(19) United States
(12) Patent Application Publication
(10) Pub. No.: US 2013/0031665 A1
(43) Pub. Date: Jan. 31, 2013

(54) ENHANCED METHODS FOR GENE REGULATION IN PLANTS

(71) Applicants: John McMillan, Raleigh, NC (US); Jon Dietz, Cary, NC (US); Dave Deppong, Cary, NC (US); Peifeng Ren, Cary, NC (US); Stephen Diener, Raleigh, NC (US); Lawrence Winfield Talton, Cary, NC (US)

(72) Inventors: John McMillan, Raleigh, NC (US); Jon Dietz, Cary, NC (US); Dave Deppong, Cary, NC (US); Peifeng Ren, Cary, NC (US); Stephen Diener, Raleigh, NC (US); Lawrence Winfield Talton, Cary, NC (US)

(73) Assignee: BASF Plant Science Company GmbH, Ludwigshafen (DE)

(21) Appl. No.: 13/641,175

(22) PCT Filed: Apr. 18, 2011
(86) PCT No.: PCT/IB11/51661

§ 371 Date: Oct. 15, 2012

Related U.S. Application Data
(60) Provisional application No. 61/325,833, filed on Apr. 20, 2010.

(30) Foreign Application Priority Data
May 3, 2010 (EP) 10161774.4

(51) Int. Cl. C12N 15/82; C12N 5/10; A01H 5/00; C12N 15/113

(52) U.S. Cl. 800/278; 536/24.1; 435/320.1; 435/419; 800/298

(57) ABSTRACT

The present invention is in the field of plant molecular biology and provides methods for regulating target gene expression in plants by suppression of the activity of endogenous small regulating RNAs targeting said target gene.

[0001] Gene expression in plants is a highly controlled mechanism. Regulation takes place on all steps involved, for example the accessibility of the genomic DNA for the transcriptional machinery or regulation of stability of the messenger. In the last years it has been shown, that stability and accessibility of the messenger RNA is highly regulated by small interfering RNAs (siRNAs) such as, for example microRNAs, ta-siRNAs and others.

[0002] MicroRNAs have emerged as evolutionarily conserved, RNA-based regulators of gene expression in animals and plants. MicroRNAs (approx. 18 to 25 nt) arise from larger precursors, pre-miRNAs, with a stem loop structure that are transcribed from non-protein-coding genes.

[0003] Plant microRNAs known so far repress expression of a high number of genes which function in developmental processes, indicating that microRNA-based regulation is integral to pathways governing growth and development. Gene expression-repressing plant microRNAs usually contain near-perfect complementarity with target sites, which occur most commonly in protein-coding regions of mRNAs (Llave C et al. (2002) Science 297, 2053-2056; Rhoades M W et al. (2002) Cell 110, 513-520). As a result, in plants most gene expression-repressing plant microRNAs function to guide target RNA cleavage (Jones-Rhoades M W and Bartel D P (2004) Mol. Cell 14, 787-799; Kasschau K D et al. (2003) Dev. Cell 4, 205-217).

[0004] Various documents describe the use of microRNAs for downregulation of target gene expression by overexpression or induction of endogenous or recombinant microRNAs in plants. Ossowski et al (2008) are giving an overview on methods for gene silencing using artificial siRNAs such as microRNAs.

[0005] Overexpression of genes targeted by siRNAs, for example microRNAs is difficult to achieve, as the RNA derived from the target gene is rapidly inactivated by microRNA binding. One method to avoid such inactivation of target gene mRNA has been described in Tay et al (2008). The authors describe the introduction of mutations into the microRNA binding site of the messenger to avoid binding and thereby prevent degradation of the respective mRNA. This method is not always applicable, as the mutations introduced into the respective mRNA might affect functionality of the mRNA or the protein it is encoding. Therefore there is a need to overcome such limitations. Moreover, the mutated genes are generally not longer under control of the respective microRNA. Fine tuning, for example upregulation of the respective target gene in a specific tissue or at a specific developmental stage is not possible.

[0006] A method for increased expression of genes naturally targeted by microRNAs has been described in Esau et al (2006). The authors introduced chemically modified antisense oligonucleotides (ASO) into mice and showed increased mRNA levels of the respective target gene. This method can be applied to plant protoplasts. Introduction of such ASO in plants and maintenance of the effect over generations or even the lifetime of a plant is not feasible.

[0007] Recently, is has been shown in Arabidopsis that suppression of the activity of a specific microRNA leads to the induction or the increase of the mRNA of the respective target gene. Franco-Zorrilla et al (2007) showed that the mRNA of an endogenous gene expressed in Arabidopsis (IPS1 gene) is able to bind a specific microRNA that is not cleaving said mRNA. They show that thereby the microRNA is hindered to bind to the respective target gene leading to an increase of the mRNA of the gene targeted by the microRNA. In addition it has been shown, that by manipulating of the microRNA binding site in the IPS1 gene it was possible to bind other microRNAs thereby preventing these microRNAs from downregulation of their respective target genes. Such target mimicry genes are binding all microRNAs of a family that are sharing high sequence homology. Repression of a single member of a microRNA family is difficult as they often differ only in the sequence of the pre-microRNA. This regulation has yet only been demonstrated in Arabidopsis. There have been no reports of such gene regulation mechanisms in other plants.

[0008] Precise expression of recombinant genes in plants is a constant need in the art. A multitude of methods for regulation of gene expression have been described. The invention at hand describes a further layer for regulation of target gene expression in plants. So far, no methods have been described using suppression of the activity of endogenous or recombinant small regulating RNAs (srRNAs), such as tasiRNA (trans activating siRNAs), nat-siRNAs (natural anti-sense siRNAs), hc-siRNA (heterochroamtic siRNAs), ca-siRNAs (cis-acting siRNAs), ImiRNAs (long miRNAs), IsiRNAs (long siRNAs) and easiRNA (epigenetically activated siRNA) or microRNAs to modulate the expression of the genes targeted by said small regulating RNAs in plants.

### DETAILED DESCRIPTION OF THE INVENTION

[0009] A first embodiment of the invention is directed to a method for modulating, compared to a respective wild-type plant or part thereof, the expression of at least one target gene in a plant or part thereof, wherein the method comprises the steps of
[0010] a) suppressing, compared to a respective wild-type plant or part thereof, the activity of at least one small regulating RNA (srRNA) molecule naturally targeting said target gene by
[0011] b) introducing into said plant or part thereof at least one recombinant nucleic acid molecule not occurring in a respective wild-type plant or part thereof, wherein at least a part of said recombinant nucleic acid molecule is complementary to at least a part of at least one srRNA molecule or at least one precursor of said at least one srRNA molecule comprising said srRNA molecule regulating expression of said target gene in said plant or part thereof.

[0012] SrRNA molecules are, for example microRNA molecules, ta-siRNA molecules (trans activating siRNAs), siRNA molecules, activating RNA (RNAa) molecules, nat-siRNA molecules (natural anti-sense siRNAs), hc-siRNA molecules (heterochroamtic siRNAs), ca-siRNA molecules (cis-acting siRNAs), ImiRNA molecules (long miRNAs), IsiRNA molecules (long siRNAs) and easiRNA molecules (epigenetically activated siRNA) and their respective precursors. Preferred srRNA molecules of the invention are microRNA molecules, ta-siRNA molecules and RNAa molecules and their respective precursors.

[0013] The term “introducing” is to be understood as genetic transformation of the respective plant or part thereof. This transformation may be transient transformation by means of for example particle bombardment, virus vectors, infiltration or the like. Transformation may also mean stable transformation, which comprises the step of introducing a recombinant nucleic acid molecule into the genome of a plant or part thereof, for example Agrobacterium mediated transformation. The skilled person is aware of other methods for transient or stable transformation of plants or parts thereof. In a preferred embodiment of the invention, the introduction of the recombinant nucleic acid molecule into a plant or part thereof is a stable transformation.
[0014] The recombinant nucleic acid molecule of the invention is in a preferred embodiment functionally linked to other regulatory nucleic acid molecules, for example a plant specific promoter and/or a terminator being heterologous to the recombinant nucleic acid molecule.

[0015] The skilled person is aware of the fact that srRNAs, mostly described for downregulation of their respective target gene, are also involved in increasing target gene expression. Hence, the embodiments of the invention can respectively be used to repress or increase target gene expression by suppressing, compared to a respective wild-type plant or part thereof, the activity of a srRNA molecule naturally targeting the target gene, depending on whether the srRNA molecule is increasing or repressing the expression of its respective target gene. All embodiments described herein read therefore as increasing or repressing target gene expression when for example the term “modulating” is used.
[0016] Increasing or repressing target gene expression in a plant or part thereof is to be understood as increasing or repressing target gene expression in a plant or part thereof compared to a wild-type or reference plant. Increase or repression may thereby be in a specific cell, cell layer, tissue or organ of the plant or may be in a specific developmental state of the plant such as senescence, germination or flowering or may be under specific conditions such as biotic or abiotic stress. The skilled person knows methods to measure expression of a target gene such as run-on experiments, quantitative RT-PCR, protein activity or protein quantification. The increase or decrease of the target gene expression is preferentially statistically significant, determined by for example the students T-test.

[0017] The person skilled in the art is aware of how to identify a srRNA molecule, for example a microRNA molecule that is targeting a specific target gene the expression of the latter is to be increased or repressed. Such methods are for example described in Cell (2009) 136, 669-687. After the identification of such srRNA molecule a precursor RNA molecule, for example a pre-miRNA molecule, comprising the srRNA sequence, for example the microRNA sequence may be identified. Such methods are for example described in Cell (2002) 110, 513-520.

[0018] The recombinant nucleic acid molecule not occurring in a respective wild-type plant or part thereof may for example be produced by identifying the sequence of a naturally occurring srRNA for example microRNA targeting a respective target gene. In a second step a nucleic acid molecule naturally suppressing activity of a natural srRNA is isolated. The nucleic acid molecule may for example suppress the activity of a srRNA by binding said srRNA molecule but preventing cleavage of the nucleic acid molecule. The binding may be facilitated by sequences comprised in said nucleic acid molecule that are at least partially inverse complement to the respective srRNA molecule. The sequence that is at least partially inverse complement to a natural srRNA molecule may in a further step be replaced by a sequence that is at least partially inverse complement to a srRNA molecule targeting the target gene. This recombinant nucleic acid molecule may further be functionally linked to plant regulatory nucleic acid molecule such as plant specific promoters, terminators and the like. The recombinant nucleic acid molecule may then be introduced into a plant or part thereof now suppressing the activity of the srRNA molecule identified in the first step of the method. Another embodiment of the method of the invention is to introduce into a plant or part thereof a recombinant nucleic acid molecule which comprises a sequence that is at least partially inverse complement to the precursor sequence of a srRNA molecule.

[0019] In a preferred embodiment of the method of the invention, the part of the recombinant nucleic acid molecule complementary to the precursor RNA molecule for example pre-miRNA molecules comprises 20 consecutive basepairs or more, for example 20 consecutive basepairs, or comprises 50 consecutive basepairs or more, for example 50 consecutive basepairs, preferably 100 consecutive complementary basepairs or more, for example 100 consecutive basepairs, 200 consecutive complementary basepairs or more, for example 200 consecutive basepairs, 300 consecutive complementary basepairs or more, for example 300 consecutive basepairs, more preferably 500 consecutive complementary basepairs or more, for example 500 consecutive basepairs of said precursor RNA molecule for example pre-miRNA molecule. The homology between the precursor RNA sequence for example pre-miRNA sequence and the consecutive complementary sequence of the respective recombinant nucleic acid molecule may for example be 80% or more, for example 80%, 85% or more, for example 85%, preferably 90% or more, for example 90%, 95% or more, for example 95%, more preferably 98% or more, for example 98%, even more preferably 99% or more, for example 99%. In a most preferred embodiment the homology between the precursor RNA sequence for example pre-miRNA sequence and the consecutive complementary sequence of the respective recombinant nucleic acid molecule is 100%.

[0020] In one embodiment of the invention, the recombinant nucleic acid molecule complementary to the precursor RNA molecule, for example the pre-miRNA molecule comprises sequences which are not complementary to the srRNA sequence for example the microRNA sequence comprised in said precursor RNA molecule, for example the pre-miRNA molecule.

[0021] In another embodiment, the recombinant nucleic acid molecule complementary to the precursor RNA molecule, is complementary to a at least a part of at least one loop of the precursor RNA molecule but not to the srRNA sequence comprised in the respective precursor RNA molecule. In a preferred embodiment, the recombinant nucleic acid molecule complementary to the precursor RNA molecule, is complementary to at least one loop of the precursor RNA molecule but not to the srRNA sequence comprised in the respective precursor RNA molecule

[0022] The skilled person is aware, that in plants a multitude of srRNA molecules, for example microRNA molecules exist. Some of these srRNA molecules for example microRNA molecules have a 100% sequence identity or share a high degree of homology although derived from different precursor RNAs for example pre-miRNA molecules. By applying this embodiment of the invention the downregulation of a specific precursor RNA for example pre-miRNA molecules is achieved. This leads to the downregulation of one specific srRNA molecule for example microRNA molecule whereas the other members of the respective srRNA family for example microRNA family are unaffected. This allows a very precise regulation of a target gene.

[0023] In a further embodiment of the invention, the recombinant nucleic acid molecule complementary to the precursor RNA molecule, for example pre-miRNA molecule comprises sequences which are complementary to the srRNA sequence for example microRNA sequence comprised in said precursor RNA molecule for example pre-miRNA molecule.

[0024] The skilled person is aware, that in plants a multitude of srRNA molecules exist. Some of these srRNA molecules have a 100% sequence identity or share a high degree of homology although derived from different precursor RNAs. This has been shown for example for microRNAs derived from different pre-miRNAs (Cell (2002) 110, 513-520). By applying this embodiment of the invention the repression of a family of srRNA molecules is achieved. This allows the downregulation of all srRNA molecules targeting the same target site of a specific target gene and allows an additional layer of regulation of this target gene.

[0025] The part of the recombinant nucleic acid molecule that is complementary to at least a part of the respective precursor RNA molecule comprising sequences complementary to the srRNA sequence comprised in said precursor RNA molecule may comprise at least the entire srRNA sequence comprised in said precursor RNA molecule but may comprise additional sequences adjacent to the srRNA sequence in the precursor RNA molecule comprising said srRNA sequence. The additional sequences may be adjacent to the 5′, 3′ or both sides of the srRNA sequence comprised in said precursor RNA molecule and may comprise for example 1 bp or more, 5 bp or more or 10 basepairs or more.
[0026] It may also be possible, that the part of the recombinant nucleic acid molecule that is complementary to at least a part of the respective precursor RNA molecule which is comprising sequences complementary to the srRNA sequence comprised in said precursor RNA molecule comprises sequences complementary to the entire srRNA sequence without any sequences adjacent to the srRNA sequence.
[0027] It may also be possible, that the part of the recombinant nucleic acid molecule that is complementary to at least a part of the respective precursor RNA molecule which is comprising sequences complementary to the srRNA sequence comprised in said precursor RNA molecule comprises sequences complementary to only a part of the srRNA sequence with or without any sequences adjacent to the srRNA sequence.
[0028] In one embodiment, the part of the recombinant nucleic acid molecule that is complementary to at least a part of the respective precursor RNA molecule which is comprising sequences complementary to the srRNA sequence comprised in said precursor RNA molecule may comprise for example 15 consecutive basepairs or more, for example 15, preferably 16 consecutive basepairs or more, for example 16, or 17 consecutive basepairs, 18 consecutive basepairs or 19 consecutive basepairs or more, more preferably 20 consecutive basepairs or 21 consecutive complementary basepairs or more, for example 21 of said srRNA sequence. The consecutive complementary basepairs comprised in the recombinant nucleic acid molecule may comprise 5 or less, for example 5, preferably 4 or less, for example 4, more preferably 3 or less, for example 3, 2 or one mismatch. In a most preferred embodiment the complementary consecutive basepairs comprise 3, 2 or 1 mismatch. In a preferred embodiment, these mismatches are consecutive.
[0029] In another embodiment, the consecutive complementary basepairs comprised in the recombinant nucleic acid molecule may be not completely consecutive but interrupted by additional basepairs of at least one insertion of 1 or more, for example 1, 2 or more, for example 2, 3 or more for example 3, 4 or more for example 4, 5 or more for example 5, 6 or more for example 6, 7 or more for example 7, 8 or more for example 8, 9 or more for example 9, 10 or more for example 10 additional basepairs not comprised in the precursor RNA molecule. In a preferred embodiment, the consecutive basepairs comprise one said insertion. In a preferred embodiment, the additional basepairs are consecutive and form a loop upon hybridization or basepairing to the respective part of the precursor RNA molecule or srRNA molecule. In a most preferred embodiment, the complementary basepairs comprise an insertion of 3 consecutive additional basepairs. The additional basepairs may be inserted at any position within the complementary basepairs comprised in the recombinant nucleic acid molecule. In a preferred embodiment the additional basepairs are inserted in the middle of the complementary basepairs.
[0030] In a most preferred embodiment the part of the recombinant nucleic acid molecule that is complementary to at least a part of the respective precursor RNA molecule which is comprising sequences complementary to the srRNA sequence comprised in said precursor RNA molecule is comprising 21 basepairs complementary to the srRNA molecule and this 21 basepairs complementary to the srRNA molecule are comprising an insertion of 3 consecutive additional basepairs between position 10 and 11 of said 21 basepairs complementary to the srRNA molecule.

[0031] The invention further provides a method for modulating, compared to a respective wild-type plant or part thereof, the expression of a target gene in a plant or part thereof wherein the recombinant nucleic acid molecule comprising a sequence complementary to a srRNA sequence for example microRNA sequence is selected from a nucleic acid molecule comprised in the group consisting of
[0032] a) a nucleic acid molecule represented by any of SEQ ID NOs: 1, 2, 7, 8, 9, 10, 11, 12 or 26 or
[0033] b) a nucleic acid molecule having at least 50, preferably 100, 150, 200 or 250 consecutive base pairs of a sequence described by any of SEQ ID NOs: 1, 2, 7, 8, 9, 10, 11, 12 or 26 or
[0034] c) a nucleic acid molecule having an identity of at least 70%, 75%, 80% or 85%, preferably 90%, 95%, 98% or 99%, most preferably 100% over a sequence of at least 95, 100, 110, 120, 130, 140 or 150 consecutive nucleic acid base pairs to a sequences described by any of SEQ ID NOs: 1, 2, 7, 8, 9, 10, 11, 12 or 26 or
[0035] d) a nucleic acid molecule hybridizing under medium stringent conditions, preferably high stringent condition, especially very high stringent conditions with a nucleic acid molecule of at least 50, 100, 150 or 200 consecutive base pairs of a nucleic acid molecule described by any of SEQ ID NOs: 1, 2, 7, 8, 9, 10, 11, 12 or 26.

[0036] It is a further embodiment of the invention, that the part of the recombinant nucleic acid molecule complementary to the respective precursor RNA, for example pre-miRNA is represented by position 347 bp-370 bp of SEQ ID NO: 1, position 234 bp-257 bp of SEQ ID NO: 2, position 299 bp-322 bp of SEQ ID NO: 7, position 233 bp-256 bp of SEQ ID NO: 8, position 221 bp-244 bp of SEQ ID NO: 9, position 184 bp-207 bp of SEQ ID NO: 10, 149 bp-172 bp of SEQ ID NO: 11, position 49 bp-72 bp of SEQ ID NO: 12, and position 218 bp-241 bp of SEQ ID NO: 26 or the respective basepairs of the corresponding sequences as defined above under b) to d).

[0037] In a further embodiment of the invention SEQ ID NO: 7, 8, 9, 10, 11, 12 and/or 26 and/or the corresponding sequences as defined under b) to d) is modulating, increasing or repressing the expression of a target gene in a dicotyledonous plant, preferably leguminous plant, especially preferably in a plant of the genus Glycine, most preferably a Glycine max plant.

[0038] In a further embodiment of the invention SEQ ID NO: 1 and/or the corresponding sequences as defined under b) to d) is modulating, increasing or repressing the expression of a target gene in a monocotyledonous plant, preferably poacea plant, especially preferably in a plant of the genus Zea, most preferably a Zea mays plant.

[0039] In a further embodiment of the invention SEQ ID NO: 2 and/or the corresponding sequences as defined under b) to d) is modulating, increasing or repressing the expression of a target gene in a monocotyledonous plant, preferably poacea plant, especially preferably in a plant of the genus Oryca, most preferably a Oryza sativa plant.

[0040] The methods of the invention may be applied to any known srRNA molecule or srRNA precursor molecule. In a preferred embodiment, the methods are applied to any known microRNA molecule or pre-miRNA molecule. In a more preferred embodiment the sequence complementary to the respective precursor RNA sequence may be any of the sequences selected from the group of SEQ ID NO: 4512 to 16344 or a homolog or fragment or fragment of a homolog thereof.
[0041] A homolog thereof may be any sequence having at least 75%, 80%, 85%, 90%, 95%, 96%, 97%, 98%, 99% or 100% homology to any of the sequences selected from the group of SEQ ID NO: 4512 to 16344.
[0042] A fragment thereof may be any sequence comprising at least 10, 15, 16, 17, 18, 19, 20, 21, 50, 100, 150, 200 or 250 consecutive basepairs of the sequences selected from the group of SEQ ID NO: 4512 to 16344. In a preferred embodiment thereof, the fragment is consisting of at least 21 consecutive basepairs of the sequences selected from the group of SEQ ID NO: 4512 to 16344.
[0043] A fragment of a homolog may be any sequence having at least 75%, 80%, 85%, 90%, 95%, 96%, 97%, 98%, 99% or 100% homology and comprising at least 10, 15, 16, 17, 18, 19, 20, 21, 50, 100, 150, 200 or 250 consecutive basepairs of the sequences selected from the group of SEQ ID NO: 4512 to 16344. In a preferred embodiment thereof, a fragment of a homolog may be any sequence having at least 95% homology and is consisting of at least 21 consecutive basepairs of the sequences selected from the group of SEQ ID NO: 4512 to 16344.

[0044] In another preferred embodiment, the sequence complementary to the respective srRNA may be any of the sequences selected from the group of SEQ ID NO: 78 to 4511 or a homolog or fragment or fragment of a homolog thereof.
[0045] A homolog thereof may be any sequence having at least 75%, 80%, 85%, 90%, 95%, 96%, 97%, 98%, 99% or 100% homology to any of the sequences selected from the group of SEQ ID NO: 78 to 4511.

[0046] A fragment thereof may be any sequence comprising at least 10, 15, 16, 17, 18, 19, 20 or 21 consecutive basepairs of the sequences selected from the group of SEQ ID NO: 78-4511. In a preferred embodiment thereof, the fragment is consisting of at least 21 consecutive basepairs of the sequences selected from the group of SEQ ID NO: 78-4511. A fragment of a homolog may be any sequence having at least 75%, 80%, 85%, 90%, 95%, 96%, 9₇%, 98% , 99% or 100% homology and comprising at least 10, 15, 16, 17, 18, 19, 20 or 21 consecutive basepairs of the sequences selected from the group of SEQ ID NO: 78 to 4511. In a preferred embodiment thereof, a fragment of a homolog may be any sequence having at least 95% homology and is consisting of at least 21 consecutive basepairs of the sequences selected from the group of SEQ ID NO: 78 to 4511.

[0047] It is a further preferred embodiment, that SEQ ID NO: 7, 8, 9, 10, 11, 12 and/or 26 comprises any of the sequences selected from the group of SEQ ID NO: 7168 to 16344 or a homolog or fragment or fragment of a homolog thereof.
[0048] A homolog thereof may be any sequence having at least 75%, 80%, 85%, 90%, 95%, 96%, 97%, 98%, 99% or 100% homology to any of the sequences selected from the group of SEQ ID NO: 7168 to 16344.
[0049] A fragment thereof may be any sequence comprising at least 10, 15, 16, 17, 18, 19, 20, 21, 50, 100, 150, 200 or 250 consecutive basepairs of the sequences selected from the group of SEQ ID NO: 7168 to 16344. In a preferred embodiment thereof, the fragment is consisting of at least 21 consecutive basepairs of the sequences selected from the group of SEQ ID NO: 7168 to 16344.
[0050] A fragment of a homolog may be any sequence having at least 75%, 80%, 85%, 90%, 95%, 96%, 97%, 98%, 99% or 100% homology and comprising at least 10, 15, 16, 17, 18, 19, 20, 21, 50, 100, 150, 200 or 250 consecutive basepairs of the sequences selected from the group of SEQ ID NO: 7168 to 16344. In a preferred embodiment thereof, a fragment of a homolog may be any sequence having at least 95% homology and is consisting of at least 21 consecutive basepairs of the sequences selected from the group of SEQ ID NO: 7168 to 16344.

[0051] It is a further preferred embodiment, that SEQ ID NO: 7, 8, 9, 10, 11, 12 and/or 26 comprises any of the sequences selected from the group of SEQ ID NO: 1404 to 4511 or a homolog or fragment or fragment of a homolog thereof.
[0052] A homolog thereof may be any sequence having at least 75%, 80%, 85%, 90%, 95%, 96%, 97%, 98%, 99% or 100% homology to any of the sequences selected from the group of SEQ ID NO: 1404 to 4511.
[0053] A fragment thereof may be any sequence comprising at least 10, 15, 16, 17, 18, 19, 20 or 21 consecutive basepairs of the sequences selected from the group of SEQ ID NO: 1404 to 4511. In a preferred embodiment thereof, the fragment is consisting of at least 21 consecutive basepairs of the sequences selected from the group of SEQ ID NO: 1404 to 4511.

[0054] A fragment of a homolog may be any sequence having at least 75%, 80%, 85%, 90%, 95%, 96%, 97%, 98%, 99% or 100% homology and comprising at least 10, 15, 16, 17, 18, 19, 20 or 21 consecutive basepairs of the sequences selected from the group of SEQ ID NO: 1404 to 4511. In a preferred embodiment thereof, a fragment of a homolog may be any sequence having at least 95% homology and is consisting of at least 21 consecutive basepairs of the sequences selected from the group of SEQ ID NO: 1404 to 4511.

[0055] It is a further preferred embodiment, that SEQ ID NO: 1 comprises any of the sequences selected from the group of SEQ ID NO: 4512 to 7167 or a homolog or fragment or fragment of a homolog thereof.
[0056] A homolog thereof may be any sequence having at least 75%, 80%, 85%, 90%, 95%, 96%, 97%, 98%, 99% or 100%homology to any of the sequences selected from the group of SEQ ID NO: 4512 to 7167.
[0057] A fragment thereof may be any sequence comprising at least 10, 15, 16, 17, 18, 19, 20, 21, 50, 100, 150, 200 or 250 consecutive basepairs of the sequences selected from the group of SEQ ID NO: 4512 to 7167. In a preferred embodiment thereof, the fragment is consisting of at least 21 consecutive basepairs of the sequences selected from the group of SEQ ID NO: 4512 to 7167.
[0058] A fragment of a homolog may be any sequence having at least 75%, 80%, 85%, 90%, 95%, 96%, 97%, 98%, 99% or 100%homology and comprising at least 10, 15, 16, 17, 18, 19, 20, 21, 50, 100, 150, 200 or 250 consecutive basepairs of the sequences selected from the group of SEQ ID NO: 4512 to 7167. In a preferred embodiment thereof, a fragment of a homolog may be any sequence having at least 95% homology and is consisting of at least 21 consecutive basepairs of the sequences selected from the group of SEQ ID NO: 4512 to 7167.

[0059] It is a further preferred embodiment, that SEQ ID NO: 1 comprises any of the sequences selected from the group of SEQ ID NO: 78 to 1403 or a homolog or fragment or fragment of a homolog thereof.
[0060] A homolog thereof may be any sequence having at least 75%, 80%, 85%, 90%, 95%, 96%, 97%, 98%, 99% or 100%homology to any of the sequences selected from the group of SEQ ID NO: 78 to 1403.
[0061] A fragment thereof may be any sequence comprising at least 10, 15, 16, 17, 18, 19, 20 or 21 consecutive basepairs of the sequences selected from the group of SEQ ID NO: 78 to 1403. In a preferred embodiment thereof, the fragment is consisting of at least 21 consecutive basepairs of the sequences selected from the group of SEQ ID NO: 78 to 1403.
[0062] A fragment of a homolog may be any sequence having at least 75%, 80%, 85%, 90%, 95%, 96%, 97%, 98%, 99% or 100%homology and comprising at least 10, 15, 16, 17, 18, 19, 20 or 21 consecutive basepairs of the sequences selected from the group of SEQ ID NO: 78 to 1403. In a preferred embodiment thereof, a fragment of a homolog may be any sequence having at least 95% homology and is consisting of at least 21 consecutive basepairs of the sequences selected from the group of SEQ ID NO: 78 to 1403.

[0063] The methods described above comprise the steps of
[0064] a) Identification of a srRNA sequence for example microRNA sequence targeting the target gene
[0065] b) Identification of the precursor RNA molecule for example the pre-miRNA precursor molecule comprising the respective srRNA sequence for example microRNA sequence
[0066] c) Producing the recombinant molecules, such as miRNA target mimics, miRNA trap or antisense transcript of pre-miRNA as described above and below in ‘Examples’.
[0067] d) introducing the recombinant molecule into a plant or plant cell.

[0068] Methods to identify srRNA sequences are for example in silico prediction (Cell 110: 513-520) or deep sequencing (Nature Biotechnology 2007. 25:473-477).
[0069] Methods to identify precursor RNA molecules are for example sequence analysis as described in Cell 2002; 110: 513-520.
[0070] For the production of the recombinant molecule of the invention any method known in the art may be applied. Such method may be restriction and ligation, recombination or synthesize of the respective recombinant molecule.
[0071] For the introduction of the recombinant molecule into a plant or plant cell various methods well known to a skilled person may be applied. For example particle bombardment, Agrobacterium mediated transformation, virus mediated transformation, electroporation and the like may be applied. The introduction into the plant or plant cell may lead to stable or transient transformation, preferably stable transformation.
[0072] A further embodiment of the present invention is a method for producing a plant or part thereof with, compared to a respective control plant or part thereof, modulated increased or repressed expression of one or more target gene comprising the steps of introducing into the plant or part thereof one or more recombinant expression constructs or vectors of the invention comprising a nucleic acid molecule as defined above.

[0073] Producing a plant as used herein comprises methods for stable transformation such as introducing a recombinant DNA construct into a plant or part thereof by means of Agrobacterium mediated transformation, protoplast transformation, particle bombardment or the like and optionally subsequent regeneration of a transgenic plant. It also comprises methods for transient transformation of a plant or part thereof such as viral infection or Agrobacterium infiltration. A skilled person is aware of further methods for stable and/or transient transformation of a plant or part thereof. Approaches such as breeding methods or protoplast fusion might also be employed for production of a plant of the invention and are covered herewith.

[0074] The method of the invention may be applied to any plant, for example gymnosperm or angiosperm, preferably angiosperm, for example dicotyledonous or monocotyledonous plants, preferably dicotyledonous plants. Preferred monocotyledonous plants are for example corn, wheat, rice, barley, sorghum, musa, sugarcane, miscanthus and brachypodium, especially preferred monocotyledonous plants are corn, wheat and rice. Preferred dicotyledonous plants are for example soy, rape seed, canola, linseed, cotton, potato, sugar beet, tagetes and Arabidopsis, especially preferred dicotyledonous plants are soy, rape seed, canola and potato

[0075] A further way to perform the methods of the invention may be to
[0076] a) provide an expression construct comprising one or more nucleic acid molecules comprising a sequence at least partially complementary to at least a part of a srRNA or a precursor RNA comprising a srRNA as defined above functionally linked to a plant specific promoter and
[0077] b) integrate said expression construct into the genome of said plant or part thereof and optionally
[0078] c) regenerate a plant or part thereof comprising said one or more expression construct from said transformed plant or part thereof.

[0079] The expression construct may be integrated into the genome of the respective plant with any method known in the art. The integration may be random using methods such as particle bombardment or Agrobacterium mediated transformation. In a preferred embodiment, the integration is via targeted integration for example by homologous recombination.

[0080] Further embodiments of the invention are the isolated nucleic acid molecules comprising, preferably consisting of the sequence selected from the group of any one of
[0081] a) a nucleic acid molecule represented by any of SEQ ID NO: 1, 2, 7, 8, 9, 10, 11, 12 or 26 or
[0082] b) a nucleic acid molecule having at least 50, preferably 100, 150, 200 or 250 consecutive base pairs of a sequence described by any of SEQ ID NO: 1, 2, 7, 8, 9, 10, 11, 12 or 26 or
[0083] c) a nucleic acid molecule having an identity of at least 70%, 75%, 80% or 85%, preferably 90% 95%, 98% or 99%, most preferably 100% over a sequence of at least 95, 100, 110, 120, 130, 140, 150, 200 or 250 consecutive nucleic acid base pairs to a sequences described by any of SEQ ID NOs: 1, 2, 7, 8, 9, 10, 11, 12 or 26 or
[0084] d) a nucleic acid molecule hybridizing under medium stringency conditions, preferably high stringency condition, especially very high stringency conditions with a nucleic acid molecule of at least 50, 100, 150 or 200 consecutive base pairs of a nucleic acid molecule described by any of SEQ ID NOs: 1, 2, 7, 8, 9, 10, 11, 12 or 26.

[0085] A nucleic acid construct for expression in plants comprising a recombinant nucleic acid molecule as defined above functionally linked to a plant specific promoter is also an embodiment of the invention.
[0086] A skilled person is aware of various methods for functionally linking two or more nucleic acids molecules. Such methods may encompass restriction/ligation, ligase independent cloning, recombineering, recombination or synthesis. Other methods may be employed to functionally link two or more nucleic acids molecules.
[0087] A vector comprising a nucleic acid construct as defined above is a further embodiment of the invention.

[0088] A microorganism able to transfer nucleic acids to a plant or part of a plant wherein said microorganism is comprising a recombinant nucleic acid construct as defined above or a vector as defined above, wherein said recombinant nucleic acid molecule confers upon transfer of said recombinant nucleic acid construct into a plant or plant cell an increase or decrease of expression of a target gene in said plant or part of a plant compared to a respective plant or part of a plant not comprising said recombinant nucleic acid molecule is a further embodiment of the invention.

[0089] A plant cell comprising a recombinant nucleic acid construct as defined above or a vector as defined above, wherein said recombinant nucleic acid molecule confers an increase or decrease of expression of a target gene in said plant cell compared to a respective plant cell not comprising said recombinant nucleic acid molecule is also an embodiment of the invention.

[0090] A plant or part thereof comprising a recombinant nucleic acid construct of the invention or a vector of the invention, wherein said recombinant nucleic acid molecule confers an increase or decrease of expression of a target gene in said plant or part thereof compared to a respective plant or part thereof not comprising said recombinant nucleic acid molecule is additionally provided with this invention.

[0091] A further embodiment of the invention is any method comprising a nucleic acid construct of the invention, a plant of the invention and/or a plant cell of the invention.

[0092] Any method for production of a nucleic acid construct of the invention, a vector of the invention, a plant and/or a plant cell of the invention are further embodiments of the invention.

[0093] Any use of an expression construct of the invention or a vector of the invention for increasing or repressing compared to a wild-type plant or part thereof the expression of a target gene in a plant or part thereof is also part of the invention.

### Definitions

[0094] Abbreviations: GFP—green fluorescence protein, GUS—beta-Glucuronidase, BAP—6-benzylaminopurine; 2,4-D—2,4-dichlorophenoxyacetic acid; MS—Murashige and Skoog medium; NAA—1-naphtaleneacetic acid; MES, 2-(N-morpholino-ethanesulfonic acid, IAA indole acetic acid; Kan: Kanamycin sulfate; GA3—Gibberellic acid; Timentin™: ticarcillin disodium/clavulanate potassium.

[0095] It is to be understood that this invention is not limited to the particular methodology or protocols. It is also to be understood that the terminology used herein is for the purpose of describing particular embodiments only, and is not intended to limit the scope of the present invention which will be limited only by the appended claims. It must be noted that as used herein and in the appended claims, the singular forms “a,” “and,” and “the” include plural reference unless the context clearly dictates otherwise. Thus, for example, reference to “a vector” is a reference to one or more vectors and includes equivalents thereof known to those skilled in the art, and so forth. The term “about” is used herein to mean approximately, roughly, around, or in the region of. When the term “about” is used in conjunction with a numerical range, it modifies that range by extending the boundaries above and below the numerical values set forth. In general, the term “about” is used herein to modify a numerical value above and below the stated value by a variance of 20 percent, preferably 10 percent up or down (higher or lower). As used herein, the word “or” means any one member of a particular list and also includes any combination of members of that list. The words “comprise,” “comprising,” “include,” “including,” and “includes” when used in this specification and in the following claims are intended to specify the presence of one or more stated features, integers, components, or steps, but they do not preclude the presence or addition of one or more other features, integers, components, steps, or groups thereof. For clarity, certain terms used in the specification are defined and used as follows:

[0096] Antiparallel: “Antiparallel” refers herein to two nucleotide sequences paired through hydrogen bonds between complementary base residues with phosphodiester bonds running in the 5′-3′ direction in one nucleotide sequence and in the 3′-5′ direction in the other nucleotide sequence.

[0097] Antisense: The term “antisense” refers to a nucleotide sequence that is inverted relative to its normal orientation for transcription or function and so expresses an RNA transcript that is complementary to a target gene mRNA molecule expressed within the host cell (e.g., it can hybridize to the target gene mRNA molecule or single stranded genomic DNA through Watson-Crick base pairing) or that is complementary to a target DNA molecule such as, for example genomic DNA present in the host cell.

[0098] Coding region: As used herein the term “coding region” when used in reference to a structural gene refers to the nucleotide sequences which encode the amino acids found in the nascent polypeptide as a result of translation of a mRNA molecule. The coding region is bounded, in eukaryotes, on the 5′-side by the nucleotide triplet “ATG” which encodes the initiator methionine and on the 3′-side by one of the three triplets which specify stop codons (i.e., TAA, TAG, TGA). In addition to containing introns, genomic forms of a gene may also include sequences located on both the 5′- and 3′-end of the sequences which are present on the RNA transcript. These sequences are referred to as “flanking” sequences or regions (these flanking sequences are located 5′ or 3′ to the non-translated sequences present on the mRNA transcript). The 5′-flanking region may contain regulatory sequences such as promoters and enhancers which control or influence the transcription of the gene. The 3′-flanking region may contain sequences which direct the termination of transcription, post-transcriptional cleavage and polyadenylation.

[0099] Complementary: “Complementary” or “complementarity” refers to two nucleotide sequences which comprise antiparallel nucleotide sequences capable of pairing with one another (by the base-pairing rules) upon formation of hydrogen bonds between the complementary base residues in the antiparallel nucleotide sequences. For example, the sequence 5′-AGT-3′ is complementary to the sequence 5′-ACT-3′. Complementarity can be “partial” or “total.” “Partial” complementarity is where one or more nucleic acid bases are not matched according to the base pairing rules. “Total” or “complete” complementarity between nucleic acid molecules is where each and every nucleic acid base is matched with another base under the base pairing rules. The degree of complementarity between nucleic acid molecule strands has significant effects on the efficiency and strength of hybridization between nucleic acid molecule strands. A “complement” of a nucleic acid sequence as used herein refers to a nucleotide sequence whose nucleic acid molecules show total complementarity to the nucleic acid molecules of the nucleic acid sequence.

[0100] Double-stranded RNA: A “double-stranded RNA” molecule or “dsRNA” molecule comprises a sense RNA fragment of a nucleotide sequence and an antisense RNA fragment of the nucleotide sequence, which both comprise nucleotide sequences complementary to one another, thereby allowing the sense and antisense RNA fragments to pair and form a double-stranded RNA molecule.

[0101] Endogenous: An “endogenous” nucleotide sequence refers to a nucleotide sequence, which is present in the genome of the untransformed plant cell.

[0102] Enhanced expression: “enhance” or “increase” the expression of a nucleic acid molecule in a plant cell are used equivalently herein and mean that the level of expression of the nucleic acid molecule in a plant, part of a plant or plant cell after applying a method of the present invention is higher than its expression in the plant, part of the plant or plant cell before applying the method, or compared to a reference plant lacking a recombinant nucleic acid molecule of the invention. For example, the reference plant is comprising the same construct which is only lacking the respective part complementary to at least a part of the precursor molecule comprising the srRNA sequence. The term “enhanced” or “increased” as used herein are synonymous and means herein higher, preferably significantly higher expression of the nucleic acid molecule to be expressed. As used herein, an “enhancement” or “increase” of the level of an agent such as a protein, mRNA or RNA means that the level is increased relative to a substantially identical plant, part of a plant or plant cell grown under substantially identical conditions, lacking a recombinant nucleic acid molecule of the invention, for example lacking the respective part complementary to at least a part of the precursor molecule comprising the srRNA sequence, the recombinant construct or recombinant vector of the invention. As used herein, “enhancement” or “increase” of the level of an agent, such as for example a preRNA, mRNA, rRNA, tRNA, snoRNA, snRNA expressed by the target gene and/or of the protein product encoded by it, means that the level is increased 50% or more, for example 100% or more, preferably 200% or more, more preferably 5 fold or more, even more preferably 10 fold or more, most preferably 20 fold or more for example 50 fold relative to a cell or organism lacking a recombinant nucleic acid molecule of the invention. The enhancement or increase can be determined by methods with which the skilled worker is familiar. Thus, the enhancement or increase of the nucleic acid or protein quantity can be determined for example by an immunological detection of the protein. Moreover, techniques such as protein assay, fluorescence, Northern hybridization, nuclease protection assay, reverse transcription (quantitative RT-PCR), ELISA (enzyme-linked immunosorbent assay), Western blotting, radioimmunoassay (RIA) or other immunoassays and fluorescence-activated cell analysis (FACS) can be employed to measure a specific protein or RNA in a plant or plant cell. Depending on the type of the induced protein product, its activity or the effect on the phenotype of the organism or the cell may also be determined. Methods for determining the protein quantity are known to the skilled worker. Examples, which may be mentioned, are: the micro-Biuret method (Goa J (1953) Scand J Clin Lab Invest 5:218-222), the Folin-Ciocalteau method (Lowry O H et al. (1951) J Biol Chem 193:265-275) or measuring the absorption of CBB G-250 (Bradford M M (1976) Analyt Biochem 72:248-254). As one example for quantifying the activity of a protein, the detection of luciferase activity is described in the Examples below.

[0103] Expression: “Expression” refers to the biosynthesis of a gene product, preferably to the transcription and/or translation of a nucleotide sequence, for example an endogenous gene or a heterologous gene, in a cell. For example, in the case of a structural gene, expression involves transcription of the structural gene into mRNA and—optionally—the subsequent translation of mRNA into one or more polypeptides. In other cases, expression may refer only to the transcription of the DNA harboring an RNA molecule. Expression may also refer to the change of the steady state level of the respective RNA in a plant or part thereof for example due to change of the stability of the respective RNA.

[0104] Expression construct: “Expression construct” as used herein mean a DNA sequence capable of directing expression of a particular nucleotide sequence in an appropriate part of a plant or plant cell, comprising a promoter functional in said part of a plant or plant cell into which it will be introduced, operatively linked to the nucleotide sequence of interest which is —optionally—operatively linked to termination signals. If translation is required, it also typically comprises sequences required for proper translation of the nucleotide sequence. The coding region may code for a protein of interest but may also code for a functional RNA of interest, for example RNAa, siRNA, snoRNA, snRNA, microRNA, ta-siRNA or any other noncoding regulatory RNA, in the sense or antisense direction. The expression construct comprising the nucleotide sequence of interest may be chimeric, meaning that one or more of its components is heterologous with respect to one or more of its other components. The expression construct may also be one, which is naturally occurring but has been obtained in a recombinant form useful for heterologous expression. Typically, however, the expression construct is heterologous with respect to the host, i.e., the particular DNA sequence of the expression construct does not occur naturally in the host cell and must have been introduced into the host cell or an ancestor of the host cell by a transformation event. The expression of the nucleotide sequence in the expression construct may be under the control of a constitutive promoter or of an inducible promoter, which initiates transcription only when the host cell is exposed to some particular external stimulus. In the case of a plant, the promoter can also be specific to a particular tissue or organ or stage of development.

[0105] Foreign: The term “foreign” refers to any nucleic acid molecule (e.g., gene sequence) which is introduced into the genome of a cell by experimental manipulations and may include sequences found in that cell so long as the introduced sequence contains some modification (e.g., a point mutation, the presence of a selectable marker gene, etc.) and is therefore distinct relative to the naturally-occurring sequence.

[0106] Functional linkage: The term “functional linkage” or “functionally linked” is to be understood as meaning, for example, the sequential arrangement of a regulatory element (e.g. a promoter) with a nucleic acid sequence to be expressed and, if appropriate, further regulatory elements (such as e.g., a terminator or an enhancer) in such a way that each of the regulatory elements can fulfill its intended function to allow, modify, facilitate or otherwise influence expression of said nucleic acid sequence. As a synonym the wording “operable linkage” or “operably linked” may be used. The expression may result depending on the arrangement of the nucleic acid sequences in relation to sense or antisense RNA. To this end, direct linkage in the chemical sense is not necessarily required. Genetic control sequences such as, for example, enhancer sequences, can also exert their function on the target sequence from positions which are further away, or indeed from other DNA molecules. Preferred arrangements are those in which the nucleic acid sequence to be expressed recombinantly is positioned behind the sequence acting as promoter, so that the two sequences are linked covalently to each other. The distance between the promoter sequence and the nucleic acid sequence to be expressed recombinantly is preferably less than 200 base pairs, especially preferably less than 100 base pairs, very especially preferably less than 50 base pairs. In a preferred embodiment, the nucleic acid sequence to be transcribed is located behind the promoter in such a way that the transcription start is identical with the desired beginning of the chimeric RNA of the invention. Functional linkage, and an expression construct, can be generated by means of customary recombination and cloning techniques as described (e.g., in Maniatis T, Fritsch E F and Sambrook J (1989) Molecular Cloning: A Laboratory Manual, 2nd Ed., Cold Spring Harbor Laboratory, Cold Spring Harbor (N.Y.); Silhavy et al. (1984) Experiments with Gene Fusions, Cold Spring Harbor Laboratory, Cold Spring Harbor (N.Y.); Ausubel et al. (1987) Current Protocols in Molecular Biology, Greene Publishing Assoc. and Wiley Interscience; Gelvin et al. (Eds) (1990) Plant Molecular Biology Manual; Kluwer Academic Publisher, Dordrecht, The Netherlands). However, further sequences, which, for example, act as a linker with specific cleavage sites for restriction enzymes, or as a signal peptide, may also be positioned between the two sequences. The insertion of sequences may also lead to the expression of fusion proteins. Preferably, the expression construct, consisting of a linkage of a regulatory region for example a promoter and nucleic acid sequence to be expressed, can exist in a vector-integrated form and be inserted into a plant genome, for example by transformation.

[0107] Gene: The term “gene” refers to a region operably joined to appropriate regulatory sequences capable of regulating the expression of the gene product (e.g., a polypeptide or a functional RNA) in some manner. A gene includes untranslated regulatory regions of DNA (e.g., promoters, enhancers, repressors, etc.) preceding (up-stream) and following (downstream) the coding region (open reading frame, ORF) as well as, where applicable, intervening sequences (i.e., introns) between individual coding regions (i.e., exons). The term “structural gene” as used herein is intended to mean a DNA sequence that is transcribed into mRNA which is then translated into a sequence of amino acids characteristic of a specific polypeptide.

[0108] Genome and genomic DNA: The terms “genome” or “genomic DNA” is referring to the heritable genetic information of a host organism. Said genomic DNA comprises the DNA of the nucleus (also referred to as chromosomal DNA) but also the DNA of the plastids (e.g., chloroplasts) and other cellular organelles (e.g., mitochondria). Preferably the terms genome or genomic DNA is referring to the chromosomal DNA of the nucleus.

[0109] Heterologous: The term “heterologous” with respect to a nucleic acid molecule or DNA refers to a nucleic acid molecule which is operably linked to, or is manipulated to become operably linked to, a second nucleic acid molecule to which it is not operably linked in nature, or to which it is operably linked at a different location in nature. A heterologous expression construct comprising a nucleic acid molecule and one or more regulatory nucleic acid molecule (such as a promoter or a transcription termination signal) linked thereto for example is a constructs originating by experimental manipulations in which either a) said nucleic acid molecule, or b) said regulatory nucleic acid molecule or c) both (i.e. (a) and (b)) is not located in its natural (native) genetic environment or has been modified by experimental manipulations, an example of a modification being a substitution, addition, deletion, inversion or insertion of one or more nucleotide residues. Natural genetic environment refers to the natural chromosomal locus in the organism of origin, or to the presence in a genomic library. In the case of a genomic library, the natural genetic environment of the sequence of the nucleic acid molecule is preferably retained, at least in part. The environment flanks the nucleic acid sequence at least at one side and has a sequence of at least 50 bp, preferably at least 500 bp, especially preferably at least 1,000 bp, very especially preferably at least 5,000 bp, in length. A naturally occurring expression construct—for example the naturally occurring combination of a promoter with the corresponding gene—becomes a transgenic expression construct when it is modified by non-natural, synthetic “artificial” methods such as, for example, mutagenization. Such methods have been described (U.S. Pat. No. 5,565,350; WO 00/15815). For example a protein encoding nucleic acid molecule operably linked to a promoter, which is not the native promoter of this molecule, is considered to be heterologous with respect to the promoter. Preferably, heterologous DNA is not endogenous to or not naturally associated with the cell into which it is introduced, but has been obtained from another cell or has been synthesized. Heterologous DNA also includes an endogenous DNA sequence, which contains some modification, non-naturally occurring, multiple copies of an endogenous DNA sequence, or a DNA sequence which is not naturally associated with another DNA sequence physically linked thereto. Generally, although not necessarily, heterologous DNA encodes RNA or proteins that are not normally produced by the cell into which it is expressed.

[0110] Hybridization: The term “hybridization” as used herein includes “any process by which a strand of nucleic acid molecule joins with a complementary strand through base pairing.” (J. Coombs (1994) Dictionary of Biotechnology, Stockton Press, New York). Hybridization and the strength of hybridization (i.e., the strength of the association between the nucleic acid molecules) is impacted by such factors as the degree of complementarity between the nucleic acid molecules, stringency of the conditions involved, the Tm of the formed hybrid, and the G:C ratio within the nucleic acid molecules. As used herein, the term “Tm” is used in reference to the “melting temperature.” The melting temperature is the temperature at which a population of double-stranded nucleic acid molecules becomes half dissociated into single strands. The equation for calculating the Tm of nucleic acid molecules is well known in the art. As indicated by standard references, a simple estimate of the Tm value may be calculated by the equation: Tm=81.5+0.41(% G+C), when a nucleic acid molecule is in aqueous solution at 1 M NaCl [see e.g., Anderson and Young, Quantitative Filter Hybridization, in Nucleic Acid Hybridization (1985)]. Other references include more sophisticated computations, which take structural as well as sequence characteristics into account for the calculation of Tm. Stringent conditions, are known to those skilled in the art and can be found in Current Protocols in Molecular Biology, John Wiley & Sons, N.Y. (1989), 6.3.1-6.3.6.

[0111] Medium stringency conditions when used in reference to nucleic acid hybridization comprise conditions equivalent to binding or hybridization at 68° C. in a solution consisting of 5×SSPE (43.8 g/L NaCl, 6.9 g/L NaH2PO4.H2O and 1.85 g/L EDTA, pH adjusted to 7.4 with NaOH), 1% SDS, 5×Denhardt's reagent [50×Denhardt's contains the following per 500 mL 5 g Ficoll (Type 400, Pharmacia), 5 g BSA (Fraction V; Sigma)] and 100 μg/mL denatured salmon sperm DNA followed by washing (preferably for one times 15 minutes, more preferably two times 15 minutes, more preferably three time 15 minutes) in a solution comprising 1×SSC (1×SSC is 0.15 M NaCl plus 0.015 M sodium citrate) and 0.1% SDS at room temperature or—preferably 37° C.—when a DNA probe of preferably about 100 to about 500 nucleotides in length is employed.

[0112] Normal stringency conditions when used in reference to nucleic acid hybridization comprise conditions equivalent to binding or hybridization at 68° C. in a solution consisting of 5×SSPE (43.8 g/L NaCl, 6.9 g/L NaH2PO4.H2O and 1.85 g/L EDTA, pH adjusted to 7.4 with NaOH), 1% SDS, 5×Denhardt's reagent [50×Denhardt's contains the following per 500 mL 5 g Ficoll (Type 400, Pharmacia), 5 g BSA (Fraction V; Sigma)] and 100 μg/mL denatured salmon sperm DNA followed by washing (preferably for one times 15 minutes, more preferably two times 15 minutes, more preferably three time 15 minutes) in a solution comprising 0.1×SSC (1×SSC is 0.15 M NaCl plus 0.015 M sodium citrate) and 1% SDS at room temperature or—preferably 37° C.—when a DNA probe of preferably about 100 to about 500 nucleotides in length is employed.

[0113] High stringency conditions when used in reference to nucleic acid hybridization comprise conditions equivalent to binding or hybridization at 68° C. in a solution consisting of 5×SSPE (43.8 g/L NaCl, 6.9 g/L NaH2PO4.H2O and 1.85 g/L EDTA, pH adjusted to 7.4 with NaOH), 1% SDS, 5×Denhardt's reagent [50×Denhardt's contains the following per 500 mL 5 g Ficoll (Type 400, Pharmacia), 5 g BSA (Fraction V; Sigma)] and 100 μg/mL denatured salmon sperm DNA followed by washing (preferably for one times 15 minutes, more preferably two times 15 minutes, more preferably three time 15 minutes) in a solution comprising 0.1×SSC (1×SSC is 0.15 M NaCl plus 0.015 M sodium citrate) and 1% SDS at 50° C.—when a DNA probe of preferably about 100 to about 500 nucleotides in length is employed.

[0114] Very high stringency conditions when used in reference to nucleic acid hybridization comprise conditions equivalent to binding or hybridization at 68° C. in a solution consisting of 5×SSPE, 1% SDS, 5×Denhardt's reagent and 100 μg/mL denatured salmon sperm DNA followed by washing (preferably for one times 15 minutes, more preferably two times 15 minutes, more preferably three time 15 minutes) in a solution comprising 0.1×SSC, and 1% SDS at 68° C., when a probe of preferably about 100 to about 500 nucleotides in length is employed.

[0115] “Identity”: “Identity” when used in respect to the comparison of two or more nucleic acid or amino acid molecules means that the sequences of said molecules share a certain degree of sequence similarity, the sequences being partially identical.
[0116] To determine the percentage identity (homology is herein used interchangeably) of two amino acid sequences or of two nucleic acid molecules, the sequences are written one underneath the other for an optimal comparison (for example gaps may be inserted into the sequence of a protein or of a nucleic acid in order to generate an optimal alignment with the other protein or the other nucleic acid).

[0117] The amino acid residues or nucleic acid molecules at the corresponding amino acid positions or nucleotide positions are then compared. If a position in one sequence is occupied by the same amino acid residue or the same nucleic acid molecule as the corresponding position in the other sequence, the molecules are homologous at this position (i.e. amino acid or nucleic acid “homology” as used in the present context corresponds to amino acid or nucleic acid “identity”. The percentage identity between the two sequences is a function of the number of identical positions shared by the sequences (i.e. % homology=number of identical positions/total number of positions×100). The terms “homology” and “identity” are thus to be considered as synonyms.

[0118] For the determination of the percentage identity of two or more amino acids or of two or more nucleotide sequences several computer software programs have been developed. The identity of two or more sequences can be calculated with for example the software fasta, which presently has been used in the version fasta 3 (W. R. Pearson and D. J. Lipman, PNAS 85, 2444(1988); W. R. Pearson, Methods in Enzymology 183, 63 (1990); W. R. Pearson and D. J. Lipman, PNAS 85, 2444 (1988); W. R. Pearson, Enzymology 183, 63 (1990)). Another useful program for the calculation of identities of different sequences is the standard blast program, which is included in the Biomax pedant software (Biomax, Munich, Federal Republic of Germany). This leads unfortunately sometimes to suboptimal results since blast does not always include complete sequences of the subject and the query. Nevertheless as this program is very efficient it can be used for the comparison of a huge number of sequences. The following settings are typically used for such a comparisons of sequences:
[0119] —p Program Name [String];—d Database [String]; default=nr;—i Query File [File In]; default=stdin;—e Expectation value (E) [Real]; default=10.0;—m alignment view options: 0=pairwise; 1=query-anchored showing identities; 2=query-anchored no identities; 3=flat query-anchored, show identities; 4=flat query-anchored, no identities; 5=query-anchored no identities and blunt ends; 6=flat query-anchored, no identities and blunt ends; 7=XML Blast output; 8=tabular; 9 tabular with comment lines [Integer]; default=0;—o BLAST report Output File [File Out] Optional; default=stdout;—F Filter query sequence (DUST with blastn, SEG with others) [String]; default=T;—G Cost to open a gap (zero invokes default behavior) [Integer]; default=0;—E Cost to extend a gap (zero invokes default behavior) [Integer]; default=0;—X X dropoff value for gapped alignment (in bits) (zero invokes default behavior); blastn 30, megablast 20, tblastx 0, all others 15 [Integer]; default=0;—I Show GI's in deflines [T/F]; default=F;—q Penalty for a nucleotide mismatch (blastn only) [Integer]; default=—3;—r Reward for a nucleotide match (blastn only) [Integer]; default=1;—v Number of database sequences to show one-line descriptions for (V) [Integer]; default=500;—b Number of database sequence to show alignments for (B) [Integer]; default=250;—f Threshold for extending hits, default if zero; blastp 11, blastn 0, blastx 12, tblastn 13; tblastx 13, megablast 0 [Integer]; default=0;—g Perfom gapped alignment (not available with tblastx) [T/F]; default =T;—Q Query Genetic code to use [Integer]; default=1;—D DB Genetic code (for tblast[nx] only) [Integer]; default=1;—a Number of processors to use [Integer]; default=1;—O SeqAlign file [File Out] Optional;—J Believe the query defline [T/F]; default=F;—M Matrix [String]; default=BLOSUM62;—W Word size, default if zero (blastn 11, megablast 28, all others 3) [Integer]; default=0;—z Effective length of the database (use zero for the real size) [Real]; default=0;—K Number of best hits from a region to keep (off by default, if used a value of 100 is recommended) [Integer]; default=0; —P 0 for multiple hit, 1 for single hit [Integer]; default=0;—Y Effective length of the search space (use zero for the real size) [Real]; default=0;—S Query strands to search against database (for blast[nx], and tblastx); 3 is both, 1 is top, 2 is bottom [Integer]; default=3;—T Produce HTML output [T/F]; default=F;—-I Restrict search of database to list of GI's [String] Optional;—U Use lower case filtering of FASTA sequence [T/F] Optional; default=F;—y X dropoff value for ungapped extensions in bits (0.0 invokes default behavior); blastn 20, megablast 10, all others 7 [Real]; default=0.0;—Z X dropoff value for final gapped alignment in bits (0.0 invokes default behavior); blastn/megablast 50, tblastx 0, all others 25 [Integer]; default=0;—R PSI-TBLASTN checkpoint file [File In] Optional;—n MegaBlast search [T/F]; default=F;—L Location on query sequence [String] Optional;—A Multiple Hits window size, default if zero (blastn/megablast 0, all others 40 [Integer]; default=0;—w Frame shift penalty (OOF algorithm for blastx) [Integer]; default=0;—t Length of the largest intron allowed in tblastn for linking HSPs (0 disables linking) [Integer]; default=0.

[0120] Results of high quality are reached by using the algorithm of Needleman and Wunsch or Smith and Waterman. Therefore programs based on said algorithms are preferred. Advantageously the comparisons of sequences can be done with the program PileUp (J. Mol. Evolution., 25, 351 (1987), Higgins et al., CABIOS 5, 151 (1989)) or preferably with the programs “Gap” and “Needle”, which are both based on the algorithms of Needleman and Wunsch (J. Mol. Biol. 48; 443 (1970)), and “BestFit”, which is based on the algorithm of Smith and Waterman (Adv. Appl. Math. 2; 482 (1981)). “Gap” and “BestFit” are part of the GCG software-package (Genetics Computer Group, 575 Science Drive, Madison, Wis., USA 53711 (1991); Altschul et al., (Nucleic Acids Res. 25, 3389 (1997)), “Needle” is part of the The European Molecular Biology Open Software Suite (EMBOSS) (Trends in Genetics 16 (6), 276 (2000)). Therefore preferably the calculations to determine the percentages of sequence identity are done with the programs “Gap” or “Needle” over the whole range of the sequences. The following standard adjustments for the comparison of nucleic acid sequences were used for “Needle”: matrix: EDNAFULL, Gap_penalty: 10.0, Extend_penalty: 0.5. The following standard adjustments for the comparison of nucleic acid sequences were used for “Gap”: gap weight: 50, length weight: 3, average match: 10.000, average mismatch: 0.000.

[0121] For example a sequence, which is said to have 80% identity with sequence SEQ ID NO: 1 at the nucleic acid level is understood as meaning a sequence which, upon comparison with the sequence represented by SEQ ID NO: 1 by the above program “Needle” with the above parameter set, has a 80% identity. Preferably the identity is calculated on the complete length of the query sequence, for example SEQ ID NO:1.

[0122] Isogenic: organisms (e.g., plants), which are genetically identical, except that they may differ by the presence or absence of a heterologous DNA sequence.

[0123] Isolated: The term “isolated” as used herein means that a material has been removed by the hand of man and exists apart from its original, native environment and is therefore not a product of nature. An isolated material or molecule (such as a DNA molecule or enzyme) may exist in a purified form or may exist in a non-native environment such as, for example, in a transgenic host cell. For example, a naturally occurring polynucleotide or polypeptide present in a living plant is not isolated, but the same polynucleotide or polypeptide, separated from some or all of the coexisting materials in the natural system, is isolated. Such polynucleotides can be part of a vector and/or such polynucleotides or polypeptides could be part of a composition, and would be isolated in that such a vector or composition is not part of its original environment. Preferably, the term “isolated” when used in relation to a nucleic acid molecule, as in “an isolated nucleic acid sequence” refers to a nucleic acid sequence that is identified and separated from at least one contaminant nucleic acid molecule with which it is ordinarily associated in its natural source. Isolated nucleic acid molecule is nucleic acid molecule present in a form or setting that is different from that in which it is found in nature. In contrast, non-isolated nucleic acid molecules are nucleic acid molecules such as DNA and RNA, which are found in the state they exist in nature. For example, a given DNA sequence (e.g., a gene) is found on the host cell chromosome in proximity to neighboring genes; RNA sequences, such as a specific mRNA sequence encoding a specific protein, are found in the cell as a mixture with numerous other mRNAs, which encode a multitude of proteins. However, an isolated nucleic acid sequence comprising for example SEQ ID NO: 1 includes, by way of example, such nucleic acid sequences in cells which ordinarily contain SEQ ID NO:1 where the nucleic acid sequence is in a chromosomal or extrachromosomal location different from that of natural cells, or is otherwise flanked by a different nucleic acid sequence than that found in nature. The isolated nucleic acid sequence may be present in single-stranded or double-stranded form. When an isolated nucleic acid sequence is to be utilized to express a protein, the nucleic acid sequence will contain at a minimum at least a portion of the sense or coding strand (i.e., the nucleic acid sequence may be single-stranded). Alternatively, it may contain both the sense and anti-sense strands (i.e., the nucleic acid sequence may be double-stranded).

[0124] Minimal Promoter: promoter elements, particularly a TATA element, that are inactive or that have greatly reduced promoter activity in the absence of upstream activation. In the presence of a suitable transcription factor, the minimal promoter functions to permit transcription.

[0125] “Modulating the expression of a gene” in a plant as used herein means the increase, enhancement, repression or downregulation of the expression of a target gene compared to a wild-type or reference plant or part thereof to which the method of the invention has not been applied. According to the invention, the modulation of the expression of a target gene is achieved by suppression of the activity of a srRNA such as, for example, a microRNA or an enhancing RNA (RNAa). Depending on the activity of the respective srRNA, either repressing the expression of the respective target gene or activating the expression of the respective target gene, the effect of the suppression of the activity of the srRNA is either an increase or enhancement of the expression of the target gene or the repression or downregulation of the expression of the target gene. Both are covered by the term “modulating the expression of a gene”.

[0126] “Naturally” when used herein in respect to a nucleic acid sequence or nucleic acid molecule or a gene means that the respective sequence or molecule is present in a wild-type plant cell, that has not been genetically modified or manipulated by man. A srRNA molecule naturally targeting a target gene means a srRNA molecule present in a wild-type plant cell, the cell has not been genetically modified or manipulated by man which is targeting a target gene naturally occurring in the respective plant cell.

[0127] Non-coding: The term “non-coding” refers to sequences of nucleic acid molecules that do not encode part or all of an expressed protein. Non-coding sequences include but are not limited to introns, enhancers, promoter regions, 3′ untranslated regions, and 5′ untranslated regions.

[0128] Nucleic acids and nucleotides: The terms “Nucleic Acids” and “Nucleotides” refer to naturally occurring or synthetic or artificial nucleic acid or nucleotides. The terms “nucleic acids” and “nucleotides” comprise deoxyribonucleotides or ribonucleotides or any nucleotide analogue and polymers or hybrids thereof in either single- or double-stranded, sense or antisense form. Unless otherwise indicated, a particular nucleic acid sequence also implicitly encompasses conservatively modified variants thereof (e.g., degenerate codon substitutions) and complementary sequences, as well as the sequence explicitly indicated. The term “nucleic acid” is used inter-changeably herein with “gene”, “cDNA”, “mRNA”, “oligonucleotide,” and “polynucleotide”. Nucleotide analogues include nucleotides having modifications in the chemical structure of the base, sugar and/or phosphate, including, but not limited to, 5-position pyrimidine modifications, 8-position purine modifications, modifications at cytosine exocyclic amines, substitution of 5-bromo-uracil, and the like; and 2′-position sugar modifications, including but not limited to, sugar-modified ribonucleotides in which the 2′-OH is replaced by a group selected from H, OR, R, halo, SH, SR, NH2, NHR, NR2, or CN. Short hairpin RNAs (shRNAs) also can comprise non-natural elements such as non-natural bases, e.g., ionosin and xanthine, non-natural sugars, e.g., 2′-methoxy ribose, or non-natural phosphodiester linkages, e.g., methylphosphonates, phosphorothioates and peptides.

[0129] Nucleic acid sequence: The phrase “nucleic acid sequence” refers to a single or double-stranded polymer of deoxyribonucleotide or ribonucleotide bases read from the 5′- to the 3′-end. It includes chromosomal DNA, self-replicating plasmids, infectious polymers of DNA or RNA and DNA or RNA that performs a primarily structural role. “Nucleic acid sequence” also refers to a consecutive list of abbreviations, letters, characters or words, which represent nucleotides. In one embodiment, a nucleic acid can be a “probe” which is a relatively short nucleic acid, usually less than 100 nucleotides in length. Often a nucleic acid probe is from about 50 nucleotides in length to about 10 nucleotides in length. A “target region” of a nucleic acid is a portion of a nucleic acid that is identified to be of interest. A “coding region” of a nucleic acid is the portion of the nucleic acid, which is transcribed and translated in a sequence-specific manner to produce into a particular polypeptide or protein when placed under the control of appropriate regulatory sequences. The coding region is said to encode such a polypeptide or protein.

[0130] Oligonucleotide: The term “oligonucleotide” refers to an oligomer or polymer of ribonucleic acid (RNA) or deoxyribonucleic acid (DNA) or mimetics thereof, as well as oligonucleotides having non-naturally-occurring portions which function similarly. Such modified or substituted oligonucleotides are often preferred over native forms because of desirable properties such as, for example, enhanced cellular uptake, enhanced affinity for nucleic acid target and increased stability in the presence of nucleases. An oligonucleotide preferably includes two or more nucleomonomers covalently coupled to each other by linkages (e.g., phosphodiesters) or substitute linkages.

[0131] Overhang: An “overhang” is a relatively short single-stranded nucleotide sequence on the 5′- or 3′-hydroxyl end of a double-stranded oligonucleotide molecule (also referred to as an “extension,” “protruding end,” or “sticky end”).

[0132] Plant: is generally understood as meaning any eukaryotic single-or multi-celled organism or a cell, tissue, organ, part or propagation material (such as seeds or fruit) of same which is capable of photosynthesis. Included for the purpose of the invention are all genera and species of higher and lower plants of the Plant Kingdom. Annual, perennial, monocotyledonous and dicotyledonous plants are preferred. The term includes the mature plants, seed, shoots and seedlings and their derived parts, propagation material (such as seeds or microspores), plant organs, tissue, protoplasts, callus and other cultures, for example cell cultures, and any other type of plant cell grouping to give functional or structural units. Mature plants refer to plants at any desired developmental stage beyond that of the seedling. Seedling refers to a young immature plant at an early developmental stage. Annual, biennial, monocotyledonous and dicotyledonous plants are preferred host organisms for the generation of transgenic plants. The expression of genes is furthermore advantageous in all ornamental plants, useful or ornamental trees, flowers, cut flowers, shrubs or lawns. Plants which may be mentioned by way of example but not by limitation are angiosperms, bryophytes such as, for example, Hepaticae (liverworts) and Musci (mosses); Pteridophytes such as ferns, horsetail and club mosses; gymnosperms such as conifers, cycads, ginkgo and Gnetatae; algae such as Chlorophyceae, Phaeophpyceae, Rhodophyceae, Myxophyceae, Xanthophyceae, Bacillariophyceae (diatoms), and Euglenophyceae. Preferred are plants which are used for food or feed purpose such as the families of the Leguminosae such as pea, alfalfa and soya; Gramineae such as rice, maize, wheat, barley, sorghum, millet, rye, triticale, or oats; the family of the Umbelliferae, especially the genus Daucus, very especially the species carota (carrot) and Apium, very especially the species Graveolens dulce (celery) and many others; the family of the Solanaceae, especially the genus Lycopersicon, very especially the species esculentum (tomato) and the genus Solanum, very especially the species tuberosum (potato) and melongena (egg plant), and many others (such as tobacco); and the genus Capsicum, very especially the species annuum (peppers) and many others; the family of the Leguminosae, especially the genus Glycine, very especially the species max (soybean), alfalfa, pea, lucerne, beans or peanut and many others; and the family of the Cruciferae (Brassicacae), especially the genus Brassica, very especially the species napus (oil seed rape), campestris (beet), oleracea cv Tastie (cabbage), oleracea cv Snowball Y (cauliflower) and oleracea cv Emperor (broccoli); and of the genus Arabidopsis, very especially the species thaliana and many others; the family of the Compositae, especially the genus Lactuca, very especially the species sativa (lettuce) and many others; the family of the Asteraceae such as sunflower, Tagetes, lettuce or Calendula and many other; the family of the Cucurbitaceae such as melon, pumpkin/squash or zucchini, and linseed. Further preferred are cotton, sugar cane, hemp, flax, chillies, and the various tree, nut and wine species.

[0133] Polypeptide: The terms “polypeptide”, “peptide”, “oligopeptide”, “polypeptide”, “gene product”, “expression product” and “protein” are used interchangeably herein to refer to a polymer or oligomer of consecutive amino acid residues.

[0134] Pre-protein: Protein, which is normally targeted to a cellular organelle, such as a chloroplast, and still comprising its transit peptide.

[0135] Primary transcript: The term “primary transcript” as used herein refers to a premature RNA transcript of a gene. A “primary transcript” for example still comprises introns and/or is not yet comprising a polyA tail or a cap structure and/or is missing other modifications necessary for its correct function as transcript such as for example trimming or editing.

[0136] Promoter: The terms “promoter”, or “promoter sequence” are equivalents and as used herein, refer to a DNA sequence which when ligated to a nucleotide sequence of interest is capable of controlling the transcription of the nucleotide sequence of interest into RNA. Such promoters can for example be found in the following public databases http://www.grassius.org/grasspromdb.html,
[0137] http://mendel.cs.rhul.ac.uk/mendel.php?topic=plantprom, http://ppdb.gene.nagoya-u.ac.jp/cgi-bin/index.cgi. Promoters listed there may be addressed with the methods of the invention and are herewith included by reference. A promoter is located 5′ (i.e., upstream), proximal to the transcriptional start site of a nucleotide sequence of interest whose transcription into mRNA it controls, and provides a site for specific binding by RNA polymerase and other transcription factors for initiation of transcription. Said promoter comprises for example the at least 10 kb, for example 5 kb or 2 kb proximal to the transcription start site. It may also comprise the at least 1500 bp proximal to the transcriptional start site, preferably the at least 1000 bp, more preferably the at least 500 bp, even more preferably the at least 400 bp, the at least 300 bp, the at least 200 bp or the at least 100 bp. In a further preferred embodiment, the promoter comprises the at least 50 bp proximal to the transcription start site, for example, at least 25 bp. The promoter does not comprise exon and/or intron regions or 5′ untranslated regions. The promoter may for example be heterologous or homologous to the respective plant. A polynucleotide sequence is “heterologous to” an organism or a second polynucleotide sequence if it originates from a foreign species, or, if from the same species, is modified from its original form. For example, a promoter operably linked to a heterologous coding sequence refers to a coding sequence from a species different from that from which the promoter was derived, or, if from the same species, a coding sequence which is not naturally associated with the promoter (e.g. a genetically engineered coding sequence or an allele from a different ecotype or variety). Suitable promoters can be derived from genes of the host cells where expression should occur or from pathogens for this host cells (e.g., plants or plant pathogens like plant viruses). A plant specific promoter is a promoter suitable for regulating expression in a plant. It may be derived from a plant but also from plant pathogens or it might be a synthetic promoter designed by man. If a promoter is an inducible promoter, then the rate of transcription increases in response to an inducing agent. Also, the promoter may be regulated in a tissue-specific or tissue preferred manner such that it is only or predominantly active in transcribing the associated coding region in a specific tissue type(s) such as leaves, roots or meristem. The term “tissue specific” as it applies to a promoter refers to a promoter that is capable of directing selective expression of a nucleotide sequence of interest to a specific type of tissue (e.g., petals) in the relative absence of expression of the same nucleotide sequence of interest in a different type of tissue (e.g., roots). Tissue specificity of a promoter may be evaluated by, for example, operably linking a reporter gene to the promoter sequence to generate a reporter construct, introducing the reporter construct into the genome of a plant such that the reporter construct is integrated into every tissue of the resulting transgenic plant, and detecting the expression of the reporter gene (e.g., detecting mRNA, protein, or the activity of a protein encoded by the reporter gene) in different tissues of the transgenic plant. The detection of a greater level of expression of the reporter gene in one or more tissues relative to the level of expression of the reporter gene in other tissues shows that the promoter is specific for the tissues in which greater levels of expression are detected. The term “cell type specific” as applied to a promoter refers to a promoter, which is capable of directing selective expression of a nucleotide sequence of interest in a specific type of cell in the relative absence of expression of the same nucleotide sequence of interest in a different type of cell within the same tissue. The term “cell type specific” when applied to a promoter also means a promoter capable of promoting selective expression of a nucleotide sequence of interest in a region within a single tissue. Cell type specificity of a promoter may be assessed using methods well known in the art, e.g., GUS activity staining, GFP protein or immunohistochemical staining. The term “constitutive” when made in reference to a promoter or the expression derived from a promoter means that the promoter is capable of directing transcription of an operably linked nucleic acid molecule in the absence of a stimulus (e.g., heat shock, chemicals, light, etc.) in the majority of plant tissues and cells throughout substantially the entire lifespan of a plant or part of a plant. Typically, constitutive promoters are capable of directing expression of a transgene in substantially any cell and any tissue.

[0138] Promoter specificity: The term “specificity” when referring to a promoter means the pattern of expression conferred by the respective promoter. The specificity describes the tissues and/or developmental status of a plant or part thereof, in which the promoter is conferring expression of the nucleic acid molecule under the control of the respective promoter. Specificity of a promoter may also comprise the environmental conditions, under which the promoter may be activated or down-regulated such as induction or repression by biological or environmental stresses such as cold, drought, wounding or infection.

[0139] Purified: As used herein, the term “purified” refers to molecules, either nucleic or amino acid sequences that are removed from their natural environment, isolated or separated. “Substantially purified” molecules are at least 60% free, preferably at least 75% free, and more preferably at least 90% free from other components with which they are naturally associated. A purified nucleic acid sequence may be an isolated nucleic acid sequence.

[0140] Recombinant: The term “recombinant” with respect to nucleic acid molecules refers to nucleic acid molecules produced by recombinant DNA techniques. Recombinant nucleic acid molecules may also comprise molecules, which as such does not exist in nature but are modified, changed, mutated or otherwise manipulated by man. Preferably, a “recombinant nucleic acid molecule” is a non-naturally occurring nucleic acid molecule that differs in sequence from a naturally occurring nucleic acid molecule by at least one nucleic acid. A “recombinant nucleic acid molecule” may also comprise a “recombinant construct” which comprises, preferably operably linked, a sequence of nucleic acid molecules not naturally occurring in that order. Preferred methods for producing said recombinant nucleic acid molecule may comprise cloning techniques, directed or non-directed mutagenesis, synthesis or recombination techniques.

[0141] “Repress” or “downregulate” the expression of a nucleic acid molecule in a plant cell are used equivalently herein and mean that the level of expression of the nucleic acid molecule in a plant, part of a plant or plant cell after applying a method of the present invention is lower than its expression in the plant, part of the plant or plant cell before applying the method, or compared to a reference plant lacking a recombinant nucleic acid molecule of the invention. For example, the reference plant is comprising the same construct which is only lacking the respective precursor molecule. The term “repressed” or “downregulated” as used herein are synonymous and means herein lower, preferably significantly lower expression of the nucleic acid molecule to be expressed. As used herein, a “repression” or “downregulation” of the level of an agent such as a protein, mRNA or RNA means that the level is reduced relative to a substantially identical plant, part of a plant or plant cell grown under substantially identical conditions, lacking a recombinant nucleic acid molecule of the invention, for example lacking the region complementary to at least a part of the precursor molecule of the srRNA, the recombinant construct or recombinant vector of the invention. As used herein, “repression” or “downregulation” of the level of an agent, such as for example a preRNA, mRNA, rRNA, tRNA, snoRNA, snRNA expressed by the target gene and/or of the protein product encoded by it, means that the amount is reduced 10% or more, for example 20% or more, preferably 30% or more, more preferably 50% or more, even more preferably 70% or more, most preferably 80% or more for example 90% relative to a cell or organism lacking a recombinant nucleic acid molecule of the invention. The repression or downregulation can be determined by methods with which the skilled worker is familiar. Thus, the enhancement or increase of the nucleic acid or protein quantity can be determined for example by an immunological detection of the protein. Moreover, techniques such as protein assay, fluorescence, Northern hybridization, nuclease protection assay, reverse transcription (quantitative RT-PCR), ELISA (enzyme-linked immunosorbent assay), Western blotting, radioimmunoassay (RIA) or other immunoassays and fluorescence-activated cell analysis (FACS) can be employed to measure a specific protein or RNA in a plant or plant cell. Depending on the type of the induced protein product, its activity or the effect on the phenotype of the organism or the cell may also be determined. Methods for determining the protein quantity are known to the skilled worker. Examples, which may be mentioned, are: the micro-Biuret method (Goa J (1953) Scand J Clin Lab Invest 5:218-222), the Folin-Ciocalteau method (Lowry O H et al. (1951) J Biol Chem 193:265-275) or measuring the absorption of CBB G-250 (Bradford M M (1976) Analyt Biochem 72:248-254). As one example for quantifying the activity of a protein, the detection of luciferase activity is described in the Examples below.

[0142] Sense: The term “sense” is understood to mean a nucleic acid molecule having a sequence which is complementary or identical to a target sequence, for example a sequence which binds to a protein transcription factor and which is involved in the expression of a given gene. According to a preferred embodiment, the nucleic acid molecule comprises a gene of interest and elements allowing the expression of the said gene of interest.

[0143] Significant increase or decrease: An increase or decrease, for example in enzymatic activity or in gene expression, that is larger than the margin of error inherent in the measurement technique, preferably an increase or decrease by about 2-fold or greater of the activity of the control enzyme or expression in the control cell, more preferably an increase or decrease by about 5-fold or greater, and most preferably an increase or decrease by about 10-fold or greater.

[0144] Small regulating RNA molecules: “small regulating RNA molecules” or srRNA molecules are understood as molecules consisting of nucleic acids or derivatives thereof. They may be double-stranded or single-stranded and are between about 15 and about 30 bp, for example between 15 and 30 bp, more preferred between about 19 and about 26 bp, for example between 19 and 26 bp, even more preferred between about 20 and about 25 by for example between 20 and 25 bp. In an especially preferred embodiment the oligonucleotides are between about 21 and about 24 bp, for example between 21 and 24 bp. In a most preferred embodiment, the small nucleic acid molecules are about 21 bp and about 24 bp, for example 21 bp and 24 bp. SrRNA molecules may be derived from larger precursor RNA molecules that comprise such srRNA molecules and that are processed in vitro or in vivo and release upon processing such srRNA molecules. SrRNA molecules may also be synthesized by man.

[0145] Substantially complementary: In its broadest sense, the term “substantially complementary”, when used herein with respect to a nucleotide sequence in relation to a reference or target nucleotide sequence, means a nucleotide sequence having a percentage of identity between the substantially complementary nucleotide sequence and the exact complementary sequence of said reference or target nucleotide sequence of at least 60%, more desirably at least 70%, more desirably at least 80% or 85%, preferably at least 90%, more preferably at least 93%, still more preferably at least 95% or 96%, yet still more preferably at least 97% or 98%, yet still more preferably at least 99% or most preferably 100% (the later being equivalent to the term “identical” in this context). Preferably identity is assessed over a length of at least 19 nucleotides, preferably at least 50 nucleotides, more preferably the entire length of the nucleic acid sequence to said reference sequence (if not specified otherwise below). Sequence comparisons are carried out using default GAP analysis with the University of Wisconsin GCG, SEQWEB application of GAP, based on the algorithm of Needleman and Wunsch (Needleman and Wunsch (1970) J Mol. Biol. 48: 443-453; as defined above). A nucleotide sequence “substantially complementary ” to a reference nucleotide sequence hybridizes to the reference nucleotide sequence under low stringency conditions, preferably medium stringency conditions, most preferably high stringency conditions (as defined above).

[0146] Suppressing the activity of a srRNA molecule such as microRNA molecule, ta-siRNA or RNAa molecule, means that the regulatory function of said srRNA is reduced or lost and hence the amount of transcript of a target gene targeted by the respective srRNA in a plant, part of a plant or plant cell after applying a method of the present invention is changed compared to a wild-type or reference plant. Depending on whether the activity of the respective srRNA is the downregulation or activation of its target gene, the plant or part thereof comprises a higher or lower amount of transcript than the amount of transcript of said target gene in the plant, part of the plant or plant cell before applying the method of the invention, or compared to a reference plant, part of the plant or plant cell lacking a recombinant nucleic acid molecule of the invention.
[0147] In case, the activity of the respective srRNA is the downregulation or repression of the respective target gene, the amount of transcript is higher, preferably significantly higher in the plant comprising a recombinant nucleic acid of the invention. As used herein, an higher amount of a transcript such as an mRNA or RNA means that the level is higher relative to a substantially identical plant, part of a plant or plant cell grown under substantially identical conditions, lacking a recombinant nucleic acid molecule of the invention, for example lacking, the recombinant construct or recombinant vector of the invention. As used herein, a higher amount of a transcript, such as for example a preRNA, mRNA, rRNA, tRNA, snoRNA, snRNA and the like expressed by the target gene, means that the amount is increased 50% or more, for example 100% or more, preferably 200% or more, more preferably 5 fold or more, even more preferably 10 fold or more, most preferably 20 fold or more for example 50 fold relative to a cell or organism lacking a recombinant nucleic acid molecule of the invention.
[0148] In case the activity of the respective srRNA is the activation of the respective target gene, the amount of transcript is lower, preferably significantly lower in the plant comprising a recombinant nucleic acid of the invention. As used herein, a lower amount of a transcript such as an mRNA or RNA means that the level is lower relative to a substantially identical plant, part of a plant or plant cell grown under substantially identical conditions, lacking a recombinant nucleic acid molecule of the invention, for example lacking, the recombinant construct or recombinant vector of the invention. As used herein, a lower amount of a transcript, such as for example a preRNA, mRNA, rRNA, tRNA, snoRNA, snRNA and the like expressed by the target gene, means that the amount is reduced 10% or more, for example 20% or more, preferably 30% or more, more preferably 50% or more, even more preferably 70% or more, most preferably 80% or more for example 90% relative to a cell or organism lacking a recombinant nucleic acid molecule of the invention.
[0149] The enhancement or increase or decrease or suppression of the transcript can be determined by methods with which the skilled worker is familiar. Thus, the enhancement or increase or decrease or suppression of the nucleic acid quantity can be determined for example by techniques such as Northern hybridization, nuclease protection assay, reverse transcription (quantitative RT-PCR).

[0150] Transgene: The term “transgene” as used herein refers to any nucleic acid sequence, which is introduced into the genome of a cell by experimental manipulations. A transgene may be an “endogenous DNA sequence,” or a “heterologous DNA sequence” (i.e., “foreign DNA”). The term “endogenous DNA sequence” refers to a nucleotide sequence, which is naturally found in the cell into which it is introduced so long as it does not contain some modification (e.g., a point mutation, the presence of a selectable marker gene, etc.) relative to the naturally-occurring sequence.

[0151] Transgenic: The term transgenic when referring to an organism means transformed, preferably stably transformed, with a recombinant DNA molecule that preferably comprises a suitable promoter operatively linked to a DNA sequence of interest.

[0152] Vector: As used herein, the term “vector” refers to a nucleic acid molecule capable of transporting another nucleic acid molecule to which it has been linked. One type of vector is a genomic integrated vector, or “integrated vector”, which can become integrated into the chromosomal DNA of the host cell. Another type of vector is an episomal vector, i.e., a nucleic acid molecule capable of extra-chromosomal replication. Vectors capable of directing the expression of genes to which they are operatively linked are referred to herein as “expression vectors”. In the present specification, “plasmid” and “vector” are used interchangeably unless otherwise clear from the context. Expression vectors designed to produce RNAs as described herein in vitro or in vivo may contain sequences recognized by any RNA polymerase, including mitochondrial RNA polymerase, RNA pol I, RNA pol II, and RNA pol III. These vectors can be used to transcribe the desired RNA molecule in the cell according to this invention. A plant transformation vector is to be understood as a vector suitable in the process of plant transformation.

[0153] Wild-type: The term “wild-type”, “natural” or “natural origin” means with respect to an organism, polypeptide, or nucleic acid sequence, that said organism is naturally occurring or available in at least one naturally occurring organism which is not changed, mutated, or otherwise manipulated by man.

### EXAMPLES

### Chemicals and Common Methods

[0154] Unless indicated otherwise, cloning procedures carried out for the purposes of the present invention including restriction digest, agarose gel electrophoresis, purification of nucleic acids, Ligation of nucleic acids, transformation, selection and cultivation of bacterial cells were performed as described (Sambrook et al., 1989). Sequence analyses of recombinant DNA were performed with a laser fluorescence DNA sequencer (Applied Biosystems, Foster City, Calif., USA) using the Sanger technology (Sanger et al., 1977). Unless described otherwise, chemicals and reagents were obtained from Sigma Aldrich (Sigma Aldrich, St. Louis, USA), from Promega (Madison, Wis., USA), Duchefa (Haarlem, The Netherlands) or Invitrogen (Carlsbad, Calif., USA). Restriction endonucleases were from New England Biolabs (Ipswich, Mass., USA) or Roche Diagnostics GmbH (Penzberg, Germany). Oligonucleotides were synthesized by Eurofins MWG Operon (Ebersberg, Germany).

### Example 1

### Suppressing Endogenous miRNA Activity in Monocots via Target Mimics

[0155] Maize and rice databases were Blastn searched for sequences containing a sequence similar to the motif TAGGGCAACTTNNNTCCTTTGGCA (SEQ ID NO. 30), where N is any nucleotide base. Maize and rice sequences were identified from the database containing sequences similar to this motif.

TABLE 1
Endogenous target mimicry sequences from maize and rice

| Sequence name | source | sequence |
|---|---|---|
| ZM06MC40391_TD146076974 | Maize | AGGCTTGCTATAGCTGGTCCATGGC |
| rc | Maize | ACCATACATGTAAGCACGCACACAG |
| sequence shown is the | Mefi | GCACACACACACACGCACGCAATGA |
| reverse complement of | Version | TCTACGTATCTAGCAGCAGCTTATCA |
| ZM06MC40391_TD146076974 | 06 (SEQ | TGTCGTCATCATGCATGCATGGCCG |
| | ID NO. 1) | ACGGAGGTCGTCATCTTATCTGGGA |
| | | GCGTGTGTGTCTTGGCAATGGGAAG |
| | | CTGCATGCGCCTCTCGGGCGTCGG |
| | | CGCGTCGGCGCCTAGCTGTAGGGC |
| | | GGCGTGCCATAGAGCTGCCTCCTG |
| | | CCGCTCACACCATGCTGTTGACGAG |
| | | GACTGATGGTGGTCATGGCCTCTCG |
| | | GCGTCGGTGGCGGCGGCGCCGGC |
| | | GCCGAGTTTTACCTCTCTACTAAGG |
| | | TAGGGCAACTTGTATCCTTTGGCAA |
| | | TTGTTCTCATCTATCTGGGTCTGTCT |
| | | GTTGGCTGCCCGGTGACGGTATAC |
| | | GGTGATGTTCTAATAGTACTCAATTG |
| | | GTCTTGGATCGGAGTTCATGCTACG |
| | | GCTCCTCTGTTATATATTACACGGCT |
| | | GACGGCTCCTTATTAATGTGTCCGT |
| | | TGATGATGTCATTAATAATATGAATC |
| | | TGATATTGTATAAAAAAAAAAAAAA |
| OS07MC07755_33971786 | Rice | AGGGGGTGTGTACTGCTGATTCCTC |
| | Hyseq_rice_mefi_v07.nt | ATGCGTCGTCGGAGATCGAGAGGT |
| | (SEQ ID | GATGCATGCTGCGAACGGCGAGCG |
| | NO. 2) | GCGGCGGCGGCGACAGGAGGTCG |
| | | GCGGCGAGCTCCGGCGTGCTGGCT |
| | | GGCATCCGGCGATCGACGACGGCG |
| | | ACCGAGGGAGGGAGGAAGCTATAG |
| | | CTAGGATGGTCATCATGTGATTAATT |
| | | CAGTGATGTGTCCTAATTAAGTAGCT |
| | | TCTTGCTTGCTAGCAGGGCAATTTC |
| | | AATCCTTTGGCATCTGTAACCTTTTT |
| | | CTTTCTTTCTGAAGTAAACCTTAATA |
| | | ACCCAGCTATGTTCTCTTATGATGTT |
| | | CTGAACAAATACAACAAATTAGGCAT |
| | | ACAGATTCAGATACAATAGCACTTGA |
| | | GTTTGTATCTAGTCGTTTGTCAAGAA |
| | | CCAAGACACATTTCTTG |

[0156] The 24 nt sequence having a motif similar to TAGGGCAACTTNNNTCCTTTGGCA (SEQ ID NO. 30) is underlined in each sequence.

Artificial miR166 Target Mimic.

[0157] To create a sequence that when expressed in maize will act as a target for endogenous miR166 miRNAs, sequence ZM06MC40391_TD146076974 rc (Table 1) was modified as follows:
[0158] 1. The sequence TACTAAGGTAGGGCAACTTGTATCCTTTGGCAATTGTTCTCATC (SEQ ID NO. 31) spanning nucleotides 339-382 of ZM06MC40391_TD146076974 rc and including the motif similar to SEQ ID NO. 30 (underlined) was replaced with sequence TCCGGAGGGGGGAATGAAGAAACCTGGTCCGAATTGCGGCCGC (SEQ ID NO. 32) containing a miR166 target site with a BspEl site (TCCGGA) 5′ of the miR166 targets site and a Notl site (GCGGCCGC) 3′ of the miR166 target site.
[0159] 2. The 14 nt poly(A) tail spanning nucleotides 561-574 in ZM06MC40391_TD146076974 rc was deleted.

TABLE 2
The final miR166 target sequence
(Zm miR166-trap) with the miR166
target site underlined.

| Sequence name | sequence |
|---|---|
| Zm miR166- | AGGCTTGCTATAGCTGGTCCATGGCACCATACATGTA |
| trap(SEQ ID | AGCACGCACACAGGCACACACACACACGCACGCAATG |
| NO. 33) | ATCTACGTATCTAGCAGCAGCTTATCATGTCGTCATC |
| | ATGCATGCATGGCCGACGGAGGTCGTCATCTTATCTG |
| | GGAGCGTGTGTGTCTTGGCAATGGGAAGCTGCATGCG |
| | CCTCTCGGGCGTCGGCGCGTCGGCGCCTAGCTGTAGG |
| | GCGGCGTGCCATAGAGCTGCCTCCTGCCGCTCACACC |
| | ATGCTGTTGACGAGGACTGATGGTGGTCATGGCCTCT |
| | CGGCGTCGGTGGCGGCGGCGCCGGCGCCGAGTTTTAC |
| | CTCTCTCCGGAGGGGGGAATGAAGAAACCTGGTCCGA |
| | ATTGCGGCCGCTATCTGGGTCTGTCTGTTGGCTGCCC |
| | GGTGACGGTATACGGTGATGTTCTAATAGTACTCAAT |
| | TGGTCTTGGATCGGAGTTCATGCTACGGCTCCTCTGT |
| | TATATATTACACGGCTGACGGCTCCTTATTAATGTGT |
| | CCGTTGATGATGTCATTAATAATATGAATCTGATATT |
| | GTAT |

[0160] The miR166 target site is complementary to known maize miR166 family members in maize with a 3 nt bulge in the target sequence between bases 10 and 11 from the 5′ end of the miRNA. miRNA sequences were obtained from miRbase (www.mirbase.org). RNA sequences are shown.

Target site in Zm miR166-trap

(SEQ ID NO. 34)

5′GGGGAAUGAAGAAACCUGGUCCGA 3′
zma-MIR166k and j

(SEQ ID NO. 35)

3′UCCCUAACUUC GGACCAGGCU 5′
zma-MIR166l and m

(SEQ ID NO. 36)

3′CUCCUUACUUC GGACCAGGCU 5′
zma-MIR166h, e, l, f, g, b, c, d

(SEQ ID NO. 37)

3′ CCCUUACUUC GGACCAGGCU 5′
zma-MIR166a

(SEQ ID NO. 38)

3′CCCCUUACUUC GGACCAGGCU 5′

[0161] Zm miR166-trap was synthesized and cloned into a binary vector that contained the maize transformation selectable marker ZmAHASL2_A122(At)T/S653(At)N to create plasmid RTP2149-1qcz (SEQ ID NO.3). In RTP2149-1qcz, Zm miR166-trap was expressed under control of the ScBV[mm247] promoter plus i-Met1-1[mm369] intron and NOS terminator and ZmAHASL2_A122(At)T/S653(At)N was expressed under control of the p-Ubi promoter and t-XI12-3′/UTR terminator.

[0162] Partial sequence of RTP2149-1qcz from bases 5386 to 8250, including the elements p-SCBV(mm247) (bases 5386-6806), i-met1-1(mm369) (bases 6835-7417), c-Zm miR166-TRAP (bases 7426-7984), and t-NOS (bases 7998-8250) is presented as SEQ ID NO. 39.

### Generation of T₀ RTP2149-1qcz Plants:

[0163] RTP2149-1qcz and the control construct RCB958-1qcz (SEQ ID NO. 4) were transformed into maize J553×(Hill×Ai88) embryos. RCB958-1qcz is a maize binary vector similar to RTP2149-1qcz but instead expresses GUS. In RCB958-1qcz, GUS was expressed under control of the ScBV[mm247] promoter plus i-Met1-1[mm369] intron and NOS terminator and ZmAHASL2_A122(At)T/5653(At)N was expressed under control of the p-Ubi promoter and t-XI12-3′/UTR terminator.

[0164] RTP2149-1qcz and RCB958-1qcz transformed maize were grown in the greenhouse, leaf harvested 11 or 17 days after transfer to big pots, and RNA extracted. Rld1 (rolled leaf 1) RNA has been demonstrated to be a target of miR166 in maize (Nature. 2004. 428: 84-88). Taqman probes were designed for rld1 and the expression level of Rld1 was determined by quantitative RT-PCR in the RNA isolated from each leaf sample (tables 3-6). Three quantitative RT-PCR technical reps were performed for each RNA sample and the average of the 3 technical reps for each plant and the overall group average of relative rld1 expression are reported in tables 3-6.

TABLE 3
Relative expression of rld1 in transgenic events
carrying RTP2149-1 qcz

| Construct | | days from big | relative rld1 expression |
|---|---|---|---|
| Name | Plant ID | pots to harvest | average of 3 technical reps |
| RTP2149- | 106386201 | 17 | 3.9 |
| 1qcz | | | |
| RTP2149- | 106386231 | 17 | 5.4 |
| 1qcz | | | |
| RTP2149- | 106386261 | 17 | 2.1 |
| 1qcz | | | |
| RTP2149- | 106386271 | 17 | 1.4 |
| 1qcz | | | |
| RTP2149- | 106386291 | 17 | 3.5 |
| 1qcz | | | |
| RTP2149- | 106386301 | 17 | 6.6 |
| 1qcz | | | |
| RTP2149- | 106424471 | 17 | 3.7 |
| 1qcz | | | |
| | | avg | 3.8 |

TABLE 4
Relative expression of rld1 in transgenic events
carrying RCB958-1qcz

| Construct | | days from big | relative rld1 expression |
|---|---|---|---|
| Name | Plant ID | pots to harvest | average of 3 technical reps |
| RCB958- | 106386041 | 17 | 1.0 |
| 1qcz | | | |
| RCB958- | 106386061 | 17 | 3.4 |
| 1qcz | | | |
| RCB958- | 106386091 | 17 | 2.5 |
| 1qcz | | | |
| RCB958- | 106386101 | 17 | 1.8 |
| 1qcz | | | |
| RCB958- | 106386141 | 17 | 1.1 |
| 1qcz | | | |
| RCB958- | 106386161 | 17 | 1.3 |
| 1qcz | | | |
| | | avg | 1.8 |

TABLE 5
Relative expression of rld1 in transgenic events
carrying RTP2149-1 qcz

| Construct | | days from big | relative rld1 expression |
|---|---|---|---|
| Name | Plant ID | pots to harvest | average of 3 technical reps |
| RTP2149- | 106386241 | 10 | 3.5 |
| 1qcz | | | |
| RTP2149- | 106386251 | 10 | 3.3 |
| 1qcz | | | |
| RTP2149- | 106386331 | 10 | 0.7 |
| 1qcz | | | |
| RTP2149- | 106386351 | 10 | 5.9 |
| 1qcz | | | |
| RTP2149- | 106395911 | 10 | 3.3 |
| 1qcz | | | |
| RTP2149- | 106424461 | 10 | 2.9 |
| 1qcz | | | |
| | | avg | 3.3 |

TABLE 6
Relative expression of rld1 in transgenic events
carrying RTP958-1 qcz

| Construct | | days from big | relative rld1 expression |
|---|---|---|---|
| Name | Plant ID | pots to harvest | average of 3 technical reps |
| RCB958- | 106386081 | 10 | 1.3 |
| 1qcz | | | |
| RCB958- | 106386151 | 10 | 0.6 |
| 1qcz | | | |
| | | avg | 0.9 |

[0165] The data from tables 3-6 demonstrate a increase in expression of rld1 in transgenic plants expressing Zm miR166-TRAP (RTP2149-1qcz) as expected if the activity of miR166 is suppressed with respect to rld1.

### Rld1 Expression in Segregating T1 Seedlings.

[0166] The RTP2149-1qcz T₀ transgenic plant 106386231 (table 3) was shown to have a single copy insertion of Zm miR166-TRAP by Taqman copy number analysis. This plant was self-pollinated and the resulting T₁ seeds planted. Zygosity of each seedling was determined by Taqman copy number analysis as homozygous for Zm miR166-TRAP, hemizygous for Zm miR166-TRAP, or null.

[0167] The entire 3^{rd} leaf, counting from bottom, of 15 homozygous, 23 hemizygous, and 26 null 13 day old seedlings was harvested, RNA extracted, and Rld1 expression level determined by Taqman quantitative RT-PCR. The least squares mean for each population is reported in table 7. The p-values between the null populations and hemizygous and homozygous populations are reported in table 8 demonstrating the higher expression levels of Rld1 in plants expressing Zm miR166-trap vs. nulls is significant.

TABLE 7
Relative expression of rld1 in transgenic events

Relative Rld1 expression

| group | Least squares mean | Standard Error |
|---|---|---|
| null | 1.00 | 0.14 |
| hemizygous | 2.21 | 0.14 |
| homozygous | 2.54 | 0.18 |

TABLE 8
Relative expression of rld1 in transgenic events

| | pvalue |
|---|---|
| null vs hemizygous | 7.22E−08 |
| null vs homozygous | 4.05E−09 |

Target Mimic for Suppression of Multiple miRNAs:

[0168] To create a sequence that when expressed in a monocot will act as a target for multiple endogenous small regulating RNAs, two or more Zm miR166-trap sequences (Table 2) can be expressed in tandem as one transcript with each sequence containing a target site for a different small regulating RNA. In table 9, is a tandem construct with target sites for miR166 (first 24 nt sequence underlined) and miR159 (second 24 nt sequence underlined).

TABLE 9
Zm miR166-trap/Zm miR-159 trap sequence.

| Sequence | |
|---|---|
| name | sequence |
| Zm miR166- | AGGCTTGCTATAGCTGGTCCATGGCACCATACATG |
| trap/Zm | TAAGCACGCACACAGGCACACACACACACGCACGC |
| miR159-trap | AATGATCTACGTATCTAGCAGCAGCTTATCATGTCG |
| (SEQ ID | TCATCATGCATGCATGGCCGACGGAGGTCGTCATC |
| NO 5) | TTATCTGGGAGCGTGTGTGTCTTGGCAATGGGAAG |
| | CTGCATGCGCCTCTCGGGCGTCGGCGCGTCGGCG |
| | CCTAGCTGTAGGGCGGCGTGCCATAGAGCTGCCT |
| | CCTGCCGCTCACACCATGCTGTTGACGAGGACTGA |
| | TGGTGGTCATGGCCTCTCGGCGTCGGTGGCGGCG |
| | GCGCCGGCGCCGAGTTTTACCTCTCTCCGGAGGG |
| | GGGAATGAAGAAACCTGGTCCGAATTGCGGCCGCT |
| | ATCTGGGTCTGTCTGTTGGCTGCCCGGTGACGGTA |
| | TACGGTGATGTTCTAATAGTACTCAATTGGTCTTGG |
| | ATCGGAGTTCATGCTACGGCTCCTCTGTTATATATT |
| | ACACGGCTGACGGCTCCTTATTAATGTGTCCGTTG |
| | ATGATGTCATTAATAATATGAATCTGATATTGTATAG |
| | GCTTGCTATAGCTGGTCCATGGCACCATACATGTAA |
| | GCACGCACACAGGCACACACACACACGCACGCAAT |
| | GATCTACGTATCTAGCAGCAGCTTATCATGTCGTCA |
| | TCATGCATGCATGGCCGACGGAGGTCGTCATCTTA |
| | TCTGGGAGCGTGTGTGTCTTGGCAATGGGAAGCTG |
| | CATGCGCCTCTCGGGCGTCGGCGCGTCGGCGCCT |
| | AGCTGTAGGGCGGCGTGCCATAGAGCTGCCTCCT |
| | GCCGCTCACACCATGCTGTTGACGAGGACTGATGG |
| | TGGTCATGGCCTCTCGGCGTCGGTGGCGGCGGCG |
| | CCGGCGCCGAGTTTTACCTCTCTCCGGAGGCGGA |
| | GCTCCCTCACTCAATCCAAAATTGCGGCCGCTATCT |
| | GGGTCTGTCTGTTGGCTGCCCGGTGACGGTATACG |
| | GTGATGTTCTAATAGTACTCAATTGGTCTTGGATCG |
| | GAGTTCATGCTACGGCTCCTCTGTTATATATTACAC |
| | GGCTGACGGCTCCTTATTAATGTGTCCGTTGATGAT |
| | GTCATTAATAATATGAATCTGATATTGTAT |

[0169] The miR159 target site in Zm miR159-trap is complementary to known maize miR159 family members with a 3 nt bulge in the target sequence between bases 10 and 11 from the 5′ end of the miRNA. miRNA sequences were obtained from miRbase (www.mirbase.org). RNA sequences are shown.

Target site in Zm miR166-trap
(SEQ ID NO. 40)
5′CGGAGCUCCCUCACUCAAUCCAAA 3′
zma-miR159a
(SEQ ID NO. 41)
3′GUCUCGAGGGA AGUUAGGUUU 5′
zma-miR159b
(SEQ ID NO. 42)
3′GUCUCGAGGGA AGUUAGGUUU 5′
zma-miR159c
(SEQ ID NO. 43)
3′UCCUCGAGGGA AGUUAGGUUC 5′
zma-miR159d
(SEQ ID NO. 44)
3′UCCUCGAGGGA AGUUAGGUUC 5′

[0170] A second example to suppress two or more small regulating RNAs in a monocot is to transcribe two or more non-identical sequences in tandem, each containing a target sequence for a different small regulating RNA. An example of this type of tandem construct, Zm miR166-trap/Os miR159-trap Z, is in table 10. Zm miR166-trap/Os miR159-trap, combines the sequence Zm miR166-trap (sequence in table 2) fused with sequence OS07MC07755_{—}33971786 (table 1) modified to contain a miR159 target site. The OS07MC07755_{—}33971786 sequence is modified to contain a miR159 target site by deleting the 24 nt miR399 target site underlined in table 1 and replacing it with a 24 nt miR159 target site identical to the miR159 target site in the Zm miR166-trap/Zm miR159-trap sequence in table 9. The miR159 target site is the second underlined sequence in table 10.

TABLE 10
Zm miR166-trap/Os miR159-trap

| Sequence name | sequence |
|---|---|
| Zm miR166- | AGGCTTGCTATAGCTGGTCCATGGCACCATAC |
| trap/Os | ATGTAAGCACGCACACAGGCACACACACACAC |
| miR159-trap | GCACGCAATGATCTACGTATCTAGCAGCAGCT |
| (SEQ ID | TATCATGTCGTCATCATGCATGCATGGCCGAC |
| NO. 6) | GGAGGTCGTCATCTTATCTGGGAGCGTGTGT |
| | GTCTTGGCAATGGGAAGCTGCATGCGCCTCT |
| | CGGGCGTCGGCGCGTCGGCGCCTAGCTGTA |
| | GGGCGGCGTGCCATAGAGCTGCCTCCTGCCG |
| | CTCACACCATGCTGTTGACGAGGACTGATGGT |
| | GGTCATGGCCTCTCGGCGTCGGTGGCGGCG |
| | GCGCCGGCGCCGAGTTTTACCTCTCTCCGGA |
| | GGGGGGAATGAAGAAACCTGGTCCGAATTGC |
| | GGCCGCTATCTGGGTCTGTCTGTTGGCTGCC |
| | CGGTGACGGTATACGGTGATGTTCTAATAGTA |
| | CTCAATTGGTCTTGGATCGGAGTTCATGCTAC |
| | GGCTCCTCTGTTATATATTACACGGCTGACGG |
| | CTCCTTATTAATGTGTCCGTTGATGATGTCATT |
| | AATAATATGAATCTGATATTGTATAGGGGGTGT |
| | GTACTGCTGATTCCTCATGCGTCGTCGGAGAT |
| | CGAGAGGTGATGCATGCTGCGAACGGCGAGC |
| | GGCGGCGGCGGCGACAGGAGGTCGGCGGCG |
| | AGCTCCGGCGTGCTGGCTGGCATCCGGCGAT |
| | CGACGACGGCGACCGAGGGAGGGAGGAAGC |
| | TATAGCTAGGATGGTCATCATGTGATTAATTCA |
| | GTGATGTGTCCTAATTAAGTAGCTTCTTGCTTG |
| | CTAGCGGAGCTCCCTCACTCAATCCAAATCTG |
| | TAACCTTTTTCTTTCTTTCTGAAGTAAACCTTAA |
| | TAACCCAGCTATGTTCTCTTATGATGTTCTGAA |
| | CAAATACAACAAATTAGGCATACAGATTCAGAT |
| | ACAATAGCACTTGAGTTTGTATCTAGTCGTTTG |
| | TCAAGAACCAAGACACATTTCTTG |

### Example 2

### Suppressing Endogenous miRNA Activity in Dicots via Target Mimics

[0171] Soybean databases were Blastn searched for sequences containing a sequence similar to the motif TAGGGCAACTTNNNTCCTTTGGCA (SEQ ID NO. 30), where N is any nucleotide base. 6 soybean sequences having a similar motif were identified and are reported in Table 11. Sequence 51129502.f_l14_{—}1 exactly matches part of sequence GM06MC32536_sk84d08 over its entire length. Sequence 52202528.f_f03_{—}1 exactly matches part of sequence GM06MC09408_{—}52318733 over its entire length.

TABLE 11
Soybean target mimicry candidates

| Sequence name | source | sequence |
|---|---|---|
| GM06MC32536_ | Soybean | AGAAACAAAATCCCTATAACACCCAA |
| sk84d08 | Hyseq_ | TCCTAGCTACAACTTCAAACCCTCTC |
| | soybean_ | TGAATTGCACCACCCCCATCATCCC |
| | mefi_ | AAACATGTAACACCCCTTTTGAAACT |
| | v6.nt | TTTTCTCATGAGCCACCCCCCCTTTG |
| | (SEQ ID | CCCCATGCCACCACTTCCTTAATCAA |
| | NO. 7) | TTTGGCATGTGGGGGTGGTGAACAT |
| | | GTTGTGGATATATGGTGTGTTTGGT |
| | | GTGGCTATAATGGTATCTTCCTTATC |
| | | TTTCCATGCTCCTTTTCTTTCAAGGC |
| | | TAAGCGAAAACGCTCCTTCTTGAGG |
| | | GGCGGTTTCTGTTGGAAAGGGCAAC |
| | | TTCAATCCTTTGGCATTTTTCAACTC |
| | | CTCCATCTCACCTCACACACTGTGAT |
| | | TTGGGCTCTTGAGGGACATCTCAGA |
| | | ATGGCAACACCCCTTTTTATGTGTAC |
| | | CGTACTATTTTCTAGTTCTTTTTCTTG |
| | | TACAACGAAATTTAGATGCAGTTTCT |
| | | TAGATGTTGGTGTTGTTTTTTAATCA |
| | | AAATTAGAGTTTTATCTTGATAGTAC |
| | | CGGATTATCAAGGTAAAACTCTGATT |
| | | CTTATCAGAAAATGGCACCAAAAATA |
| | | CTTTAAGAACTGTATGCAAGTTTTTT |
| | | GTTGTTTTTTTTTGGTAATTCTTGTTT |
| | | GTGATGTGATGATTTCAACTGCAAAC |
| | | TATGCCTATCAGTATGGTTACCATAG |
| | | ACTATATGTTATCTAATAAATTTACAT |
| | | TTGAATAGGCCTTTGGCCAAAATGTA |
| | | TTATTGTTGTCGTTAATATGAATATG |
| | | GTTAAATCAAAAAAAAAAAAAAAAAA |
| | | AAAAAAAAAAAAAAAAAAAAAAAAAA |
| | | AAAAAAAAAAAAAAAAAAAAAAAAAA |
| | | AAAAAAAAAAAAAAAAAAATA |
| 51129502.f_ | Soybean | CCCATCATCCCAAACATGTAACACC |
| I14_1 | Hyseq_ | CCTTTTGAAACTTTTTCTCATGAGCC |
| | soybean_ | ACCCCCCCTTTGCCCCATGCCACCA |
| | EST.nt | CTTCCTTAATCAATTTGGCATGTGGG |
| | (SEQ ID | GGTGGTGAACATGTTGTGGATATAT |
| | NO. 8) | GGTGTGTTTGGTGTGGCTATAATGG |
| | | TATCTTCCTTATCTTTCCATGCTCCTT |
| | | TTCTTTCAAGGCTAAGCGAAAACGCT |
| | | CCTTCTTGAGGGGCGGTTTCTGTTG |
| | | GAAAGGGCAACTTCAATCCTTTGGC |
| | | ATTTTTCAACTCCTCCATCTCACCTC |
| | | ACACACTGTGATTTGGGCTCTTGAG |
| | | GGACATCTCAGAATGGCAACACCCC |
| | | TTTTTATGTGTACCGTACTATTTTCTA |
| | | GTTCTTTTTCTTGTACAACGAAATTTA |
| | | GATGCAGTTTC |
| GM06MC32394_ | soybean | CACGCGTCCGATTCATTCTCGAACC |
| sk51f08 | Hyseq_ | CTCTCCAAACTGCACCCCTTCTCGA |
| | soybean_ | ATAATAGCCCTCGCTGCCTCTGTGG |
| | mefi_ | CAGTGGAGGTGGTGGAGATGCATAT |
| | v6.nt | GGTGCATTTTTGTCGGTGTTTCCTTT |
| | (SEQ ID | TGGTTCAATCATGGTGGAGCATGAA |
| | NO. 9) | TATTATGTAATAAGTTGAAAGATTGC |
| | | TGGGAATGAACCGTTCTTTTTCTTAA |
| | | GGGCGAATTCTCTTCAAAAGGGCAA |
| | | CTTCCATCCTTTGGCATTTTCCAATT |
| | | CCTCGAACTCACTTCACTTTGTGTGT |
| | | GAATCAAGTTCTCAGGGGAACTTTG |
| | | GCAATATATATGTAATATCCCTATAC |
| | | TATGTACTATTAATTGTACTCTTTGTT |
| | | ATCTTGTACTTTGTGTTTAAATTAGAA |
| | | TTGCATTATATATATATATATATATAT |
| | | ATATATATATATATATATATATGTACA |
| | | CTATCAAGTATCAATATGTATGATAT |
| | | GATGCTGCCTAATATATAGTATAATA |
| | | GGCAGCCAATAAATGTTGGTTTTTAG |
| | | AGAACTG |
| GM06MC09408_ | Soybean | TGCTCCCCCTTCTCGAATAACCCTC |
| 52318733 | Hyseq_ | GCTGCCCTCTGTGGTAGTGGAGGTG |
| | soybean_ | GTGGAGATTCATAGATGGTGCGTTT |
| | mefi_ | TTGTCAATGTTTCCTTTTGGTTCAAT |
| | v6.nt | CATGGTCGAGAAAGAATATGTAATAA |
| | (SEQ ID | GTTAAAAGATTGCTGGGAATGACGA |
| | NO. 10) | ACCGTCCTTCTTAAGGGCGAATTCC |
| | | CTCGAAAAGGGCAACTTCCATCCTTT |
| | | GGCATTTTCCAATTAATTCCTCAAAC |
| | | TCACTTCACTTTGTGTGTGAATCAAG |
| | | TTCTCGAAGGAACTTTGGCAATATAG |
| | | TATATAATATCCCTATACTATGTACTA |
| | | TATACTGTACTCTTTGTTATCTTGTAC |
| | | TTTGTGCTTCAATTAGAACTGCATTT |
| | | TATATGTATCAGTGTATCACTATCAA |
| | | CATATATGATATGATACTGCCTACTA |
| | | TATATAGTAGGCAACCAATAAATGTT |
| | | GGTTTTTAGACAAAAAAAAAAAAAAA |
| | | AAGGGGCCGCTCTAAAGGATCCAAG |
| | | TTTACGTACGCGGGCTGGCAAAGAA |
| | | AAACTTTTT |
| 53230190.f_ | Soybean | CTTAACCAATTTGGCATGTGGGGGT |
| b11_1 | Hyseq_ | GGTGGACATGTTGTGGATGGTGTGT |
| | soybean_ | TTTGGTGTGGCTATAATGGTATCCTC |
| | EST.nt | CTTATCTTTCCATGCTCCTTTTCTTTC |
| | (SEQ ID | AAGGCTATGCTAAAACGCTCCTTCTT |
| | NO. 11) | GAGGGCGGCTTCTCTTGGAAAGGG |
| | | CAACTTCAATCCTTTGGCATTTTTCA |
| | | ACTCCTCCACCTCACTTCACACACTG |
| | | TGATTTGGGCTCTTGAGGGACCTCT |
| | | CAGAATGGCAACACCCCTTTTATGT |
| | | GTACCGTACTCTCTTCTAGTTCTTTT |
| | | CTTGTACAACAAAATTTAGATGCAGT |
| | | TTCTTACATGTTGGTGTTGCTTTCTA |
| | | ATCAAAATTGGAGTTTTACCTTGGTG |
| | | GCACCCAGATTATCGAGGTAAAACT |
| | | CTGATTGTGATAGAAAAATGACACCA |
| | | AAAACACT |
| 52202528.f_ | Soybean | ATTGCTGGGAATGACGAACCGTCCT |
| f03_1 | Hyseq_ | TCTTAAGGGCGAATTCCCTCGAAAA |
| | soybean_ | GGGCAACTTCCATCCTTTGGCATTTT |
| | EST.nt | CCAATTAATTCCTCAAACTCACTTCA |
| | (SEQ ID | CTTTGTGTGTGAATCAAGTTCTCGAA |
| | NO. 12) | GGAACTTTGGCAATATAGTATATAAT |
| | | ATCCCTATACTATGTACTATATACTG |
| | | TACTCTTTGTTATCTTGTACTTTGTG |
| | | CTTCAATTAGAACTGCATTTTATATG |
| | | TATCAGTGTATCACTATCAACATATA |
| | | TGATATGATACTGCCTACTATATATA |
| | | GTAGGCAACCAATAAATGTTGGTTTT |
| | | TAGACAAAAAAAAAAAAAAAAAGGG |
| | | GCCGCTCTAAAGGATCCAAGTTTAC |
| | | GTACGCGGGCTGGCAAAGAAAAACT |
| | | TTTT |

The 24 nt sequence having a motif similar to TAGGGCAACTTNNNTCCTTTGGCA (SEQ ID NO. 30) is underlined in each sequence.

Artificial miR159 Target Mimic.

[0172] To create a sequence that when expressed in soy will act as a target for endogenous miR159 miRNAs, sequence GM06MC32536_sk84d08 was modified as follows:
[0173] 1. The sequence GTTTCTGTTGGAAAGGGCAACTTCAATCCTTTGGCATTTTTCAA (SEQ ID NO. 45) spanning nucleotides 287-330 of GM06MC32536_sk84d08 and including the motif similar to SEQ ID NO. 30 (underlined) was replaced with sequence GTTTCTGTTGGATAGAGCTCCCTCAATCAATCCAAATTTTTCAA (SEQ ID NO. 46) containing a miR159 target site.
[0174] 2. The 91 nt poly(A) tail spanning nucleotides 760-850 in GM06MC32536_sk84d08 was deleted.

[0175] The final miR159 target sequence (Gm miR159-trap) is as follows with the miR159 target site underlined.

(SEQ ID NO. 47)
AGAAACAAAATCCCTATAACACCCAATCCTAGCTACAACTTCAAACCCTC
TCTGAATTGCACCACCCCCATCATCCCAAACATGTAACACCCCTTTTGAA
ACTTTTTCTCATGAGCCACCCCCCCTTTGCCCCATGCCACCACTTCCTTA
ATCAATTTGGCATGTGGGGGTGGTGAACATGTTGTGGATATATGGTGTGT
TTGGTGTGGCTATAATGGTATCTTCCTTATCTTTCCATGCTCCTTTTCTT
TCAAGGCTAAGCGAAAACGCTCCTTCTTGAGGGGCGGTTTCTGTTGGATA
GAGCTCCCTCAATCAATCCAAATTTTTCAACTCCTCCATCTCACCTCACA
CACTGTGATTTGGGCTCTTGAGGGACATCTCAGAATGGCAACACCCCTTT
TTATGTGTACCGTACTATTTTCTAGTTCTTTTTCTTGTACAACGAAATTT
AGATGCAGTTTCTTAGATGTTGGTGTTGTTTTTTAATCAAAATTAGAGTT
TTATCTTGATAGTACCGGATTATCAAGGTAAAACTCTGATTCTTATCAGA
AAATGGCACCAAAAATACTTTAAGAACTGTATGCAAGTTTTTTGTTGTTT
TTTTTTGGTAATTCTTGTTTGTGATGTGATGATTTCAACTGCAAACTATG
CCTATCAGTATGGTTACCATAGACTATATGTTATCTAATAAATTTACATT
TGAATAGGCCTTTGGCCAAAATGTATTATTGTTGTCGTTAATATGAATAT
GGTTAAATC

[0176] The miR159 target site is complementary to known soy miR159 family members in soy with a 3 nt bulge in the target sequence between bases 10 and 11 from the 5′ end of the miRNA.

[0177] miRNA sequences were obtained from miRbase (www.mirbase.org). RNA sequences are shown.

Target site in Gm miR159-trap
(SEQ ID NO. 48)
5′UAGAGCUCCCUCAAUCAAUCCAAA3′
gma-MIR159a
(SEQ ID NO. 49)
3′AUCUCGAGGGA AGUUAGGUUU5′
gma-MIR159b
(SEQ ID NO. 50)
3′ACCUCGAGGGA AGUGAGGUUA5′
gma-MIR159c
(SEQ ID NO. 51)
3′GCCUCGAGGGA AGUGAGGUUA5′

[0178] The Gm miR159-trap sequence was synthesized and cloned into a binary vector that contained the soy transformation selectable marker AtAHASL2_A122T/S653N to create plasmide RTP4811-1qcz (Seq ID No.13). In RTP4811-1qcz. Gm miR159-trap was expressed under control of the Super promoter from BPS-LU and NOS terminator and AtAHASL2_A122T/S653N was expressed under control of the PcUbi4-2 promoter and AtAHAS-3′/UTR[ac321] terminator.
[0179] Partial sequence of RTP4811-1 from bases 4071 to 6215, including the elements p-SUPER (bases 4071-5182), c-Gm miR159-TRAP (bases 5191-5949), and t-NOS (bases 5963-6215) is presented as SEQ ID NO. 52.
[0180] Artificial miR159 target mimic control for soy (gma-miRandom1 target mimic).

[0181] To create a sequence that when expressed in soy will act as a control for Gm miR159-TRAP, sequence GM06MC32536_sk84d08 was modified as follows:
[0182] 1. The sequence GTTTCTGTTGGAAAGGGCAACTTCAATCCTTTGGCATTTTTCAA (SEQ ID NO. 53) spanning nucleotides 287-330 of GM06MC32536_sk84d08 and including the motif similar to SEQ ID NO. 30 (underlined) was replaced with sequence GTTTCTGTTGGATGACTACGGTTCAAATACCTGTAATTTTTCAA (SEQ ID NO. 54) containing a miR159 target site.
[0183] 3. The 91 nt poly(A) tail spanning nucleotides 760-850 in GM06MC32536_sk84d08 was deleted.

[0184] The sequence of the control (gma-miRandom1 target mimic) is identical to Gm miR159-trap except the target region has been modified so that it will not bind any known soy microRNA.

[0185] The final miRandom target sequence (gma-miRandom1 target mimic, SEQ ID NO. 14) is as follows with the miRandom target site underlined.

(SEQ ID NO: 14)
AGAAACAAAATCCCTATAACACCCAATCCTAGCTACAACTTCAAACCCTC
TCTGAATTGCACCACCCCCATCATCCCAAACATGTAACACCCCTTTTGAA
ACTTTTTCTCATGAGCCACCCCCCCTTTGCCCCATGCCACCACTTCCTTA
ATCAATTTGGCATGTGGGGGTGGTGAACATGTTGTGGATATATGGTGTGT
TTGGTGTGGCTATAATGGTATCTTCCTTATCTTTCCATGCTCCTTTTCTT
TCAAGGCTAAGCGAAAACGCTCCTTCTTGAGGGGCGGTTTCTGTTGGATG
ACTACGGTTCAAATACCTGTAATTTTTCAACTCCTCCATCTCACCTCACA
CACTGTGATTTGGGCTCTTGAGGGACATCTCAGAATGGCAACACCCCTTT
TTATGTGTACCGTACTATTTTCTAGTTCTTTTTCTTGTACAACGAAATTT
AGATGCAGTTTCTTAGATGTTGGTGTTGTTTTTTAATCAAAATTAGAGTT
TTATCTTGATAGTACCGGATTATCAAGGTAAAACTCTGATTCTTATCAGA
AAATGGCACCAAAAATACTTTAAGAACTGTATGCAAGTTTTTTGTTGTTT
TTTTTTGGTAATTCTTGTTTGTGATGTGATGATTTCAACTGCAAACTATG
CCTATCAGTATGGTTACCATAGACTATATGTTATCTAATAAATTTACATT
TGAATAGGCCTTTGGCCAAAATGTATTATTGTTGTCGTTAATATGAATAT
GGTTAAATC

[0186] The gma-miRandom1 target mimic sequence was synthesized and cloned into a binary vector that contained the soy transformation selectable marker AtAHASL2_A122T/S653N to create plasmid RTP4808-1qcz (SEQ ID NO.15). In RTP4811-1qcz. gma-miRandom1 was expressed under control of the Super promoter from BPS-LU and NOS terminator and AtAHASL2_A122T/S653N was expressed under control of the PcUbi4-2 promoter and AtAHAS-3′/UTR[ac321] terminator.

[0187] Partial sequence of RTP4808-1 from bases 3593 to 5737, including the elements p-SUPER (bases 3593-4704), gma-miRandom1 target mimic (bases 4713-5471), and t-NOS (bases 5485-5737) is presented as SEQ ID NO. 55.

[0188] RTP4811-1 and RTP4808-1 soybean transgenic root lines were generated and RNA was extracted.

[0189] CO984960 is a predicted target of miR159 in soybean. Taqman probes were designed for CO984960 and the expression level was determined by quantitative RT-PCR in the RNA isolated from each root line.
[0190] The least squares mean for each population is reported in table 12 for gene CO984960. The p-values between the RTP4811-1 and RTP4808-1 are reported in table 13 demonstrating the higher expression levels of CO984960 in roots expressing Gm miR159-trap vs. gma-miRandom1 target mimic is significant.

TABLE 12
Relative expression of CO984960 from transgenic soybean roots

Relative CO984960 expression

| group | Least squares mean | Standard Error |
|---|---|---|
| RTP4808-1 | 5.33 | 1.35 |
| RTP4811-1 | 16.40 | 1.04 |

TABLE 13
Pvalue of relative expression of CO984960 from
transgenic soybean roots

| | pvalue |
|---|---|
| RTP4808-1 | 1.4E−05 |

Soy Target Mimic for Multiple microRNAs

[0191] To create a sequence that when expressed in soy will act as a target for multiple endogenous soy miRNAs, two GM06MC32536_sk84d08 sequences can be synthesized in tandem. The 91 nt poly(A) tail spanning nucleotides 760-850 in GM06MC32536_sk84d08 is deleted. The motif similar to SEQ ID NO. 30 can be replaced with a sequence that can potentially sequester any endogenous microRNA.

[0192] The following is an example of the stacked GM06MC32536_sk84d08 sequences with modifications to allow the transcript to act as a target mimic for miR159 and miR167. The final miR159 and miR167 target sequences (Gm miR159/miR167-trap, SEQ ID NO.16) is as follows with the miR159 and miR167 target sites underlined, respectively. The sequence includes the elements p-SUPER (bases 1-1112), gma-miR159/miR167 target mimic (bases 1113-2638), and t-NOS (bases 2639-2891).

(SEQ ID NO: 56)
GGATCCCTGAAAGCGACGTTGGATGTTAACATCTACAAATTGCCTTTTCTTATCGACCA
TGTACGTAAGCGCTTACGTTTTTGGTGGACCCTTGAGGAAACTGGTAGCTGTTGTGGG
CCTGTGGTCTCAAGATGGATCATTAATTTCCACCTTCACCTACGATGGGGGGCATCGC
ACCGGTGAGTAATATTGTACGGCTAAGAGCGAATTTGGCCTGTAGGATCCCTGAAAGC
GACGTTGGATGTTAACATCTACAAATTGCCTTTTCTTATCGACCATGTACGTAAGCGCT
TACGTTTTTGGTGGACCCTTGAGGAAACTGGTAGCTGTTGTGGGCCTGTGGTCTCAAG
ATGGATCATTAATTTCCACCTTCACCTACGATGGGGGGCATCGCACCGGTGAGTAATA
TTGTACGGCTAAGAGCGAATTTGGCCTGTAGGATCCCTGAAAGCGACGTTGGATGTTA
ACATCTACAAATTGCCTTTTCTTATCGACCATGTACGTAAGCGCTTACGTTTTTGGTGG
ACCCTTGAGGAAACTGGTAGCTGTTGTGGGCCTGTGGTCTCAAGATGGATCATTAATT
TCCACCTTCACCTACGATGGGGGGCATCGCACCGGTGAGTAATATTGTACGGCTAAGA
GCGAATTTGGCCTGTAGGATCCGCGAGCTGGTCAATCCCATTGCTTTTGAAGCAGCTC
AACATTGATCTCTTTCTCGATCGAGGGAGATTTTTCAAATCAGTGCGCAAGACGTGACG
TAAGTATCCGAGTCAGTTTTTATTTTTCTACTAATTTGGTCGTTTATTTCGGCGTGTAGG
ACATGGCAACCGGGCCTGAATTTCGCGGGTATTCTGTTTCTATTCCAACTTTTTCTTGA
TCCGCAGCCATTAACGACTTTTGAATAGATACGCTGACACGCCAAGCCTCGCTAGTCA
AAAGTGTACCAAACAACGCTTTACAGCAAGAACGGAATGCGCGTGACGCTCGCGGTG
ACGCCATTTCGCCTTTTCAGAAATGGATAAATAGCCTTGCTTCCTATTATATCTTCCCAA
ATTACCAATACATTACACTAGCATCTGAATTTCATAACCAATCTCGATACACCAAATCGA
AGAAACAAAATCCCTATAACACCCAATCCTAGCTACAACTTCAAACCCTCTCTGAATTG
CACCACCCCCATCATCCCAAACATGTAACACCCCTTTTGAAACTTTTTCTCATGAGCCA
CCCCCCCTTTGCCCCATGCCACCACTTCCTTAATCAATTTGGCATGTGGGGGTGGTGA
ACATGTTGTGGATATATGGTGTGTTTGGTGTGGCTATAATGGTATCTTCCTTATCTTTCC
ATGCTCCTTTTCTTTCAAGGCTAAGCGAAAACGCTCCTTCTTGAGGGGCGGTTTCTGTT
GGATAGAGCTCCCTCAATCAATCCAAATTTTTCAACTCCTCCATCTCACCTCACACACT
GTGATTTGGGCTCTTGAGGGACATCTCAGAATGGCAACACCCCTTTTTATGTGTACCGT
ACTATTTTCTAGTTCTTTTTCTTGTACAACGAAATTTAGATGCAGTTTCTTAGATGTTGGT
GTTGTTTTTTAATCAAAATTAGAGTTTTATCTTGATAGTACCGGATTATCAAGGTAAAAC
TCTGATTCTTATCAGAAAATGGCACCAAAAATACTTTAAGAACTGTATGCAAGTTTTTTG
TTGTTTTTTTTTGGTAATTCTTGTTTGTGATGTGATGATTTCAACTGCAAACTATGCCTAT
CAGTATGGTTACCATAGACTATATGTTATCTAATAAATTTACATTTGAATAGGCCTTTGG
CCAAAATGTATTATTGTTGTCGTTAATATGAATATGGTTAAATCGCGGCCGCAGAAACA
AAATCCCTATAACACCCAATCCTAGCTACAACTTCAAACCCTCTCTGAATTGCACCACC
CCCATCATCCCAAACATGTAACACCCCTTTTGAAACTTTTTCTCATGAGCCACCCCCCC
TTTGCCCCATGCCACCACTTCCTTAATCAATTTGGCATGTGGGGGTGGTGAACATGTT
GTGGATATATGGTGTGTTTGGTGTGGCTATAATGGTATCTTCCTTATCTTTCCATGCTC
CTTTTCTTTCAAGGCTAAGCGAAAACGCTCCTTCTTGAGGGGCGGTTTCTGTTGGATAG
ATCATGCTCAAGGCAGCTTCATTTTTCAACTCCTCCATCTCACCTCACACACTGTGATTT
GGGCTCTTGAGGGACATCTCAGAATGGCAACACCCCTTTTTATGTGTACCGTACTATTT
TCTAGTTCTTTTTCTTGTACAACGAAATTTAGATGCAGTTTCTTAGATGTTGGTGTTGTT
TTTTAATCAAAATTAGAGTTTTATCTTGATAGTACCGGATTATCAAGGTAAAACTCTGAT
TCTTATCAGAAAATGGCACCAAAAATACTTTAAGAACTGTATGCAAGTTTTTTGTTGTTT
TTTTTTGGTAATTCTTGTTTGTGATGTGATGATTTCAACTGCAAACTATGCCTATCAGTA
TGGTTACCATAGACTATATGTTATCTAATAAATTTACATTTGAATAGGCCTTTGGCCAAA
ATGTATTATTGTTGTCGTTAATATGAATATGGTTAAATCGATCGTTCAAACATTTGGCAA
TAAAGTTTCTTAAGATTGAATCCTGTTGCCGGTCTTGCGATGATTATCATATAATTTCTG
TTGAATTACGTTAAGCATGTAATAATTAACATGTAATGCATGACGTTATTTATGAGATGG
GTTTTTATGATTAGAGTCCCGCAATTATACATTTAATACGCGATAGAAAACAAAATATAG
CGCGCAAACTAGGATAAATTATCGCGCGCGGTGTCATCTATGTTACTAGATC

Target Mimic for Downregulation of Multiple miRNAs:

[0193] To create a sequence that when expressed in a monocot will act as a target for multiple endogenous small regulating RNAs, two Gm miR166-trap sequences (Table 2) can be expressed in tandem as one transcript with each sequence containing a target site for a different small regulating RNA. In table 9, is a tandem construct with target sites for miR166 (first 24nt sequence underlined) and miR159 (second 24 nt sequence underlined).

[0194] The Gm miR159-trap/Gm miR167-trap sequence was synthesized and cloned into a binary vector that contained the soy transformation selectable marker AtAHASL2_A122T/S653N to create plasmid RWT1000 (SEQ ID NO.17). In RWT1000. Gm miR159-trap/Gm miR167-trap was expressed under control of the Super promoter from BPS-LU and NOS terminator and AtAHASL2_A122T/S653N was expressed under control of the PcUbi4-2 promoter and AtAHAS-37UTR[ac321] terminator.

### Example 3

### Suppressing Endogenous miRNA Activity via miRNA Trap

[0195] The concept of this miRNA trap is to embed a modified miRNA binding site in the 3′ untranslated region of transgene expression cassette. The modification is to insert a few (e.g. three) nucleotides between position 10 and 11 of the miRNA where cleavage of target mRNA by miRNA is normally taken place. Because of three extra nucleotide insertion at the cleavage site, miRNA would still bind to the modified site (or miRNA trap) but is incapable of cleaving target mRNA. Thus, miRNA trap serves as a ‘sink’ to sequester or suppress endogenous miRNA activity.

[0196] Construct RPR44 (SEQ ID NO. 18) carrying an expression cassette consist of dsRed reporter gene under the control of sugarcane bacilliform virus promoter and nopaline synthase (NOS) terminator. Between the stop codon of dsRed, TAG, and NOS terminator, a 24-nt DNA fragment (5′ AAGGGGTGACCTAAGAACACCACC 3′ (SEQ ID NO. 57)) complimentary to miR398a.

[0197] miRNA profiling with miRNA specific assays developed by Applied Biosystem on a range of wild-type maize tissues indicated that miR398a is highly expressed in embryo, weak in endosperm and not in leaf, root and tassel. Analysis of transgenic maize events transformed with RPR44 indicated significant reduction in dsRed fluorescence in embryo but not in endosperm, root and tassel indicated a reciprocal correlation of dsRed and miRNA398a expression, i.e. miR398a recognizes its binding site in the 3′ untranslated region of dsRed expression cassette and cleaves dsRed mRNA in the embryo. Reduction of dsRed expression in leaf was unexpected, likely due to expression of other miR398a family members in the leaf that were not detected by miR398a assay.

[0198] Construct RTP3429-9qcz (SEQ ID NO.19) was identical to RPR44 except three nucleotides, CTA, was incorporated into 24-nt DNA fragment at miR398a cleavage site, i.e. 5′ AAGGGGTGACCCTATAAGAACACC 3′ (SEQ ID NO. 58) (miR398a trap). As a result, a bulge is formed between miR398a and miR398a trap causing dsRed transcripts uncleavable by miR398a.
[0199] RTP3429-9qcz was transformed into maize. dsRed expression from leaf of T0 transgenic events was analyzed. At least 20% of events had strong dsRed expression in leaf and rest of events had weak dsRed expression judged by fluorescence. This result suggested that miR398a binds to modified miR398a site without cleaving the transcript. Thus, miRNA trap approach is capable to suppress endogenous miRNA activity.

### Example 4

### Suppressing Endogenous miRNA Activity by Using an Antisense Transcript of the miRNA Precursor

[0200] The method is to capture specific miRNAs and up-regulate the miRNA targets. By over expressing the complementary strand of an endogenous pre-miRNA, the effective concentration of the endogenous miRNA available to cleave its natural targets is reduced. The first possible mode of action for complementary transcript is to form double-stranded RNA with endogenous pre-miRNA and result in silencing of pre-miRNA. The second possible mode of action for complementary transcript is to serves as an additional cleavage target for mature miRNA. Since the complement is expressed at a high level it becomes the dominant target by the miRNA essentially sequestering it away from the endogenous targets. Both mode of actions result in the up-regulation of the endogenous mRNA targeted by miRNA.

### Construct Design and Construction

[0201] The genomic DNA fragments complementary to miRNA precursors were identified from Arabidopsis genome (www.arabidopsis.org). Using Primer 3 software, a set of specific PCR primers were generated for PCR amplifying each DNA fragment. Through Gateway cloning strategy, PCR products were cloned into entry vectors first, then into destination or binary vectors. The complements of six known pre-miRNAs were selected for analysis (Table 14). Expression of pre-miRNA complement is under the control of parsley ubiquitin promoter.

TABLE 14
Summary of constructs and miRNA precursors
targeted by antisense transgene

| RCB | | Complement | |
|---|---|---|---|
| Construct | Transgene | of: | Validated Targets of miRNA |
| RCB346 | AT_P_MIR11 | pre-miR393a | At1g12820 At3g26810 |
| | | | At3g23690 At3g62980 |
| | | | At4g03190 |
| RCB383 | AT_P_MIR60 | pre-miR396b | At2g22840 At2g36400 |
| | | | At2g45480 At4g24150 |
| | | | At4g37740 At5g53660 |
| RCB478 | ATint1070848 | pre miR167b | At1g30330 At5g37020 |
| RCB493 | ATint1445292 | pre-miR166 | At1g30490 At1g52150 |
| | | | At2g34710 At5g60690 |
| | | | At4g32880 |

[0202] In RCB346 (SEQ ID NO.20), the transgene AT_P_MIR11 was expressed under the control of the PcUbi4-2 promoter and the NOS terminator. The selectable marker for plant transformation, the BAR gene, was expressed under the control of the NOS promoter and the NOS terminator.

[0203] Partial sequence of RCB346 from bases 7039-9489 including elements p-PcUbi4-2 (bases 7039-7363), AT_P_MIR11 (bases 8083-9194), and t-NOS (bases 9237-9489) is presented as SEQ ID NO. 59.

[0204] In RCB371 (SEQ ID NO.21), the transgene AT_P_MIR44 was expressed under the control of the PcUbi4-2 promoter and the NOS terminator. The selectable marker for plant transformation, the BAR gene, was expressed under the control of the NOS promoter and the NOS terminator.

[0205] Partial sequence of RCB371 from bases 7039-8856 including elements p-PcUbi4-2 (bases 7039-7363), AT_P_MIR44 (bases 8083-8561), and t-NOS (bases 8604-8856) is presented as SEQ ID NO. 60.

[0206] In RCB383 (SEQ ID NO.22), the transgene AT_P_MIR60 was expressed under the control of the PcUbi4-2 promoter and the NOS terminator. The selectable marker for plant transformation, the BAR gene, was expressed under the control of the NOS promoter and the NOS terminator.

[0207] Partial sequence of RCB383 from bases 7039-9293 including elements p-PcUbi4-2 (bases 7039-7363), AT_P_MIR60 (bases 8083-8998), and t-NOS (bases 9041-9293) is presented as SEQ ID NO. 61.

[0208] In RCB388 (SEQ ID NO.23), the transgene AT_P_MIR68 was expressed under the control of the PcUbi4-2 promoter and the NOS terminator. The selectable marker for plant transformation, the BAR gene, was expressed under the control of the NOS promoter and the NOS terminator.

[0209] Partial sequence of RCB388 from bases 7039-9258 including elements p-PcUbi4-2 (bases 7039-7363), AT_P_MIR68 (bases 8083-8963), and t-NOS (bases 9006-9258) is presented as SEQ ID NO. 62.

[0210] In RCB478 (SEQ ID NO.24), the transgene ATint1070848 was expressed under the control of the PcUbi4-2 promoter and the NOS terminator. The selectable marker for plant transformation, the BAR gene, was expressed under the control of the NOS promoter and the NOS terminator.

[0211] Partial sequence of RCB478 from bases 7038-9409 including elements p-PcUbi4-2 (bases 7039-7362), ATint1070848 (bases 8082-9114), and t-NOS (bases 9157-9409) is presented as SEQ ID NO. 63.

[0212] In RCB493 (SEQ ID NO.25), the transgene ATint1445292 was expressed under the control of the PcUbi4-2 promoter and the NOS terminator. The selectable marker for plant transformation, the BAR gene, was expressed under the control of the NOS promoter and the NOS terminator.

[0213] Partial sequence of RCB93 from bases 7038-9228 including elements p-PcUbi4-2 (bases 7039-7362), ATint1445292 (bases 8082-8933), and t-NOS (bases 8976-9228) is presented as SEQ ID NO. 64.

### Event Development and Selection

[0214] Arabidopsis thaliana ecotype C24 was transformed with approximately 1 kb of the complement strand of an endogenous miRNA gene and six lines were recovered that expressed a complement to a known miRNA. T2 seeds for each of the selected events were sown to selection media. Seedlings were harvested 14 days after sowing (DAS). The seedlings were blotted dry and stored at −80° C. Total RNA was extracted using Trizol per manufacturer's protocol, (Invitrogen, Carlsbad, Calif. (http://www.invitrogen.com/site/us/en/home.html). The RNA was quantified on a Nanodrop 1000 (www.nanodrop.com). The quality of the RNA was confirmed by analysis on the Agilent 2100 Bioanalyser (www.agilent.com)

### Target Selection

[0215] Gene sequences for validated targets of known miRNAs in A. thanliana are available from the Arabidopsis MPSS website, (http://mpss.udel.edu/at/). Analysis of seedling tissue expression was surmised using the expression data provided for each target.

Endogenous miRNA Analysis

[0216] The average expression levels of six miRNAs in complementary transgenics and controls was determined. miR393a also showed a large percentage reduction but was not significant. Analysis of the expression levels of miR396b in the individual lines indicated a range of values while the relative expression levels in the control group was more consistent but reduced from the non-transgenic Col-O control, (Table14).

[0217] The reduction of the endogenous miRNA in each complement event was measured using the ABI method. The change was quantified using a custom designed RT primer for ath-miR396b and ath-miR393a from Applied Biosystems. Quantitative RT-PCR was performed and normalized to the expression of the endogenous snoR101 transcript. Only the expression level of miR396b in the RCB383 transgenic was significantly reduced from 9-46 fold or more than 90%, (FIG. 1, Table 15 and 16). The reduction of miR393a was not significant but showed some impact on a target gene (FIG. 2). As shown in FIG. 1, all three RCB383 events show a significant reduction in expression compared to the control group. The reduction of miR393a was less dramatic and not significant.

TABLE 15
The average relative expression levels of the six miRNAs in
are shown and compared with the levels in the control group
and Columbia-O.

| | | Average Relative Expression | | |
|---|---|---|---|---|
| | | levels of miRNA | | |
| | | Transgenic | Transgenic | |
| Construct | miRNA | Events | Controls | Col-0 |
| RCB346 | ath-miR393a | 0.006 | 0.034 | 0.008 |
| RCB371 | ath-miR169d | 0.187 | 0.175 | 1.783 |
| RCB383 | ath-miR396b | 0.234 | 3.266 | 4.252 |
| RCB388 | ath-miR156a | 5.899 | 5.108 | 10.138 |
| RCB478 | ath-miR167a | 29.749 | 36.406 | 54.435 |
| RCB493 | ath-miR166a | 8.015 | 6.197 | 8.821 |

TABLE 16
The individual relative expression level of miR396b in each plant line is given and
the fold change is determined.

| | | | | | | | | | | fold |
|---|---|---|---|---|---|---|---|---|---|---|
| | | relative | Fold difference compared to transgenic | | | | | | | difference |
| | complementary | expression | standard | | | | | | | compared |
| sample | miRNA | levels | 306-2 | 306-3 | 310-1 | 310-3 | 318-1 | 318-3 | 363-7 | to Col-WT |
| 383-4 | ath-miR396b | 0.12 | 24.94 | 29.56 | 30.58 | 24.31 | 27.68 | 28.18 | 24.06 | 35.21 |
| 383-9 | ath-miR396b | 0.49 | 6.15 | 7.29 | 7.54 | 5.99 | 6.82 | 6.95 | 5.93 | 8.68 |
| 383-10 | ath-miR396b | 0.09 | 33.22 | 39.38 | 40.73 | 32.38 | 36.86 | 37.54 | 32.05 | 46.90 |
| 306-2 | ath-miR396b | 3.01 | | | | | | | | |
| 306-3 | ath-miR396b | 3.57 | | | | | | | | |
| 310-1 | ath-miR396b | 3.69 | | | | | | | | |
| 310-3 | ath-miR396b | 2.94 | | | | | | | | |
| 318-1 | ath-miR396b | 3.34 | | | | | | | | |
| 318-3 | ath-miR396b | 3.40 | | | | | | | | |
| 363-7 | ath-miR396b | 2.91 | | | | | | | | |
| Col-0 | ath-miR396b | 4.25 | | | | | | | | |

### Taqman Analysis

[0218] Taqman assays were devised for each target gene and validated on seedling RNA extracted from Columbia wildtype seedlings. At least two targets were selected for analysis for each complement, (Table 14). Selected targets were screened for a change in expression by TaqMan analysis when compared to the seven controls, (Table17).

TABLE 17
The designation of the seven transgenic controls are provided. None
expressed a complement to a known miRNA nor produced
a phenotype either positive or negative in
either whole plant assay.
Controls

| | | | |
|---|---|---|---|
| RCB306-2 | RCB306-3 | RCB310-1 | RCB310-3 |

| | | |
|---|---|---|
| RCB318-1 | RCB318-3 | RCB363-7 |

[0219] Three replicate of each assay were conducted simultaneously. The values were normalized against actin and an average expression of each in a plant was determined. The results showed little change in expression of the target genes compared to the control group except for two targets on each for RCB383 and RCB346, (Table 18). However at a confidence of 0.1 and 8 degrees of freedom a significant 3-fold increase in the expression of At2G22840 in the RCB383 transgenic and a 1.5-fold increase of At3G26810 in RCB346 transgenics was found. The increase expression of At2G22840 was correlated to the reduction in the endogenous miR396b. The 1.5-fold increase in At3G26810 was not supported by a significantly relevant reduction in the measured expression of miR393a, (Table 19).

TABLE 18
The relative change in expression of the target
gene in the three RCB383
transgenic events compared to the expression
levels in the control group

| A. | | | |
|---|---|---|---|
| | | | Fold |
| | | | Increase in |
| RCB383 | At2G22840 | Ave Exp | Expression |
| RCB383-10 | 0.094 | 0.130 | |
| RCB383-9 | 0.197 | | |
| RCB383-4 | 0.100 | | 2.390 |
| Controls | | | |
| RCB306-2 | 0.144 | 0.054 | |
| RCB306-3 | 0.088 | | |
| RCB310-1 | 0.035 | | |
| RCB310-3 | 0.028 | | |
| RCB318-1 | 0.018 | | |
| RCB318-3 | 0.013 | | |
| RCB363-7 | 0.056 | | |
| B. | | | |
| | | | Fold |
| | | | Increase in |
| RCB346 | At3G62980 | Ave Exp | Expression |
| RCB346-7 | 0.378 | 0.305 | |
| RCB346-3 | 0.250 | | |
| RCB346-5 | 0.287 | | 1.452 |
| Controls | | | |
| RCB306-2 | 0.298 | 0.210 | |
| RCB306-3 | 0.249 | | |
| RCB310-1 | 0.166 | | |
| RCB310-3 | 0.130 | | |
| RCB318-1 | 0.173 | | |
| RCB318-3 | 0.192 | | |
| RCB363-7 | 0.263 | | |

TABLE 19
The table shows the average relative change in expression of the
target genes in the transgenic events compared to the transgenic
controls. The ratio of expression reflects the change in the
expression of the target gene in the transgenic event. Values
greater than 1 indicate an increase in expression while values
less than one indicate a decrease in expression. Only changes
with a probability less than 0.1 are considered significant when
taken in conjunction to the ration of expression.

| Target | | | | |
|---|---|---|---|---|
| gene | Construct | miRNA | Probt | Ratio |
| At1G12820 | RCB346 | miR393a | 0.8891 | 0.981 |
| At3G23690 | RCB346 | miR393a | 0.9400 | 0.984 |
| At3G26810 | RCB346 | miR393a | 0.3888 | 0.912 |
| At3G62980 | RCB346 | miR393a | 0.0714 | 1.493 |
| At4G03190 | RCB346 | miR393a | 0.7460 | 1.045 |
| At2G22840 | RCB383 | miR396b | 0.0651 | 3.227 |
| At2G36400 | RCB383 | miR396b | 0.1898 | 1.386 |
| At4G37740 | RCB383 | miR396b | 0.4427 | 1.128 |
| At5G53660 | RCB383 | miR396b | 0.4125 | 0.673 |
| At1G30330 | RCB478 | miR4167b | 0.9046 | 1.015 |
| At5G37020 | RCB478 | miR4167b | 0.2881 | 1.476 |
| At2G34710 | RCB493 | miR166 | 0.4824 | 0.426 |
| At4G32880 | RCB493 | miR166 | 0.2918 | 1.647 |

### Analyze Small RNA Production in Transgenic Events by Deep Sequencing

[0220] RNA from RCB346 and RCB383 was deep sequenced for small RNAs. Both libraries were sequenced to similar depth with the RCB383 library being 97% that of the RCB346 library, (Table 6). The libraries were mapped to their respective genomes and transgenes. Since the transgene is the complement of a native gene a portion of the small RNA pool is expected to arise from the expression of the native gene. The portion of the small RNA pool expected from the native contribution was determined by cross mapping to the other construct. RCB346 was mapped onto RCB383 and 568 copies of pre-miR396b were found. RCB383 was mapped to RCB346 and 1218 copies of pre-miR393a were found. The overall contribution to the transgene small RNA pool was found to be quite small and primarily restricted to the miRNA and miRNAstar sequences. The deep sequencing results showed an approximate 75% reduction in the level of miR396b in RCB 383 when compared to miR396b levels in RCB346. The reduction was significant using a

[0221] Chi Sq test to a p=5-E54. The overall numbers of miR393a in RCB346 and RCB383 were too small to provide an adequate assessment.

TABLE 20
Summary of small RNA analysis

| | | Total | Total | | | | | |
|---|---|---|---|---|---|---|---|---|
| | | small | small | | | | | |
| | | RNAs | RNAs | | | | | |
| | | from the | from | | | % | | % |
| | Total | Endogenous | the | | | Reduction | | Reduction |
| | small | & | Endogogenous | Native | | of | | of |
| Construct | RNAs | Transgene | Gene | miR156 | miR396b | miR396b | miR393a | miR393a |
| RCB383 | 13760979 | 8890 | 568 | 112617 | 130 | 74.7% | 9 | |
| RCB346 | 14268140 | 12912 | 1815 | 125030 | 514 | | 1 | 88.9% |

### SUMMARY

[0222] Quantification of the Reduction of an Endogenous miRNAs

[0223] Analysis was conducted on all of the events determining the impact on the endogenous levels of the known miRNAs. RCB383 expresses the complement of miR396b and RCB346 expresses the complement of miR393a. A significant reduction in miR396b levels was found in the RCB383 transgenics. The ABI assay showed a significant 90% reduction while the deep sequencing results mirrored this with a 75% reduction. This indicates that the complement transcript served as a target sink resulting in the reduction in the miR396b levels. This reduction in the levels of miR396b resulted in an up regulation of the target gene At2g22840. A reduction in miR393a was found in RCB346 but the reduction was not significant. The deep sequencing results indicate that the natural levels of miR393a may be too small to make a meaningful determination of effectiveness.

[0224] The results here indicate that expressing the complementary strand of an endogenous miRNA serves as a means to reduce the expression levels of the endogenous miRNA. The sequestering of the miRNAs results in an up regulation of the expression of the natural targets of these miRNAs.

### Example 5

### Suppressing Endogenous Small Regulating RNA Activity in Dicots via Target Mimics.

[0225] The Arabidopsis IPS1 gene (Nature Genetics 2007. 39:1033-37.) that is reported to sequester the miRNA miR399 can be modified to down-regulate other endogenous small regulating RNAs other than miRNAs. Small regulating RNAs that can be down-regulated by target mimicry include nat-siRNAs, long siRNAs, and tasiRNAs.

Arabidopsis miR399 Target Mimic

| Sequence name | source | sequence |
|---|---|---|
| IPS1 target mimic | Arabidopsis | aagaaaaatggccatcccctagctaggtgaagaag |
| (SEQ ID NO: 26) | | aatgaaaacctctaatttatctagaggttattcatctttta |
| | | ggggatggcctaaatacaaaatgaaaactctctaatt |
| | | aagtggttttgtgttcatgtaaggaaagcgttttaagat |
| | | atggagcaatgaagactgcagaaggctgattcaga |
| | | ctgcgagttttgtttatctccctctagaaattgggcaact |
| | | tctatcctttggcaagcttcggttcccctcggaatcagc |
| | | agattatgtatctttaattttgtaatactctctctcttctctat |
| | | gctttgtttttcttcattatgtttgggttgtacccactcccgc |
| | | gcgttgtgtgttctttgtgtgaggaataaaaaaatattc |
| | | ggatttgagaactaaaactagagtagttttattgatatt |
| | | cttgtttttcatttagtatctaataagtttggagaatagtc |
| | | agaccagtgcatgtaaatttgcttccgattctctttatag |
| | | tgaattcctc |

The 24 nt having a motif similar to TAGGGCAACTTNNNTCCTTTGGCA (SEQ ID NO. 30) is underlined.

Artificial Target Mimic for nat-siRNA (SRO5-P5CDH)

[0226] To create a sequence that when expressed in soy will act as a target for endogenous nat-siRNA (SRO5-P5CDH), sequence IPS1 target mimic was modified as follows:
[0227] 4. The sequence CTAGAAATTGGGCAACTTCTATCCTTTGGCAAGCTTCG (SEQ ID NO. 65) spanning nucleotides 211-248 of IPS1 and including the motif similar to SEQ ID NO. 30 (underlined) was replaced with sequence CTAGAAAGGGGACCCGAGAGGCTAGGCCGGGATAAGCTTCG (SEQ ID NO: 27) containing a nat-siRNA (SRO5-P5CDH) target site.

[0228] The nat-siRNA (SRO5-P5CDH) target site is complementary to known nat-siRNA (SRO5-P5CDH) in Arabidopsis with a 3 nt bulge in the target sequence between bases 10 and 11 from the 5′ end of the miRNA.

Target site in nat-siRNA (SRO5-P5CDH)-trap
(SEQ ID NO. 66)
5′GGGGACCCGAGAGGCTAGGCCGGGATA 3′
nat-siRNA (SR05-P5CDH)
(SEQ ID NO. 67)
3′CCCCTGGGCTCTCC CCGGCCCTAT 5′

Artificial Target Mimic for the Long siRNA, AtlsiRNA-1

[0229] To create a sequence that when expressed in soy will act as a target for endogenous AtlsiRNA-1, sequence IPS1 target mimic was modified as follows:
[0230] 1. The sequence CTAGAAATTGGGCAACTTCTATCCTTTGGCAAGCTTCG (SEQ ID NO. 68) spanning nucleotides 211-248 of IPS1 and including the motif similar to SEQ ID NO. 30 (underlined) was replaced with sequence TAGAAAATCATCCAAAGTACAGTAACAGGCGATCTTCAGAACCAGAAGCATCTG TTCATCG AGCTTCG (SEQ ID NO:28) containing an AtlsiRNA-1 target site.

Target site in AtisiRNA-1-trap
(SEQ ID NO. 69)
5′ATCATCCAAAGTACAGTAACAGGCGATCTTCAGAACCAGAAGCATCTGTTCATCG 3′
Atisi RNA-1
(SEQ ID NO. 70)
3′TAGTAGGTTTCATGTCATTGTCCGCTAGAAGTCTTGGTCTTCGTAGACAAGTAGC 5′

Artificial Target Mimic for D7 and D8 tasiRNAs From Arabidopsis and Maize TAS3 Gene

[0231] To create a sequence that when expressed in soy will act as a target for endogenous D7 and D8 tasiRNAs from the Arabidopsis TAS3 gene, sequence IPS1 target mimic was modified as follows:

D7 tasiRNA Target Mimic
[0232] 1. The sequence CTAGAAATTGGGCAACTTCTATCCTTTGGCAAGCTTCG (SEQ ID NO. 71) spanning nucleotides 211-248 of IPS1and including the motif similar to SEQ ID NO. 30 (underlined) was replaced with sequence TAGAAA GGGGTCTTAGACTAAAGGTCAAGAA AGCTTCG (SEQ ID NO: 29) containing a D7 tasiRNA target site.

Target site in D7 tasiRNA-trap
(SEQ ID NO. 72)
5′GGGGTCTTAGACTAAGGTCAAGAA 3′
D7 tasiRNA
(SEQ ID NO. 73)
3′CCCCAGAATCT TCCAGTTCTT 5′

D8 tasiRNA Target Mimic
[0233] 1. The sequence CTAGAAATTGGGCAACTTCTATCCTTTGGCAAGCTTCG (SEQ ID NO. 74) spanning nucleotides 211-248 of IPS1and including the motif similar to SEQ ID NO. 30 (underlined) was replaced with sequence TAGAAA GAGGCCTTACACTAAGGTCAAGAA AGCTTCG (SEQ ID NO. 75) containing a D8 tasiRNA target site.

Target site in D8 tasiRNA-trap
(SEQ ID NO. 76)
5′GAGGCCTTACACTAAGGTCAAGAA 3′
D8 tasiRNA
(SEQ ID NO. 77)
3′CTCCGGAATGT TCCAGTTCTT 5′

### Example 6

### Comparison of Use of Anti-Sense Approach vs dsRNA Approach to Down-Regulate Endogenous miRNA Expression

[0234] RWT200 (SEQ ID NO: 16345) is constructed to test antisense approach. Soybean Glycine max miR159 precursor (Gm pre-miR159a) is about 800 bp long which contains Gm miR159a and miR159a star sequences. A DNA fragment encoding antisense transcript of Gm pre-miR159a without Gm miR159 site (21 nt) is synthesized. Such fragment is then cloned into a binary vector to make RWT200 which expresses antisense transcripts of Gm pre-miR159a under the control of Super promoter and NOS terminator.

[0235] RWT201 (SEQ ID NO: 16346) is constructed to test dsRNA approach. First, a 400-bp DNA fragment encoding antisense transcript of partial Gm pre-miR159a is synthesized with Aat II and Pac I sites at each end, respectively. Second, a 400-bp DNA fragment encoding sense transcript of partial Gm pre-miR159a is synthesized with Xho I and Pac I sites at each end, respectively. The sense and antisense fragments are completely complimentary to each other in sequence. Third, a 266-bp DNA fragment or loop is generated which has AscI and XhoI sites at each end, respectively. Forth, a binary vector is linearized with AatII and PacI which cuts between the Super promoter and the NOS terminator; Finaly, all four DNA fragments (antisense, loop, sense and binary vector) are ligated simultaneously with compatible restriction sites between the fragments in single reaction to form RWT201. This dsRNA vector produces an RNA molecule with a secondary hairpin structure with a 400 base pair stem homologous to the primary Glycine max miR159a transcript and a stem loop that is 266 base pairs.

[0236] RW200 and RW201 are transformed into soybean respectively. Transgenic roots are harvested and total RNA is extracted. The expression of Gm miR159a from transgenic soy plants transformed with RWT200 and RW201 respectively is determined by qRT-PCR. The result indicates that antisense approach using RWT200 is more effective than dsRNAi approach using RWT201 in down-regulation of Gm miR159a expression.

The application's sequence listing, which the Patent Office published only in electronic form, follows.

SEQUENCE LISTING (16346 sequences)

SEQ ID NO: 1 - DNA, 574 bp, Zea mays
  ZM06MC40391_TD146076974 rc
aggcttgctatagctggtccatggcaccatacatgtaagcacgcacacaggcacacacacacacgcacgcaatgatctacgtatctagcagcagcttatcatgtcgtcatcatgcatgcatggccgacggaggtcgtcatcttatctgggagcgtgtgtgtcttggcaatgggaagctgcatgcgcctctcgggcgtcggcgcgtcggcgcctagctgtagggcggcgtgccatagagctgcctcctgccgctcacaccatgctgttgacgaggactgatggtggtcatggcctctcggcgtcggtggcggcggcgccggcgccgagttttacctctctactaaggtagggcaacttgtatcctttggcaattgttctcatctatctgggtctgtctgttggctgcccggtgacggtatacggtgatgttctaatagtactcaattggtcttggatcggagttcatgctacggctcctctgttatatattacacggctgacggctccttattaatgtgtccgttgatgatgtcattaataatatgaatctgatattgtataaaaaaaaaaaaaa

SEQ ID NO: 2 - DNA, 418 bp, Oryca sativa
  OS07MC07755_33971786
agggggtgtgtactgctgattcctcatgcgtcgtcggagatcgagaggtgatgcatgctgcgaacggcgagcggcggcggcggcgacaggaggtcggcggcgagctccggcgtgctggctggcatccggcgatcgacgacggcgaccgagggagggaggaagctatagctaggatggtcatcatgtgattaattcagtgatgtgtcctaattaagtagcttcttgcttgctagcagggcaatttcaatcctttggcatctgtaacctttttctttctttctgaagtaaaccttaataacccagctatgttctcttatgatgttctgaacaaatacaacaaattaggcatacagattcagatacaatagcacttgagtttgtatctagtcgtttgtcaagaaccaagacacatttcttg

SEQ ID NO: 3 - DNA, 12949 bp, Artificial sequence
  RTP2149-1
gtgattttgtgccgagctgccggtcggggagctgttggctggctggtggcaggatatattgtggtgtaaacaaattgacgcttagacaacttaataacacattgcggacgtctttaatgtactgaatttagttactgatcactgattaagtactgatatcggtaccaagcttccgcggctgcagtgcagcgtgacccggtcgtgcccctctctagagataatgagcattgcatgtctaagttataaaaaattaccacatattttttttgtcacacttgtttgaagtgcagtttatctatctttatacatatatttaaactttactctacgaataatataatctatagtactacaataatatcagtgttttagagaatcatataaatgaacagttagacatggtctaaaggacaattgagtattttgacaacaggactctacagttttatctttttagtgtgcatgtgttctcctttttttttgcaaatagcttcacctatataatacttcatccattttattagtacatccatttagggtttagggttaatggtttttatagactaatttttttagtacatctattttattctattttagcctctaaattaagaaaactaaaactctattttagtttttttatttaatagtttagatataaaatagaataaaataaagtgactaaaaattaaacaaataccctttaagaaattaaaaaaactaaggaaacatttttcttgtttcgagtagataatgccagcctgttaaacgccgtcgacgagtctaacggacaccaaccagcgaaccagcagcgtcgcgtcgggccaagcgaagcagacggcacggcatctctgtcgctgcctctggacccctctcgagagttccgctccaccgttggacttgctccgctgtcggcatccagaaattgcgtggcggagcggcagacgtgagccggcacggcaggcggcctcctcctcctctcacggcaccggcagctacgggggattcctttcccaccgctccttcgctttcccttcctcgcccgccgtaataaatagacaccccctccacaccctctttccccaacctcgtgttgttcggagcgcacacacacacaaccagatctcccccaaatccacccgtcggcacctccgcttcaaggtacgccgctcgtcctccccccccccccccctctctaccttctctagatcggcgttccggtccatggttagggcccggtagttctacttctgttcatgtttgtgttagatccgtgtttgtgttagatccgtgctgctagcgttcgtacacggatgcgacctgtacgtcagacacgttctgattgctaacttgccagtgtttctctttggggaatcctgggatggctctagccgttccgcagacgggatcgatttcatgattttttttgtttcgttgcatagggtttggtttgcccttttcctttatttcaatatatgccgtgcacttgtttgtcgggtcatcttttcatgcttttttttgtcttggttgtgatgatgtggtctggttgggcggtcgttctagatcggagtagaattctgtttcaaactacctggtggatttattaattttggatctgtatgtgtgtgccatacatattcatagttacgaattgaagatgatggatggaaatatcgatctaggataggtatacatgttgatgcgggttttactgatgcatatacagagatgctttttgttcgcttggttgtgatgatgtggtgtggttgggcggtcgttcattcgttctagatcggagtagaatactgtttcaaactacctggtgtatttattaattttggaactgtatgtgtgtgtcatacatcttcatagttacgagtttaagatggatggaaatatcgatctaggataggtatacatgttgatgtgggttttactgatgcatatacatgatggcatatgcagcatctattcatatgctctaaccttgagtacctatctattataataaacaagtatgttttataattatttcgatcttgatatacttggatgatggcatatgcagcagctatatgtggatttttttagccctgccttcatacgctatttatttgcttggtactgtttcttttgtcgatgctcaccctgttgtttggtgttacttctgcagcccgggggatccactagttctagaaaccatggccaccgccgccgccgcgtctaccgcgctcactggcgccactaccgctgcgcccaaggcgaggcgccgggcgcacctcctggccacccgccgcgccctcgccgcgcccatcaggtgctcagcggcgtcacccgccatgccgatggctcccccggccaccccgctccggccgtggggccccaccgatccccgcaagggcgccgacatcctcgtcgagtccctcgagcgctgcggcgtccgcgacgtcttcgcctaccccggcggcacgtccatggagatccaccaggcactcacccgctcccccgtcatcgccaaccacctcttccgccacgagcaaggggaggcctttgcggcctccggctacgcgcgctcctcgggccgcgtcggcgtctgcatcgccacctccggccccggcgccaccaaccttgtctccgcgctcgccgacgcgctgctcgattccgtccccatggtcgccatcacgggacaggtgccgcgacgcatgattggcaccgacgccttccaggagacgcccatcgtcgaggtcacccgctccatcaccaagcacaactacctggtcctcgacgtcgacgacatcccccgcgtcgtgcaggaggctttcttcctcgcctcctctggtcgaccggggccggtgcttgtcgacatccccaaggacatccagcagcagatggcggtgcctgtctgggacaagcccatgagtctgcctgggtacattgcgcgccttcccaagccccctgcgactgagttgcttgagcaggtgctgcgtcttgttggtgaatcccggcgccctgttctttatgttggcggtggctgcgcagcatctggtgaggagttgcgacgctttgtggagctgactggaatcccggtcacaactactcttatgggcctcggcaacttccccagcgacgacccactgtctctgcgcatgctaggtatgcatggcacggtgtatgcaaattatgcagtggataaggccgatctgttgcttgcacttggtgtgcggtttgatgatcgtgtgacagggaagattgaggcttttgcaagcagggctaagattgtgcacgttgatattgatccggctgagattggcaagaacaagcagccacatgtgtccatctgtgcagatgttaagcttgctttgcagggcatgaatgctcttcttgaaggaagcacatcaaagaagagctttgactttggctcatggaacgatgagttggatcagcagaagagggaattcccccttgggtataaaacatctaatgaggagatccagccacaatatgctattcaggttcttgatgagctgacgaaaggcgaggccatcatcggcacaggtgttgggcagcaccagatgtgggcggcacagtactacacttacaagcggccaaggcagtggttgtcttcagctggtcttggggctatgggatttggtttgccggctgctgctggtgcttctgtggccaacccaggtgttactgttgttgacatcgatggagatggtagctttctcatgaacgttcaggagctagctatgatccgaattgagaacctcccggtgaaggtctttgtgctaaacaaccagcacctggggatggtggtgcagtgggaggacaggttctataaggccaacagagcgcacacatacttgggaaacccagagaatgaaagtgagatatatccagatttcgtgacgatcgccaaagggttcaacattccagcggtccgtgtgacaaagaagaacgaagtccgcgcagcgataaagaagatgctcgagactccagggccgtacctcttggatataatcgtcccacaccaggagcatgtgttgcctatgatccctaatggtggggctttcaaggatatgatcctggatggtgatggcaggactgtgtactgatctaaaatccagcaagcaactgatctaaaatccagcaagcaccgcctccctgctagtacaagggtgatatgtttttatctgtgtgatgttctcctgtattctatctttttttgtaggccgtcagctatctgttatggtaatcctatgtagcttccgaccttgtaattgtgtagtctgttgttttccttctggcatgtgtcataagagatcatttaagtgccttttgctacatataaataagataataagcactgctatgcagtggttctgaattggcttctgttgccaaatttaagtgtccaactggtccttgcttttgttttcgctatttttttccttttttagttattattatattggtaatttcaactcaacatatgatgtatggaataatgctagggctgcaatttcaaactattttacaaaccagaatggcattttcgtggtttgaggggagtgaaaaaaaatgaggcatttgactgaattagttacctgatccattttcgtggtttggatcattggaattaaattccattctaataatagtaattttggcatatatcaattaagttaattcggttttatgcaaaatatatttgtatactattattatcaagatgtcggagatatttatatgctacatttttactatacaggagtgagatgaagagtgtcatgtaagttacacagtagaaacaaattctattaatgcataaaatcatttccatcatccaccctatgaatttgagatagacctatatctaaactttgaaaagtggttgaatatcaaattccaaattaaataagttattttattgagtgaattctaatttctctaaaacgaagggatctaaacgccctctaaagctaatttggaaactcaaactttcttagcattggaggggattgagaaaaaatattaattcattttcatctcaatcattcaatctccaaagagatttgagttccttattagtctgttccatgcatcaaatcggctcaatgtgtcattatttgccatgacgattgacgagttgttctggggcctagcgctttccacgccgatgtgctggggcctggtcctggagaagacagcttgatatttaaagctatcaattgtttcaattgattcccacttcatttttctaaatgtagaaaacggtgacgtataagaaaaagaatgaattaggacttttattccgtacactaatctagagcggcccaagcttgtacactagtacgcgtcaattgatttaaatttaattaagaagttgaagacaaagaaggtcttaaatcctggctagcaacactgaactatgccagaaaccacatcaaagatatgggcaagcttcttggcccattatatccaaagacctcagagaaaggtgagcgaaggctcaattcagaagattggaagctgatcaataggatcaagacaatggtgagaacgcttccaaatctcactattccaccagaagatgcatacattatcattgaaacagatgcatgtgcaactggatggggagcagtatgcaagtggaagaaaaacaaggcagacccaagaaatacagagcaaatctgtaggtatgccagtggaaaatttgataagccaaaaggaacctgtgatgcagaaatctatggggttatgaatggcttagaaaagatgagattgttctacttggacaaaagagagatcacagtcagaactgacagtagtgcaatcgaaaggttctacaacaagagtgctgaacacaagccttctgagatcagatggatcaggttcatggactacatcactggtgcaggaccagagatagtcattgaacacataaaagggaagagcaatggtttagctgacatcttgtccaggctcaaagccaaattagctcagaatgaaccaacggaagagatgatcctgcttacacaagccataagggaagtaattccttatccagatcatccatacactgagcaactcagagaatggggaaacaaaattctggatccattccccacattcaagaaggacatgttcgaaagaacagagcaagcttttatgctaacagaggaaccagttctactctgtgcatgcaggaagcctgcaattcagttagtgtccagaacatctgccaacccaggaaggaaattcttcaagtgcgcaatgaacaaatgccattgctggtactgggcagatctcattgaagaacacattcaagacagaattgatgaatttctcaagaatcttgaagttctgaagaccggtggcgtgcaaacaatggaggaggaacttatgaaggaagtcaccaagctgaagatagaagagcaggagttcgaggaataccaggccacaccaagggctatgtcgccagtagccgcagaagatgtgctagatctccaagacgtaagcaatgacgattgaggaggcattgacgtcagggatgaccgcagcggagagtactgggcccattcagtggatgctccactgagttgtattattgtgtgcttttcggacaagtgtgctgtccactttcttttggcacctgtgccactttattccttgtctgccacgatgcctttgcttagcttgtaagcaaggatcgcagtgcgtgtgtgacaccaccccccttccgacgctctgcctatataaggcaccgtctgtaagctcttacgatcatcggtagttcaccagtcgacaccgggccttcacctgcggagggtaagatccgatcaccatcttctgaatttctgttcttgatctgtcatgtataataactgtctagtcttggtgttggtgagatggaaattcggtggatctcggaagggatattgttcgtttgctggggttttttttgtgtgttgtgatccgtagagaatttgtgtttatccatgttgttgatcttggtatgtattcatgacatattgacatgcatgtgttgtatgtgtcatatgtgtgcctctccttgggatttgttttggataatagaacatgttatggactcaatagtctgtgaacaaatctttttttagatggtggccaaatctgatgatgatctttcttgagaggaaaaagttcatgatagaaaaatcttttttgagatggtggcttaatgtgatgatgatctttcttgagaggaaaaaaaagattcattataggagattttgatttagctcctttccaccgatattaaatgaggagcatgcatgctgattgctgataaggatctgatttttttatcccctcttctttgaacagacaagaaataggctctgaatttctgattgattatttgtacatgcagggcgcgccaggcttgctatagctggtccatggcaccatacatgtaagcacgcacacaggcacacacacacacgcacgcaatgatctacgtatctagcagcagcttatcatgtcgtcatcatgcatgcatggccgacggaggtcgtcatcttatctgggagcgtgtgtgtcttggcaatgggaagctgcatgcgcctctcgggcgtcggcgcgtcggcgcctagctgtagggcggcgtgccatagagctgcctcctgccgctcacaccatgctgttgacgaggactgatggtggtcatggcctctcggcgtcggtggcggcggcgccggcgccgagttttacctctctccggaggggggaatgaagaaacctggtccgaattgcggccgctatctgggtctgtctgttggctgcccggtgacggtatacggtgatgttctaatagtactcaattggtcttggatcggagttcatgctacggctcctctgttatatattacacggctgacggctccttattaatgtgtccgttgatgatgtcattaataatatgaatctgatattgtatcctgcaggcctaggatcgttcaaacatttggcaataaagtttcttaagattgaatcctgttgccggtcttgcgatgattatcatataatttctgttgaattacgttaagcatgtaataattaacatgtaatgcatgacgttatttatgagatgggtttttatgattagagtcccgcaattatacatttaatacgcgatagaaaacaaaatatagcgcgcaaactaggataaattatcgcgcgcggtgtcatctatgttactagatcggccggccgtttaaacttagttactaatcagtgatcagattgtcgtttcccgccttcactttaaactatcagtgtttgacaggatatattggcgggtaaacctaagagaaaagagcgtttattagaataatcggatatttaaaagggcgtgaaaaggtttatccgttcgtccatttgtatgtcaatattgggggggggggaaagccacgttgtgtctcaaaatctctgatgttacattgcacaagataaaaatatatcatcatgaacaataaaactgtctgcttacataaacagtaatacaaggggtgttcgccaccatgagccatatccagcgtgaaacctcgtgctcccgcccgcgcctcaattccaatatggatgccgacctttatggctacaagtgggcgcgcgacaacgtcggccagtcgggcgcgaccatttatcggctttatggcaaacccgatgccccggaactgttcctgaagcacggcaaaggcagcgtcgcaaacgatgtcaccgatgagatggtccgcctgaactggcttaccgagttcatgccgctgccgacgattaagcatttcatccgtaccccggacgatgcctggctcttgaccacggccattccgggcaaaacggcctttcaggtccttgaagagtacccggactccggtgagaatatcgtggacgccctcgcggtcttcctccgccgtttgcatagcatccccgtgtgcaactgccccttcaactcggaccgggttttccgcctggcacaggcccagtcgcgcatgaataacggcctcgttgacgcgagcgatttcgacgatgaacggaatggctggccggtggaacaggtttggaaggaaatgcacaaactgcttccgttctcgccggattcggtggtcacgcatggtgatttttccctggataatctgatctttgacgagggcaagctgatcggctgcatcgacgtgggtcgcgtcggtatcgccgaccgctatcaggacctggcgatcttgtggaattgcctcggcgagttctcgccctcgctccagaagcgcctgttccagaagtacggcatcgacaacccggatatgaacaagctccagttccacctcatgctggacgaatttttttgaacagaattggttaattggttgtaacactggcagagcattacgctgacttgacgggacggcggctttgttgaataaatcgaacttttgctgagttgaaggatcgatgagttgaaggaccccgtagaaaagatcaaaggatcttcttgagatcctttttttctgcgcgtaatctgctgcttgcaaacaaaaaaaccaccgctaccagcggtggtttgtttgccggatcaagagctaccaactctttttccgaaggtaactggcttcagcagagcgcagataccaaatactgtccttctagtgtagccgtagttaggccaccacttcaagaactctgtagcaccgcctacatacctcgctctgctaatcctgttaccagtggctgctgccagtggcgataagtcgtgtcttaccgggttggactcaagacgatagttaccggataaggcgcagcggtcgggctgaacggggggttcgtgcacacagcccagcttggagcgaacgacctacaccgaactgagatacctacagcgtgagctatgagaaagcgccacgcttcccgaagggagaaaggcggacaggtatccggtaagcggcagggtcggaacaggagagcgcacgagggagcttccagggggaaacgcctggtatctttatagtcctgtcgggtttcgccacctctgacttgagcgtcgatttttgtgatgctcgtcaggggggcggagcctatggaaaaacgccagcaacgcggcctttttacggttcctggccttttgctggccttttgctcacatgttctttcctgcgttatcccctgattctgtggataaccgtattaccgcctttgagtgagctgataccgctcgccgcagccgaacgaccgagcgcagcgagtcagtgagcgaggaagcggaagagcgcctgatgcggtattttctccttacgcatctgtgcggtatttcacaccgcataggccgcgataggccgacgcgaagcggcggggcgtagggagcgcagcgaccgaagggtaggcgctttttgcagctcttcggctgtgcgctggccagacagttatgcacaggccaggcgggttttaagagttttaataagttttaaagagttttaggcggaaaaatcgccttttttctcttttatatcagtcacttacatgtgtgaccggttcccaatgtacggctttgggttcccaatgtacgggttccggttcccaatgtacggctttgggttcccaatgtacgtgctatccacaggaaagagaccttttcgacctttttcccctgctagggcaatttgccctagcatctgctccgtacattaggaaccggcggatgcttcgccctcgatcaggttgcggtagcgcatgactaggatcgggccagcctgccccgcctcctccttcaaatcgtactccggcaggtcatttgacccgatcagcttgcgcacggtgaaacagaacttcttgaactctccggcgctgccactgcgttcgtagatcgtcttgaacaaccatctggcttctgccttgcctgcggcgcggcgtgccaggcggtagagaaaacggccgatgccggggtcgatcaaaaagtaatcggggtgaaccgtcagcacgtccgggttcttgccttctgtgatctcgcggtacatccaatcagcaagctcgatctcgatgtactccggccgcccggtttcgctctttacgatcttgtagcggctaatcaaggcttcaccctcggataccgtcaccaggcggccgttcttggccttcttggtacgctgcatggcaacgtgcgtggtgtttaaccgaatgcaggtttctaccaggtcgtctttctgctttccgccatcggctcgccggcagaacttgagtacgtccgcaacgtgtggacggaacacgcggccgggcttgtctcccttcccttcccggtatcggttcatggattcggttagatgggaaaccgccatcagtaccaggtcgtaatcccacacactggccatgccggcggggcctgcggaaacctctacgtgcccgtctggaagctcgtagcggatcacctcgccagctcgtcggtcacgcttcgacagacggaaaacggccacgtccatgatgctgcgactatcgcgggtgcccacgtcatagagcatcggaacgaaaaaatctggttgctcgtcgcccttgggcggcttcctaatcgacggcgcaccggctgccggcggttgccgggattctttgcggattcgatcagcggccccttgccacgattcaccggggcgtgcttctgcctcgatgcgttgccgctgggcggcctgcgcggccttcaacttctccaccaggtcatcacccagcgccgcgccgatttgtaccgggccggatggtttgcgaccgctcacgccgattcctcgggcttgggggttccagtgccattgcagggccggcagacaacccagccgcttacgcctggccaaccgcccgttcctccacacatggggcattccacggcgtcggtgcctggttgttcttgattttccatgccgcctcctttagccgctaaaattcatctactcatttattcatttgctcatttactctggtagctgcgcgatgtattcagatagcagctcggtaatggtcttgccttggcgtaccgcgtacatcttcagcttggtgtgatcctccgccggcaactgaaagttgacccgcttcatggctggcgtgtctgccaggctggccaacgttgcagccttgctgctgcgtgcgctcggacggccggcacttagcgtgtttgtgcttttgctcattttctctttacctcattaactcaaatgagttttgatttaatttcagcggccagcgcctggacctcgcgggcagcgtcgccctcgggttctgattcaagaacggttgtgccggcggcggcagtgcctgggtagctcacgcgctgcgtgatacgggactcaagaatgggcagctcgtacccggccagcgcctcggcaacctcaccgccgatgcgcgtgcctttgatcgcccgcgacacgacaaaggccgcttgtagccttccatccgtgacctcaatgcgctgcttaaccagctccaccaggtcggcggtggcccaaatgtcgtaagggcttggctgcaccggaatcagcacgaagtcggctgccttgatcgcggacacagccaagtccgccgcctggggcgctccgtcgatcactacgaagtcgcgccggccgatggccttcacgtcgcggtcaatcgtcgggcggtcgatgccgacaacggttagcggttgatcttcccgcacggccgcccaatcgcgggcactgccctggggatcggaatcgactaacagaacatcggccccggcgagttgcagggcgcgggctagatgggttgcgatggtcgtcttgcctgacccgcctttctggttaagtacagcgataaccttcatgcgttccccttgcgtatttgtttatttactcatcgcatcatatacgcagcgaccgcatgacgcaagctgttttactcaaatacacatcacctttttagatgatca

SEQ ID NO: 4 - DNA, 14681 bp, Artificial sequence
  RCB958-1
gtgattttgtgccgagctgccggtcggggagctgttggctggctggtggcaggatatattgtggtgtaaacaaattgacgcttagacaacttaataacacattgcggacgtctttaatgtactgaattagtactctagtttacagcactcgtctccgtcttggtaggttctttgagcttaagaaggttgacgttgtggtgataggtctaaggcggaggctaggctagttgatatcggtaccaagcttccgcggctgcagtgcagcgtgacccggtcgtgcccctctctagagataatgagcattgcatgtctaagttataaaaaattaccacatattttttttgtcacacttgtttgaagtgcagtttatctatctttatacatatatttaaactttactctacgaataatataatctatagtactacaataatatcagtgttttagagaatcatataaatgaacagttagacatggtctaaaggacaattgagtattttgacaacaggactctacagttttatctttttagtgtgcatgtgttctcctttttttttgcaaatagcttcacctatataatacttcatccattttattagtacatccatttagggtttagggttaatggtttttatagactaatttttttagtacatctattttattctattttagcctctaaattaagaaaactaaaactctattttagtttttttatttaatagtttagatataaaatagaataaaataaagtgactaaaaattaaacaaataccctttaagaaattaaaaaaactaaggaaacatttttcttgtttcgagtagataatgccagcctgttaaacgccgtcgacgagtctaacggacaccaaccagcgaaccagcagcgtcgcgtcgggccaagcgaagcagacggcacggcatctctgtcgctgcctctggacccctctcgagagttccgctccaccgttggacttgctccgctgtcggcatccagaaattgcgtggcggagcggcagacgtgagccggcacggcaggcggcctcctcctcctctcacggcaccggcagctacgggggattcctttcccaccgctccttcgctttcccttcctcgcccgccgtaataaatagacaccccctccacaccctctttccccaacctcgtgttgttcggagcgcacacacacacaaccagatctcccccaaatccacccgtcggcacctccgcttcaaggtacgccgctcgtcctccccccccccccccctctctaccttctctagatcggcgttccggtccatggttagggcccggtagttctacttctgttcatgtttgtgttagatccgtgtttgtgttagatccgtgctgctagcgttcgtacacggatgcgacctgtacgtcagacacgttctgattgctaacttgccagtgtttctctttggggaatcctgggatggctctagccgttccgcagacgggatcgatttcatgattttttttgtttcgttgcatagggtttggtttgcccttttcctttatttcaatatatgccgtgcacttgtttgtcgggtcatcttttcatgcttttttttgtcttggttgtgatgatgtggtctggttgggcggtcgttctagatcggagtagaattctgtttcaaactacctggtggatttattaattttggatctgtatgtgtgtgccatacatattcatagttacgaattgaagatgatggatggaaatatcgatctaggataggtatacatgttgatgcgggttttactgatgcatatacagagatgctttttgttcgcttggttgtgatgatgtggtgtggttgggcggtcgttcattcgttctagatcggagtagaatactgtttcaaactacctggtgtatttattaattttggaactgtatgtgtgtgtcatacatcttcatagttacgagtttaagatggatggaaatatcgatctaggataggtatacatgttgatgtgggttttactgatgcatatacatgatggcatatgcagcatctattcatatgctctaaccttgagtacctatctattataataaacaagtatgttttataattatttcgatcttgatatacttggatgatggcatatgcagcagctatatgtggatttttttagccctgccttcatacgctatttatttgcttggtactgtttcttttgtcgatgctcaccctgttgtttggtgttacttctgcagcccgggggatccactagttctagaaaccatggccaccgccgccgccgcgtctaccgcgctcactggcgccactaccgctgcgcccaaggcgaggcgccgggcgcacctcctggccacccgccgcgccctcgccgcgcccatcaggtgctcagcggcgtcacccgccatgccgatggctcccccggccaccccgctccggccgtggggccccaccgatccccgcaagggcgccgacatcctcgtcgagtccctcgagcgctgcggcgtccgcgacgtcttcgcctaccccggcggcacgtccatggagatccaccaggcactcacccgctcccccgtcatcgccaaccacctcttccgccacgagcaaggggaggcctttgcggcctccggctacgcgcgctcctcgggccgcgtcggcgtctgcatcgccacctccggccccggcgccaccaaccttgtctccgcgctcgccgacgcgctgctcgattccgtccccatggtcgccatcacgggacaggtgccgcgacgcatgattggcaccgacgccttccaggagacgcccatcgtcgaggtcacccgctccatcaccaagcacaactacctggtcctcgacgtcgacgacatcccccgcgtcgtgcaggaggctttcttcctcgcctcctctggtcgaccggggccggtgcttgtcgacatccccaaggacatccagcagcagatggcggtgcctgtctgggacaagcccatgagtctgcctgggtacattgcgcgccttcccaagccccctgcgactgagttgcttgagcaggtgctgcgtcttgttggtgaatcccggcgccctgttctttatgttggcggtggctgcgcagcatctggtgaggagttgcgacgctttgtggagctgactggaatcccggtcacaactactcttatgggcctcggcaacttccccagcgacgacccactgtctctgcgcatgctaggtatgcatggcacggtgtatgcaaattatgcagtggataaggccgatctgttgcttgcacttggtgtgcggtttgatgatcgtgtgacagggaagattgaggcttttgcaagcagggctaagattgtgcacgttgatattgatccggctgagattggcaagaacaagcagccacatgtgtccatctgtgcagatgttaagcttgctttgcagggcatgaatgctcttcttgaaggaagcacatcaaagaagagctttgactttggctcatggaacgatgagttggatcagcagaagagggaattcccccttgggtataaaacatctaatgaggagatccagccacaatatgctattcaggttcttgatgagctgacgaaaggcgaggccatcatcggcacaggtgttgggcagcaccagatgtgggcggcacagtactacacttacaagcggccaaggcagtggttgtcttcagctggtcttggggctatgggatttggtttgccggctgctgctggtgcttctgtggccaacccaggtgttactgttgttgacatcgatggagatggtagctttctcatgaacgttcaggagctagctatgatccgaattgagaacctcccggtgaaggtctttgtgctaaacaaccagcacctggggatggtggtgcagtgggaggacaggttctataaggccaacagagcgcacacatacttgggaaacccagagaatgaaagtgagatatatccagatttcgtgacgatcgccaaagggttcaacattccagcggtccgtgtgacaaagaagaacgaagtccgcgcagcgataaagaagatgctcgagactccagggccgtacctcttggatataatcgtcccacaccaggagcatgtgttgcctatgatccctaatggtggggctttcaaggatatgatcctggatggtgatggcaggactgtgtactgatctaaaatccagcaagcaactgatctaaaatccagcaagcaccgcctccctgctagtacaagggtgatatgtttttatctgtgtgatgttctcctgtattctatctttttttgtaggccgtcagctatctgttatggtaatcctatgtagcttccgaccttgtaattgtgtagtctgttgttttccttctggcatgtgtcataagagatcatttaagtgccttttgctacatataaataagataataagcactgctatgcagtggttctgaattggcttctgttgccaaatttaagtgtccaactggtccttgcttttgttttcgctatttttttccttttttagttattattatattggtaatttcaactcaacatatgatgtatggaataatgctagggctgcaatttcaaactattttacaaaccagaatggcattttcgtggtttgaggggagtgaaaaaaaatgaggcatttgactgaattagttacctgatccattttcgtggtttggatcattggaattaaattccattctaataatagtaattttggcatatatcaattaagttaattcggttttatgcaaaatatatttgtatactattattatcaagatgtcggagatatttatatgctacatttttactatacaggagtgagatgaagagtgtcatgtaagttacacagtagaaacaaattctattaatgcataaaatcatttccatcatccaccctatgaatttgagatagacctatatctaaactttgaaaagtggttgaatatcaaattccaaattaaataagttattttattgagtgaattctaatttctctaaaacgaagggatctaaacgccctctaaagctaatttggaaactcaaactttcttagcattggaggggattgagaaaaaatattaattcattttcatctcaatcattcaatctccaaagagatttgagttccttattagtctgttccatgcatcaaatcggctcaatgtgtcattatttgccatgacgattgacgagttgttctggggcctagcgctttccacgccgatgtgctggggcctggtcctggagaagacagcttgatatttaaagctatcaattgtttcaattgattcccacttcatttttctaaatgtagaaaacggtgacgtataagaaaaagaatgaattaggacttttattccgtacactaatctagagcggccgcaagcttgtacaacgcgtaccggttaattaaattacgccaagctatcaactttgtatagaaaagttgggtaccttaattaaaggaagttgaagacaaagaaggtcttaaatcctggctagcaacactgaactatgccagaaaccacatcaaagatatgggcaagcttcttggcccattatatccaaagacctcagagaaaggtgagcgaaggctcaattcagaagattggaagctgatcaataggatcaagacaatggtgagaacgcttccaaatctcactattccaccagaagatgcatacattatcattgaaacagatgcatgtgcaactggatggggagcagtatgcaagtggaagaaaaacaaggcagacccaagaaatacagagcaaatctgtaggtatgccagtggaaaatttgataagccaaaaggaacctgtgatgcagaaatctatggggttatgaatggcttagaaaagatgagattgttctacttggacaaaagagagatcacagtcagaactgacagtagtgcaatcgaaaggttctacaacaagagtgctgaacacaagccttctgagatcagatggatcaggttcatggactacatcactggtgcaggaccagagatagtcattgaacacataaaagggaagagcaatggtttagctgacatcttgtccaggctcaaagccaaattagctcagaatgaaccaacggaagagatgatcctgcttacacaagccataagggaagtaattccttatccagatcatccatacactgagcaactcagagaatggggaaacaaaattctggatccattccccacattcaagaaggacatgttcgaaagaacagagcaagcttttatgctaacagaggaaccagttctactctgtgcatgcaggaagcctgcaattcagttagtgtccagaacatctgccaacccaggaaggaaattcttcaagtgcgcaatgaacaaatgccattgctggtactgggcagatctcattgaagaacacattcaagacagaattgatgaatttctcaagaatcttgaagttctgaagaccggtggcgtgcaaacaatggaggaggaacttatgaaggaagtcaccaagctgaagatagaagagcaggagttcgaggaataccaggccacaccaagggctatgtcgccagtagccgcagaagatgtgctagatctccaagacgtaagcaatgacgattgaggaggcattgacgtcagggatgaccgcagcggagagtactgggcccattcagtggatgctccactgagttgtattattgtgtgcttttcggacaagtgtgctgtccactttcttttggcacctgtgccactttattccttgtctgccacgatgcctttgcttagcttgtaagcaaggatcgcagtgcgtgtgtgacaccaccccccttccgacgctctgcctatataaggcaccgtctgtaagctcttacgatcatcggtagttcaccagtcgacaccgggccttcacctgcggagggtaagatccgatcaccatcttctgaatttctgttcttgatctgtcatgtataataactgtctagtcttggtgttggtgagatggaaattcggtggatctcggaagggatattgttcgtttgctggggttttttttgtgtgttgtgatccgtagagaatttgtgtttatccatgttgttgatcttggtatgtattcatgacatattgacatgcatgtgttgtatgtgtcatatgtgtgcctctccttgggatttgttttggataatagaacatgttatggactcaatagtctgtgaacaaatctttttttagatggtggccaaatctgatgatgatctttcttgagaggaaaaagttcatgatagaaaaatcttttttgagatggtggcttaatgtgatgatgatctttcttgagaggaaaaaaaagattcattataggagattttgatttagctcctttccaccgatattaaatgaggagcatgcatgctgattgctgataaggatctgatttttttatcccctcttctttgaacagacaagaaataggctctgaatttctgattgattatttgtacatgcagaagggcgaattcgacccaagtttgtacaaaaaagcaggcttgataaccaaccatggtccgtcctgtagaaaccccaacccgtgaaatcaaaaaactcgacggcctgtgggcattcagtctggatcgcgaaaactgtggaattgatcagcgttggtgggaaagcgcgttacaagaaagccgggcaattgctgtgccaggcagttttaacgatcagttcgccgatgcagatattcgtaattatgcgggcaacgtctggtatcagcgcgaagtctttataccgaaaggttgggcaggccagcgtatcgtgctgcgtttcgatgcggtcactcattacggcaaagtgtgggtcaataatcaggaagtgatggagcatcagggcggctatacgccatttgaagccgatgtcacgccgtatgttattgccgggaaaagtgtacgtaagtttctgcttctacctttgatatatatataataattatcattaattagtagtaatataatatttcaaatatttttttcaaaataaaagaatgtagtatatagcaattgcttttctgtagtttataagtgtgtatattttaatttataacttttctaatatatgaccaaaatttgttgatgtgcaggtatcaccgtttgtgtgaacaacgaactgaactggcagactatcccgccgggaatggtgattaccgacgaaaacggcaagaaaaagcagtcttacttccatgatttctttaactatgccggaatccatcgcagcgtaatgctctacaccacgccgaacacctgggtggacgatatcaccgtggtgacgcatgtcgcgcaagactgtaaccacgcgtctgttgactggcaggtggtggccaatggtgatgtcagcgttgaactgcgtgatgcggatcaacaggtggttgcaactggacaaggcactagcgggactttgcaagtggtgaatccgcacctctggcaaccgggtgaaggttatctctatgaactgtgcgtcacagccaaaagccagacagagtgtgatatctacccgcttcgcgtcggcatccggtcagtggcagtgaagggcgaacagttcctgattaaccacaaaccgttctactttactggctttggtcgtcatgaagatgcggacttgcgtggcaaaggattcgataacgtgctgatggtgcacgaccacgcattaatggactggattggggccaactcctaccgtacctcgcattacccttacgctgaagagatgctcgactgggcagatgaacatggcatcgtggtgattgatgaaactgctgctgtcggctttaacctctctttaggcattggtttcgaagcgggcaacaagccgaaagaactgtacagcgaagaggcagtcaacggggaaactcagcaagcgcacttacaggcgattaaagagctgatagcgcgtgacaaaaaccacccaagcgtggtgatgtggagtattgccaacgaaccggatacccgtccgcaaggtgcacgggaatatttcgcgccactggcggaagcaacgcgtaaactcgacccgacgcgtccgatcacctgcgtcaatgtaatgttctgcgacgctcacaccgataccatcagcgatctctttgatgtgctgtgcctgaaccgttattacggatggtatgtccaaagcggcgatttggaaacggcagagaaggtactggaaaaagaacttctggcctggcaggagaaactgcatcagccgattatcatcaccgaatacggcgtggatacgttagccgggctgcactcaatgtacaccgacatgtggagtgaagagtatcagtgtgcatggctggatatgtatcaccgcgtctttgatcgcgtcagcgccgtcgtcggtgaacaggtatggaatttcgccgattttgcgacctcgcaaggcatattgcgcgttggcggtaacaagaaagggatcttcactcgcgaccgcaaaccgaagtcggcggcttttctgctgcaaaaacgctggactggcatgaacttcggtgaaaaaccgcagcagggaggcaaacaatgaatcaaacccagctttcttgtacaaagtgggacctaggatcgttcaaacatttggcaataaagtttcttaagattgaatcctgttgccggtcttgcgatgattatcatataatttctgttgaattacgttaagcatgtaataattaacatgtaatgcatgacgttatttatgagatgggtttttatgattagagtcccgcaattatacatttaatacgcgatagaaaacaaaatatagcgcgcaaactaggataaattatcgcgcgcggtgtcatctatgttactagatcgaattcaactttattatacatagttgataattcactgggccggccctgtctatcttgttgggaaaagccgacctacccggacgcgattacttaagcaaaagatactatcgaacgaagaaagctagtaggtagactatatcaggcctgattgtcgtttcccgccttcagtttaaactatcagtgtttgacaggatatattggcgggtaaacctaagagaaaagagcgtttattagaataatcggatatttaaaagggcgtgaaaaggtttatccgttcgtccatttgtatgtcaatattgggggggggggaaagccacgttgtgtctcaaaatctctgatgttacattgcacaagataaaaatatatcatcatgaacaataaaactgtctgcttacataaacagtaatacaaggggtgttcgccaccatgagccatatccagcgtgaaacctcgtgctcccgcccgcgcctcaattccaatatggatgccgacctttatggctacaagtgggcgcgcgacaacgtcggccagtcgggcgcgaccatttatcggctttatggcaaacccgatgccccggaactgttcctgaagcacggcaaaggcagcgtcgcaaacgatgtcaccgatgagatggtccgcctgaactggcttaccgagttcatgccgctgccgacgattaagcatttcatccgtaccccggacgatgcctggctcttgaccacggccattccgggcaaaacggcctttcaggtccttgaagagtacccggactccggtgagaatatcgtggacgccctcgcggtcttcctccgccgtttgcatagcatccccgtgtgcaactgccccttcaactcggaccgggttttccgcctggcacaggcccagtcgcgcatgaataacggcctcgttgacgcgagcgatttcgacgatgaacggaatggctggccggtggaacaggtttggaaggaaatgcacaaactgcttccgttctcgccggattcggtggtcacgcatggtgatttttccctggataatctgatctttgacgagggcaagctgatcggctgcatcgacgtgggtcgcgtcggtatcgccgaccgctatcaggacctggcgatcttgtggaattgcctcggcgagttctcgccctcgctccagaagcgcctgttccagaagtacggcatcgacaacccggatatgaacaagctccagttccacctcatgctggacgaatttttttgaacagaattggttaattggttgtaacactggcagagcattacgctgacttgacgggacggcggctttgttgaataaatcgaacttttgctgagttgaaggatcgatgagttgaaggaccccgtagaaaagatcaaaggatcttcttgagatcctttttttctgcgcgtaatctgctgcttgcaaacaaaaaaaccaccgctaccagcggtggtttgtttgccggatcaagagctaccaactctttttccgaaggtaactggcttcagcagagcgcagataccaaatactgtccttctagtgtagccgtagttaggccaccacttcaagaactctgtagcaccgcctacatacctcgctctgctaatcctgttaccagtggctgctgccagtggcgataagtcgtgtcttaccgggttggactcaagacgatagttaccggataaggcgcagcggtcgggctgaacggggggttcgtgcacacagcccagcttggagcgaacgacctacaccgaactgagatacctacagcgtgagctatgagaaagcgccacgcttcccgaagggagaaaggcggacaggtatccggtaagcggcagggtcggaacaggagagcgcacgagggagcttccagggggaaacgcctggtatctttatagtcctgtcgggtttcgccacctctgacttgagcgtcgatttttgtgatgctcgtcaggggggcggagcctatggaaaaacgccagcaacgcggcctttttacggttcctggccttttgctggccttttgctcacatgttctttcctgcgttatcccctgattctgtggataaccgtattaccgcctttgagtgagctgataccgctcgccgcagccgaacgaccgagcgcagcgagtcagtgagcgaggaagcggaagagcgcctgatgcggtattttctccttacgcatctgtgcggtatttcacaccgcataggccgcgataggccgacgcgaagcggcggggcgtagggagcgcagcgaccgaagggtaggcgctttttgcagctcttcggctgtgcgctggccagacagttatgcacaggccaggcgggttttaagagttttaataagttttaaagagttttaggcggaaaaatcgccttttttctcttttatatcagtcacttacatgtgtgaccggttcccaatgtacggctttgggttcccaatgtacgggttccggttcccaatgtacggctttgggttcccaatgtacgtgctatccacaggaaagagaccttttcgacctttttcccctgctagggcaatttgccctagcatctgctccgtacattaggaaccggcggatgcttcgccctcgatcaggttgcggtagcgcatgactaggatcgggccagcctgccccgcctcctccttcaaatcgtactccggcaggtcatttgacccgatcagcttgcgcacggtgaaacagaacttcttgaactctccggcgctgccactgcgttcgtagatcgtcttgaacaaccatctggcttctgccttgcctgcggcgcggcgtgccaggcggtagagaaaacggccgatgccggggtcgatcaaaaagtaatcggggtgaaccgtcagcacgtccgggttcttgccttctgtgatctcgcggtacatccaatcagcaagctcgatctcgatgtactccggccgcccggtttcgctctttacgatcttgtagcggctaatcaaggcttcaccctcggataccgtcaccaggcggccgttcttggccttcttggtacgctgcatggcaacgtgcgtggtgtttaaccgaatgcaggtttctaccaggtcgtctttctgctttccgccatcggctcgccggcagaacttgagtacgtccgcaacgtgtggacggaacacgcggccgggcttgtctcccttcccttcccggtatcggttcatggattcggttagatgggaaaccgccatcagtaccaggtcgtaatcccacacactggccatgccggcggggcctgcggaaacctctacgtgcccgtctggaagctcgtagcggatcacctcgccagctcgtcggtcacgcttcgacagacggaaaacggccacgtccatgatgctgcgactatcgcgggtgcccacgtcatagagcatcggaacgaaaaaatctggttgctcgtcgcccttgggcggcttcctaatcgacggcgcaccggctgccggcggttgccgggattctttgcggattcgatcagcggccccttgccacgattcaccggggcgtgcttctgcctcgatgcgttgccgctgggcggcctgcgcggccttcaacttctccaccaggtcatcacccagcgccgcgccgatttgtaccgggccggatggtttgcgaccgctcacgccgattcctcgggcttgggggttccagtgccattgcagggccggcagacaacccagccgcttacgcctggccaaccgcccgttcctccacacatggggcattccacggcgtcggtgcctggttgttcttgattttccatgccgcctcctttagccgctaaaattcatctactcatttattcatttgctcatttactctggtagctgcgcgatgtattcagatagcagctcggtaatggtcttgccttggcgtaccgcgtacatcttcagcttggtgtgatcctccgccggcaactgaaagttgacccgcttcatggctggcgtgtctgccaggctggccaacgttgcagccttgctgctgcgtgcgctcggacggccggcacttagcgtgtttgtgcttttgctcattttctctttacctcattaactcaaatgagttttgatttaatttcagcggccagcgcctggacctcgcgggcagcgtcgccctcgggttctgattcaagaacggttgtgccggcggcggcagtgcctgggtagctcacgcgctgcgtgatacgggactcaagaatgggcagctcgtacccggccagcgcctcggcaacctcaccgccgatgcgcgtgcctttgatcgcccgcgacacgacaaaggccgcttgtagccttccatccgtgacctcaatgcgctgcttaaccagctccaccaggtcggcggtggcccaaatgtcgtaagggcttggctgcaccggaatcagcacgaagtcggctgccttgatcgcggacacagccaagtccgccgcctggggcgctccgtcgatcactacgaagtcgcgccggccgatggccttcacgtcgcggtcaatcgtcgggcggtcgatgccgacaacggttagcggttgatcttcccgcacggccgcccaatcgcgggcactgccctggggatcggaatcgactaacagaacatcggccccggcgagttgcagggcgcgggctagatgggttgcgatggtcgtcttgcctgacccgcctttctggttaagtacagcgataaccttcatgcgttccccttgcgtatttgtttatttactcatcgcatcatatacgcagcgaccgcatgacgcaagctgttttactcaaatacacatcacctttttagatgatca

SEQ ID NO: 5 - DNA, 1118 bp, Artificial sequence
  Zm miR166-trap / Zm miR159-trap
aggcttgctatagctggtccatggcaccatacatgtaagcacgcacacaggcacacacacacacgcacgcaatgatctacgtatctagcagcagcttatcatgtcgtcatcatgcatgcatggccgacggaggtcgtcatcttatctgggagcgtgtgtgtcttggcaatgggaagctgcatgcgcctctcgggcgtcggcgcgtcggcgcctagctgtagggcggcgtgccatagagctgcctcctgccgctcacaccatgctgttgacgaggactgatggtggtcatggcctctcggcgtcggtggcggcggcgccggcgccgagttttacctctctccggaggggggaatgaagaaacctggtccgaattgcggccgctatctgggtctgtctgttggctgcccggtgacggtatacggtgatgttctaatagtactcaattggtcttggatcggagttcatgctacggctcctctgttatatattacacggctgacggctccttattaatgtgtccgttgatgatgtcattaataatatgaatctgatattgtataggcttgctatagctggtccatggcaccatacatgtaagcacgcacacaggcacacacacacacgcacgcaatgatctacgtatctagcagcagcttatcatgtcgtcatcatgcatgcatggccgacggaggtcgtcatcttatctgggagcgtgtgtgtcttggcaatgggaagctgcatgcgcctctcgggcgtcggcgcgtcggcgcctagctgtagggcggcgtgccatagagctgcctcctgccgctcacaccatgctgttgacgaggactgatggtggtcatggcctctcggcgtcggtggcggcggcgccggcgccgagttttacctctctccggaggcggagctccctcactcaatccaaaattgcggccgctatctgggtctgtctgttggctgcccggtgacggtatacggtgatgttctaatagtactcaattggtcttggatcggagttcatgctacggctcctctgttatatattacacggctgacggctccttattaatgtgtccgttgatgatgtcattaataatatgaatctgatattgtat

SEQ ID NO: 6 - DNA, 977 bp, Artificial sequence
  Zm miR166-trap / Os miR159-trap
aggcttgctatagctggtccatggcaccatacatgtaagcacgcacacaggcacacacacacacgcacgcaatgatctacgtatctagcagcagcttatcatgtcgtcatcatgcatgcatggccgacggaggtcgtcatcttatctgggagcgtgtgtgtcttggcaatgggaagctgcatgcgcctctcgggcgtcggcgcgtcggcgcctagctgtagggcggcgtgccatagagctgcctcctgccgctcacaccatgctgttgacgaggactgatggtggtcatggcctctcggcgtcggtggcggcggcgccggcgccgagttttacctctctccggaggggggaatgaagaaacctggtccgaattgcggccgctatctgggtctgtctgttggctgcccggtgacggtatacggtgatgttctaatagtactcaattggtcttggatcggagttcatgctacggctcctctgttatatattacacggctgacggctccttattaatgtgtccgttgatgatgtcattaataatatgaatctgatattgtatagggggtgtgtactgctgattcctcatgcgtcgtcggagatcgagaggtgatgcatgctgcgaacggcgagcggcggcggcggcgacaggaggtcggcggcgagctccggcgtgctggctggcatccggcgatcgacgacggcgaccgagggagggaggaagctatagctaggatggtcatcatgtgattaattcagtgatgtgtcctaattaagtagcttcttgcttgctagcggagctccctcactcaatccaaatctgtaacctttttctttctttctgaagtaaaccttaataacccagctatgttctcttatgatgttctgaacaaatacaacaaattaggcatacagattcagatacaatagcacttgagtttgtatctagtcgtttgtcaagaaccaagacacatttcttg

SEQ ID NO: 7 - DNA, 850 bp, Glycine max
  GM06MC32536_sk84d08
agaaacaaaatccctataacacccaatcctagctacaacttcaaaccctctctgaattgcaccacccccatcatcccaaacatgtaacaccccttttgaaactttttctcatgagccaccccccctttgccccatgccaccacttccttaatcaatttggcatgtgggggtggtgaacatgttgtggatatatggtgtgtttggtgtggctataatggtatcttccttatctttccatgctccttttctttcaaggctaagcgaaaacgctccttcttgaggggcggtttctgttggaaagggcaacttcaatcctttggcatttttcaactcctccatctcacctcacacactgtgatttgggctcttgagggacatctcagaatggcaacacccctttttatgtgtaccgtactattttctagttctttttcttgtacaacgaaatttagatgcagtttcttagatgttggtgttgttttttaatcaaaattagagttttatcttgatagtaccggattatcaaggtaaaactctgattcttatcagaaaatggcaccaaaaatactttaagaactgtatgcaagttttttgttgtttttttttggtaattcttgtttgtgatgtgatgatttcaactgcaaactatgcctatcagtatggttaccatagactatatgttatctaataaatttacatttgaataggcctttggccaaaatgtattattgttgtcgttaatatgaatatggttaaatcaaaaaaaaaaaaaaaaaaaaaaaaaaaaaaaaaaaaaaaaaaaaaaaaaaaaaaaaaaaaaaaaaaaaaaaaaaaaaaaaaaaaaaaaata

SEQ ID NO: 8 - DNA, 396 bp, Glycine max
  51129502.f_l14_1
cccatcatcccaaacatgtaacaccccttttgaaactttttctcatgagccaccccccctttgccccatgccaccacttccttaatcaatttggcatgtgggggtggtgaacatgttgtggatatatggtgtgtttggtgtggctataatggtatcttccttatctttccatgctccttttctttcaaggctaagcgaaaacgctccttcttgaggggcggtttctgttggaaagggcaacttcaatcctttggcatttttcaactcctccatctcacctcacacactgtgatttgggctcttgagggacatctcagaatggcaacacccctttttatgtgtaccgtactattttctagttctttttcttgtacaacgaaatttagatgcagtttc

SEQ ID NO: 9 - DNA, 524 bp, Glycine max
  GM06MC32394_sk51f08
cacgcgtccgattcattctcgaaccctctccaaactgcaccccttctcgaataatagccctcgctgcctctgtggcagtggaggtggtggagatgcatatggtgcatttttgtcggtgtttccttttggttcaatcatggtggagcatgaatattatgtaataagttgaaagattgctgggaatgaaccgttctttttcttaagggcgaattctcttcaaaagggcaacttccatcctttggcattttccaattcctcgaactcacttcactttgtgtgtgaatcaagttctcaggggaactttggcaatatatatgtaatatccctatactatgtactattaattgtactctttgttatcttgtactttgtgtttaaattagaattgcattatatatatatatatatatatatatatatatatatatatatatgtacactatcaagtatcaatatgtatgatatgatgctgcctaatatatagtataataggcagccaataaatgttggtttttagagaactg

SEQ ID NO: 10 - DNA, 524 bp, Glycine max
  GM06MC09408_52318733
tgctcccccttctcgaataaccctcgctgccctctgtggtagtggaggtggtggagattcatagatggtgcgtttttgtcaatgtttccttttggttcaatcatggtcgagaaagaatatgtaataagttaaaagattgctgggaatgacgaaccgtccttcttaagggcgaattccctcgaaaagggcaacttccatcctttggcattttccaattaattcctcaaactcacttcactttgtgtgtgaatcaagttctcgaaggaactttggcaatatagtatataatatccctatactatgtactatatactgtactctttgttatcttgtactttgtgcttcaattagaactgcattttatatgtatcagtgtatcactatcaacatatatgatatgatactgcctactatatatagtaggcaaccaataaatgttggtttttagacaaaaaaaaaaaaaaaaaggggccgctctaaaggatccaagtttacgtacgcgggctggcaaagaaaaacttttt

SEQ ID NO: 11 - DNA, 418 bp, Glycine max
  53230190.f_b11_1
cttaaccaatttggcatgtgggggtggtggacatgttgtggatggtgtgttttggtgtggctataatggtatcctccttatctttccatgctccttttctttcaaggctatgctaaaacgctccttcttgagggcggcttctcttggaaagggcaacttcaatcctttggcatttttcaactcctccacctcacttcacacactgtgatttgggctcttgagggacctctcagaatggcaacaccccttttatgtgtaccgtactctcttctagttcttttcttgtacaacaaaatttagatgcagtttcttacatgttggtgttgctttctaatcaaaattggagttttaccttggtggcacccagattatcgaggtaaaactctgattgtgatagaaaaatgacaccaaaaacact

SEQ ID NO: 12 - DNA, 389 bp, Glycine max
  52202528.f_f03_1
attgctgggaatgacgaaccgtccttcttaagggcgaattccctcgaaaagggcaacttccatcctttggcattttccaattaattcctcaaactcacttcactttgtgtgtgaatcaagttctcgaaggaactttggcaatatagtatataatatccctatactatgtactatatactgtactctttgttatcttgtactttgtgcttcaattagaactgcattttatatgtatcagtgtatcactatcaacatatatgatatgatactgcctactatatatagtaggcaaccaataaatgttggtttttagacaaaaaaaaaaaaaaaaaggggccgctctaaaggatccaagtttacgtacgcgggctggcaaagaaaaacttttt

SEQ ID NO: 13 - DNA, 11295 bp, Artificial sequence
  RTP4811-1
gtaaccgcaaacgtgtcatagtcagatcccctcttccttcaccgcctcaaacacaaaaataatcttctacagcctatatatacaacccccccttctatctctcctttctcacaattcatcatctttctttctctacccccaattttaagaaatcctctcttctcctcttcattttcaaggtaaatctctctctctctctctctctctgttattccttgttttaattaggtatgtattattgctagtttgttaatctgcttatcttatgtatgccttatgtgaatatctttatcttgttcatctcatccgtttagaagctataaatttgttgatttgactgtgtatctacacgtggttatgtttatatctaatcagatatgaatttcttcatattgttgcgtttgtgtgtaccaatccgaaatcgttgatttttttcatttaatcgtgtagctaattgtacgtatacatatggatctacgtatcaattgttcatctgtttgtgtttgtatgtatacagatctgaaaacatcacttctctcatctgattgtgttgttacatacatagatatagatctgttatatcattttttttattaattgtgtatatatatatgtgcatagatctggattacatgattgtgattatttacatgattttgttatttacgtatgtatatatgtagatctggactttttggagttgttgacttgattgtatttgtgtgtgtatatgtgtgttctgatcttgatatgttatgtatgtgcagctgaaccatggcggcggcaacaacaacaacaacaacatcttcttcgatctccttctccaccaaaccatctccttcctcctccaaatcaccattaccaatctccagattctccctcccattctccctaaaccccaacaaatcatcctcctcctcccgccgccgcggtatcaaatccagctctccctcctccatctccgccgtgctcaacacaaccaccaatgtcacaaccactccctctccaaccaaacctaccaaacccgaaacattcatctcccgattcgctccagatcaaccccgcaaaggcgctgatatcctcgtcgaagctttagaacgtcaaggcgtagaaaccgtattcgcttaccctggaggtacatcaatggagattcaccaagccttaacccgctcttcctcaatccgtaacgtccttcctcgtcacgaacaaggaggtgtattcgcagcagaaggatacgctcgatcctcaggtaaaccaggtatctgtatagccacttcaggtcccggagctacaaatctcgttagcggattagccgatgcgttgttagatagtgttcctcttgtagcaatcacaggacaagtccctcgtcgtatgattggtacagatgcgtttcaagagactccgattgttgaggtaacgcgttcgattacgaagcataactatcttgtgatggatgttgaagatatccctaggattattgaggaagctttctttttagctacttctggtagacctggacctgttttggttgatgttcctaaagatattcaacaacagcttgcgattcctaattgggaacaggctatgagattacctggttatatgtctaggatgcctaaacctccggaagattctcatttggagcagattgttaggttgatttctgagtctaagaagcctgtgttgtatgttggtggtggttgtttgaattctagcgatgaattgggtaggtttgttgagcttacggggatccctgttgcgagtacgttgatggggctgggatcttatccttgtgatgatgagttgtcgttacatatgcttggaatgcatgggactgtgtatgcaaattacgctgtggagcatagtgatttgttgttggcgtttggggtaaggtttgatgatcgtgtcacgggtaagcttgaggcttttgctagtagggctaagattgttcatattgatattgactcggctgagattgggaagaataagactcctcatgtgtctgtgtgtggtgatgttaagctggctttgcaagggatgaataaggttcttgagaaccgagcggaggagcttaagcttgattttggagtttggaggaatgagttgaacgtacagaaacagaagtttccgttgagctttaagacgtttggggaagctattcctccacagtatgcgattaaggtccttgatgagttgactgatggaaaagccataataagtactggtgtcgggcaacatcaaatgtgggcggcgcagttctacaattacaagaaaccaaggcagtggctatcatcaggaggccttggagctatgggatttggacttcctgctgcgattggagcgtctgttgctaaccctgatgcgatagttgtggatattgacggagatggaagctttataatgaatgtgcaagagctagccactattcgtgtagagaatcttccagtgaaggtacttttattaaacaaccagcatcttggcatggttatgcaatgggaagatcggttctacaaagctaaccgagctcacacatttctcggggatccggctcaggaggacgagatattcccgaacatgttgctgtttgcagcagcttgcgggattccagcggcgagggtgacaaagaaagcagatctccgagaagctattcagacaatgctggatacaccaggaccttacctgttggatgtgatttgtccgcaccaagaacatgtgttgccgatgatcccgaatggtggcactttcaacgatgtcataacggaaggagatggccggattaaatactgagagatgaaaccggtgattatcagaaccttttatggtctttgtatgcatatggtaaaaaaacttagtttgcaatttcctgtttgttttggtaatttgagtttcttttagttgttgatctgcctgctttttggtttacgtcagactactactgctgttgttgtttggtttcctttctttcattttataaataaataatccggttcggtttactccttgtgactggctcagtttggttattgcgaaatgcgaatggtaaattgagtaattgaaattcgttattagggttctaagctgttttaacagtcactgggttaatatctctcgaatcttgcatggaaaatgctcttaccattggtttttaattgaaatgtgctcatatgggccgtggtttccaaattaaataaaactacgatgtcatcgagaagtaaaatcaactgtgtccacattatcagttttgtgtatacgatgaaatagggtaattcaaaatctagcttgatatgccttttggttcattttaaccttctgtaaacattttttcagattttgaacaagtaaatccaaaaaaaaaaaaaaaaaatctcaactcaacactaaattattttaatgtataaaagatgcttaaaacatttggcttaaaagaaagaagctaaaaacatagagaactcttgtaaattgaagtatgaaaatatactgaattgggtattatatgaatttttctgatttaggattcacatgatccaaaaaggaaatccagaagcactaatcagacattggaagtaggaatatttcaaaaagttttttttttttaagtaagtgacaaaagcttttaaaaaatagaaaagaaactagtattaaagttgtaaatttaataaacaaaagaaattttttatattttttcatttctttttccagcatgaggttatgatggcaggatgtggatttcatttttttccttttgatagccttttaattgatctattataattgacgaaaaaatattagttaattatagatatattttaggtagtattagcaatttacacttccaaaagactatgtaagttgtaaatatgatgcgttgatctcttcatcattcaatggttagtcaaaaaaataaaagcttaactagtaaactaaagtagtcaaaaattgtactttagtttaaaatattacatgaataatccaaaacgacatttatgtgaaacaaaaacaatatctagtacgcgtcaattgatttaaatttaattaatcgactctagattcgacggtatcgataagctcgcggatccctgaaagcgacgttggatgttaacatctacaaattgccttttcttatcgaccatgtacgtaagcgcttacgtttttggtggacccttgaggaaactggtagctgttgtgggcctgtggtctcaagatggatcattaatttccaccttcacctacgatggggggcatcgcaccggtgagtaatattgtacggctaagagcgaatttggcctgtaggatccctgaaagcgacgttggatgttaacatctacaaattgccttttcttatcgaccatgtacgtaagcgcttacgtttttggtggacccttgaggaaactggtagctgttgtgggcctgtggtctcaagatggatcattaatttccaccttcacctacgatggggggcatcgcaccggtgagtaatattgtacggctaagagcgaatttggcctgtaggatccctgaaagcgacgttggatgttaacatctacaaattgccttttcttatcgaccatgtacgtaagcgcttacgtttttggtggacccttgaggaaactggtagctgttgtgggcctgtggtctcaagatggatcattaatttccaccttcacctacgatggggggcatcgcaccggtgagtaatattgtacggctaagagcgaatttggcctgtaggatccgcgagctggtcaatcccattgcttttgaagcagctcaacattgatctctttctcgatcgagggagatttttcaaatcagtgcgcaagacgtgacgtaagtatccgagtcagtttttatttttctactaatttggtcgtttatttcggcgtgtaggacatggcaaccgggcctgaatttcgcgggtattctgtttctattccaactttttcttgatccgcagccattaacgacttttgaatagatacgctgacacgccaagcctcgctagtcaaaagtgtaccaaacaacgctttacagcaagaacggaatgcgcgtgacgctcgcggtgacgccatttcgccttttcagaaatggataaatagccttgcttcctattatatcttcccaaattaccaatacattacactagcatctgaatttcataaccaatctcgatacaccaaatcgaggcgcgccagaaacaaaatccctataacacccaatcctagctacaacttcaaaccctctctgaattgcaccacccccatcatcccaaacatgtaacaccccttttgaaactttttctcatgagccaccccccctttgccccatgccaccacttccttaatcaatttggcatgtgggggtggtgaacatgttgtggatatatggtgtgtttggtgtggctataatggtatcttccttatctttccatgctccttttctttcaaggctaagcgaaaacgctccttcttgaggggcggtttctgttggatagagctccctcaatcaatccaaatttttcaactcctccatctcacctcacacactgtgatttgggctcttgagggacatctcagaatggcaacacccctttttatgtgtaccgtactattttctagttctttttcttgtacaacgaaatttagatgcagtttcttagatgttggtgttgttttttaatcaaaattagagttttatcttgatagtaccggattatcaaggtaaaactctgattcttatcagaaaatggcaccaaaaatactttaagaactgtatgcaagttttttgttgtttttttttggtaattcttgtttgtgatgtgatgatttcaactgcaaactatgcctatcagtatggttaccatagactatatgttatctaataaatttacatttgaataggcctttggccaaaatgtattattgttgtcgttaatatgaatatggttaaatccctgcaggcctaggatcgttcaaacatttggcaataaagtttcttaagattgaatcctgttgccggtcttgcgatgattatcatataatttctgttgaattacgttaagcatgtaataattaacatgtaatgcatgacgttatttatgagatgggtttttatgattagagtcccgcaattatacatttaatacgcgatagaaaacaaaatatagcgcgcaaactaggataaattatcgcgcgcggtgtcatctatgttactagatcggccggccgtttaaacttagttactaatcagtgatcagattgtcgtttcccgccttcactttaaactatcagtgtttgacaggatatattggcgggtaaacctaagagaaaagagcgtttattagaataatcggatatttaaaagggcgtgaaaaggtttatccgttcgtccatttgtatgtcaatattgggggggggggaaagccacgttgtgtctcaaaatctctgatgttacattgcacaagataaaaatatatcatcatgaacaataaaactgtctgcttacataaacagtaatacaaggggtgttcgccaccatgagccatatccagcgtgaaacctcgtgctcccgcccgcgcctcaattccaatatggatgccgacctttatggctacaagtgggcgcgcgacaacgtcggccagtcgggcgcgaccatttatcggctttatggcaaacccgatgccccggaactgttcctgaagcacggcaaaggcagcgtcgcaaacgatgtcaccgatgagatggtccgcctgaactggcttaccgagttcatgccgctgccgacgattaagcatttcatccgtaccccggacgatgcctggctcttgaccacggccattccgggcaaaacggcctttcaggtccttgaagagtacccggactccggtgagaatatcgtggacgccctcgcggtcttcctccgccgtttgcatagcatccccgtgtgcaactgccccttcaactcggaccgggttttccgcctggcacaggcccagtcgcgcatgaataacggcctcgttgacgcgagcgatttcgacgatgaacggaatggctggccggtggaacaggtttggaaggaaatgcacaaactgcttccgttctcgccggattcggtggtcacgcatggtgatttttccctggataatctgatctttgacgagggcaagctgatcggctgcatcgacgtgggtcgcgtcggtatcgccgaccgctatcaggacctggcgatcttgtggaattgcctcggcgagttctcgccctcgctccagaagcgcctgttccagaagtacggcatcgacaacccggatatgaacaagctccagttccacctcatgctggacgaatttttttgaacagaattggttaattggttgtaacactggcagagcattacgctgacttgacgggacggcggctttgttgaataaatcgaacttttgctgagttgaaggatcgatgagttgaaggaccccgtagaaaagatcaaaggatcttcttgagatcctttttttctgcgcgtaatctgctgcttgcaaacaaaaaaaccaccgctaccagcggtggtttgtttgccggatcaagagctaccaactctttttccgaaggtaactggcttcagcagagcgcagataccaaatactgtccttctagtgtagccgtagttaggccaccacttcaagaactctgtagcaccgcctacatacctcgctctgctaatcctgttaccagtggctgctgccagtggcgataagtcgtgtcttaccgggttggactcaagacgatagttaccggataaggcgcagcggtcgggctgaacggggggttcgtgcacacagcccagcttggagcgaacgacctacaccgaactgagatacctacagcgtgagctatgagaaagcgccacgcttcccgaagggagaaaggcggacaggtatccggtaagcggcagggtcggaacaggagagcgcacgagggagcttccagggggaaacgcctggtatctttatagtcctgtcgggtttcgccacctctgacttgagcgtcgatttttgtgatgctcgtcaggggggcggagcctatggaaaaacgccagcaacgcggcctttttacggttcctggccttttgctggccttttgctcacatgttctttcctgcgttatcccctgattctgtggataaccgtattaccgcctttgagtgagctgataccgctcgccgcagccgaacgaccgagcgcagcgagtcagtgagcgaggaagcggaagagcgcctgatgcggtattttctccttacgcatctgtgcggtatttcacaccgcataggccgcgataggccgacgcgaagcggcggggcgtagggagcgcagcgaccgaagggtaggcgctttttgcagctcttcggctgtgcgctggccagacagttatgcacaggccaggcgggttttaagagttttaataagttttaaagagttttaggcggaaaaatcgccttttttctcttttatatcagtcacttacatgtgtgaccggttcccaatgtacggctttgggttcccaatgtacgggttccggttcccaatgtacggctttgggttcccaatgtacgtgctatccacaggaaagagaccttttcgacctttttcccctgctagggcaatttgccctagcatctgctccgtacattaggaaccggcggatgcttcgccctcgatcaggttgcggtagcgcatgactaggatcgggccagcctgccccgcctcctccttcaaatcgtactccggcaggtcatttgacccgatcagcttgcgcacggtgaaacagaacttcttgaactctccggcgctgccactgcgttcgtagatcgtcttgaacaaccatctggcttctgccttgcctgcggcgcggcgtgccaggcggtagagaaaacggccgatgccggggtcgatcaaaaagtaatcggggtgaaccgtcagcacgtccgggttcttgccttctgtgatctcgcggtacatccaatcagcaagctcgatctcgatgtactccggccgcccggtttcgctctttacgatcttgtagcggctaatcaaggcttcaccctcggataccgtcaccaggcggccgttcttggccttcttggtacgctgcatggcaacgtgcgtggtgtttaaccgaatgcaggtttctaccaggtcgtctttctgctttccgccatcggctcgccggcagaacttgagtacgtccgcaacgtgtggacggaacacgcggccgggcttgtctcccttcccttcccggtatcggttcatggattcggttagatgggaaaccgccatcagtaccaggtcgtaatcccacacactggccatgccggcggggcctgcggaaacctctacgtgcccgtctggaagctcgtagcggatcacctcgccagctcgtcggtcacgcttcgacagacggaaaacggccacgtccatgatgctgcgactatcgcgggtgcccacgtcatagagcatcggaacgaaaaaatctggttgctcgtcgcccttgggcggcttcctaatcgacggcgcaccggctgccggcggttgccgggattctttgcggattcgatcagcggccccttgccacgattcaccggggcgtgcttctgcctcgatgcgttgccgctgggcggcctgcgcggccttcaacttctccaccaggtcatcacccagcgccgcgccgatttgtaccgggccggatggtttgcgaccgctcacgccgattcctcgggcttgggggttccagtgccattgcagggccggcagacaacccagccgcttacgcctggccaaccgcccgttcctccacacatggggcattccacggcgtcggtgcctggttgttcttgattttccatgccgcctcctttagccgctaaaattcatctactcatttattcatttgctcatttactctggtagctgcgcgatgtattcagatagcagctcggtaatggtcttgccttggcgtaccgcgtacatcttcagcttggtgtgatcctccgccggcaactgaaagttgacccgcttcatggctggcgtgtctgccaggctggccaacgttgcagccttgctgctgcgtgcgctcggacggccggcacttagcgtgtttgtgcttttgctcattttctctttacctcattaactcaaatgagttttgatttaatttcagcggccagcgcctggacctcgcgggcagcgtcgccctcgggttctgattcaagaacggttgtgccggcggcggcagtgcctgggtagctcacgcgctgcgtgatacgggactcaagaatgggcagctcgtacccggccagcgcctcggcaacctcaccgccgatgcgcgtgcctttgatcgcccgcgacacgacaaaggccgcttgtagccttccatccgtgacctcaatgcgctgcttaaccagctccaccaggtcggcggtggcccaaatgtcgtaagggcttggctgcaccggaatcagcacgaagtcggctgccttgatcgcggacacagccaagtccgccgcctggggcgctccgtcgatcactacgaagtcgcgccggccgatggccttcacgtcgcggtcaatcgtcgggcggtcgatgccgacaacggttagcggttgatcttcccgcacggccgcccaatcgcgggcactgccctggggatcggaatcgactaacagaacatcggccccggcgagttgcagggcgcgggctagatgggttgcgatggtcgtcttgcctgacccgcctttctggttaagtacagcgataaccttcatgcgttccccttgcgtatttgtttatttactcatcgcatcatatacgcagcgaccgcatgacgcaagctgttttactcaaatacacatcacctttttagatgatcagtgattttgtgccgagctgccggtcggggagctgttggctggctggtggcaggatatattgtggtgtaaacaaattgacgcttagacaacttaataacacattgcggacgtctttaatgtactgaatttagttactgatcactgattaagtactgatatcggtaccaattcgaatccaaaaattacggatatgaatataggcatatccgtatccgaattatccgtttgacagctagcaacgattgtacaattgcttctttaaaaaaggaagaaagaaagaaagaaaagaatcaacatcagcgttaacaaacggccccgttacggcccaaacggtcatatagagtaacggcgttaagcgttgaaagactcctatcgaaatac

SEQ ID NO: 14 - DNA, 759 bp, Artificial sequence
  final miRandom target sequence
agaaacaaaatccctataacacccaatcctagctacaacttcaaaccctctctgaattgcaccacccccatcatcccaaacatgtaacaccccttttgaaactttttctcatgagccaccccccctttgccccatgccaccacttccttaatcaatttggcatgtgggggtggtgaacatgttgtggatatatggtgtgtttggtgtggctataatggtatcttccttatctttccatgctccttttctttcaaggctaagcgaaaacgctccttcttgaggggcggtttctgttggatgactacggttcaaatacctgtaatttttcaactcctccatctcacctcacacactgtgatttgggctcttgagggacatctcagaatggcaacacccctttttatgtgtaccgtactattttctagttctttttcttgtacaacgaaatttagatgcagtttcttagatgttggtgttgttttttaatcaaaattagagttttatcttgatagtaccggattatcaaggtaaaactctgattcttatcagaaaatggcaccaaaaatactttaagaactgtatgcaagttttttgttgtttttttttggtaattcttgtttgtgatgtgatgatttcaactgcaaactatgcctatcagtatggttaccatagactatatgttatctaataaatttacatttgaataggcctttggccaaaatgtattattgttgtcgttaatatgaatatggttaaatc

SEQ ID NO: 15 - DNA, 11295 bp, Artificial sequence
  RTP4808-1
gtatcaattgttcatctgtttgtgtttgtatgtatacagatctgaaaacatcacttctctcatctgattgtgttgttacatacatagatatagatctgttatatcattttttttattaattgtgtatatatatatgtgcatagatctggattacatgattgtgattatttacatgattttgttatttacgtatgtatatatgtagatctggactttttggagttgttgacttgattgtatttgtgtgtgtatatgtgtgttctgatcttgatatgttatgtatgtgcagctgaaccatggcggcggcaacaacaacaacaacaacatcttcttcgatctccttctccaccaaaccatctccttcctcctccaaatcaccattaccaatctccagattctccctcccattctccctaaaccccaacaaatcatcctcctcctcccgccgccgcggtatcaaatccagctctccctcctccatctccgccgtgctcaacacaaccaccaatgtcacaaccactccctctccaaccaaacctaccaaacccgaaacattcatctcccgattcgctccagatcaaccccgcaaaggcgctgatatcctcgtcgaagctttagaacgtcaaggcgtagaaaccgtattcgcttaccctggaggtacatcaatggagattcaccaagccttaacccgctcttcctcaatccgtaacgtccttcctcgtcacgaacaaggaggtgtattcgcagcagaaggatacgctcgatcctcaggtaaaccaggtatctgtatagccacttcaggtcccggagctacaaatctcgttagcggattagccgatgcgttgttagatagtgttcctcttgtagcaatcacaggacaagtccctcgtcgtatgattggtacagatgcgtttcaagagactccgattgttgaggtaacgcgttcgattacgaagcataactatcttgtgatggatgttgaagatatccctaggattattgaggaagctttctttttagctacttctggtagacctggacctgttttggttgatgttcctaaagatattcaacaacagcttgcgattcctaattgggaacaggctatgagattacctggttatatgtctaggatgcctaaacctccggaagattctcatttggagcagattgttaggttgatttctgagtctaagaagcctgtgttgtatgttggtggtggttgtttgaattctagcgatgaattgggtaggtttgttgagcttacggggatccctgttgcgagtacgttgatggggctgggatcttatccttgtgatgatgagttgtcgttacatatgcttggaatgcatgggactgtgtatgcaaattacgctgtggagcatagtgatttgttgttggcgtttggggtaaggtttgatgatcgtgtcacgggtaagcttgaggcttttgctagtagggctaagattgttcatattgatattgactcggctgagattgggaagaataagactcctcatgtgtctgtgtgtggtgatgttaagctggctttgcaagggatgaataaggttcttgagaaccgagcggaggagcttaagcttgattttggagtttggaggaatgagttgaacgtacagaaacagaagtttccgttgagctttaagacgtttggggaagctattcctccacagtatgcgattaaggtccttgatgagttgactgatggaaaagccataataagtactggtgtcgggcaacatcaaatgtgggcggcgcagttctacaattacaagaaaccaaggcagtggctatcatcaggaggccttggagctatgggatttggacttcctgctgcgattggagcgtctgttgctaaccctgatgcgatagttgtggatattgacggagatggaagctttataatgaatgtgcaagagctagccactattcgtgtagagaatcttccagtgaaggtacttttattaaacaaccagcatcttggcatggttatgcaatgggaagatcggttctacaaagctaaccgagctcacacatttctcggggatccggctcaggaggacgagatattcccgaacatgttgctgtttgcagcagcttgcgggattccagcggcgagggtgacaaagaaagcagatctccgagaagctattcagacaatgctggatacaccaggaccttacctgttggatgtgatttgtccgcaccaagaacatgtgttgccgatgatcccgaatggtggcactttcaacgatgtcataacggaaggagatggccggattaaatactgagagatgaaaccggtgattatcagaaccttttatggtctttgtatgcatatggtaaaaaaacttagtttgcaatttcctgtttgttttggtaatttgagtttcttttagttgttgatctgcctgctttttggtttacgtcagactactactgctgttgttgtttggtttcctttctttcattttataaataaataatccggttcggtttactccttgtgactggctcagtttggttattgcgaaatgcgaatggtaaattgagtaattgaaattcgttattagggttctaagctgttttaacagtcactgggttaatatctctcgaatcttgcatggaaaatgctcttaccattggtttttaattgaaatgtgctcatatgggccgtggtttccaaattaaataaaactacgatgtcatcgagaagtaaaatcaactgtgtccacattatcagttttgtgtatacgatgaaatagggtaattcaaaatctagcttgatatgccttttggttcattttaaccttctgtaaacattttttcagattttgaacaagtaaatccaaaaaaaaaaaaaaaaaatctcaactcaacactaaattattttaatgtataaaagatgcttaaaacatttggcttaaaagaaagaagctaaaaacatagagaactcttgtaaattgaagtatgaaaatatactgaattgggtattatatgaatttttctgatttaggattcacatgatccaaaaaggaaatccagaagcactaatcagacattggaagtaggaatatttcaaaaagttttttttttttaagtaagtgacaaaagcttttaaaaaatagaaaagaaactagtattaaagttgtaaatttaataaacaaaagaaattttttatattttttcatttctttttccagcatgaggttatgatggcaggatgtggatttcatttttttccttttgatagccttttaattgatctattataattgacgaaaaaatattagttaattatagatatattttaggtagtattagcaatttacacttccaaaagactatgtaagttgtaaatatgatgcgttgatctcttcatcattcaatggttagtcaaaaaaataaaagcttaactagtaaactaaagtagtcaaaaattgtactttagtttaaaatattacatgaataatccaaaacgacatttatgtgaaacaaaaacaatatctagtacgcgtcaattgatttaaatttaattaatcgactctagattcgacggtatcgataagctcgcggatccctgaaagcgacgttggatgttaacatctacaaattgccttttcttatcgaccatgtacgtaagcgcttacgtttttggtggacccttgaggaaactggtagctgttgtgggcctgtggtctcaagatggatcattaatttccaccttcacctacgatggggggcatcgcaccggtgagtaatattgtacggctaagagcgaatttggcctgtaggatccctgaaagcgacgttggatgttaacatctacaaattgccttttcttatcgaccatgtacgtaagcgcttacgtttttggtggacccttgaggaaactggtagctgttgtgggcctgtggtctcaagatggatcattaatttccaccttcacctacgatggggggcatcgcaccggtgagtaatattgtacggctaagagcgaatttggcctgtaggatccctgaaagcgacgttggatgttaacatctacaaattgccttttcttatcgaccatgtacgtaagcgcttacgtttttggtggacccttgaggaaactggtagctgttgtgggcctgtggtctcaagatggatcattaatttccaccttcacctacgatggggggcatcgcaccggtgagtaatattgtacggctaagagcgaatttggcctgtaggatccgcgagctggtcaatcccattgcttttgaagcagctcaacattgatctctttctcgatcgagggagatttttcaaatcagtgcgcaagacgtgacgtaagtatccgagtcagtttttatttttctactaatttggtcgtttatttcggcgtgtaggacatggcaaccgggcctgaatttcgcgggtattctgtttctattccaactttttcttgatccgcagccattaacgacttttgaatagatacgctgacacgccaagcctcgctagtcaaaagtgtaccaaacaacgctttacagcaagaacggaatgcgcgtgacgctcgcggtgacgccatttcgccttttcagaaatggataaatagccttgcttcctattatatcttcccaaattaccaatacattacactagcatctgaatttcataaccaatctcgatacaccaaatcgaggcgcgccagaaacaaaatccctataacacccaatcctagctacaacttcaaaccctctctgaattgcaccacccccatcatcccaaacatgtaacaccccttttgaaactttttctcatgagccaccccccctttgccccatgccaccacttccttaatcaatttggcatgtgggggtggtgaacatgttgtggatatatggtgtgtttggtgtggctataatggtatcttccttatctttccatgctccttttctttcaaggctaagcgaaaacgctccttcttgaggggcggtttctgttggatgactacggttcaaatacctgtaatttttcaactcctccatctcacctcacacactgtgatttgggctcttgagggacatctcagaatggcaacacccctttttatgtgtaccgtactattttctagttctttttcttgtacaacgaaatttagatgcagtttcttagatgttggtgttgttttttaatcaaaattagagttttatcttgatagtaccggattatcaaggtaaaactctgattcttatcagaaaatggcaccaaaaatactttaagaactgtatgcaagttttttgttgtttttttttggtaattcttgtttgtgatgtgatgatttcaactgcaaactatgcctatcagtatggttaccatagactatatgttatctaataaatttacatttgaataggcctttggccaaaatgtattattgttgtcgttaatatgaatatggttaaatccctgcaggcctaggatcgttcaaacatttggcaataaagtttcttaagattgaatcctgttgccggtcttgcgatgattatcatataatttctgttgaattacgttaagcatgtaataattaacatgtaatgcatgacgttatttatgagatgggtttttatgattagagtcccgcaattatacatttaatacgcgatagaaaacaaaatatagcgcgcaaactaggataaattatcgcgcgcggtgtcatctatgttactagatcggccggccgtttaaacttagttactaatcagtgatcagattgtcgtttcccgccttcactttaaactatcagtgtttgacaggatatattggcgggtaaacctaagagaaaagagcgtttattagaataatcggatatttaaaagggcgtgaaaaggtttatccgttcgtccatttgtatgtcaatattgggggggggggaaagccacgttgtgtctcaaaatctctgatgttacattgcacaagataaaaatatatcatcatgaacaataaaactgtctgcttacataaacagtaatacaaggggtgttcgccaccatgagccatatccagcgtgaaacctcgtgctcccgcccgcgcctcaattccaatatggatgccgacctttatggctacaagtgggcgcgcgacaacgtcggccagtcgggcgcgaccatttatcggctttatggcaaacccgatgccccggaactgttcctgaagcacggcaaaggcagcgtcgcaaacgatgtcaccgatgagatggtccgcctgaactggcttaccgagttcatgccgctgccgacgattaagcatttcatccgtaccccggacgatgcctggctcttgaccacggccattccgggcaaaacggcctttcaggtccttgaagagtacccggactccggtgagaatatcgtggacgccctcgcggtcttcctccgccgtttgcatagcatccccgtgtgcaactgccccttcaactcggaccgggttttccgcctggcacaggcccagtcgcgcatgaataacggcctcgttgacgcgagcgatttcgacgatgaacggaatggctggccggtggaacaggtttggaaggaaatgcacaaactgcttccgttctcgccggattcggtggtcacgcatggtgatttttccctggataatctgatctttgacgagggcaagctgatcggctgcatcgacgtgggtcgcgtcggtatcgccgaccgctatcaggacctggcgatcttgtggaattgcctcggcgagttctcgccctcgctccagaagcgcctgttccagaagtacggcatcgacaacccggatatgaacaagctccagttccacctcatgctggacgaatttttttgaacagaattggttaattggttgtaacactggcagagcattacgctgacttgacgggacggcggctttgttgaataaatcgaacttttgctgagttgaaggatcgatgagttgaaggaccccgtagaaaagatcaaaggatcttcttgagatcctttttttctgcgcgtaatctgctgcttgcaaacaaaaaaaccaccgctaccagcggtggtttgtttgccggatcaagagctaccaactctttttccgaaggtaactggcttcagcagagcgcagataccaaatactgtccttctagtgtagccgtagttaggccaccacttcaagaactctgtagcaccgcctacatacctcgctctgctaatcctgttaccagtggctgctgccagtggcgataagtcgtgtcttaccgggttggactcaagacgatagttaccggataaggcgcagcggtcgggctgaacggggggttcgtgcacacagcccagcttggagcgaacgacctacaccgaactgagatacctacagcgtgagctatgagaaagcgccacgcttcccgaagggagaaaggcggacaggtatccggtaagcggcagggtcggaacaggagagcgcacgagggagcttccagggggaaacgcctggtatctttatagtcctgtcgggtttcgccacctctgacttgagcgtcgatttttgtgatgctcgtcaggggggcggagcctatggaaaaacgccagcaacgcggcctttttacggttcctggccttttgctggccttttgctcacatgttctttcctgcgttatcccctgattctgtggataaccgtattaccgcctttgagtgagctgataccgctcgccgcagccgaacgaccgagcgcagcgagtcagtgagcgaggaagcggaagagcgcctgatgcggtattttctccttacgcatctgtgcggtatttcacaccgcataggccgcgataggccgacgcgaagcggcggggcgtagggagcgcagcgaccgaagggtaggcgctttttgcagctcttcggctgtgcgctggccagacagttatgcacaggccaggcgggttttaagagttttaataagttttaaagagttttaggcggaaaaatcgccttttttctcttttatatcagtcacttacatgtgtgaccggttcccaatgtacggctttgggttcccaatgtacgggttccggttcccaatgtacggctttgggttcccaatgtacgtgctatccacaggaaagagaccttttcgacctttttcccctgctagggcaatttgccctagcatctgctccgtacattaggaaccggcggatgcttcgccctcgatcaggttgcggtagcgcatgactaggatcgggccagcctgccccgcctcctccttcaaatcgtactccggcaggtcatttgacccgatcagcttgcgcacggtgaaacagaacttcttgaactctccggcgctgccactgcgttcgtagatcgtcttgaacaaccatctggcttctgccttgcctgcggcgcggcgtgccaggcggtagagaaaacggccgatgccggggtcgatcaaaaagtaatcggggtgaaccgtcagcacgtccgggttcttgccttctgtgatctcgcggtacatccaatcagcaagctcgatctcgatgtactccggccgcccggtttcgctctttacgatcttgtagcggctaatcaaggcttcaccctcggataccgtcaccaggcggccgttcttggccttcttggtacgctgcatggcaacgtgcgtggtgtttaaccgaatgcaggtttctaccaggtcgtctttctgctttccgccatcggctcgccggcagaacttgagtacgtccgcaacgtgtggacggaacacgcggccgggcttgtctcccttcccttcccggtatcggttcatggattcggttagatgggaaaccgccatcagtaccaggtcgtaatcccacacactggccatgccggcggggcctgcggaaacctctacgtgcccgtctggaagctcgtagcggatcacctcgccagctcgtcggtcacgcttcgacagacggaaaacggccacgtccatgatgctgcgactatcgcgggtgcccacgtcatagagcatcggaacgaaaaaatctggttgctcgtcgcccttgggcggcttcctaatcgacggcgcaccggctgccggcggttgccgggattctttgcggattcgatcagcggccccttgccacgattcaccggggcgtgcttctgcctcgatgcgttgccgctgggcggcctgcgcggccttcaacttctccaccaggtcatcacccagcgccgcgccgatttgtaccgggccggatggtttgcgaccgctcacgccgattcctcgggcttgggggttccagtgccattgcagggccggcagacaacccagccgcttacgcctggccaaccgcccgttcctccacacatggggcattccacggcgtcggtgcctggttgttcttgattttccatgccgcctcctttagccgctaaaattcatctactcatttattcatttgctcatttactctggtagctgcgcgatgtattcagatagcagctcggtaatggtcttgccttggcgtaccgcgtacatcttcagcttggtgtgatcctccgccggcaactgaaagttgacccgcttcatggctggcgtgtctgccaggctggccaacgttgcagccttgctgctgcgtgcgctcggacggccggcacttagcgtgtttgtgcttttgctcattttctctttacctcattaactcaaatgagttttgatttaatttcagcggccagcgcctggacctcgcgggcagcgtcgccctcgggttctgattcaagaacggttgtgccggcggcggcagtgcctgggtagctcacgcgctgcgtgatacgggactcaagaatgggcagctcgtacccggccagcgcctcggcaacctcaccgccgatgcgcgtgcctttgatcgcccgcgacacgacaaaggccgcttgtagccttccatccgtgacctcaatgcgctgcttaaccagctccaccaggtcggcggtggcccaaatgtcgtaagggcttggctgcaccggaatcagcacgaagtcggctgccttgatcgcggacacagccaagtccgccgcctggggcgctccgtcgatcactacgaagtcgcgccggccgatggccttcacgtcgcggtcaatcgtcgggcggtcgatgccgacaacggttagcggttgatcttcccgcacggccgcccaatcgcgggcactgccctggggatcggaatcgactaacagaacatcggccccggcgagttgcagggcgcgggctagatgggttgcgatggtcgtcttgcctgacccgcctttctggttaagtacagcgataaccttcatgcgttccccttgcgtatttgtttatttactcatcgcatcatatacgcagcgaccgcatgacgcaagctgttttactcaaatacacatcacctttttagatgatcagtgattttgtgccgagctgccggtcggggagctgttggctggctggtggcaggatatattgtggtgtaaacaaattgacgcttagacaacttaataacacattgcggacgtctttaatgtactgaatttagttactgatcactgattaagtactgatatcggtaccaattcgaatccaaaaattacggatatgaatataggcatatccgtatccgaattatccgtttgacagctagcaacgattgtacaattgcttctttaaaaaaggaagaaagaaagaaagaaaagaatcaacatcagcgttaacaaacggccccgttacggcccaaacggtcatatagagtaacggcgttaagcgttgaaagactcctatcgaaatacgtaaccgcaaacgtgtcatagtcagatcccctcttccttcaccgcctcaaacacaaaaataatcttctacagcctatatatacaacccccccttctatctctcctttctcacaattcatcatctttctttctctacccccaattttaagaaatcctctcttctcctcttcattttcaaggtaaatctctctctctctctctctctctgttattccttgttttaattaggtatgtattattgctagtttgttaatctgcttatcttatgtatgccttatgtgaatatctttatcttgttcatctcatccgtttagaagctataaatttgttgatttgactgtgtatctacacgtggttatgtttatatctaatcagatatgaatttcttcatattgttgcgtttgtgtgtaccaatccgaaatcgttgatttttttcatttaatcgtgtagctaattgtacgtatacatatggatctac

SEQ ID NO: 16 - DNA, 2891 bp, Artificial sequence
  Gm miR159/miR167-trap
ggatccctgaaagcgacgttggatgttaacatctacaaattgccttttcttatcgaccatgtacgtaagcgcttacgtttttggtggacccttgaggaaactggtagctgttgtgggcctgtggtctcaagatggatcattaatttccaccttcacctacgatggggggcatcgcaccggtgagtaatattgtacggctaagagcgaatttggcctgtaggatccctgaaagcgacgttggatgttaacatctacaaattgccttttcttatcgaccatgtacgtaagcgcttacgtttttggtggacccttgaggaaactggtagctgttgtgggcctgtggtctcaagatggatcattaatttccaccttcacctacgatggggggcatcgcaccggtgagtaatattgtacggctaagagcgaatttggcctgtaggatccctgaaagcgacgttggatgttaacatctacaaattgccttttcttatcgaccatgtacgtaagcgcttacgtttttggtggacccttgaggaaactggtagctgttgtgggcctgtggtctcaagatggatcattaatttccaccttcacctacgatggggggcatcgcaccggtgagtaatattgtacggctaagagcgaatttggcctgtaggatccgcgagctggtcaatcccattgcttttgaagcagctcaacattgatctctttctcgatcgagggagatttttcaaatcagtgcgcaagacgtgacgtaagtatccgagtcagtttttatttttctactaatttggtcgtttatttcggcgtgtaggacatggcaaccgggcctgaatttcgcgggtattctgtttctattccaactttttcttgatccgcagccattaacgacttttgaatagatacgctgacacgccaagcctcgctagtcaaaagtgtaccaaacaacgctttacagcaagaacggaatgcgcgtgacgctcgcggtgacgccatttcgccttttcagaaatggataaatagccttgcttcctattatatcttcccaaattaccaatacattacactagcatctgaatttcataaccaatctcgatacaccaaatcgaagaaacaaaatccctataacacccaatcctagctacaacttcaaaccctctctgaattgcaccacccccatcatcccaaacatgtaacaccccttttgaaactttttctcatgagccaccccccctttgccccatgccaccacttccttaatcaatttggcatgtgggggtggtgaacatgttgtggatatatggtgtgtttggtgtggctataatggtatcttccttatctttccatgctccttttctttcaaggctaagcgaaaacgctccttcttgaggggcggtttctgttggatagagctccctcaatcaatccaaatttttcaactcctccatctcacctcacacactgtgatttgggctcttgagggacatctcagaatggcaacacccctttttatgtgtaccgtactattttctagttctttttcttgtacaacgaaatttagatgcagtttcttagatgttggtgttgttttttaatcaaaattagagttttatcttgatagtaccggattatcaaggtaaaactctgattcttatcagaaaatggcaccaaaaatactttaagaactgtatgcaagttttttgttgtttttttttggtaattcttgtttgtgatgtgatgatttcaactgcaaactatgcctatcagtatggttaccatagactatatgttatctaataaatttacatttgaataggcctttggccaaaatgtattattgttgtcgttaatatgaatatggttaaatcgcggccgcagaaacaaaatccctataacacccaatcctagctacaacttcaaaccctctctgaattgcaccacccccatcatcccaaacatgtaacaccccttttgaaactttttctcatgagccaccccccctttgccccatgccaccacttccttaatcaatttggcatgtgggggtggtgaacatgttgtggatatatggtgtgtttggtgtggctataatggtatcttccttatctttccatgctccttttctttcaaggctaagcgaaaacgctccttcttgaggggcggtttctgttggatagatcatgctcaaggcagcttcatttttcaactcctccatctcacctcacacactgtgatttgggctcttgagggacatctcagaatggcaacacccctttttatgtgtaccgtactattttctagttctttttcttgtacaacgaaatttagatgcagtttcttagatgttggtgttgttttttaatcaaaattagagttttatcttgatagtaccggattatcaaggtaaaactctgattcttatcagaaaatggcaccaaaaatactttaagaactgtatgcaagttttttgttgtttttttttggtaattcttgtttgtgatgtgatgatttcaactgcaaactatgcctatcagtatggttaccatagactatatgttatctaataaatttacatttgaataggcctttggccaaaatgtattattgttgtcgttaatatgaatatggttaaatcgatcgttcaaacatttggcaataaagtttcttaagattgaatcctgttgccggtcttgcgatgattatcatataatttctgttgaattacgttaagcatgtaataattaacatgtaatgcatgacgttatttatgagatgggtttttatgattagagtcccgcaattatacatttaatacgcgatagaaaacaaaatatagcgcgcaaactaggataaattatcgcgcgcggtgtcatctatgttactagatc

SEQ ID NO: 17 - DNA, 12062 bp, Artificial sequence
  RWT1000
gtaaccgcaaacgtgtcatagtcagatcccctcttccttcaccgcctcaaacacaaaaataatcttctacagcctatatatacaacccccccttctatctctcctttctcacaattcatcatctttctttctctacccccaattttaagaaatcctctcttctcctcttcattttcaaggtaaatctctctctctctctctctctctgttattccttgttttaattaggtatgtattattgctagtttgttaatctgcttatcttatgtatgccttatgtgaatatctttatcttgttcatctcatccgtttagaagctataaatttgttgatttgactgtgtatctacacgtggttatgtttatatctaatcagatatgaatttcttcatattgttgcgtttgtgtgtaccaatccgaaatcgttgatttttttcatttaatcgtgtagctaattgtacgtatacatatggatctacgtatcaattgttcatctgtttgtgtttgtatgtatacagatctgaaaacatcacttctctcatctgattgtgttgttacatacatagatatagatctgttatatcattttttttattaattgtgtatatatatatgtgcatagatctggattacatgattgtgattatttacatgattttgttatttacgtatgtatatatgtagatctggactttttggagttgttgacttgattgtatttgtgtgtgtatatgtgtgttctgatcttgatatgttatgtatgtgcagctgaaccatggcggcggcaacaacaacaacaacaacatcttcttcgatctccttctccaccaaaccatctccttcctcctccaaatcaccattaccaatctccagattctccctcccattctccctaaaccccaacaaatcatcctcctcctcccgccgccgcggtatcaaatccagctctccctcctccatctccgccgtgctcaacacaaccaccaatgtcacaaccactccctctccaaccaaacctaccaaacccgaaacattcatctcccgattcgctccagatcaaccccgcaaaggcgctgatatcctcgtcgaagctttagaacgtcaaggcgtagaaaccgtattcgcttaccctggaggtacatcaatggagattcaccaagccttaacccgctcttcctcaatccgtaacgtccttcctcgtcacgaacaaggaggtgtattcgcagcagaaggatacgctcgatcctcaggtaaaccaggtatctgtatagccacttcaggtcccggagctacaaatctcgttagcggattagccgatgcgttgttagatagtgttcctcttgtagcaatcacaggacaagtccctcgtcgtatgattggtacagatgcgtttcaagagactccgattgttgaggtaacgcgttcgattacgaagcataactatcttgtgatggatgttgaagatatccctaggattattgaggaagctttctttttagctacttctggtagacctggacctgttttggttgatgttcctaaagatattcaacaacagcttgcgattcctaattgggaacaggctatgagattacctggttatatgtctaggatgcctaaacctccggaagattctcatttggagcagattgttaggttgatttctgagtctaagaagcctgtgttgtatgttggtggtggttgtttgaattctagcgatgaattgggtaggtttgttgagcttacggggatccctgttgcgagtacgttgatggggctgggatcttatccttgtgatgatgagttgtcgttacatatgcttggaatgcatgggactgtgtatgcaaattacgctgtggagcatagtgatttgttgttggcgtttggggtaaggtttgatgatcgtgtcacgggtaagcttgaggcttttgctagtagggctaagattgttcatattgatattgactcggctgagattgggaagaataagactcctcatgtgtctgtgtgtggtgatgttaagctggctttgcaagggatgaataaggttcttgagaaccgagcggaggagcttaagcttgattttggagtttggaggaatgagttgaacgtacagaaacagaagtttccgttgagctttaagacgtttggggaagctattcctccacagtatgcgattaaggtccttgatgagttgactgatggaaaagccataataagtactggtgtcgggcaacatcaaatgtgggcggcgcagttctacaattacaagaaaccaaggcagtggctatcatcaggaggccttggagctatgggatttggacttcctgctgcgattggagcgtctgttgctaaccctgatgcgatagttgtggatattgacggagatggaagctttataatgaatgtgcaagagctagccactattcgtgtagagaatcttccagtgaaggtacttttattaaacaaccagcatcttggcatggttatgcaatgggaagatcggttctacaaagctaaccgagctcacacatttctcggggatccggctcaggaggacgagatattcccgaacatgttgctgtttgcagcagcttgcgggattccagcggcgagggtgacaaagaaagcagatctccgagaagctattcagacaatgctggatacaccaggaccttacctgttggatgtgatttgtccgcaccaagaacatgtgttgccgatgatcccgaatggtggcactttcaacgatgtcataacggaaggagatggccggattaaatactgagagatgaaaccggtgattatcagaaccttttatggtctttgtatgcatatggtaaaaaaacttagtttgcaatttcctgtttgttttggtaatttgagtttcttttagttgttgatctgcctgctttttggtttacgtcagactactactgctgttgttgtttggtttcctttctttcattttataaataaataatccggttcggtttactccttgtgactggctcagtttggttattgcgaaatgcgaatggtaaattgagtaattgaaattcgttattagggttctaagctgttttaacagtcactgggttaatatctctcgaatcttgcatggaaaatgctcttaccattggtttttaattgaaatgtgctcatatgggccgtggtttccaaattaaataaaactacgatgtcatcgagaagtaaaatcaactgtgtccacattatcagttttgtgtatacgatgaaatagggtaattcaaaatctagcttgatatgccttttggttcattttaaccttctgtaaacattttttcagattttgaacaagtaaatccaaaaaaaaaaaaaaaaaatctcaactcaacactaaattattttaatgtataaaagatgcttaaaacatttggcttaaaagaaagaagctaaaaacatagagaactcttgtaaattgaagtatgaaaatatactgaattgggtattatatgaatttttctgatttaggattcacatgatccaaaaaggaaatccagaagcactaatcagacattggaagtaggaatatttcaaaaagttttttttttttaagtaagtgacaaaagcttttaaaaaatagaaaagaaactagtattaaagttgtaaatttaataaacaaaagaaattttttatattttttcatttctttttccagcatgaggttatgatggcaggatgtggatttcatttttttccttttgatagccttttaattgatctattataattgacgaaaaaatattagttaattatagatatattttaggtagtattagcaatttacacttccaaaagactatgtaagttgtaaatatgatgcgttgatctcttcatcattcaatggttagtcaaaaaaataaaagcttaactagtaaactaaagtagtcaaaaattgtactttagtttaaaatattacatgaataatccaaaacgacatttatgtgaaacaaaaacaatatctagtacgcgtcaattgatttaaatttaattaatcgactctagattcgacggtatcgataagctcgcggatccctgaaagcgacgttggatgttaacatctacaaattgccttttcttatcgaccatgtacgtaagcgcttacgtttttggtggacccttgaggaaactggtagctgttgtgggcctgtggtctcaagatggatcattaatttccaccttcacctacgatggggggcatcgcaccggtgagtaatattgtacggctaagagcgaatttggcctgtaggatccctgaaagcgacgttggatgttaacatctacaaattgccttttcttatcgaccatgtacgtaagcgcttacgtttttggtggacccttgaggaaactggtagctgttgtgggcctgtggtctcaagatggatcattaatttccaccttcacctacgatggggggcatcgcaccggtgagtaatattgtacggctaagagcgaatttggcctgtaggatccctgaaagcgacgttggatgttaacatctacaaattgccttttcttatcgaccatgtacgtaagcgcttacgtttttggtggacccttgaggaaactggtagctgttgtgggcctgtggtctcaagatggatcattaatttccaccttcacctacgatggggggcatcgcaccggtgagtaatattgtacggctaagagcgaatttggcctgtaggatccgcgagctggtcaatcccattgcttttgaagcagctcaacattgatctctttctcgatcgagggagatttttcaaatcagtgcgcaagacgtgacgtaagtatccgagtcagtttttatttttctactaatttggtcgtttatttcggcgtgtaggacatggcaaccgggcctgaatttcgcgggtattctgtttctattccaactttttcttgatccgcagccattaacgacttttgaatagatacgctgacacgccaagcctcgctagtcaaaagtgtaccaaacaacgctttacagcaagaacggaatgcgcgtgacgctcgcggtgacgccatttcgccttttcagaaatggataaatagccttgcttcctattatatcttcccaaattaccaatacattacactagcatctgaatttcataaccaatctcgatacaccaaatcgaggcgcgccagaaacaaaatccctataacacccaatcctagctacaacttcaaaccctctctgaattgcaccacccccatcatcccaaacatgtaacaccccttttgaaactttttctcatgagccaccccccctttgccccatgccaccacttccttaatcaatttggcatgtgggggtggtgaacatgttgtggatatatggtgtgtttggtgtggctataatggtatcttccttatctttccatgctccttttctttcaaggctaagcgaaaacgctccttcttgaggggcggtttctgttggatagagctccctcaatcaatccaaatttttcaactcctccatctcacctcacacactgtgatttgggctcttgagggacatctcagaatggcaacacccctttttatgtgtaccgtactattttctagttctttttcttgtacaacgaaatttagatgcagtttcttagatgttggtgttgttttttaatcaaaattagagttttatcttgatagtaccggattatcaaggtaaaactctgattcttatcagaaaatggcaccaaaaatactttaagaactgtatgcaagttttttgttgtttttttttggtaattcttgtttgtgatgtgatgatttcaactgcaaactatgcctatcagtatggttaccatagactatatgttatctaataaatttacatttgaataggcctttggccaaaatgtattattgttgtcgttaatatgaatatggttaaatcgcggccgcagaaacaaaatccctataacacccaatcctagctacaacttcaaaccctctctgaattgcaccacccccatcatcccaaacatgtaacaccccttttgaaactttttctcatgagccaccccccctttgccccatgccaccacttccttaatcaatttggcatgtgggggtggtgaacatgttgtggatatatggtgtgtttggtgtggctataatggtatcttccttatctttccatgctccttttctttcaaggctaagcgaaaacgctccttcttgaggggcggtttctgttggatagatcatgctcaaggcagcttcatttttcaactcctccatctcacctcacacactgtgatttgggctcttgagggacatctcagaatggcaacacccctttttatgtgtaccgtactattttctagttctttttcttgtacaacgaaatttagatgcagtttcttagatgttggtgttgttttttaatcaaaattagagttttatcttgatagtaccggattatcaaggtaaaactctgattcttatcagaaaatggcaccaaaaatactttaagaactgtatgcaagttttttgttgtttttttttggtaattcttgtttgtgatgtgatgatttcaactgcaaactatgcctatcagtatggttaccatagactatatgttatctaataaatttacatttgaataggcctttggccaaaatgtattattgttgtcgttaatatgaatatggttaaatccctgcaggcctaggatcgttcaaacatttggcaataaagtttcttaagattgaatcctgttgccggtcttgcgatgattatcatataatttctgttgaattacgttaagcatgtaataattaacatgtaatgcatgacgttatttatgagatgggtttttatgattagagtcccgcaattatacatttaatacgcgatagaaaacaaaatatagcgcgcaaactaggataaattatcgcgcgcggtgtcatctatgttactagatcggccggccgtttaaacttagttactaatcagtgatcagattgtcgtttcccgccttcactttaaactatcagtgtttgacaggatatattggcgggtaaacctaagagaaaagagcgtttattagaataatcggatatttaaaagggcgtgaaaaggtttatccgttcgtccatttgtatgtcaatattgggggggggggaaagccacgttgtgtctcaaaatctctgatgttacattgcacaagataaaaatatatcatcatgaacaataaaactgtctgcttacataaacagtaatacaaggggtgttcgccaccatgagccatatccagcgtgaaacctcgtgctcccgcccgcgcctcaattccaatatggatgccgacctttatggctacaagtgggcgcgcgacaacgtcggccagtcgggcgcgaccatttatcggctttatggcaaacccgatgccccggaactgttcctgaagcacggcaaaggcagcgtcgcaaacgatgtcaccgatgagatggtccgcctgaactggcttaccgagttcatgccgctgccgacgattaagcatttcatccgtaccccggacgatgcctggctcttgaccacggccattccgggcaaaacggcctttcaggtccttgaagagtacccggactccggtgagaatatcgtggacgccctcgcggtcttcctccgccgtttgcatagcatccccgtgtgcaactgccccttcaactcggaccgggttttccgcctggcacaggcccagtcgcgcatgaataacggcctcgttgacgcgagcgatttcgacgatgaacggaatggctggccggtggaacaggtttggaaggaaatgcacaaactgcttccgttctcgccggattcggtggtcacgcatggtgatttttccctggataatctgatctttgacgagggcaagctgatcggctgcatcgacgtgggtcgcgtcggtatcgccgaccgctatcaggacctggcgatcttgtggaattgcctcggcgagttctcgccctcgctccagaagcgcctgttccagaagtacggcatcgacaacccggatatgaacaagctccagttccacctcatgctggacgaatttttttgaacagaattggttaattggttgtaacactggcagagcattacgctgacttgacgggacggcggctttgttgaataaatcgaacttttgctgagttgaaggatcgatgagttgaaggaccccgtagaaaagatcaaaggatcttcttgagatcctttttttctgcgcgtaatctgctgcttgcaaacaaaaaaaccaccgctaccagcggtggtttgtttgccggatcaagagctaccaactctttttccgaaggtaactggcttcagcagagcgcagataccaaatactgtccttctagtgtagccgtagttaggccaccacttcaagaactctgtagcaccgcctacatacctcgctctgctaatcctgttaccagtggctgctgccagtggcgataagtcgtgtcttaccgggttggactcaagacgatagttaccggataaggcgcagcggtcgggctgaacggggggttcgtgcacacagcccagcttggagcgaacgacctacaccgaactgagatacctacagcgtgagctatgagaaagcgccacgcttcccgaagggagaaaggcggacaggtatccggtaagcggcagggtcggaacaggagagcgcacgagggagcttccagggggaaacgcctggtatctttatagtcctgtcgggtttcgccacctctgacttgagcgtcgatttttgtgatgctcgtcaggggggcggagcctatggaaaaacgccagcaacgcggcctttttacggttcctggccttttgctggccttttgctcacatgttctttcctgcgttatcccctgattctgtggataaccgtattaccgcctttgagtgagctgataccgctcgccgcagccgaacgaccgagcgcagcgagtcagtgagcgaggaagcggaagagcgcctgatgcggtattttctccttacgcatctgtgcggtatttcacaccgcataggccgcgataggccgacgcgaagcggcggggcgtagggagcgcagcgaccgaagggtaggcgctttttgcagctcttcggctgtgcgctggccagacagttatgcacaggccaggcgggttttaagagttttaataagttttaaagagttttaggcggaaaaatcgccttttttctcttttatatcagtcacttacatgtgtgaccggttcccaatgtacggctttgggttcccaatgtacgggttccggttcccaatgtacggctttgggttcccaatgtacgtgctatccacaggaaagagaccttttcgacctttttcccctgctagggcaatttgccctagcatctgctccgtacattaggaaccggcggatgcttcgccctcgatcaggttgcggtagcgcatgactaggatcgggccagcctgccccgcctcctccttcaaatcgtactccggcaggtcatttgacccgatcagcttgcgcacggtgaaacagaacttcttgaactctccggcgctgccactgcgttcgtagatcgtcttgaacaaccatctggcttctgccttgcctgcggcgcggcgtgccaggcggtagagaaaacggccgatgccggggtcgatcaaaaagtaatcggggtgaaccgtcagcacgtccgggttcttgccttctgtgatctcgcggtacatccaatcagcaagctcgatctcgatgtactccggccgcccggtttcgctctttacgatcttgtagcggctaatcaaggcttcaccctcggataccgtcaccaggcggccgttcttggccttcttggtacgctgcatggcaacgtgcgtggtgtttaaccgaatgcaggtttctaccaggtcgtctttctgctttccgccatcggctcgccggcagaacttgagtacgtccgcaacgtgtggacggaacacgcggccgggcttgtctcccttcccttcccggtatcggttcatggattcggttagatgggaaaccgccatcagtaccaggtcgtaatcccacacactggccatgccggcggggcctgcggaaacctctacgtgcccgtctggaagctcgtagcggatcacctcgccagctcgtcggtcacgcttcgacagacggaaaacggccacgtccatgatgctgcgactatcgcgggtgcccacgtcatagagcatcggaacgaaaaaatctggttgctcgtcgcccttgggcggcttcctaatcgacggcgcaccggctgccggcggttgccgggattctttgcggattcgatcagcggccccttgccacgattcaccggggcgtgcttctgcctcgatgcgttgccgctgggcggcctgcgcggccttcaacttctccaccaggtcatcacccagcgccgcgccgatttgtaccgggccggatggtttgcgaccgctcacgccgattcctcgggcttgggggttccagtgccattgcagggccggcagacaacccagccgcttacgcctggccaaccgcccgttcctccacacatggggcattccacggcgtcggtgcctggttgttcttgattttccatgccgcctcctttagccgctaaaattcatctactcatttattcatttgctcatttactctggtagctgcgcgatgtattcagatagcagctcggtaatggtcttgccttggcgtaccgcgtacatcttcagcttggtgtgatcctccgccggcaactgaaagttgacccgcttcatggctggcgtgtctgccaggctggccaacgttgcagccttgctgctgcgtgcgctcggacggccggcacttagcgtgtttgtgcttttgctcattttctctttacctcattaactcaaatgagttttgatttaatttcagcggccagcgcctggacctcgcgggcagcgtcgccctcgggttctgattcaagaacggttgtgccggcggcggcagtgcctgggtagctcacgcgctgcgtgatacgggactcaagaatgggcagctcgtacccggccagcgcctcggcaacctcaccgccgatgcgcgtgcctttgatcgcccgcgacacgacaaaggccgcttgtagccttccatccgtgacctcaatgcgctgcttaaccagctccaccaggtcggcggtggcccaaatgtcgtaagggcttggctgcaccggaatcagcacgaagtcggctgccttgatcgcggacacagccaagtccgccgcctggggcgctccgtcgatcactacgaagtcgcgccggccgatggccttcacgtcgcggtcaatcgtcgggcggtcgatgccgacaacggttagcggttgatcttcccgcacggccgcccaatcgcgggcactgccctggggatcggaatcgactaacagaacatcggccccggcgagttgcagggcgcgggctagatgggttgcgatggtcgtcttgcctgacccgcctttctggttaagtacagcgataaccttcatgcgttccccttgcgtatttgtttatttactcatcgcatcatatacgcagcgaccgcatgacgcaagctgttttactcaaatacacatcacctttttagatgatcagtgattttgtgccgagctgccggtcggggagctgttggctggctggtggcaggatatattgtggtgtaaacaaattgacgcttagacaacttaataacacattgcggacgtctttaatgtactgaatttagttactgatcactgattaagtactgatatcggtaccaattcgaatccaaaaattacggatatgaatataggcatatccgtatccgaattatccgtttgacagctagcaacgattgtacaattgcttctttaaaaaaggaagaaagaaagaaagaaaagaatcaacatcagcgttaacaaacggccccgttacggcccaaacggtcatatagagtaacggcgttaagcgttgaaagactcctatcgaaatac

SEQ ID NO: 18 - DNA, 12616 bp, Artificial sequence
  Construct RPR44
tggcaggatatattgtggtgtaaacaaattgacgcttagacaacttaataacacattgcggacgtttttaatgtactgaattggatccgcccgggcggtaccaagcttccgcggctgcagtgcagcgtgacccggtcgtgcccctctctagagataatgagcattgcatgtctaagttataaaaaattaccacatattttttttgtcacacttgtttgaagtgcagtttatctatctttatacatatatttaaactttactctacgaataatataatctatagtactacaataatatcagtgttttagagaatcatataaatgaacagttagacatggtctaaaggacaattgagtattttgacaacaggactctacagttttatctttttagtgtgcatgtgttctcctttttttttgcaaatagcttcacctatataatacttcatccattttattagtacatccatttagggtttagggttaatggtttttatagactaatttttttagtacatctattttattctattttagcctctaaattaagaaaactaaaactctattttagtttttttatttaatagtttagatataaaatagaataaaataaagtgactaaaaattaaacaaataccctttaagaaattaaaaaaactaaggaaacatttttcttgtttcgagtagataatgccagcctgttaaacgccgtcgacgagtctaacggacaccaaccagcgaaccagcagcgtcgcgtcgggccaagcgaagcagacggcacggcatctctgtcgctgcctctggacccctctcgagagttccgctccaccgttggacttgctccgctgtcggcatccagaaattgcgtggcggagcggcagacgtgagccggcacggcaggcggcctcctcctcctctcacggcaccggcagctacgggggattcctttcccaccgctccttcgctttcccttcctcgcccgccgtaataaatagacaccccctccacaccctctttccccaacctcgtgttgttcggagcgcacacacacacaaccagatctcccccaaatccacccgtcggcacctccgcttcaaggtacgccgctcgtcctccccccccccccccctctctaccttctctagatcggcgttccggtccatggttagggcccggtagttctacttctgttcatgtttgtgttagatccgtgtttgtgttagatccgtgctgctagcgttcgtacacggatgcgacctgtacgtcagacacgttctgattgctaacttgccagtgtttctctttggggaatcctgggatggctctagccgttccgcagacgggatcgatttcatgattttttttgtttcgttgcatagggtttggtttgcccttttcctttatttcaatatatgccgtgcacttgtttgtcgggtcatcttttcatgcttttttttgtcttggttgtgatgatgtggtctggttgggcggtcgttctagatcggagtagaattctgtttcaaactacctggtggatttattaattttggatctgtatgtgtgtgccatacatattcatagttacgaattgaagatgatggatggaaatatcgatctaggataggtatacatgttgatgcgggttttactgatgcatatacagagatgctttttgttcgcttggttgtgatgatgtggtgtggttgggcggtcgttcattcgttctagatcggagtagaatactgtttcaaactacctggtgtatttattaattttggaactgtatgtgtgtgtcatacatcttcatagttacgagtttaagatggatggaaatatcgatctaggataggtatacatgttgatgtgggttttactgatgcatatacatgatggcatatgcagcatctattcatatgctctaaccttgagtacctatctattataataaacaagtatgttttataattatttcgatcttgatatacttggatgatggcatatgcagcagctatatgtggatttttttagccctgccttcatacgctatttatttgcttggtactgtttcttttgtcgatgctcaccctgttgtttggtgttacttctgcagggtacggatccactagttctagaaaccatggccaccgccgccgccgcgtctaccgcgctcactggcgccactaccgctgcgcccaaggcgaggcgccgggcgcacctcctggccacccgccgcgccctcgccgcgcccatcaggtgctcagcggcgtcacccgccatgccgatggctcccccggccaccccgctccggccgtggggccccaccgatccccgcaagggcgccgacatcctcgtcgagtccctcgagcgctgcggcgtccgcgacgtcttcgcctaccccggcggcgcgtccatggagatccaccaggcactcacccgctcccccgtcatcgccaaccacctcttccgccacgagcaaggggaggcctttgcggcctccggctacgcgcgctcctcgggccgcgtcggcgtctgcatcgccacctccggccccggcgccaccaaccttgtctccgcgctcgccgacgcgctgctcgattccgtccccatggtcgccatcacgggacaggtgccgcgacgcatgattggcaccgacgccttccaggagacgcccatcgtcgaggtcacccgctccatcaccaagcacaactacctggtcctcgacgtcgacgacatcccccgcgtcgtgcaggaggctttcttcctcgcctcctctggtcgaccggggccggtgcttgtcgacatccccaaggacatccagcagcagatggcggtgcctgtctgggacaagcccatgagtctgcctgggtacattgcgcgccttcccaagccccctgcgactgagttgcttgagcaggtgctgcgtcttgttggtgaatcccggcgccctgttctttatgttggcggtggctgcgcagcatctggtgaggagttgcgacgctttgtggagctgactggaatcccggtcacaactactcttatgggcctcggcaacttccccagcgacgacccactgtctctgcgcatgctaggtatgcatggcacggtgtatgcaaattatgcagtggataaggccgatctgttgcttgcacttggtgtgcggtttgatgatcgtgtgacagggaagattgaggcttttgcaagcagggctaagattgtgcacgttgatattgatccggctgagattggcaagaacaagcagccacatgtgtccatctgtgcagatgttaagcttgctttgcagggcatgaatgctcttcttgaaggaagcacatcaaagaagagctttgactttggctcatggaacgatgagttggatcagcagaagagggaattcccccttgggtataaaacatctaatgaggagatccagccacaatatgctattcaggttcttgatgagctgacgaaaggcgaggccatcatcggcacaggtgttgggcagcaccagatgtgggcggcacagtactacacttacaagcggccaaggcagtggttgtcttcagctggtcttggggctatgggatttggtttgccggctgctgctggtgcttctgtggccaacccaggtgttactgttgttgacatcgatggagatggtagctttctcatgaacgttcaggagctagctatgatccgaattgagaacctcccggtgaaggtctttgtgctaaacaaccagcacctggggatggtggtgcagtgggaggacaggttctataaggccaacagagcgcacacatacttgggaaacccagagaatgaaagtgagatatatccagatttcgtgacgatcgccaaagggttcaacattccagcggtccgtgtgacaaagaagaacgaagtccgcgcagcgataaagaagatgctcgagactccagggccgtacctcttggatataatcgtcccacaccaggagcatgtgttgcctatgatccctaatggtggggctttcaaggatatgatcctggatggtgatggcaggactgtgtactgatctaaaatccagcaagcaactgatctaaaatccagcaagcaccgcctccctgctagtacaagggtgatatgtttttatctgtgtgatgttctcctgtattctatctttttttgtaggccgtcagctatctgttatggtaatcctatgtagcttccgaccttgtaattgtgtagtctgttgttttccttctggcatgtgtcataagagatcatttaagtgccttttgctacatataaataagataataagcactgctatgcagtggttctgaattggcttctgttgccaaatttaagtgtccaactggtccttgcttttgttttcgctatttttttccttttttagttattattatattggtaatttcaactcaacatatgatgtatggaataatgctagggctgcaatttcaaactattttacaaaccagaatggcattttcgtggtttgaggggagtgaaaaaaaatgaggcatttgactgaattagttacctgatccattttcgtggtttggatcattggaattaaattccattctaataatagtaattttggcatatatcaattaagttaattcggttttatgcaaaatatatttgtatactattattatcaagatgtcggagatatttatatgctacatttttactatacaggagtgagatgaagagtgtcatgtaagttacacagtagaaacaaattctattaatgcataaaatcatttccatcatccaccctatgaatttgagatagacctatatctaaactttgaaaagtggttgaatatcaaattccaaattaaataagttattttattgagtgaattctaatttctctaaaacgaagggatctaaacgccctctaaagctaatttggaaactcaaactttcttagcattggaggggattgagaaaaaatattaattcattttcatctcaatcattcaatctccaaagagatttgagttccttattagtctgttccatgcatcaaatcggctcaatgtgtcattatttgccatgacgattgacgagttgttctggggcctagcgctttccacgccgatgtgctggggcctggtcctggagaagacagcttgatatttaaagctatcaattgtttcaattgattcccacttcatttttctaaatgtagaaaacggtgacgtataagaaaaagaatgaattaggacttttattccgtacactaatctagagcggccgcaagcttgtacaacgcgtaccggttaattaaggtacccaattgcatatgtaatcctggctagcaacactgaactatgccagaaaccacatcaaagatatgggcaagcttcttggcccattatatccaaagacctcagagaaaggtgagcgaaggctcaattcagaagattggaagctgatcaataggatcaagacaatggtgagaacgcttccaaatctcactattccaccagaagatgcatacattatcattgaaacagatgcatgtgcaactggatggggagcagtatgcaagtggaagaaaaacaaggcagacccaagaaatacagagcaaatctgtaggtatgccagtggaaaatttgataagccaaaaggaacctgtgatgcagaaatctatggggttatgaatggcttagaaaagatgagattgttctacttggacaaaagagagatcacagtcagaactgacagtagtgcaatcgaaaggttctacaacaagagtgctgaacacaagccttctgagatcagatggatcaggttcatggactacatcactggtgcaggaccagagatagtcattgaacacataaaagggaagagcaatggtttagctgacatcttgtccaggctcaaagccaaattagctcagaatgaaccaacggaagagatgatcctgcttacacaagccataagggaagtaattccttatccagatcatccatacactgagcaactcagagaatggggaaacaaaattctggatccattccccacattcaagaaggacatgttcgaaagaacagagcaagcttttatgctaacagaggaaccagttctactctgtgcatgcaggaagcctgcaattcagttagtgtccagaacatctgccaacccaggaaggaaattcttcaagtgcgcaatgaacaaatgccattgctggtactgggcagatctcattgaagaacacattcaagacagaattgatgaatttctcaagaatcttgaagttctgaagaccggtggcgtgcaaacaatggaggaggaacttatgaaggaagtcaccaagctgaagatagaagagcaggagttcgaggaataccaggccacaccaagggctatgtcgccagtagccgcagaagatgtgctagatctccaagacgtaagcaatgacgattgaggaggcattgacgtcagggatgaccgcagcggagagtactgggcccattcagtggatgctccactgagttgtattattgtgtgcttttcggacaagtgtgctgtccactttcttttggcacctgtgccactttattccttgtctgccacgatgcctttgcttagcttgtaagcaaggatcgcagtgcgtgtgtgacaccaccccccttccgacgctctgcctatataaggcaccgtctgtaagctcttacgatcatcggtagttcaccaagggggtaccggtcgccaccatggcctcctccgagaacgtcatcaccgagttcatgcgcttcaaggtgcgcatggagggcaccgtgaacggccacgagttcgagatcgagggcgagggcgagggccgcccctacgagggccacaacaccgtgaagctgaaggtgaccaagggcggccccctgcccttcgcctgggacatcctgtccccccagttccagtacggctccaaggtgtacgtgaagcaccccgccgacatccccgactacaagaagctgtccttccccgagggcttcaagtgggagcgcgtgatgaacttcgaggacggcggcgtggcgaccgtgacccaggactcctccctgcaggacggctgcttcatctacaaggtgaagttcatcggcgtgaacttcccctccgacggccccgtgatgcagaagaagaccatgggctgggaggcctccaccgagcgcctgtacccccgcgacggcgtgctgaagggcgagacccacaaggccctgaagctgaaggacggcggccactacctggtggagttcaagtccatctacatggccaagaagcccgtgcagctgcccggctactactacgtggacgccaagctggacatcacctcccacaacgaggactacaccatcgtggagcagtacgagcgcaccgagggccgccaccacctgttcctgtagcggccgccctgcagggagctctcctcaaggggtgacctaagaacaccaccaccacctagggatcgttcaaacatttggcaataaagtttcttaagattgaatcctgttgccggtcttgcgatgattatcatataatttctgttgaattacgttaagcatgtaataattaacatgtaatgcatgacgttatttatgagatgggtttttatgattagagtcccgcaattatacatttaatacgcgatagaaaacaaaatatagcgcgcaaactaggataaattatcgcgcgcggtgtcatctatgttactagatcgggaattcgggcccggccggccagatcttgattgtcgtttcccgccttcagtttaaactatcagtgtttgacaggatatattggcgggtaaacctaagagaaaagagcgtttattagaataatcggatatttaaaagggcgtgaaaaggtttatccgttcgtccatttgtatgtgcatgccaaccacagggttcccctcgggagtgcttggcattccgtgcgataatgacttctgttcaaccacccaaacgtcggaaagcctgacgacggagcagcattccaaaaagatcccttggctcgtctgggtcggctagaaggtcgagtgggctgctgtggcttgatccctcaacgcggtcgcggacgtagcgcagcgccgaaaaatcctcgatcgcaaatccgacgctgtcgaaaagcgtgatctgcttgtcgctctttcggccgacgtcctggccagtcatcacgcgccaaagttccgtcacaggatgatctggcgcgagttgctggatctcgccttcaatccgggtctgtggcgggaactccacgaaaatatccgaacgcagcaagatcgtcgaccaattcttgaagacgaaagggcctcgtgatacgcctatttttataggttaatgtcatgataataatggtttcttagacgtcaggtggcacttttcggggaaatgtgcgcggaacccctatttgtttatttttctaaatacattcaaatatgtatccgctcatgagacaataaccctgataaatgcttcaataatattgaaaaaggaagagtatgagtattcaacatttccgtgtcgcccttattcccttttttgcggcattttgccttcctgtttttgctcacccagaaacgctggtgaaagtaaaagatgctgaagatcagttgggtgcacgagtgggttacatcgaactggatctcaacagcggtaagatccttgagagttttcgccccgaagaacgttttccaatgatgagcacttttaaagttctgctatgtggcgcggtattatcccgtgttgacgccgggcaagagcaactcggtcgccgcatacactattctcagaatgacttggttgagtactcaccagtcacagaaaagcatcttacggatggcatgacagtaagagaattatgcagtgctgccataaccatgagtgataacactgcggccaacttacttctgacaacgatcggaggaccgaaggagctaaccgcttttttgcacaacatgggggatcatgtaactcgccttgatcgttgggaaccggagctgaatgaagccataccaaacgacgagcgtgacaccacgatgccgggggggggggggggggacatgaggttgccccgtattcagtgtcgctgatttgtattgtctgaagttgtttttacgttaagttgatgcagatcaattaatacgatacctgcgtcataattgattatttgacgtggtttgatggcctccacgcacgttgtgatatgtagatgataatcattatcactttacgggtcctttccggtgatccgacaggttacggggcggcgacctcgcgggttttcgctatttatgaaaattttccggtttaaggcgtttccgttcttcttcgtcataacttaatgtttttatttaaaataccctctgaaaagaaaggaaacgacaggtgctgaaagcgagctttttggcctctgtcgtttcctttctctgtttttgtccgtggaatgaacaatggaaccccccccccccccccctgcagcaatggcaacaacgttgcgcaaactattaactggcgaactacttactctagcttcccggcaacaattaatagactggatggaggcggataaagttgcaggaccacttctgcgctcggcccttccggctggctggtttattgctgataaatctggagccggtgagcgtgggtctcgcggtatcattgcagcactggggccagatggtaagccctcccgtatcgtagttatctacacgacggggagtcaggcaactatggatgaacgaaatagacagatcgctgagataggtgcctcactgattaagcattggtaactgtcagaccaagtttactcatatatactttagattgatttaaaacttcatttttaatttaaaaggatctaggtgaagatcctttttgataatctcatgaccaaaatcccttaacgtgagttttcgttccactgagcgtcagaccccgtagaaaagatcaaaggatcttcttgagatcctttttttctgcgcgtaatctgctgcttgcaaacaaaaaaaccaccgctaccagcggtggtttgtttgccggatcaagagctaccaactctttttccgaaggtaactggcttcagcagagcgcagataccaaatactgtccttctagtgtagccgtagttaggccaccacttcaagaactctgtagcaccgcctacatacctcgctctgctaatcctgttaccagtggctgctgccagtggcgataagtcgtgtcttaccgggttggactcaagacgatagttaccggataaggcgcagcggtcgggctgaacggggggttcgtgcacacagcccagcttggagcgaacgacctacaccgaactgagatacctacagcgtgagctatgagaaagcgccacgcttcccgaagggagaaaggcggacaggtatccggtaagcggcagggtcggaacaggagagcgcacgagggagcttccagggggaaacgcctggtatctttatagtcctgtcgggtttcgccacctctgacttgagcgtcgatttttgtgatgctcgtcaggggggcggagcctatggaaaaacgccagcaacgcggcctttttacggttcctggccttttgctggccttttgctcacatgttctttcctgcgttatcccctgattctgtggataaccgtattaccgcctttgagtgagctgataccgctcgccgcagccgaacgaccgagcgcagcgagtcagtgagcgaggaagcggaagagcgcctgatgcggtattttctccttacgcatctgtgcggtatttcacaccgcatatggtgcactctcagtacaatctgctctgatgccgcatagttaagccagtatacactccgctatcgctacgtgactgggtcatggctgcgccccgacacccgccaacacccgctgacgcgccctgacgggcttgtctgctcccggcatccgcttacagacaagctgtgaccgtctccgggagctgcatgtgtcagaggttttcaccgtcatcaccgaaacgcgcgaggcagcagatcccccgatcaagtagatacactacatatatctacaatagacatcgagccggaaggtgatgtttactttcctgaaatccccagcaattttaggccagtttttacccaagacttcgcctctaacataaattatagttaccaaatctggcaaaagggttgaccggggggggggggaaagccacgttgtgtctcaaaatctctgatgttacattgcacaagataaaaatatatcatcatgaacaataaaactgtctgcttacataaacagtaatacaaggggtgttatgagccatattcaacgggaaacgtcttgctcgaggccgcgattaaattccaacatggatgctgatttatatgggtataaatgggctcgcgataatgtcgggcaatcaggtgcgacaatctatcgattgtatgggaagcccgatgcgccagagttgtttctgaaacatggcaaaggtagcgttgccaatgatgttacagatgagatggtcagactaaactggctgacggaatttatgcctcttccgaccatcaagcattttatccgtactcctgatgatgcatggttactcaccactgcgatccccgggaaaacagcattccaggtattagaagaatatcctgattcaggtgaaaatattgttgatgcgctggcagtgttcctgcgccggttgcattcgattcctgtttgtaattgtccttttaacagcgatcgcgtatttcgtctcgctcaggcgcaatcacgaatgaataacggtttggttgatgcgagtgattttgatgacgagcgtaatggctggcctgttgaacaagtctggaaagaaatgcataagcttttgccattctcaccggattcagtcgtcactcatggtgatttctcacttgataaccttatttttgacgaggggaaattaataggttgtattgatgttggacgagtcggaatcgcagaccgataccaggatcttgccatcctatggaactgcctcggtgagttttctccttcattacagaaacggctttttcaaaaatatggtattgataatcctgatatgaataaattgcagtttcatttgatgctcgatgagtttttctaatcagaattggttaattggttgtaacactggcagagcattacgctgacttgacgggacggcggctttgttgaataaatcgaacttttgctgagttgaaggatcagatcacgcatcttcccgacaacgcagaccgttccgtggcaaagcaaaagttcaaaatcaccaactggtccacctacaacaaagctctcatcaaccgtggctccctcactttctggctggatgatggggcgattcagggatcacaggcagcaacgctctgtcatcgttacaatcaacatgctaccctccgcgagatcatccgtgtttcaaacccggcagcttagttgccgttcttccgaatagcatcggtaacatgagcaaagtctgccgccttacaacggctctcccgctgacgccgtcccggactgatgggctgcctgtatcgagtggtgattttgtgccgagctgccggtcggggagctgttggctggctgg

SEQ ID NO: 19 - DNA, 12619 bp, Artificial sequence
  Construct RTP3429-9
gtgattttgtgccgagctgccggtcggggagctgttggctggctggtggcaggatatattgtggtgtaaacaaattgacgcttagacaacttaataacacattgcggacgtttttaatgtactgaattggatccgcccgggcggtaccaagcttccgcggctgcagtgcagcgtgacccggtcgtgcccctctctagagataatgagcattgcatgtctaagttataaaaaattaccacatattttttttgtcacacttgtttgaagtgcagtttatctatctttatacatatatttaaactttactctacgaataatataatctatagtactacaataatatcagtgttttagagaatcatataaatgaacagttagacatggtctaaaggacaattgagtattttgacaacaggactctacagttttatctttttagtgtgcatgtgttctcctttttttttgcaaatagcttcacctatataatacttcatccattttattagtacatccatttagggtttagggttaatggtttttatagactaatttttttagtacatctattttattctattttagcctctaaattaagaaaactaaaactctattttagtttttttatttaatagtttagatataaaatagaataaaataaagtgactaaaaattaaacaaataccctttaagaaattaaaaaaactaaggaaacatttttcttgtttcgagtagataatgccagcctgttaaacgccgtcgacgagtctaacggacaccaaccagcgaaccagcagcgtcgcgtcgggccaagcgaagcagacggcacggcatctctgtcgctgcctctggacccctctcgagagttccgctccaccgttggacttgctccgctgtcggcatccagaaattgcgtggcggagcggcagacgtgagccggcacggcaggcggcctcctcctcctctcacggcaccggcagctacgggggattcctttcccaccgctccttcgctttcccttcctcgcccgccgtaataaatagacaccccctccacaccctctttccccaacctcgtgttgttcggagcgcacacacacacaaccagatctcccccaaatccacccgtcggcacctccgcttcaaggtacgccgctcgtcctccccccccccccccctctctaccttctctagatcggcgttccggtccatggttagggcccggtagttctacttctgttcatgtttgtgttagatccgtgtttgtgttagatccgtgctgctagcgttcgtacacggatgcgacctgtacgtcagacacgttctgattgctaacttgccagtgtttctctttggggaatcctgggatggctctagccgttccgcagacgggatcgatttcatgattttttttgtttcgttgcatagggtttggtttgcccttttcctttatttcaatatatgccgtgcacttgtttgtcgggtcatcttttcatgcttttttttgtcttggttgtgatgatgtggtctggttgggcggtcgttctagatcggagtagaattctgtttcaaactacctggtggatttattaattttggatctgtatgtgtgtgccatacatattcatagttacgaattgaagatgatggatggaaatatcgatctaggataggtatacatgttgatgcgggttttactgatgcatatacagagatgctttttgttcgcttggttgtgatgatgtggtgtggttgggcggtcgttcattcgttctagatcggagtagaatactgtttcaaactacctggtgtatttattaattttggaactgtatgtgtgtgtcatacatcttcatagttacgagtttaagatggatggaaatatcgatctaggataggtatacatgttgatgtgggttttactgatgcatatacatgatggcatatgcagcatctattcatatgctctaaccttgagtacctatctattataataaacaagtatgttttataattatttcgatcttgatatacttggatgatggcatatgcagcagctatatgtggatttttttagccctgccttcatacgctatttatttgcttggtactgtttcttttgtcgatgctcaccctgttgtttggtgttacttctgcagggtacggatccactagttctagaaaccatggccaccgccgccgccgcgtctaccgcgctcactggcgccactaccgctgcgcccaaggcgaggcgccgggcgcacctcctggccacccgccgcgccctcgccgcgcccatcaggtgctcagcggcgtcacccgccatgccgatggctcccccggccaccccgctccggccgtggggccccaccgatccccgcaagggcgccgacatcctcgtcgagtccctcgagcgctgcggcgtccgcgacgtcttcgcctaccccggcggcgcgtccatggagatccaccaggcactcacccgctcccccgtcatcgccaaccacctcttccgccacgagcaaggggaggcctttgcggcctccggctacgcgcgctcctcgggccgcgtcggcgtctgcatcgccacctccggccccggcgccaccaaccttgtctccgcgctcgccgacgcgctgctcgattccgtccccatggtcgccatcacgggacaggtgccgcgacgcatgattggcaccgacgccttccaggagacgcccatcgtcgaggtcacccgctccatcaccaagcacaactacctggtcctcgacgtcgacgacatcccccgcgtcgtgcaggaggctttcttcctcgcctcctctggtcgaccggggccggtgcttgtcgacatccccaaggacatccagcagcagatggcggtgcctgtctgggacaagcccatgagtctgcctgggtacattgcgcgccttcccaagccccctgcgactgagttgcttgagcaggtgctgcgtcttgttggtgaatcccggcgccctgttctttatgttggcggtggctgcgcagcatctggtgaggagttgcgacgctttgtggagctgactggaatcccggtcacaactactcttatgggcctcggcaacttccccagcgacgacccactgtctctgcgcatgctaggtatgcatggcacggtgtatgcaaattatgcagtggataaggccgatctgttgcttgcacttggtgtgcggtttgatgatcgtgtgacagggaagattgaggcttttgcaagcagggctaagattgtgcacgttgatattgatccggctgagattggcaagaacaagcagccacatgtgtccatctgtgcagatgttaagcttgctttgcagggcatgaatgctcttcttgaaggaagcacatcaaagaagagctttgactttggctcatggaacgatgagttggatcagcagaagagggaattcccccttgggtataaaacatctaatgaggagatccagccacaatatgctattcaggttcttgatgagctgacgaaaggcgaggccatcatcggcacaggtgttgggcagcaccagatgtgggcggcacagtactacacttacaagcggccaaggcagtggttgtcttcagctggtcttggggctatgggatttggtttgccggctgctgctggtgcttctgtggccaacccaggtgttactgttgttgacatcgatggagatggtagctttctcatgaacgttcaggagctagctatgatccgaattgagaacctcccggtgaaggtctttgtgctaaacaaccagcacctggggatggtggtgcagtgggaggacaggttctataaggccaacagagcgcacacatacttgggaaacccagagaatgaaagtgagatatatccagatttcgtgacgatcgccaaagggttcaacattccagcggtccgtgtgacaaagaagaacgaagtccgcgcagcgataaagaagatgctcgagactccagggccgtacctcttggatataatcgtcccacaccaggagcatgtgttgcctatgatccctaatggtggggctttcaaggatatgatcctggatggtgatggcaggactgtgtactgatctaaaatccagcaagcaactgatctaaaatccagcaagcaccgcctccctgctagtacaagggtgatatgtttttatctgtgtgatgttctcctgtattctatctttttttgtaggccgtcagctatctgttatggtaatcctatgtagcttccgaccttgtaattgtgtagtctgttgttttccttctggcatgtgtcataagagatcatttaagtgccttttgctacatataaataagataataagcactgctatgcagtggttctgaattggcttctgttgccaaatttaagtgtccaactggtccttgcttttgttttcgctatttttttccttttttagttattattatattggtaatttcaactcaacatatgatgtatggaataatgctagggctgcaatttcaaactattttacaaaccagaatggcattttcgtggtttgaggggagtgaaaaaaaatgaggcatttgactgaattagttacctgatccattttcgtggtttggatcattggaattaaattccattctaataatagtaattttggcatatatcaattaagttaattcggttttatgcaaaatatatttgtatactattattatcaagatgtcggagatatttatatgctacatttttactatacaggagtgagatgaagagtgtcatgtaagttacacagtagaaacaaattctattaatgcataaaatcatttccatcatccaccctatgaatttgagatagacctatatctaaactttgaaaagtggttgaatatcaaattccaaattaaataagttattttattgagtgaattctaatttctctaaaacgaagggatctaaacgccctctaaagctaatttggaaactcaaactttcttagcattggaggggattgagaaaaaatattaattcattttcatctcaatcattcaatctccaaagagatttgagttccttattagtctgttccatgcatcaaatcggctcaatgtgtcattatttgccatgacgattgacgagttgttctggggcctagcgctttccacgccgatgtgctggggcctggtcctggagaagacagcttgatatttaaagctatcaattgtttcaattgattcccacttcatttttctaaatgtagaaaacggtgacgtataagaaaaagaatgaattaggacttttattccgtacactaatctagagcggccgcaagcttgtacaacgcgtaccggttaattaaggtacccaattgcatatgtaatcctggctagcaacactgaactatgccagaaaccacatcaaagatatgggcaagcttcttggcccattatatccaaagacctcagagaaaggtgagcgaaggctcaattcagaagattggaagctgatcaataggatcaagacaatggtgagaacgcttccaaatctcactattccaccagaagatgcatacattatcattgaaacagatgcatgtgcaactggatggggagcagtatgcaagtggaagaaaaacaaggcagacccaagaaatacagagcaaatctgtaggtatgccagtggaaaatttgataagccaaaaggaacctgtgatgcagaaatctatggggttatgaatggcttagaaaagatgagattgttctacttggacaaaagagagatcacagtcagaactgacagtagtgcaatcgaaaggttctacaacaagagtgctgaacacaagccttctgagatcagatggatcaggttcatggactacatcactggtgcaggaccagagatagtcattgaacacataaaagggaagagcaatggtttagctgacatcttgtccaggctcaaagccaaattagctcagaatgaaccaacggaagagatgatcctgcttacacaagccataagggaagtaattccttatccagatcatccatacactgagcaactcagagaatggggaaacaaaattctggatccattccccacattcaagaaggacatgttcgaaagaacagagcaagcttttatgctaacagaggaaccagttctactctgtgcatgcaggaagcctgcaattcagttagtgtccagaacatctgccaacccaggaaggaaattcttcaagtgcgcaatgaacaaatgccattgctggtactgggcagatctcattgaagaacacattcaagacagaattgatgaatttctcaagaatcttgaagttctgaagaccggtggcgtgcaaacaatggaggaggaacttatgaaggaagtcaccaagctgaagatagaagagcaggagttcgaggaataccaggccacaccaagggctatgtcgccagtagccgcagaagatgtgctagatctccaagacgtaagcaatgacgattgaggaggcattgacgtcagggatgaccgcagcggagagtactgggcccattcagtggatgctccactgagttgtattattgtgtgcttttcggacaagtgtgctgtccactttcttttggcacctgtgccactttattccttgtctgccacgatgcctttgcttagcttgtaagcaaggatcgcagtgcgtgtgtgacaccaccccccttccgacgctctgcctatataaggcaccgtctgtaagctcttacgatcatcggtagttcaccaagggggtaccggtcgccaccatggcctcctccgagaacgtcatcaccgagttcatgcgcttcaaggtgcgcatggagggcaccgtgaacggccacgagttcgagatcgagggcgagggcgagggccgcccctacgagggccacaacaccgtgaagctgaaggtgaccaagggcggccccctgcccttcgcctgggacatcctgtccccccagttccagtacggctccaaggtgtacgtgaagcaccccgccgacatccccgactacaagaagctgtccttccccgagggcttcaagtgggagcgcgtgatgaacttcgaggacggcggcgtggcgaccgtgacccaggactcctccctgcaggacggctgcttcatctacaaggtgaagttcatcggcgtgaacttcccctccgacggccccgtgatgcagaagaagaccatgggctgggaggcctccaccgagcgcctgtacccccgcgacggcgtgctgaagggcgagacccacaaggccctgaagctgaaggacggcggccactacctggtggagttcaagtccatctacatggccaagaagcccgtgcagctgcccggctactactacgtggacgccaagctggacatcacctcccacaacgaggactacaccatcgtggagcagtacgagcgcaccgagggccgccaccacctgttcctgtagcggccgccctgcagggagctctcctcaaggggtgaccctataagaacaccaccaccacctagggatcgttcaaacatttggcaataaagtttcttaagattgaatcctgttgccggtcttgcgatgattatcatataatttctgttgaattacgttaagcatgtaataattaacatgtaatgcatgacgttatttatgagatgggtttttatgattagagtcccgcaattatacatttaatacgcgatagaaaacaaaatatagcgcgcaaactaggataaattatcgcgcgcggtgtcatctatgttactagatcgggaattcgggcccggccggccagatcttgattgtcgtttcccgccttcagtttaaactatcagtgtttgacaggatatattggcgggtaaacctaagagaaaagagcgtttattagaataatcggatatttaaaagggcgtgaaaaggtttatccgttcgtccatttgtatgtgcatgccaaccacagggttcccctcgggagtgcttggcattccgtgcgataatgacttctgttcaaccacccaaacgtcggaaagcctgacgacggagcagcattccaaaaagatcccttggctcgtctgggtcggctagaaggtcgagtgggctgctgtggcttgatccctcaacgcggtcgcggacgtagcgcagcgccgaaaaatcctcgatcgcaaatccgacgctgtcgaaaagcgtgatctgcttgtcgctctttcggccgacgtcctggccagtcatcacgcgccaaagttccgtcacaggatgatctggcgcgagttgctggatctcgccttcaatccgggtctgtggcgggaactccacgaaaatatccgaacgcagcaagatcgtcgaccaattcttgaagacgaaagggcctcgtgatacgcctatttttataggttaatgtcatgataataatggtttcttagacgtcaggtggcacttttcggggaaatgtgcgcggaacccctatttgtttatttttctaaatacattcaaatatgtatccgctcatgagacaataaccctgataaatgcttcaataatattgaaaaaggaagagtatgagtattcaacatttccgtgtcgcccttattcccttttttgcggcattttgccttcctgtttttgctcacccagaaacgctggtgaaagtaaaagatgctgaagatcagttgggtgcacgagtgggttacatcgaactggatctcaacagcggtaagatccttgagagttttcgccccgaagaacgttttccaatgatgagcacttttaaagttctgctatgtggcgcggtattatcccgtgttgacgccgggcaagagcaactcggtcgccgcatacactattctcagaatgacttggttgagtactcaccagtcacagaaaagcatcttacggatggcatgacagtaagagaattatgcagtgctgccataaccatgagtgataacactgcggccaacttacttctgacaacgatcggaggaccgaaggagctaaccgcttttttgcacaacatgggggatcatgtaactcgccttgatcgttgggaaccggagctgaatgaagccataccaaacgacgagcgtgacaccacgatgccgggggggggggggggggacatgaggttgccccgtattcagtgtcgctgatttgtattgtctgaagttgtttttacgttaagttgatgcagatcaattaatacgatacctgcgtcataattgattatttgacgtggtttgatggcctccacgcacgttgtgatatgtagatgataatcattatcactttacgggtcctttccggtgatccgacaggttacggggcggcgacctcgcgggttttcgctatttatgaaaattttccggtttaaggcgtttccgttcttcttcgtcataacttaatgtttttatttaaaataccctctgaaaagaaaggaaacgacaggtgctgaaagcgagctttttggcctctgtcgtttcctttctctgtttttgtccgtggaatgaacaatggaaccccccccccccccccctgcagcaatggcaacaacgttgcgcaaactattaactggcgaactacttactctagcttcccggcaacaattaatagactggatggaggcggataaagttgcaggaccacttctgcgctcggcccttccggctggctggtttattgctgataaatctggagccggtgagcgtgggtctcgcggtatcattgcagcactggggccagatggtaagccctcccgtatcgtagttatctacacgacggggagtcaggcaactatggatgaacgaaatagacagatcgctgagataggtgcctcactgattaagcattggtaactgtcagaccaagtttactcatatatactttagattgatttaaaacttcatttttaatttaaaaggatctaggtgaagatcctttttgataatctcatgaccaaaatcccttaacgtgagttttcgttccactgagcgtcagaccccgtagaaaagatcaaaggatcttcttgagatcctttttttctgcgcgtaatctgctgcttgcaaacaaaaaaaccaccgctaccagcggtggtttgtttgccggatcaagagctaccaactctttttccgaaggtaactggcttcagcagagcgcagataccaaatactgtccttctagtgtagccgtagttaggccaccacttcaagaactctgtagcaccgcctacatacctcgctctgctaatcctgttaccagtggctgctgccagtggcgataagtcgtgtcttaccgggttggactcaagacgatagttaccggataaggcgcagcggtcgggctgaacggggggttcgtgcacacagcccagcttggagcgaacgacctacaccgaactgagatacctacagcgtgagctatgagaaagcgccacgcttcccgaagggagaaaggcggacaggtatccggtaagcggcagggtcggaacaggagagcgcacgagggagcttccagggggaaacgcctggtatctttatagtcctgtcgggtttcgccacctctgacttgagcgtcgatttttgtgatgctcgtcaggggggcggagcctatggaaaaacgccagcaacgcggcctttttacggttcctggccttttgctggccttttgctcacatgttctttcctgcgttatcccctgattctgtggataaccgtattaccgcctttgagtgagctgataccgctcgccgcagccgaacgaccgagcgcagcgagtcagtgagcgaggaagcggaagagcgcctgatgcggtattttctccttacgcatctgtgcggtatttcacaccgcatatggtgcactctcagtacaatctgctctgatgccgcatagttaagccagtatacactccgctatcgctacgtgactgggtcatggctgcgccccgacacccgccaacacccgctgacgcgccctgacgggcttgtctgctcccggcatccgcttacagacaagctgtgaccgtctccgggagctgcatgtgtcagaggttttcaccgtcatcaccgaaacgcgcgaggcagcagatcccccgatcaagtagatacactacatatatctacaatagacatcgagccggaaggtgatgtttactttcctgaaatccccagcaattttaggccagtttttacccaagacttcgcctctaacataaattatagttaccaaatctggcaaaagggttgaccggggggggggggaaagccacgttgtgtctcaaaatctctgatgttacattgcacaagataaaaatatatcatcatgaacaataaaactgtctgcttacataaacagtaatacaaggggtgttatgagccatattcaacgggaaacgtcttgctcgaggccgcgattaaattccaacatggatgctgatttatatgggtataaatgggctcgcgataatgtcgggcaatcaggtgcgacaatctatcgattgtatgggaagcccgatgcgccagagttgtttctgaaacatggcaaaggtagcgttgccaatgatgttacagatgagatggtcagactaaactggctgacggaatttatgcctcttccgaccatcaagcattttatccgtactcctgatgatgcatggttactcaccactgcgatccccgggaaaacagcattccaggtattagaagaatatcctgattcaggtgaaaatattgttgatgcgctggcagtgttcctgcgccggttgcattcgattcctgtttgtaattgtccttttaacagcgatcgcgtatttcgtctcgctcaggcgcaatcacgaatgaataacggtttggttgatgcgagtgattttgatgacgagcgtaatggctggcctgttgaacaagtctggaaagaaatgcataagcttttgccattctcaccggattcagtcgtcactcatggtgatttctcacttgataaccttatttttgacgaggggaaattaataggttgtattgatgttggacgagtcggaatcgcagaccgataccaggatcttgccatcctatggaactgcctcggtgagttttctccttcattacagaaacggctttttcaaaaatatggtattgataatcctgatatgaataaattgcagtttcatttgatgctcgatgagtttttctaatcagaattggttaattggttgtaacactggcagagcattacgctgacttgacgggacggcggctttgttgaataaatcgaacttttgctgagttgaaggatcagatcacgcatcttcccgacaacgcagaccgttccgtggcaaagcaaaagttcaaaatcaccaactggtccacctacaacaaagctctcatcaaccgtggctccctcactttctggctggatgatggggcgattcagggatcacaggcagcaacgctctgtcatcgttacaatcaacatgctaccctccgcgagatcatccgtgtttcaaacccggcagcttagttgccgttcttccgaatagcatcggtaacatgagcaaagtctgccgccttacaacggctctcccgctgacgccgtcccggactgatgggctgcctgtatcgagtg

SEQ ID NO: 20 - DNA, 9503 bp, Artificial sequence
  RCB346
attatacatagttgataagcgatcgcagcttggcgtaatcatggtcatagctgtttcctactagatctgattgtcgtttcccgccttcagtttaaactatcagtgtttgacaggatatattggcgggtaaacctaagagaaaagagcgtttattagaataatcggatatttaaaagggcgtgaaaaggtttatccgttcgtccatttgtatgtccatgtgttttatggacagcaagcgaaccggaattgccagctggggcgccctctggtaaggttgggaagccctgcaaagtaaactggatggctttcttgccgccaaggatctgatggcgcaggggatcaagatctgatcaagagacaggatgaggatcgtttcgcatgattgaacaagatggattgcacgcaggttctccggccgcttgggtggagaggctattcggctatgactgggcacaacagacaatcggctgctctgatgccgccgtgttccggctgtcagcgcaggggcgcccggttctttttgtcaagaccgacctgtccggtgccctgaatgaactgcaggacgaggcagcgcggctatcgtggctggccacgacgggcgttccttgcgcagctgtgctcgacgttgtcactgaagcgggaagggactggctgctattgggcgaagtgccggggcaggatctcctgtcatcccaccttgctcctgccgagaaagtatccatcatggctgatgcaatgcggcggctgcatacgcttgatccggctacctgcccattcgaccaccaagcgaaacatcgcatcgagcgagcacgtactcggatggaagccggtcttgtcgatcaggatgatctggacgaagagcatcaggggctcgcgccagccgaactgttcgccaggctcaaggcgcgcatgcccgacggcgaggatctcgtcgtgacccatggcgatgcctgcttgccgaatatcatggtggaaaatggccgcttttctggattcatcgactgtggccggctgggtgtggcggaccgctatcaggacatagcgttggctacccgtgatattgctgaagagcttggcggcgaatgggctgaccgcttcctcgtgctttacggtatcgccgctcccgattcgcagcgcatcgccttctatcgccttcttgacgagttcttctgaattgaaaaaggaagaatgcatgaccaaaatcccttaacgtgagttttcgttccactgagcgtcagaccccgtagaaaagatcaaaggatcttcttgagatcctttttttctgcgcgtaatctgctgcttgcaaacaaaaaaaccaccgctaccagcggtggtttgtttgccggatcaagagctaccaactctttttccgaaggtaactggcttcagcagagcgcagataccaaatactgtccttctagtgtagccgtagttaggccaccacttcaagaactctgtagcaccgcctacatacctcgctctgctaatcctgttaccagtggctgctgccagtggcgataagtcgtgtcttaccgggttggactcaagacgatagttaccggataaggcgcagcggtcgggctgaacggggggttcgtgcacacagcccagcttggagcgaacgacctacaccgaactgagatacctacagcgtgagctatgagaaagcgccacgcttcccgaagggagaaaggcggacaggtatccggtaagcggcagggtcggaacaggagagcgcacgagggagcttccagggggaaacgcctggtatctttatagtcctgtcgggtttcgccacctctgacttgagcgtcgatttttgtgatgctcgtcaggggggcggagcctatggaaaaacgccagcaacgcggcctttttacggttcctggccttttgctggccttttgctcacatgttctttcctgcgttatcccctgattctgtggataaccgtattaccgcctttgagtgagctgataccgctcgccgcagccgaacgaccgagcgcagcgagtcagtgagcgaggaagcggaagagcgcctgatgcggtattttctccttacgcatctgtgcggtatttcacaccgcatatggtgcactctcagtacaatctgctctgatgccgcatagttaagccagtatacactccgctatcgctacgtgactgggtcatggctgcgccccgacacccgccaacacccgctgacgcgccctgacgggcttgtctgctcccggcatccgcttacagacaagctgtgaccgtctccgggagctgcatgtgtcagaggttttcaccgtcatcaccgaaacgcgcgaggcagggtgccttgatgtgggcgccggcggtcgagtggcgacggcgcggcttgtccgcgccctggtagattgcctggccgtaggccagccatttttgagcggccagcggccgcgataggccgacgcgaagcggcggggcgtagggagcgcagcgaccgaagggtaggcgctttttgcagctcttcggctgtgcgctggccagacagttatgcacaggccaggcgggttttaagagttttaataagttttaaagagttttaggcggaaaaatcgccttttttctcttttatatcagtcacttacatgtgtgaccggttcccaatgtacggctttgggttcccaatgtacgggttccggttcccaatgtacggctttgggttcccaatgtacgtgctatccacaggaaagagaccttttcgacctttttcccctgctagggcaatttgccctagcatctgctccgtacattaggaaccggcggatgcttcgccctcgatcaggttgcggtagcgcatgactaggatcgggccagcctgccccgcctcctccttcaaatcgtactccggcaggtcatttgacccgatcagcttgcgcacggtgaaacagaacttcttgaactctccggcgctgccactgcgttcgtagatcgtcttgaacaaccatctggcttctgccttgcctgcggcgcggcgtgccaggcggtagagaaaacggccgatgccgggatcgatcaaaaagtaatcggggtgaaccgtcagcacgtccgggttcttgccttctgtgatctcgcggtacatccaatcagctagctcgatctcgatgtactccggccgcccggtttcgctctttacgatcttgtagcggctaatcaaggcttcaccctcggataccgtcaccaggcggccgttcttggccttcttcgtacgctgcatggcaacgtgcgtggtgtttaaccgaatgcaggtttctaccaggtcgtctttctgctttccgccatcggctcgccggcagaacttgagtacgtccgcaacgtgtggacggaacacgcggccgggcttgtctcccttcccttcccggtatcggttcatggattcggttagatgggaaaccgccatcagtaccaggtcgtaatcccacacactggccatgccggccggccctgcggaaacctctacgtgcccgtctggaagctcgtagcggatcacctcgccagctcgtcggtcacgcttcgacagacggaaaacggccacgtccatgatgctgcgactatcgcgggtgcccacgtcatagagcatcggaacgaaaaaatctggttgctcgtcgcccttgggcggcttcctaatcgacggcgcaccggctgccggcggttgccgggattctttgcggattcgatcagcggccgcttgccacgattcaccggggcgtgcttctgcctcgatgcgttgccgctgggcggcctgcgcggccttcaacttctccaccaggtcatcacccagcgccgcgccgatttgtaccgggccggatggtttgcgaccgctcacgccgattcctcgggcttgggggttccagtgccattgcagggccggcagacaacccagccgcttacgcctggccaaccgcccgttcctccacacatggggcattccacggcgtcggtgcctggttgttcttgattttccatgccgcctcctttagccgctaaaattcatctactcatttattcatttgctcatttactctggtagctgcgcgatgtattcagatagcagctcggtaatggtcttgccttggcgtaccgcgtacatcttcagcttggtgtgatcctccgccggcaactgaaagttgacccgcttcatggctggcgtgtctgccaggctggccaacgttgcagccttgctgctgcgtgcgctcggacggccggcacttagcgtgtttgtgcttttgctcattttctctttacctcattaactcaaatgagttttgatttaatttcagcggccagcgcctggacctcgcgggcagcgtcgccctcgggttctgattcaagaacggttgtgccggcggcggcagtgcctgggtagctcacgcgctgcgtgatacgggactcaagaatgggcagctcgtacccggccagcgcctcggcaacctcaccgccgatgcgcgtgcctttgatcgcccgcgacacgacaaaggccgcttgtagccttccatccgtgacctcaatgcgctgcttaaccagctccaccaggtcggcggtggcccatatgtcgtaagggcttggctgcaccggaatcagcacgaagtcggctgccttgatcgcggacacagccaagtccgccgcctggggcgctccgtcgatcactacgaagtcgcgccggccgatggccttcacgtcgcggtcaatcgtcgggcggtcgatgccgacaacggttagcggttgatcttcccgcacggccgcccaatcgcgggcactgccctggggatcggaatcgactaacagaacatcggccccggcgagttgcagggcgcgggctagatgggttgcgatggtcgtcttgcctgacccgcctttctggttaagtacagcgataaccttcatgcgttccccttgcgtatttgtttatttactcatcgcatcatatacgcagcgaccgcatgacgcaagctgttttactcaaatacacatcacctttttagacggcggcgctcggtttcttcagcggccaagctggccggccaggccgccagcttggcatcagacaaaccggccaggatttcatgcagccgcacggttgagacgtgcgcgggcggctcgaacacgtacccggccgcgatcatctccgcctcgatctcttcggtaatgaaaaacggttcgtcctggccgtcctggtgcggtttcatgcttgttcctcttggcgttcattctcggcggccgccagggcgtcggcctcggtcaatgcgtcctcacggaaggcaccgcgccgcctggcctcggtgggcgtcacttcctcgctgcgctcaagtgcgcggtacagggtcgagcgatgcacgccaagcagtgcagccgcctctttcacggtgcggccttcctggtcgatcagctcgcgggcgtgcgcgatctgtgccggggtgagggtagggcgggggccaaacttcacgcctcgggccttggcggcctcgcgcccgctccgggtgcggtcgatgattagggaacgctcgaactcggcaatgccggcgaacacggtcaacaccatgcggccggccggcgtggtggtaacgcgtggtgattttgtgccgagctgccggtcggggagctgttggctggctggtggcaggatatattgtggtgtaaacaaattgacgcttagacaacttaataacacattgcggacgtctttaatgtactgaattaacatccgtttgatacttgtctaaaattggctgatttcgagtgcatctatgcataaaaacaatctaatgacaattattaccaagcaggatcctctagaattcccgatctagtaacatagatgacaccgcgcgcgataatttatcctagtttgcgcgctatattttgttttctatcgcgtattaaatgtataattgcgggactctaatcataaaaacccatctcataaataacgtcatgcattacatgttaattattacatgcttaacgtaattcaacagaaattatatgataatcatcgcaagaccggcaacaggattcaatcttaagaaactttattgccaaatgtttgaacgatcggggaaattcgagctcgccggcgtcgacgatatcctgcaggtcaaatctcggtgacgggcaggaccggacggggcggtaccggcaggctgaagtccagctgccagaaacccacgtcatgccagttcccgtgcttgaagccggccgcccgcagcatgccgcggggggcatatccgagcgcctcgtgcatgcgcacgctcgggtcgttgggcagcccgatgacagcgaccacgctcttgaagccctgtgcctccagggacttcagcaggtgggtgtagagcgtggagcccagtcccgtccgctggtggcggggggagacgtacacggtcgactcggccgtccagtcgtaggcgttgcgtgccttccaggggcccgcgtaggcgatgccggcgacctcgccgtccacctcggcgacgagccagggatagcgctcccgcagacggacgaggtcgtccgtccactcctgcggttcctgcggctcggtacggaagttgaccgtgcttgtctcgatgtagtggttgacgatggtgcagaccgccggcatgtccgcctcggtggcacggcggatgtcggccgggcgtcgttctgggctcatggcgcgcctttggttgagagtgaatatgagactctaattggataccgaggggaatttatggaacgtcagtggagcatttttgacaagaaatatttgctagctgatagtgaccttaggcgacttttgaacgcgcaataatggtttctgacgtatgtgcttagctcattaaactccagaaacccgcggctgagtggctccttcaacgttgcggttctgtcagttccaaacgtaaaacggcttgtcccgcgtcatcggcgggggtcataacgtgactcccttaattctccgctcagatcagaagcttgctatcaactttgtatagaaaagttggctccgaattcgcccttagcttgactagagaattcgaatccaaaaattacggatatgaatataggcatatccgtatccgaattatccgtttgacagctagcaacgattgtacaattgcttctttaaaaaaggaagaaagaaagaaagaaaagaatcaacatcagcgttaacaaacggccccgttacggcccaaacggtcatatagagtaacggcgttaagcgttgaaagactcctatcgaaatacgtaaccgcaaacgtgtcatagtcagatcccctcttccttcaccgcctcaaacacaaaaataatcttctacagcctatatatacaacccccccttctatctctcctttctcacaattcatcatctttctttctctacccccaattttaagaaatcctctcttctcctcttcattttcaaggtaaatctctctctctctctctctctctgttattccttgttttaattaggtatgtattattgctagtttgttaatctgcttatcttatgtatgccttatgtgaatatctttatcttgttcatctcatccgtttagaagctataaatttgttgatttgactgtgtatctacacgtggttatgtttatatctaatcagatatgaatttcttcatattgttgcgtttgtgtgtaccaatccgaaatcgttgatttttttcatttaatcgtgtagctaattgtacgtatacatatggatctacgtatcaattgttcatctgtttgtgtttgtatgtatacagatctgaaaacatcacttctctcatctgattgtgttgttacatacatagatatagatctgttatatcattttttttattaattgtgtatatatatatgtgcatagatctggattacatgattgtgattatttacatgattttgttatttacgtatgtatatatgtagatctggactttttggagttgttgacttgattgtatttgtgtgtgtatatgtgtgttctgatcttgatatgttatgtatgtgcagcccggatcaagggcgaattcgacccaagtttgtacaaaaaagcaggctccgaattcgcccttcgggatccaagcacttcatagatcgtgattttggagtaactttgatgaaacgtaattttgaattataaagttgatacatatacttttcataatttctttatagacaaaaaaaatgattacgatgacatattatgtccaaggtgtatattttgttttcatgcttacaggatagtaaaaaagcttaattttaaatataatttctataagcaaatcaatgtaaaaccatagcaaagaagcaaatcaatgccaaaaaaggtgcaaataataagatgtgagggttaaaaaaagggaacaagaccatgttcttgtctacttgaaatgtatccttaaatctttgaaacttacatgtatatagcaaattttcttactttttgcttgttgatatgactggatctactcattgaagagcctcccgccgttgatgtctccggtcatgaaaccctttgaccggagtggaagctaccaaagaatgaatccaaagagatcgcatgatccggaaaagtaagcaaaatgtttggaatttgtttttcttccatctttcgattgagaaggaaaaaaaaaacaattattggggaataaatcagcttaattaggatcaatgcgatccctttggatcctttctctagttgctgtgaagaactctctctctttcaaggtgggagcaatggtgttttaattttctcgaaggcctttgatataaaagatgaccatgatcctcttcttgttaaataaaaatataaaacacactttttctcttctttttttttttttttttttaatttccaccttctcatctttaaactttttatttttagtttattatgtccacattgagaattttactttatatttgacttggagtaaaaaagacgtctatactttagacgaaatcttgtggtcttaatcacatgatttatattttataccgttattactattatcttgcaccgttatatgatcatttcggcaactactataaccaccaaacttgaagcttatacatgtatagtattatgaacatatgaagcttatacatgcatagatttatgaacatatgactgtgtaaaactaaaactaaagatatattatcagccattatcccattgtttcaaaagggcgaattcgacccagctttcttgtacaaagtggagctcgatcgttcaaacatttggcaataaagtttcttaagattgaatcctgttgccggtcttgcgatgattatcatataatttctgttgaattacgttaagcatgtaataattaacatgtaatgcatgacgttatttatgagatgggtttttatgattagagtcccgcaattatacatttaatacgcgatagaaaacaaaatatagcgcgcaaactaggataaattatcgcgcgcggtgtcatctatgttactagatcggccggccaacttt

SEQ ID NO: 21 - DNA, 8870 bp, Artificial sequence
  RCB371
attatacatagttgataagcgatcgcagcttggcgtaatcatggtcatagctgtttcctactagatctgattgtcgtttcccgccttcagtttaaactatcagtgtttgacaggatatattggcgggtaaacctaagagaaaagagcgtttattagaataatcggatatttaaaagggcgtgaaaaggtttatccgttcgtccatttgtatgtccatgtgttttatggacagcaagcgaaccggaattgccagctggggcgccctctggtaaggttgggaagccctgcaaagtaaactggatggctttcttgccgccaaggatctgatggcgcaggggatcaagatctgatcaagagacaggatgaggatcgtttcgcatgattgaacaagatggattgcacgcaggttctccggccgcttgggtggagaggctattcggctatgactgggcacaacagacaatcggctgctctgatgccgccgtgttccggctgtcagcgcaggggcgcccggttctttttgtcaagaccgacctgtccggtgccctgaatgaactgcaggacgaggcagcgcggctatcgtggctggccacgacgggcgttccttgcgcagctgtgctcgacgttgtcactgaagcgggaagggactggctgctattgggcgaagtgccggggcaggatctcctgtcatcccaccttgctcctgccgagaaagtatccatcatggctgatgcaatgcggcggctgcatacgcttgatccggctacctgcccattcgaccaccaagcgaaacatcgcatcgagcgagcacgtactcggatggaagccggtcttgtcgatcaggatgatctggacgaagagcatcaggggctcgcgccagccgaactgttcgccaggctcaaggcgcgcatgcccgacggcgaggatctcgtcgtgacccatggcgatgcctgcttgccgaatatcatggtggaaaatggccgcttttctggattcatcgactgtggccggctgggtgtggcggaccgctatcaggacatagcgttggctacccgtgatattgctgaagagcttggcggcgaatgggctgaccgcttcctcgtgctttacggtatcgccgctcccgattcgcagcgcatcgccttctatcgccttcttgacgagttcttctgaattgaaaaaggaagaatgcatgaccaaaatcccttaacgtgagttttcgttccactgagcgtcagaccccgtagaaaagatcaaaggatcttcttgagatcctttttttctgcgcgtaatctgctgcttgcaaacaaaaaaaccaccgctaccagcggtggtttgtttgccggatcaagagctaccaactctttttccgaaggtaactggcttcagcagagcgcagataccaaatactgtccttctagtgtagccgtagttaggccaccacttcaagaactctgtagcaccgcctacatacctcgctctgctaatcctgttaccagtggctgctgccagtggcgataagtcgtgtcttaccgggttggactcaagacgatagttaccggataaggcgcagcggtcgggctgaacggggggttcgtgcacacagcccagcttggagcgaacgacctacaccgaactgagatacctacagcgtgagctatgagaaagcgccacgcttcccgaagggagaaaggcggacaggtatccggtaagcggcagggtcggaacaggagagcgcacgagggagcttccagggggaaacgcctggtatctttatagtcctgtcgggtttcgccacctctgacttgagcgtcgatttttgtgatgctcgtcaggggggcggagcctatggaaaaacgccagcaacgcggcctttttacggttcctggccttttgctggccttttgctcacatgttctttcctgcgttatcccctgattctgtggataaccgtattaccgcctttgagtgagctgataccgctcgccgcagccgaacgaccgagcgcagcgagtcagtgagcgaggaagcggaagagcgcctgatgcggtattttctccttacgcatctgtgcggtatttcacaccgcatatggtgcactctcagtacaatctgctctgatgccgcatagttaagccagtatacactccgctatcgctacgtgactgggtcatggctgcgccccgacacccgccaacacccgctgacgcgccctgacgggcttgtctgctcccggcatccgcttacagacaagctgtgaccgtctccgggagctgcatgtgtcagaggttttcaccgtcatcaccgaaacgcgcgaggcagggtgccttgatgtgggcgccggcggtcgagtggcgacggcgcggcttgtccgcgccctggtagattgcctggccgtaggccagccatttttgagcggccagcggccgcgataggccgacgcgaagcggcggggcgtagggagcgcagcgaccgaagggtaggcgctttttgcagctcttcggctgtgcgctggccagacagttatgcacaggccaggcgggttttaagagttttaataagttttaaagagttttaggcggaaaaatcgccttttttctcttttatatcagtcacttacatgtgtgaccggttcccaatgtacggctttgggttcccaatgtacgggttccggttcccaatgtacggctttgggttcccaatgtacgtgctatccacaggaaagagaccttttcgacctttttcccctgctagggcaatttgccctagcatctgctccgtacattaggaaccggcggatgcttcgccctcgatcaggttgcggtagcgcatgactaggatcgggccagcctgccccgcctcctccttcaaatcgtactccggcaggtcatttgacccgatcagcttgcgcacggtgaaacagaacttcttgaactctccggcgctgccactgcgttcgtagatcgtcttgaacaaccatctggcttctgccttgcctgcggcgcggcgtgccaggcggtagagaaaacggccgatgccgggatcgatcaaaaagtaatcggggtgaaccgtcagcacgtccgggttcttgccttctgtgatctcgcggtacatccaatcagctagctcgatctcgatgtactccggccgcccggtttcgctctttacgatcttgtagcggctaatcaaggcttcaccctcggataccgtcaccaggcggccgttcttggccttcttcgtacgctgcatggcaacgtgcgtggtgtttaaccgaatgcaggtttctaccaggtcgtctttctgctttccgccatcggctcgccggcagaacttgagtacgtccgcaacgtgtggacggaacacgcggccgggcttgtctcccttcccttcccggtatcggttcatggattcggttagatgggaaaccgccatcagtaccaggtcgtaatcccacacactggccatgccggccggccctgcggaaacctctacgtgcccgtctggaagctcgtagcggatcacctcgccagctcgtcggtcacgcttcgacagacggaaaacggccacgtccatgatgctgcgactatcgcgggtgcccacgtcatagagcatcggaacgaaaaaatctggttgctcgtcgcccttgggcggcttcctaatcgacggcgcaccggctgccggcggttgccgggattctttgcggattcgatcagcggccgcttgccacgattcaccggggcgtgcttctgcctcgatgcgttgccgctgggcggcctgcgcggccttcaacttctccaccaggtcatcacccagcgccgcgccgatttgtaccgggccggatggtttgcgaccgctcacgccgattcctcgggcttgggggttccagtgccattgcagggccggcagacaacccagccgcttacgcctggccaaccgcccgttcctccacacatggggcattccacggcgtcggtgcctggttgttcttgattttccatgccgcctcctttagccgctaaaattcatctactcatttattcatttgctcatttactctggtagctgcgcgatgtattcagatagcagctcggtaatggtcttgccttggcgtaccgcgtacatcttcagcttggtgtgatcctccgccggcaactgaaagttgacccgcttcatggctggcgtgtctgccaggctggccaacgttgcagccttgctgctgcgtgcgctcggacggccggcacttagcgtgtttgtgcttttgctcattttctctttacctcattaactcaaatgagttttgatttaatttcagcggccagcgcctggacctcgcgggcagcgtcgccctcgggttctgattcaagaacggttgtgccggcggcggcagtgcctgggtagctcacgcgctgcgtgatacgggactcaagaatgggcagctcgtacccggccagcgcctcggcaacctcaccgccgatgcgcgtgcctttgatcgcccgcgacacgacaaaggccgcttgtagccttccatccgtgacctcaatgcgctgcttaaccagctccaccaggtcggcggtggcccatatgtcgtaagggcttggctgcaccggaatcagcacgaagtcggctgccttgatcgcggacacagccaagtccgccgcctggggcgctccgtcgatcactacgaagtcgcgccggccgatggccttcacgtcgcggtcaatcgtcgggcggtcgatgccgacaacggttagcggttgatcttcccgcacggccgcccaatcgcgggcactgccctggggatcggaatcgactaacagaacatcggccccggcgagttgcagggcgcgggctagatgggttgcgatggtcgtcttgcctgacccgcctttctggttaagtacagcgataaccttcatgcgttccccttgcgtatttgtttatttactcatcgcatcatatacgcagcgaccgcatgacgcaagctgttttactcaaatacacatcacctttttagacggcggcgctcggtttcttcagcggccaagctggccggccaggccgccagcttggcatcagacaaaccggccaggatttcatgcagccgcacggttgagacgtgcgcgggcggctcgaacacgtacccggccgcgatcatctccgcctcgatctcttcggtaatgaaaaacggttcgtcctggccgtcctggtgcggtttcatgcttgttcctcttggcgttcattctcggcggccgccagggcgtcggcctcggtcaatgcgtcctcacggaaggcaccgcgccgcctggcctcggtgggcgtcacttcctcgctgcgctcaagtgcgcggtacagggtcgagcgatgcacgccaagcagtgcagccgcctctttcacggtgcggccttcctggtcgatcagctcgcgggcgtgcgcgatctgtgccggggtgagggtagggcgggggccaaacttcacgcctcgggccttggcggcctcgcgcccgctccgggtgcggtcgatgattagggaacgctcgaactcggcaatgccggcgaacacggtcaacaccatgcggccggccggcgtggtggtaacgcgtggtgattttgtgccgagctgccggtcggggagctgttggctggctggtggcaggatatattgtggtgtaaacaaattgacgcttagacaacttaataacacattgcggacgtctttaatgtactgaattaacatccgtttgatacttgtctaaaattggctgatttcgagtgcatctatgcataaaaacaatctaatgacaattattaccaagcaggatcctctagaattcccgatctagtaacatagatgacaccgcgcgcgataatttatcctagtttgcgcgctatattttgttttctatcgcgtattaaatgtataattgcgggactctaatcataaaaacccatctcataaataacgtcatgcattacatgttaattattacatgcttaacgtaattcaacagaaattatatgataatcatcgcaagaccggcaacaggattcaatcttaagaaactttattgccaaatgtttgaacgatcggggaaattcgagctcgccggcgtcgacgatatcctgcaggtcaaatctcggtgacgggcaggaccggacggggcggtaccggcaggctgaagtccagctgccagaaacccacgtcatgccagttcccgtgcttgaagccggccgcccgcagcatgccgcggggggcatatccgagcgcctcgtgcatgcgcacgctcgggtcgttgggcagcccgatgacagcgaccacgctcttgaagccctgtgcctccagggacttcagcaggtgggtgtagagcgtggagcccagtcccgtccgctggtggcggggggagacgtacacggtcgactcggccgtccagtcgtaggcgttgcgtgccttccaggggcccgcgtaggcgatgccggcgacctcgccgtccacctcggcgacgagccagggatagcgctcccgcagacggacgaggtcgtccgtccactcctgcggttcctgcggctcggtacggaagttgaccgtgcttgtctcgatgtagtggttgacgatggtgcagaccgccggcatgtccgcctcggtggcacggcggatgtcggccgggcgtcgttctgggctcatggcgcgcctttggttgagagtgaatatgagactctaattggataccgaggggaatttatggaacgtcagtggagcatttttgacaagaaatatttgctagctgatagtgaccttaggcgacttttgaacgcgcaataatggtttctgacgtatgtgcttagctcattaaactccagaaacccgcggctgagtggctccttcaacgttgcggttctgtcagttccaaacgtaaaacggcttgtcccgcgtcatcggcgggggtcataacgtgactcccttaattctccgctcagatcagaagcttgctatcaactttgtatagaaaagttggctccgaattcgcccttagcttgactagagaattcgaatccaaaaattacggatatgaatataggcatatccgtatccgaattatccgtttgacagctagcaacgattgtacaattgcttctttaaaaaaggaagaaagaaagaaagaaaagaatcaacatcagcgttaacaaacggccccgttacggcccaaacggtcatatagagtaacggcgttaagcgttgaaagactcctatcgaaatacgtaaccgcaaacgtgtcatagtcagatcccctcttccttcaccgcctcaaacacaaaaataatcttctacagcctatatatacaacccccccttctatctctcctttctcacaattcatcatctttctttctctacccccaattttaagaaatcctctcttctcctcttcattttcaaggtaaatctctctctctctctctctctctgttattccttgttttaattaggtatgtattattgctagtttgttaatctgcttatcttatgtatgccttatgtgaatatctttatcttgttcatctcatccgtttagaagctataaatttgttgatttgactgtgtatctacacgtggttatgtttatatctaatcagatatgaatttcttcatattgttgcgtttgtgtgtaccaatccgaaatcgttgatttttttcatttaatcgtgtagctaattgtacgtatacatatggatctacgtatcaattgttcatctgtttgtgtttgtatgtatacagatctgaaaacatcacttctctcatctgattgtgttgttacatacatagatatagatctgttatatcattttttttattaattgtgtatatatatatgtgcatagatctggattacatgattgtgattatttacatgattttgttatttacgtatgtatatatgtagatctggactttttggagttgttgacttgattgtatttgtgtgtgtatatgtgtgttctgatcttgatatgttatgtatgtgcagcccggatcaagggcgaattcgacccaagtttgtacaaaaaagcaggctccgaattcgccctttgcgacacgacttgaccactacgcacaaaaccaaaagacttcaaagttttgttagaaacataggaagatgtatgtcaataatcagaaaaagtctttcacgtcaagtgttgccactaacaatgtcaaagaaatttgaatttcagttatcattagctaaatttacgtctatatgtctgatatagaacatatttgtcttaaacagcttccatgaacgtaaaatgtattacatatatatagacaatatgcaaaaagctcaaagtcatcaacattgtctctttccatgatcattcatgtcgtgcctctttaattttgtatgaaggtgaatgtctgagatgaaagagaagaacatataaggatagccaaggagactgcctgatatcttttttataagcaaaatggtcattgcttgatacaacttatagtgacttcaaacaagacactaaacattttacacaaagagtcaggcaagtcatccttggaagggcgaattcgacccagctttcttgtacaaagtggagctcgatcgttcaaacatttggcaataaagtttcttaagattgaatcctgttgccggtcttgcgatgattatcatataatttctgttgaattacgttaagcatgtaataattaacatgtaatgcatgacgttatttatgagatgggtttttatgattagagtcccgcaattatacatttaatacgcgatagaaaacaaaatatagcgcgcaaactaggataaattatcgcgcgcggtgtcatctatgttactagatcggccggccaacttt

SEQ ID NO: 22 - DNA, 9307 bp, Artificial sequence
  RCB383
attatacatagttgataagcgatcgcagcttggcgtaatcatggtcatagctgtttcctactagatctgattgtcgtttcccgccttcagtttaaactatcagtgtttgacaggatatattggcgggtaaacctaagagaaaagagcgtttattagaataatcggatatttaaaagggcgtgaaaaggtttatccgttcgtccatttgtatgtccatgtgttttatggacagcaagcgaaccggaattgccagctggggcgccctctggtaaggttgggaagccctgcaaagtaaactggatggctttcttgccgccaaggatctgatggcgcaggggatcaagatctgatcaagagacaggatgaggatcgtttcgcatgattgaacaagatggattgcacgcaggttctccggccgcttgggtggagaggctattcggctatgactgggcacaacagacaatcggctgctctgatgccgccgtgttccggctgtcagcgcaggggcgcccggttctttttgtcaagaccgacctgtccggtgccctgaatgaactgcaggacgaggcagcgcggctatcgtggctggccacgacgggcgttccttgcgcagctgtgctcgacgttgtcactgaagcgggaagggactggctgctattgggcgaagtgccggggcaggatctcctgtcatcccaccttgctcctgccgagaaagtatccatcatggctgatgcaatgcggcggctgcatacgcttgatccggctacctgcccattcgaccaccaagcgaaacatcgcatcgagcgagcacgtactcggatggaagccggtcttgtcgatcaggatgatctggacgaagagcatcaggggctcgcgccagccgaactgttcgccaggctcaaggcgcgcatgcccgacggcgaggatctcgtcgtgacccatggcgatgcctgcttgccgaatatcatggtggaaaatggccgcttttctggattcatcgactgtggccggctgggtgtggcggaccgctatcaggacatagcgttggctacccgtgatattgctgaagagcttggcggcgaatgggctgaccgcttcctcgtgctttacggtatcgccgctcccgattcgcagcgcatcgccttctatcgccttcttgacgagttcttctgaattgaaaaaggaagaatgcatgaccaaaatcccttaacgtgagttttcgttccactgagcgtcagaccccgtagaaaagatcaaaggatcttcttgagatcctttttttctgcgcgtaatctgctgcttgcaaacaaaaaaaccaccgctaccagcggtggtttgtttgccggatcaagagctaccaactctttttccgaaggtaactggcttcagcagagcgcagataccaaatactgtccttctagtgtagccgtagttaggccaccacttcaagaactctgtagcaccgcctacatacctcgctctgctaatcctgttaccagtggctgctgccagtggcgataagtcgtgtcttaccgggttggactcaagacgatagttaccggataaggcgcagcggtcgggctgaacggggggttcgtgcacacagcccagcttggagcgaacgacctacaccgaactgagatacctacagcgtgagctatgagaaagcgccacgcttcccgaagggagaaaggcggacaggtatccggtaagcggcagggtcggaacaggagagcgcacgagggagcttccagggggaaacgcctggtatctttatagtcctgtcgggtttcgccacctctgacttgagcgtcgatttttgtgatgctcgtcaggggggcggagcctatggaaaaacgccagcaacgcggcctttttacggttcctggccttttgctggccttttgctcacatgttctttcctgcgttatcccctgattctgtggataaccgtattaccgcctttgagtgagctgataccgctcgccgcagccgaacgaccgagcgcagcgagtcagtgagcgaggaagcggaagagcgcctgatgcggtattttctccttacgcatctgtgcggtatttcacaccgcatatggtgcactctcagtacaatctgctctgatgccgcatagttaagccagtatacactccgctatcgctacgtgactgggtcatggctgcgccccgacacccgccaacacccgctgacgcgccctgacgggcttgtctgctcccggcatccgcttacagacaagctgtgaccgtctccgggagctgcatgtgtcagaggttttcaccgtcatcaccgaaacgcgcgaggcagggtgccttgatgtgggcgccggcggtcgagtggcgacggcgcggcttgtccgcgccctggtagattgcctggccgtaggccagccatttttgagcggccagcggccgcgataggccgacgcgaagcggcggggcgtagggagcgcagcgaccgaagggtaggcgctttttgcagctcttcggctgtgcgctggccagacagttatgcacaggccaggcgggttttaagagttttaataagttttaaagagttttaggcggaaaaatcgccttttttctcttttatatcagtcacttacatgtgtgaccggttcccaatgtacggctttgggttcccaatgtacgggttccggttcccaatgtacggctttgggttcccaatgtacgtgctatccacaggaaagagaccttttcgacctttttcccctgctagggcaatttgccctagcatctgctccgtacattaggaaccggcggatgcttcgccctcgatcaggttgcggtagcgcatgactaggatcgggccagcctgccccgcctcctccttcaaatcgtactccggcaggtcatttgacccgatcagcttgcgcacggtgaaacagaacttcttgaactctccggcgctgccactgcgttcgtagatcgtcttgaacaaccatctggcttctgccttgcctgcggcgcggcgtgccaggcggtagagaaaacggccgatgccgggatcgatcaaaaagtaatcggggtgaaccgtcagcacgtccgggttcttgccttctgtgatctcgcggtacatccaatcagctagctcgatctcgatgtactccggccgcccggtttcgctctttacgatcttgtagcggctaatcaaggcttcaccctcggataccgtcaccaggcggccgttcttggccttcttcgtacgctgcatggcaacgtgcgtggtgtttaaccgaatgcaggtttctaccaggtcgtctttctgctttccgccatcggctcgccggcagaacttgagtacgtccgcaacgtgtggacggaacacgcggccgggcttgtctcccttcccttcccggtatcggttcatggattcggttagatgggaaaccgccatcagtaccaggtcgtaatcccacacactggccatgccggccggccctgcggaaacctctacgtgcccgtctggaagctcgtagcggatcacctcgccagctcgtcggtcacgcttcgacagacggaaaacggccacgtccatgatgctgcgactatcgcgggtgcccacgtcatagagcatcggaacgaaaaaatctggttgctcgtcgcccttgggcggcttcctaatcgacggcgcaccggctgccggcggttgccgggattctttgcggattcgatcagcggccgcttgccacgattcaccggggcgtgcttctgcctcgatgcgttgccgctgggcggcctgcgcggccttcaacttctccaccaggtcatcacccagcgccgcgccgatttgtaccgggccggatggtttgcgaccgctcacgccgattcctcgggcttgggggttccagtgccattgcagggccggcagacaacccagccgcttacgcctggccaaccgcccgttcctccacacatggggcattccacggcgtcggtgcctggttgttcttgattttccatgccgcctcctttagccgctaaaattcatctactcatttattcatttgctcatttactctggtagctgcgcgatgtattcagatagcagctcggtaatggtcttgccttggcgtaccgcgtacatcttcagcttggtgtgatcctccgccggcaactgaaagttgacccgcttcatggctggcgtgtctgccaggctggccaacgttgcagccttgctgctgcgtgcgctcggacggccggcacttagcgtgtttgtgcttttgctcattttctctttacctcattaactcaaatgagttttgatttaatttcagcggccagcgcctggacctcgcgggcagcgtcgccctcgggttctgattcaagaacggttgtgccggcggcggcagtgcctgggtagctcacgcgctgcgtgatacgggactcaagaatgggcagctcgtacccggccagcgcctcggcaacctcaccgccgatgcgcgtgcctttgatcgcccgcgacacgacaaaggccgcttgtagccttccatccgtgacctcaatgcgctgcttaaccagctccaccaggtcggcggtggcccatatgtcgtaagggcttggctgcaccggaatcagcacgaagtcggctgccttgatcgcggacacagccaagtccgccgcctggggcgctccgtcgatcactacgaagtcgcgccggccgatggccttcacgtcgcggtcaatcgtcgggcggtcgatgccgacaacggttagcggttgatcttcccgcacggccgcccaatcgcgggcactgccctggggatcggaatcgactaacagaacatcggccccggcgagttgcagggcgcgggctagatgggttgcgatggtcgtcttgcctgacccgcctttctggttaagtacagcgataaccttcatgcgttccccttgcgtatttgtttatttactcatcgcatcatatacgcagcgaccgcatgacgcaagctgttttactcaaatacacatcacctttttagacggcggcgctcggtttcttcagcggccaagctggccggccaggccgccagcttggcatcagacaaaccggccaggatttcatgcagccgcacggttgagacgtgcgcgggcggctcgaacacgtacccggccgcgatcatctccgcctcgatctcttcggtaatgaaaaacggttcgtcctggccgtcctggtgcggtttcatgcttgttcctcttggcgttcattctcggcggccgccagggcgtcggcctcggtcaatgcgtcctcacggaaggcaccgcgccgcctggcctcggtgggcgtcacttcctcgctgcgctcaagtgcgcggtacagggtcgagcgatgcacgccaagcagtgcagccgcctctttcacggtgcggccttcctggtcgatcagctcgcgggcgtgcgcgatctgtgccggggtgagggtagggcgggggccaaacttcacgcctcgggccttggcggcctcgcgcccgctccgggtgcggtcgatgattagggaacgctcgaactcggcaatgccggcgaacacggtcaacaccatgcggccggccggcgtggtggtaacgcgtggtgattttgtgccgagctgccggtcggggagctgttggctggctggtggcaggatatattgtggtgtaaacaaattgacgcttagacaacttaataacacattgcggacgtctttaatgtactgaattaacatccgtttgatacttgtctaaaattggctgatttcgagtgcatctatgcataaaaacaatctaatgacaattattaccaagcaggatcctctagaattcccgatctagtaacatagatgacaccgcgcgcgataatttatcctagtttgcgcgctatattttgttttctatcgcgtattaaatgtataattgcgggactctaatcataaaaacccatctcataaataacgtcatgcattacatgttaattattacatgcttaacgtaattcaacagaaattatatgataatcatcgcaagaccggcaacaggattcaatcttaagaaactttattgccaaatgtttgaacgatcggggaaattcgagctcgccggcgtcgacgatatcctgcaggtcaaatctcggtgacgggcaggaccggacggggcggtaccggcaggctgaagtccagctgccagaaacccacgtcatgccagttcccgtgcttgaagccggccgcccgcagcatgccgcggggggcatatccgagcgcctcgtgcatgcgcacgctcgggtcgttgggcagcccgatgacagcgaccacgctcttgaagccctgtgcctccagggacttcagcaggtgggtgtagagcgtggagcccagtcccgtccgctggtggcggggggagacgtacacggtcgactcggccgtccagtcgtaggcgttgcgtgccttccaggggcccgcgtaggcgatgccggcgacctcgccgtccacctcggcgacgagccagggatagcgctcccgcagacggacgaggtcgtccgtccactcctgcggttcctgcggctcggtacggaagttgaccgtgcttgtctcgatgtagtggttgacgatggtgcagaccgccggcatgtccgcctcggtggcacggcggatgtcggccgggcgtcgttctgggctcatggcgcgcctttggttgagagtgaatatgagactctaattggataccgaggggaatttatggaacgtcagtggagcatttttgacaagaaatatttgctagctgatagtgaccttaggcgacttttgaacgcgcaataatggtttctgacgtatgtgcttagctcattaaactccagaaacccgcggctgagtggctccttcaacgttgcggttctgtcagttccaaacgtaaaacggcttgtcccgcgtcatcggcgggggtcataacgtgactcccttaattctccgctcagatcagaagcttgctatcaactttgtatagaaaagttggctccgaattcgcccttagcttgactagagaattcgaatccaaaaattacggatatgaatataggcatatccgtatccgaattatccgtttgacagctagcaacgattgtacaattgcttctttaaaaaaggaagaaagaaagaaagaaaagaatcaacatcagcgttaacaaacggccccgttacggcccaaacggtcatatagagtaacggcgttaagcgttgaaagactcctatcgaaatacgtaaccgcaaacgtgtcatagtcagatcccctcttccttcaccgcctcaaacacaaaaataatcttctacagcctatatatacaacccccccttctatctctcctttctcacaattcatcatctttctttctctacccccaattttaagaaatcctctcttctcctcttcattttcaaggtaaatctctctctctctctctctctctgttattccttgttttaattaggtatgtattattgctagtttgttaatctgcttatcttatgtatgccttatgtgaatatctttatcttgttcatctcatccgtttagaagctataaatttgttgatttgactgtgtatctacacgtggttatgtttatatctaatcagatatgaatttcttcatattgttgcgtttgtgtgtaccaatccgaaatcgttgatttttttcatttaatcgtgtagctaattgtacgtatacatatggatctacgtatcaattgttcatctgtttgtgtttgtatgtatacagatctgaaaacatcacttctctcatctgattgtgttgttacatacatagatatagatctgttatatcattttttttattaattgtgtatatatatatgtgcatagatctggattacatgattgtgattatttacatgattttgttatttacgtatgtatatatgtagatctggactttttggagttgttgacttgattgtatttgtgtgtgtatatgtgtgttctgatcttgatatgttatgtatgtgcagcccggatcaagggcgaattcgacccaagtttgtacaaaaaagcaggctccgaattcgcccttcgggattaaggggaatgagaagtaaacttttatttactttcgacgacaaaactcaacatacctatttaaagatatagatttaactatagcatgattaccatcctaatgtcttcggtactttagtgattataatcgcaataactctttagatccataattctgaccataattatggatctaaagagttatcctgtgtcttcagtttaggaataaagggtttatgtaaccataccttcaaatcaatatctttggaaagaagaatcttgacaagtgaatcaatggagtaaaaccctgaattgtcatgttttcccacagctttcttgagcttccaaaatgcttaatcttaaagttttttttcttcttacttttgtttaagaaaaaaacaatggaaatgaaaaagaaagttcaagaaagctgtggaaaagtatgaccaggatcttcatcttctccttcttctgaaaactaattaaacttaagagaattgttgagagatagagagagagatattagttgagcaactagcatatagaagaaactcaagaggaccactctatttatatataatacaaagtgagtgatagatatgtgaacctgcttagtagcgtgggactgaaagataaaagtagacttgtttgtttctttatgcgttttctttttgttatacagttttatataataagttccatcaagtccaaatactatgcccattttttttttaatgtaaaccactcttatgctagtgtaaaagtatacgttcgggctaaactcatcatttaaatttggtcttatatgtgtaatttatatgtgaattacttagtggtgcttagatagttagatacaatcttacaaaagttagacaacttgataattagcttagatgtgttacctcattactcgatatggaggacgctcaccgaagggcgaattcgacccagctttcttgtacaaagtggagctcgatcgttcaaacatttggcaataaagtttcttaagattgaatcctgttgccggtcttgcgatgattatcatataatttctgttgaattacgttaagcatgtaataattaacatgtaatgcatgacgttatttatgagatgggtttttatgattagagtcccgcaattatacatttaatacgcgatagaaaacaaaatatagcgcgcaaactaggataaattatcgcgcgcggtgtcatctatgttactagatcggccggccaacttt

SEQ ID NO: 23 - DNA, 9272 bp, Artificial sequence
  RCB388
attatacatagttgataagcgatcgcagcttggcgtaatcatggtcatagctgtttcctactagatctgattgtcgtttcccgccttcagtttaaactatcagtgtttgacaggatatattggcgggtaaacctaagagaaaagagcgtttattagaataatcggatatttaaaagggcgtgaaaaggtttatccgttcgtccatttgtatgtccatgtgttttatggacagcaagcgaaccggaattgccagctggggcgccctctggtaaggttgggaagccctgcaaagtaaactggatggctttcttgccgccaaggatctgatggcgcaggggatcaagatctgatcaagagacaggatgaggatcgtttcgcatgattgaacaagatggattgcacgcaggttctccggccgcttgggtggagaggctattcggctatgactgggcacaacagacaatcggctgctctgatgccgccgtgttccggctgtcagcgcaggggcgcccggttctttttgtcaagaccgacctgtccggtgccctgaatgaactgcaggacgaggcagcgcggctatcgtggctggccacgacgggcgttccttgcgcagctgtgctcgacgttgtcactgaagcgggaagggactggctgctattgggcgaagtgccggggcaggatctcctgtcatcccaccttgctcctgccgagaaagtatccatcatggctgatgcaatgcggcggctgcatacgcttgatccggctacctgcccattcgaccaccaagcgaaacatcgcatcgagcgagcacgtactcggatggaagccggtcttgtcgatcaggatgatctggacgaagagcatcaggggctcgcgccagccgaactgttcgccaggctcaaggcgcgcatgcccgacggcgaggatctcgtcgtgacccatggcgatgcctgcttgccgaatatcatggtggaaaatggccgcttttctggattcatcgactgtggccggctgggtgtggcggaccgctatcaggacatagcgttggctacccgtgatattgctgaagagcttggcggcgaatgggctgaccgcttcctcgtgctttacggtatcgccgctcccgattcgcagcgcatcgccttctatcgccttcttgacgagttcttctgaattgaaaaaggaagaatgcatgaccaaaatcccttaacgtgagttttcgttccactgagcgtcagaccccgtagaaaagatcaaaggatcttcttgagatcctttttttctgcgcgtaatctgctgcttgcaaacaaaaaaaccaccgctaccagcggtggtttgtttgccggatcaagagctaccaactctttttccgaaggtaactggcttcagcagagcgcagataccaaatactgtccttctagtgtagccgtagttaggccaccacttcaagaactctgtagcaccgcctacatacctcgctctgctaatcctgttaccagtggctgctgccagtggcgataagtcgtgtcttaccgggttggactcaagacgatagttaccggataaggcgcagcggtcgggctgaacggggggttcgtgcacacagcccagcttggagcgaacgacctacaccgaactgagatacctacagcgtgagctatgagaaagcgccacgcttcccgaagggagaaaggcggacaggtatccggtaagcggcagggtcggaacaggagagcgcacgagggagcttccagggggaaacgcctggtatctttatagtcctgtcgggtttcgccacctctgacttgagcgtcgatttttgtgatgctcgtcaggggggcggagcctatggaaaaacgccagcaacgcggcctttttacggttcctggccttttgctggccttttgctcacatgttctttcctgcgttatcccctgattctgtggataaccgtattaccgcctttgagtgagctgataccgctcgccgcagccgaacgaccgagcgcagcgagtcagtgagcgaggaagcggaagagcgcctgatgcggtattttctccttacgcatctgtgcggtatttcacaccgcatatggtgcactctcagtacaatctgctctgatgccgcatagttaagccagtatacactccgctatcgctacgtgactgggtcatggctgcgccccgacacccgccaacacccgctgacgcgccctgacgggcttgtctgctcccggcatccgcttacagacaagctgtgaccgtctccgggagctgcatgtgtcagaggttttcaccgtcatcaccgaaacgcgcgaggcagggtgccttgatgtgggcgccggcggtcgagtggcgacggcgcggcttgtccgcgccctggtagattgcctggccgtaggccagccatttttgagcggccagcggccgcgataggccgacgcgaagcggcggggcgtagggagcgcagcgaccgaagggtaggcgctttttgcagctcttcggctgtgcgctggccagacagttatgcacaggccaggcgggttttaagagttttaataagttttaaagagttttaggcggaaaaatcgccttttttctcttttatatcagtcacttacatgtgtgaccggttcccaatgtacggctttgggttcccaatgtacgggttccggttcccaatgtacggctttgggttcccaatgtacgtgctatccacaggaaagagaccttttcgacctttttcccctgctagggcaatttgccctagcatctgctccgtacattaggaaccggcggatgcttcgccctcgatcaggttgcggtagcgcatgactaggatcgggccagcctgccccgcctcctccttcaaatcgtactccggcaggtcatttgacccgatcagcttgcgcacggtgaaacagaacttcttgaactctccggcgctgccactgcgttcgtagatcgtcttgaacaaccatctggcttctgccttgcctgcggcgcggcgtgccaggcggtagagaaaacggccgatgccgggatcgatcaaaaagtaatcggggtgaaccgtcagcacgtccgggttcttgccttctgtgatctcgcggtacatccaatcagctagctcgatctcgatgtactccggccgcccggtttcgctctttacgatcttgtagcggctaatcaaggcttcaccctcggataccgtcaccaggcggccgttcttggccttcttcgtacgctgcatggcaacgtgcgtggtgtttaaccgaatgcaggtttctaccaggtcgtctttctgctttccgccatcggctcgccggcagaacttgagtacgtccgcaacgtgtggacggaacacgcggccgggcttgtctcccttcccttcccggtatcggttcatggattcggttagatgggaaaccgccatcagtaccaggtcgtaatcccacacactggccatgccggccggccctgcggaaacctctacgtgcccgtctggaagctcgtagcggatcacctcgccagctcgtcggtcacgcttcgacagacggaaaacggccacgtccatgatgctgcgactatcgcgggtgcccacgtcatagagcatcggaacgaaaaaatctggttgctcgtcgcccttgggcggcttcctaatcgacggcgcaccggctgccggcggttgccgggattctttgcggattcgatcagcggccgcttgccacgattcaccggggcgtgcttctgcctcgatgcgttgccgctgggcggcctgcgcggccttcaacttctccaccaggtcatcacccagcgccgcgccgatttgtaccgggccggatggtttgcgaccgctcacgccgattcctcgggcttgggggttccagtgccattgcagggccggcagacaacccagccgcttacgcctggccaaccgcccgttcctccacacatggggcattccacggcgtcggtgcctggttgttcttgattttccatgccgcctcctttagccgctaaaattcatctactcatttattcatttgctcatttactctggtagctgcgcgatgtattcagatagcagctcggtaatggtcttgccttggcgtaccgcgtacatcttcagcttggtgtgatcctccgccggcaactgaaagttgacccgcttcatggctggcgtgtctgccaggctggccaacgttgcagccttgctgctgcgtgcgctcggacggccggcacttagcgtgtttgtgcttttgctcattttctctttacctcattaactcaaatgagttttgatttaatttcagcggccagcgcctggacctcgcgggcagcgtcgccctcgggttctgattcaagaacggttgtgccggcggcggcagtgcctgggtagctcacgcgctgcgtgatacgggactcaagaatgggcagctcgtacccggccagcgcctcggcaacctcaccgccgatgcgcgtgcctttgatcgcccgcgacacgacaaaggccgcttgtagccttccatccgtgacctcaatgcgctgcttaaccagctccaccaggtcggcggtggcccatatgtcgtaagggcttggctgcaccggaatcagcacgaagtcggctgccttgatcgcggacacagccaagtccgccgcctggggcgctccgtcgatcactacgaagtcgcgccggccgatggccttcacgtcgcggtcaatcgtcgggcggtcgatgccgacaacggttagcggttgatcttcccgcacggccgcccaatcgcgggcactgccctggggatcggaatcgactaacagaacatcggccccggcgagttgcagggcgcgggctagatgggttgcgatggtcgtcttgcctgacccgcctttctggttaagtacagcgataaccttcatgcgttccccttgcgtatttgtttatttactcatcgcatcatatacgcagcgaccgcatgacgcaagctgttttactcaaatacacatcacctttttagacggcggcgctcggtttcttcagcggccaagctggccggccaggccgccagcttggcatcagacaaaccggccaggatttcatgcagccgcacggttgagacgtgcgcgggcggctcgaacacgtacccggccgcgatcatctccgcctcgatctcttcggtaatgaaaaacggttcgtcctggccgtcctggtgcggtttcatgcttgttcctcttggcgttcattctcggcggccgccagggcgtcggcctcggtcaatgcgtcctcacggaaggcaccgcgccgcctggcctcggtgggcgtcacttcctcgctgcgctcaagtgcgcggtacagggtcgagcgatgcacgccaagcagtgcagccgcctctttcacggtgcggccttcctggtcgatcagctcgcgggcgtgcgcgatctgtgccggggtgagggtagggcgggggccaaacttcacgcctcgggccttggcggcctcgcgcccgctccgggtgcggtcgatgattagggaacgctcgaactcggcaatgccggcgaacacggtcaacaccatgcggccggccggcgtggtggtaacgcgtggtgattttgtgccgagctgccggtcggggagctgttggctggctggtggcaggatatattgtggtgtaaacaaattgacgcttagacaacttaataacacattgcggacgtctttaatgtactgaattaacatccgtttgatacttgtctaaaattggctgatttcgagtgcatctatgcataaaaacaatctaatgacaattattaccaagcaggatcctctagaattcccgatctagtaacatagatgacaccgcgcgcgataatttatcctagtttgcgcgctatattttgttttctatcgcgtattaaatgtataattgcgggactctaatcataaaaacccatctcataaataacgtcatgcattacatgttaattattacatgcttaacgtaattcaacagaaattatatgataatcatcgcaagaccggcaacaggattcaatcttaagaaactttattgccaaatgtttgaacgatcggggaaattcgagctcgccggcgtcgacgatatcctgcaggtcaaatctcggtgacgggcaggaccggacggggcggtaccggcaggctgaagtccagctgccagaaacccacgtcatgccagttcccgtgcttgaagccggccgcccgcagcatgccgcggggggcatatccgagcgcctcgtgcatgcgcacgctcgggtcgttgggcagcccgatgacagcgaccacgctcttgaagccctgtgcctccagggacttcagcaggtgggtgtagagcgtggagcccagtcccgtccgctggtggcggggggagacgtacacggtcgactcggccgtccagtcgtaggcgttgcgtgccttccaggggcccgcgtaggcgatgccggcgacctcgccgtccacctcggcgacgagccagggatagcgctcccgcagacggacgaggtcgtccgtccactcctgcggttcctgcggctcggtacggaagttgaccgtgcttgtctcgatgtagtggttgacgatggtgcagaccgccggcatgtccgcctcggtggcacggcggatgtcggccgggcgtcgttctgggctcatggcgcgcctttggttgagagtgaatatgagactctaattggataccgaggggaatttatggaacgtcagtggagcatttttgacaagaaatatttgctagctgatagtgaccttaggcgacttttgaacgcgcaataatggtttctgacgtatgtgcttagctcattaaactccagaaacccgcggctgagtggctccttcaacgttgcggttctgtcagttccaaacgtaaaacggcttgtcccgcgtcatcggcgggggtcataacgtgactcccttaattctccgctcagatcagaagcttgctatcaactttgtatagaaaagttggctccgaattcgcccttagcttgactagagaattcgaatccaaaaattacggatatgaatataggcatatccgtatccgaattatccgtttgacagctagcaacgattgtacaattgcttctttaaaaaaggaagaaagaaagaaagaaaagaatcaacatcagcgttaacaaacggccccgttacggcccaaacggtcatatagagtaacggcgttaagcgttgaaagactcctatcgaaatacgtaaccgcaaacgtgtcatagtcagatcccctcttccttcaccgcctcaaacacaaaaataatcttctacagcctatatatacaacccccccttctatctctcctttctcacaattcatcatctttctttctctacccccaattttaagaaatcctctcttctcctcttcattttcaaggtaaatctctctctctctctctctctctgttattccttgttttaattaggtatgtattattgctagtttgttaatctgcttatcttatgtatgccttatgtgaatatctttatcttgttcatctcatccgtttagaagctataaatttgttgatttgactgtgtatctacacgtggttatgtttatatctaatcagatatgaatttcttcatattgttgcgtttgtgtgtaccaatccgaaatcgttgatttttttcatttaatcgtgtagctaattgtacgtatacatatggatctacgtatcaattgttcatctgtttgtgtttgtatgtatacagatctgaaaacatcacttctctcatctgattgtgttgttacatacatagatatagatctgttatatcattttttttattaattgtgtatatatatatgtgcatagatctggattacatgattgtgattatttacatgattttgttatttacgtatgtatatatgtagatctggactttttggagttgttgacttgattgtatttgtgtgtgtatatgtgtgttctgatcttgatatgttatgtatgtgcagcccggatcaagggcgaattcgacccaagtttgtacaaaaaagcaggctccgaattcgcccttcgcctcgagagagacagagtggaaaaagaaacgatataatatatacatgactcgagaaaaattaaggaccagcctattaacaactaggttacattgctaatctcacttaaccacgcgttaactaatagattaagcttttttcgatactacccatctcttaaaatataatgaatgattaaaggctaaaggtctcctcccgcgtgcaagtagatggcacaaaaaatctagaaacaagaacaagccagagtttagatcgtatcttcttaccttaatatggagataaccaagagagacagagaaagattgtgtaagtgatagagagagattgagacatagagaacgaagacaggccaaagagatcagcaccggaatctgacagaaagagcagtgagcacgcaagagaagcaagtgcaatgatatgcaaattgcctttgtgtgctcactctcttctgtcagtttctttgcgtttctcttgtcccaactctttcattcacaattagtccaacttcagagatctacaagatgaaacaaagaaaacaagaaacgatgagaatcttttaagctttgtgttagatctgagttttaactggagaagacaaagaatcaaagagagggagggagagagggagagatatgagaagagaagagattccatttgagaccctttagaagatcaaatctagggtttttgtctaaatcgagaaaaaacataaccataaaaagcaaaaaaaagaaagaaagagggtaaagaaacaaagatctgatgagaagaagataagagaaaaccttatctctctctatttcaaagagtcttacctttctttatggctcttgtcgctttctttatctctcttacatgcaaagggaacagatgtctggcgaagggcgaattcgacccagctttcttgtacaaagtggagctcgatcgttcaaacatttggcaataaagtttcttaagattgaatcctgttgccggtcttgcgatgattatcatataatttctgttgaattacgttaagcatgtaataattaacatgtaatgcatgacgttatttatgagatgggtttttatgattagagtcccgcaattatacatttaatacgcgatagaaaacaaaatatagcgcgcaaactaggataaattatcgcgcgcggtgtcatctatgttactagatcggccggccaacttt

SEQ ID NO: 24 - DNA, 9424 bp, Artificial sequence
  RCB478
ttatacatagttgataagcgatcgcagcttggcgtaatcatggtcatagctgtttcctactagatctgattgtcgtttcccgccttcagtttaaactatcagtgtttgacaggatatattggcgggtaaacctaagagaaaagagcgtttattagaataatcggatatttaaaagggcgtgaaaaggtttatccgttcgtccatttgtatgtccatgtgttttatggacagcaagcgaaccggaattgccagctggggcgccctctggtaaggttgggaagccctgcaaagtaaactggatggctttcttgccgccaaggatctgatggcgcaggggatcaagatctgatcaagagacaggatgaggatcgtttcgcatgattgaacaagatggattgcacgcaggttctccggccgcttgggtggagaggctattcggctatgactgggcacaacagacaatcggctgctctgatgccgccgtgttccggctgtcagcgcaggggcgcccggttctttttgtcaagaccgacctgtccggtgccctgaatgaactgcaggacgaggcagcgcggctatcgtggctggccacgacgggcgttccttgcgcagctgtgctcgacgttgtcactgaagcgggaagggactggctgctattgggcgaagtgccggggcaggatctcctgtcatcccaccttgctcctgccgagaaagtatccatcatggctgatgcaatgcggcggctgcatacgcttgatccggctacctgcccattcgaccaccaagcgaaacatcgcatcgagcgagcacgtactcggatggaagccggtcttgtcgatcaggatgatctggacgaagagcatcaggggctcgcgccagccgaactgttcgccaggctcaaggcgcgcatgcccgacggcgaggatctcgtcgtgacccatggcgatgcctgcttgccgaatatcatggtggaaaatggccgcttttctggattcatcgactgtggccggctgggtgtggcggaccgctatcaggacatagcgttggctacccgtgatattgctgaagagcttggcggcgaatgggctgaccgcttcctcgtgctttacggtatcgccgctcccgattcgcagcgcatcgccttctatcgccttcttgacgagttcttctgaattgaaaaaggaagaatgcatgaccaaaatcccttaacgtgagttttcgttccactgagcgtcagaccccgtagaaaagatcaaaggatcttcttgagatcctttttttctgcgcgtaatctgctgcttgcaaacaaaaaaaccaccgctaccagcggtggtttgtttgccggatcaagagctaccaactctttttccgaaggtaactggcttcagcagagcgcagataccaaatactgtccttctagtgtagccgtagttaggccaccacttcaagaactctgtagcaccgcctacatacctcgctctgctaatcctgttaccagtggctgctgccagtggcgataagtcgtgtcttaccgggttggactcaagacgatagttaccggataaggcgcagcggtcgggctgaacggggggttcgtgcacacagcccagcttggagcgaacgacctacaccgaactgagatacctacagcgtgagctatgagaaagcgccacgcttcccgaagggagaaaggcggacaggtatccggtaagcggcagggtcggaacaggagagcgcacgagggagcttccagggggaaacgcctggtatctttatagtcctgtcgggtttcgccacctctgacttgagcgtcgatttttgtgatgctcgtcaggggggcggagcctatggaaaaacgccagcaacgcggcctttttacggttcctggccttttgctggccttttgctcacatgttctttcctgcgttatcccctgattctgtggataaccgtattaccgcctttgagtgagctgataccgctcgccgcagccgaacgaccgagcgcagcgagtcagtgagcgaggaagcggaagagcgcctgatgcggtattttctccttacgcatctgtgcggtatttcacaccgcatatggtgcactctcagtacaatctgctctgatgccgcatagttaagccagtatacactccgctatcgctacgtgactgggtcatggctgcgccccgacacccgccaacacccgctgacgcgccctgacgggcttgtctgctcccggcatccgcttacagacaagctgtgaccgtctccgggagctgcatgtgtcagaggttttcaccgtcatcaccgaaacgcgcgaggcagggtgccttgatgtgggcgccggcggtcgagtggcgacggcgcggcttgtccgcgccctggtagattgcctggccgtaggccagccatttttgagcggccagcggccgcgataggccgacgcgaagcggcggggcgtagggagcgcagcgaccgaagggtaggcgctttttgcagctcttcggctgtgcgctggccagacagttatgcacaggccaggcgggttttaagagttttaataagttttaaagagttttaggcggaaaaatcgccttttttctcttttatatcagtcacttacatgtgtgaccggttcccaatgtacggctttgggttcccaatgtacgggttccggttcccaatgtacggctttgggttcccaatgtacgtgctatccacaggaaagagaccttttcgacctttttcccctgctagggcaatttgccctagcatctgctccgtacattaggaaccggcggatgcttcgccctcgatcaggttgcggtagcgcatgactaggatcgggccagcctgccccgcctcctccttcaaatcgtactccggcaggtcatttgacccgatcagcttgcgcacggtgaaacagaacttcttgaactctccggcgctgccactgcgttcgtagatcgtcttgaacaaccatctggcttctgccttgcctgcggcgcggcgtgccaggcggtagagaaaacggccgatgccgggatcgatcaaaaagtaatcggggtgaaccgtcagcacgtccgggttcttgccttctgtgatctcgcggtacatccaatcagctagctcgatctcgatgtactccggccgcccggtttcgctctttacgatcttgtagcggctaatcaaggcttcaccctcggataccgtcaccaggcggccgttcttggccttcttcgtacgctgcatggcaacgtgcgtggtgtttaaccgaatgcaggtttctaccaggtcgtctttctgctttccgccatcggctcgccggcagaacttgagtacgtccgcaacgtgtggacggaacacgcggccgggcttgtctcccttcccttcccggtatcggttcatggattcggttagatgggaaaccgccatcagtaccaggtcgtaatcccacacactggccatgccggccggccctgcggaaacctctacgtgcccgtctggaagctcgtagcggatcacctcgccagctcgtcggtcacgcttcgacagacggaaaacggccacgtccatgatgctgcgactatcgcgggtgcccacgtcatagagcatcggaacgaaaaaatctggttgctcgtcgcccttgggcggcttcctaatcgacggcgcaccggctgccggcggttgccgggattctttgcggattcgatcagcggccgcttgccacgattcaccggggcgtgcttctgcctcgatgcgttgccgctgggcggcctgcgcggccttcaacttctccaccaggtcatcacccagcgccgcgccgatttgtaccgggccggatggtttgcgaccgctcacgccgattcctcgggcttgggggttccagtgccattgcagggccggcagacaacccagccgcttacgcctggccaaccgcccgttcctccacacatggggcattccacggcgtcggtgcctggttgttcttgattttccatgccgcctcctttagccgctaaaattcatctactcatttattcatttgctcatttactctggtagctgcgcgatgtattcagatagcagctcggtaatggtcttgccttggcgtaccgcgtacatcttcagcttggtgtgatcctccgccggcaactgaaagttgacccgcttcatggctggcgtgtctgccaggctggccaacgttgcagccttgctgctgcgtgcgctcggacggccggcacttagcgtgtttgtgcttttgctcattttctctttacctcattaactcaaatgagttttgatttaatttcagcggccagcgcctggacctcgcgggcagcgtcgccctcgggttctgattcaagaacggttgtgccggcggcggcagtgcctgggtagctcacgcgctgcgtgatacgggactcaagaatgggcagctcgtacccggccagcgcctcggcaacctcaccgccgatgcgcgtgcctttgatcgcccgcgacacgacaaaggccgcttgtagccttccatccgtgacctcaatgcgctgcttaaccagctccaccaggtcggcggtggcccatatgtcgtaagggcttggctgcaccggaatcagcacgaagtcggctgccttgatcgcggacacagccaagtccgccgcctggggcgctccgtcgatcactacgaagtcgcgccggccgatggccttcacgtcgcggtcaatcgtcgggcggtcgatgccgacaacggttagcggttgatcttcccgcacggccgcccaatcgcgggcactgccctggggatcggaatcgactaacagaacatcggccccggcgagttgcagggcgcgggctagatgggttgcgatggtcgtcttgcctgacccgcctttctggttaagtacagcgataaccttcatgcgttccccttgcgtatttgtttatttactcatcgcatcatatacgcagcgaccgcatgacgcaagctgttttactcaaatacacatcacctttttagacggcggcgctcggtttcttcagcggccaagctggccggccaggccgccagcttggcatcagacaaaccggccaggatttcatgcagccgcacggttgagacgtgcgcgggcggctcgaacacgtacccggccgcgatcatctccgcctcgatctcttcggtaatgaaaaacggttcgtcctggccgtcctggtgcggtttcatgcttgttcctcttggcgttcattctcggcggccgccagggcgtcggcctcggtcaatgcgtcctcacggaaggcaccgcgccgcctggcctcggtgggcgtcacttcctcgctgcgctcaagtgcgcggtacagggtcgagcgatgcacgccaagcagtgcagccgcctctttcacggtgcggccttcctggtcgatcagctcgcgggcgtgcgcgatctgtgccggggtgagggtagggcgggggccaaacttcacgcctcgggccttggcggcctcgcgcccgctccgggtgcggtcgatgattagggaacgctcgaactcggcaatgccggcgaacacggtcaacaccatgcggccggccggcgtggtggtaacgcgtggtgattttgtgccgagctgccggtcggggagctgttggctggctggtggcaggatatattgtggtgtaaacaaattgacgcttagacaacttaataacacattgcggacgtctttaatgtactgaattaacatccgtttgatacttgtctaaaattggctgatttcgagtgcatctatgcataaaaacaatctaatgacaattattaccaagcaggatcctctagaattcccgatctagtaacatagatgacaccgcgcgcgataatttatcctagtttgcgcgctatattttgttttctatcgcgtattaaatgtataattgcgggactctaatcataaaaacccatctcataaataacgtcatgcattacatgttaattattacatgcttaacgtaattcaacagaaattatatgataatcatcgcaagaccggcaacaggattcaatcttaagaaactttattgccaaatgtttgaacgatcggggaaattcgagctcgccggcgtcgacgatatcctgcaggtcaaatctcggtgacgggcaggaccggacggggcggtaccggcaggctgaagtccagctgccagaaacccacgtcatgccagttcccgtgcttgaagccggccgcccgcagcatgccgcggggggcatatccgagcgcctcgtgcatgcgcacgctcgggtcgttgggcagcccgatgacagcgaccacgctcttgaagccctgtgcctccagggacttcagcaggtgggtgtagagcgtggagcccagtcccgtccgctggtggcggggggagacgtacacggtcgactcggccgtccagtcgtaggcgttgcgtgccttccaggggcccgcgtaggcgatgccggcgacctcgccgtccacctcggcgacgagccagggatagcgctcccgcagacggacgaggtcgtccgtccactcctgcggttcctgcggctcggtacggaagttgaccgtgcttgtctcgatgtagtggttgacgatggtgcagaccgccggcatgtccgcctcggtggcacggcggatgtcggccgggcgtcgttctgggctcatggcgcgcctttggttgagagtgaatatgagactctaattggataccgaggggaatttatggaacgtcagtggagcatttttgacaagaaatatttgctagctgatagtgaccttaggcgacttttgaacgcgcaataatggtttctgacgtatgtgcttagctcattaaactccagaaacccgcggctgagtggctccttcaacgttgcggttctgtcagttccaaacgtaaaacggcttgtcccgcgtcatcggcgggggtcataacgtgactcccttaattctccgctcagatcagaagcttgctatcaactttgtatagaaaagttggctccgaattcgcccttagcttgactagagaattcgaatccaaaaattacggatatgaatataggcatatccgtatccgaattatccgtttgacagctagcaacgattgtacaattgcttctttaaaaaaggaagaaagaaagaaagaaaagaatcaacatcagcgttaacaaacggccccgttacggcccaaacggtcatatagagtaacggcgttaagcgttgaaagactcctatcgaaatacgtaaccgcaaacgtgtcatagtcagatcccctcttccttcaccgcctcaaacacaaaaataatcttctacagcctatatatacaacccccccttctatctctcctttctcacaattcatcatctttctttctctacccccaattttaagaaatcctctcttctcctcttcattttcaaggtaaatctctctctctctctctctctctgttattccttgttttaattaggtatgtattattgctagtttgttaatctgcttatcttatgtatgccttatgtgaatatctttatcttgttcatctcatccgtttagaagctataaatttgttgatttgactgtgtatctacacgtggttatgtttatatctaatcagatatgaatttcttcatattgttgcgtttgtgtgtaccaatccgaaatcgttgatttttttcatttaatcgtgtagctaattgtacgtatacatatggatctacgtatcaattgttcatctgtttgtgtttgtatgtatacagatctgaaaacatcacttctctcatctgattgtgttgttacatacatagatatagatctgttatatcattttttttattaattgtgtatatatatatgtgcatagatctggattacatgattgtgattatttacatgattttgttatttacgtatgtatatatgtagatctggactttttggagttgttgacttgattgtatttgtgtgtgtatatgtgtgttctgatcttgatatgttatgtatgtgcagcccggatcaagggcgaattcgacccaagtttgtacaaaaaagcaggctccgaattcgcccttttggggtagccattggtgaatagtaaagtgtaattttggtttatttacttacagcagtgtcaagggtaaattacactgtctgtacattttaaagctacgtcgtctgtacattttaaactaagtatgtatgctagaagtacactgtcttgaaataagggttatagtagttcgttttggtcaaacttgtgaaaggtatactttgtcttgtaattgagtgagagacaccattttggtattaaactgttttcctttttattaaaacgtttggctttgcacagtctaagttctttgaaacactaaaacatgatgcacctatgatagatctagagcgcaaaaacatgagaaaaataaagtggagagtgtgtcaaagcagggagaaaacagagagccttacaccggtttcgtgtagtcaactgtgtgcgttcgggactcttatttttctttcaatcggcatgtggaatgcttcatcaatgaatggtcctaaaccaggaaggagtgaggctgtcagagcatgacctagcttgggtttaagcaatatgtttccacattcatctcttaaccaaagatagatcatgctggcagcttcacttgttcccttgtggacttgtcttcaaaatacctgagcaacaagttgtgcaaatctcacatatttgacggatcaataattgtaaaaaacggaagctcaagaagtggagaaattgcaacagacgtgaaggcaatgaaagagaatacagaaaggagatgagagaagacagaggtgatgctttgtggtttaagaggcgctatagatacttatagaaagagatgagagaggatttgaggaacagatgttaaaaattttaagagatggttgggtaaaaaggagagagacaccacgaattaaagaagcctgaaacagtgaattaaaagacgcatcataatgcatacagctaagagaggaagaaagagagagagagagggacaaaatcaatagggctatgaagagattagagccttggccctgcatacctatatctccaccacctgtgaccctaagggcgaattcgacccagctttcttgtacaaagtggagctcgatcgttcaaacatttggcaataaagtttcttaagattgaatcctgttgccggtcttgcgatgattatcatataatttctgttgaattacgttaagcatgtaataattaacatgtaatgcatgacgttatttatgagatgggtttttatgattagagtcccgcaattatacatttaatacgcgatagaaaacaaaatatagcgcgcaaactaggataaattatcgcgcgcggtgtcatctatgttactagatcggccggccaacttta

SEQ ID NO: 25 - DNA, 9243 bp, Artificial sequence
  RCB493
ttatacatagttgataagcgatcgcagcttggcgtaatcatggtcatagctgtttcctactagatctgattgtcgtttcccgccttcagtttaaactatcagtgtttgacaggatatattggcgggtaaacctaagagaaaagagcgtttattagaataatcggatatttaaaagggcgtgaaaaggtttatccgttcgtccatttgtatgtccatgtgttttatggacagcaagcgaaccggaattgccagctggggcgccctctggtaaggttgggaagccctgcaaagtaaactggatggctttcttgccgccaaggatctgatggcgcaggggatcaagatctgatcaagagacaggatgaggatcgtttcgcatgattgaacaagatggattgcacgcaggttctccggccgcttgggtggagaggctattcggctatgactgggcacaacagacaatcggctgctctgatgccgccgtgttccggctgtcagcgcaggggcgcccggttctttttgtcaagaccgacctgtccggtgccctgaatgaactgcaggacgaggcagcgcggctatcgtggctggccacgacgggcgttccttgcgcagctgtgctcgacgttgtcactgaagcgggaagggactggctgctattgggcgaagtgccggggcaggatctcctgtcatcccaccttgctcctgccgagaaagtatccatcatggctgatgcaatgcggcggctgcatacgcttgatccggctacctgcccattcgaccaccaagcgaaacatcgcatcgagcgagcacgtactcggatggaagccggtcttgtcgatcaggatgatctggacgaagagcatcaggggctcgcgccagccgaactgttcgccaggctcaaggcgcgcatgcccgacggcgaggatctcgtcgtgacccatggcgatgcctgcttgccgaatatcatggtggaaaatggccgcttttctggattcatcgactgtggccggctgggtgtggcggaccgctatcaggacatagcgttggctacccgtgatattgctgaagagcttggcggcgaatgggctgaccgcttcctcgtgctttacggtatcgccgctcccgattcgcagcgcatcgccttctatcgccttcttgacgagttcttctgaattgaaaaaggaagaatgcatgaccaaaatcccttaacgtgagttttcgttccactgagcgtcagaccccgtagaaaagatcaaaggatcttcttgagatcctttttttctgcgcgtaatctgctgcttgcaaacaaaaaaaccaccgctaccagcggtggtttgtttgccggatcaagagctaccaactctttttccgaaggtaactggcttcagcagagcgcagataccaaatactgtccttctagtgtagccgtagttaggccaccacttcaagaactctgtagcaccgcctacatacctcgctctgctaatcctgttaccagtggctgctgccagtggcgataagtcgtgtcttaccgggttggactcaagacgatagttaccggataaggcgcagcggtcgggctgaacggggggttcgtgcacacagcccagcttggagcgaacgacctacaccgaactgagatacctacagcgtgagctatgagaaagcgccacgcttcccgaagggagaaaggcggacaggtatccggtaagcggcagggtcggaacaggagagcgcacgagggagcttccagggggaaacgcctggtatctttatagtcctgtcgggtttcgccacctctgacttgagcgtcgatttttgtgatgctcgtcaggggggcggagcctatggaaaaacgccagcaacgcggcctttttacggttcctggccttttgctggccttttgctcacatgttctttcctgcgttatcccctgattctgtggataaccgtattaccgcctttgagtgagctgataccgctcgccgcagccgaacgaccgagcgcagcgagtcagtgagcgaggaagcggaagagcgcctgatgcggtattttctccttacgcatctgtgcggtatttcacaccgcatatggtgcactctcagtacaatctgctctgatgccgcatagttaagccagtatacactccgctatcgctacgtgactgggtcatggctgcgccccgacacccgccaacacccgctgacgcgccctgacgggcttgtctgctcccggcatccgcttacagacaagctgtgaccgtctccgggagctgcatgtgtcagaggttttcaccgtcatcaccgaaacgcgcgaggcagggtgccttgatgtgggcgccggcggtcgagtggcgacggcgcggcttgtccgcgccctggtagattgcctggccgtaggccagccatttttgagcggccagcggccgcgataggccgacgcgaagcggcggggcgtagggagcgcagcgaccgaagggtaggcgctttttgcagctcttcggctgtgcgctggccagacagttatgcacaggccaggcgggttttaagagttttaataagttttaaagagttttaggcggaaaaatcgccttttttctcttttatatcagtcacttacatgtgtgaccggttcccaatgtacggctttgggttcccaatgtacgggttccggttcccaatgtacggctttgggttcccaatgtacgtgctatccacaggaaagagaccttttcgacctttttcccctgctagggcaatttgccctagcatctgctccgtacattaggaaccggcggatgcttcgccctcgatcaggttgcggtagcgcatgactaggatcgggccagcctgccccgcctcctccttcaaatcgtactccggcaggtcatttgacccgatcagcttgcgcacggtgaaacagaacttcttgaactctccggcgctgccactgcgttcgtagatcgtcttgaacaaccatctggcttctgccttgcctgcggcgcggcgtgccaggcggtagagaaaacggccgatgccgggatcgatcaaaaagtaatcggggtgaaccgtcagcacgtccgggttcttgccttctgtgatctcgcggtacatccaatcagctagctcgatctcgatgtactccggccgcccggtttcgctctttacgatcttgtagcggctaatcaaggcttcaccctcggataccgtcaccaggcggccgttcttggccttcttcgtacgctgcatggcaacgtgcgtggtgtttaaccgaatgcaggtttctaccaggtcgtctttctgctttccgccatcggctcgccggcagaacttgagtacgtccgcaacgtgtggacggaacacgcggccgggcttgtctcccttcccttcccggtatcggttcatggattcggttagatgggaaaccgccatcagtaccaggtcgtaatcccacacactggccatgccggccggccctgcggaaacctctacgtgcccgtctggaagctcgtagcggatcacctcgccagctcgtcggtcacgcttcgacagacggaaaacggccacgtccatgatgctgcgactatcgcgggtgcccacgtcatagagcatcggaacgaaaaaatctggttgctcgtcgcccttgggcggcttcctaatcgacggcgcaccggctgccggcggttgccgggattctttgcggattcgatcagcggccgcttgccacgattcaccggggcgtgcttctgcctcgatgcgttgccgctgggcggcctgcgcggccttcaacttctccaccaggtcatcacccagcgccgcgccgatttgtaccgggccggatggtttgcgaccgctcacgccgattcctcgggcttgggggttccagtgccattgcagggccggcagacaacccagccgcttacgcctggccaaccgcccgttcctccacacatggggcattccacggcgtcggtgcctggttgttcttgattttccatgccgcctcctttagccgctaaaattcatctactcatttattcatttgctcatttactctggtagctgcgcgatgtattcagatagcagctcggtaatggtcttgccttggcgtaccgcgtacatcttcagcttggtgtgatcctccgccggcaactgaaagttgacccgcttcatggctggcgtgtctgccaggctggccaacgttgcagccttgctgctgcgtgcgctcggacggccggcacttagcgtgtttgtgcttttgctcattttctctttacctcattaactcaaatgagttttgatttaatttcagcggccagcgcctggacctcgcgggcagcgtcgccctcgggttctgattcaagaacggttgtgccggcggcggcagtgcctgggtagctcacgcgctgcgtgatacgggactcaagaatgggcagctcgtacccggccagcgcctcggcaacctcaccgccgatgcgcgtgcctttgatcgcccgcgacacgacaaaggccgcttgtagccttccatccgtgacctcaatgcgctgcttaaccagctccaccaggtcggcggtggcccatatgtcgtaagggcttggctgcaccggaatcagcacgaagtcggctgccttgatcgcggacacagccaagtccgccgcctggggcgctccgtcgatcactacgaagtcgcgccggccgatggccttcacgtcgcggtcaatcgtcgggcggtcgatgccgacaacggttagcggttgatcttcccgcacggccgcccaatcgcgggcactgccctggggatcggaatcgactaacagaacatcggccccggcgagttgcagggcgcgggctagatgggttgcgatggtcgtcttgcctgacccgcctttctggttaagtacagcgataaccttcatgcgttccccttgcgtatttgtttatttactcatcgcatcatatacgcagcgaccgcatgacgcaagctgttttactcaaatacacatcacctttttagacggcggcgctcggtttcttcagcggccaagctggccggccaggccgccagcttggcatcagacaaaccggccaggatttcatgcagccgcacggttgagacgtgcgcgggcggctcgaacacgtacccggccgcgatcatctccgcctcgatctcttcggtaatgaaaaacggttcgtcctggccgtcctggtgcggtttcatgcttgttcctcttggcgttcattctcggcggccgccagggcgtcggcctcggtcaatgcgtcctcacggaaggcaccgcgccgcctggcctcggtgggcgtcacttcctcgctgcgctcaagtgcgcggtacagggtcgagcgatgcacgccaagcagtgcagccgcctctttcacggtgcggccttcctggtcgatcagctcgcgggcgtgcgcgatctgtgccggggtgagggtagggcgggggccaaacttcacgcctcgggccttggcggcctcgcgcccgctccgggtgcggtcgatgattagggaacgctcgaactcggcaatgccggcgaacacggtcaacaccatgcggccggccggcgtggtggtaacgcgtggtgattttgtgccgagctgccggtcggggagctgttggctggctggtggcaggatatattgtggtgtaaacaaattgacgcttagacaacttaataacacattgcggacgtctttaatgtactgaattaacatccgtttgatacttgtctaaaattggctgatttcgagtgcatctatgcataaaaacaatctaatgacaattattaccaagcaggatcctctagaattcccgatctagtaacatagatgacaccgcgcgcgataatttatcctagtttgcgcgctatattttgttttctatcgcgtattaaatgtataattgcgggactctaatcataaaaacccatctcataaataacgtcatgcattacatgttaattattacatgcttaacgtaattcaacagaaattatatgataatcatcgcaagaccggcaacaggattcaatcttaagaaactttattgccaaatgtttgaacgatcggggaaattcgagctcgccggcgtcgacgatatcctgcaggtcaaatctcggtgacgggcaggaccggacggggcggtaccggcaggctgaagtccagctgccagaaacccacgtcatgccagttcccgtgcttgaagccggccgcccgcagcatgccgcggggggcatatccgagcgcctcgtgcatgcgcacgctcgggtcgttgggcagcccgatgacagcgaccacgctcttgaagccctgtgcctccagggacttcagcaggtgggtgtagagcgtggagcccagtcccgtccgctggtggcggggggagacgtacacggtcgactcggccgtccagtcgtaggcgttgcgtgccttccaggggcccgcgtaggcgatgccggcgacctcgccgtccacctcggcgacgagccagggatagcgctcccgcagacggacgaggtcgtccgtccactcctgcggttcctgcggctcggtacggaagttgaccgtgcttgtctcgatgtagtggttgacgatggtgcagaccgccggcatgtccgcctcggtggcacggcggatgtcggccgggcgtcgttctgggctcatggcgcgcctttggttgagagtgaatatgagactctaattggataccgaggggaatttatggaacgtcagtggagcatttttgacaagaaatatttgctagctgatagtgaccttaggcgacttttgaacgcgcaataatggtttctgacgtatgtgcttagctcattaaactccagaaacccgcggctgagtggctccttcaacgttgcggttctgtcagttccaaacgtaaaacggcttgtcccgcgtcatcggcgggggtcataacgtgactcccttaattctccgctcagatcagaagcttgctatcaactttgtatagaaaagttggctccgaattcgcccttagcttgactagagaattcgaatccaaaaattacggatatgaatataggcatatccgtatccgaattatccgtttgacagctagcaacgattgtacaattgcttctttaaaaaaggaagaaagaaagaaagaaaagaatcaacatcagcgttaacaaacggccccgttacggcccaaacggtcatatagagtaacggcgttaagcgttgaaagactcctatcgaaatacgtaaccgcaaacgtgtcatagtcagatcccctcttccttcaccgcctcaaacacaaaaataatcttctacagcctatatatacaacccccccttctatctctcctttctcacaattcatcatctttctttctctacccccaattttaagaaatcctctcttctcctcttcattttcaaggtaaatctctctctctctctctctctctgttattccttgttttaattaggtatgtattattgctagtttgttaatctgcttatcttatgtatgccttatgtgaatatctttatcttgttcatctcatccgtttagaagctataaatttgttgatttgactgtgtatctacacgtggttatgtttatatctaatcagatatgaatttcttcatattgttgcgtttgtgtgtaccaatccgaaatcgttgatttttttcatttaatcgtgtagctaattgtacgtatacatatggatctacgtatcaattgttcatctgtttgtgtttgtatgtatacagatctgaaaacatcacttctctcatctgattgtgttgttacatacatagatatagatctgttatatcattttttttattaattgtgtatatatatatgtgcatagatctggattacatgattgtgattatttacatgattttgttatttacgtatgtatatatgtagatctggactttttggagttgttgacttgattgtatttgtgtgtgtatatgtgtgttctgatcttgatatgttatgtatgtgcagcccggatcaagggcgaattcgacccaagtttgtacaaaaaagcaggctccgaattcgccctttcaaaactcggtttgctaagtttatgaatatttgttctccgtacatatacatgatacacaaagtaagaatctgctcttgttttcttctagctataaaattaattccgaagtcaactatcaacctcaaacttgtgtaattaacctatacaaccaattcatcacttgagattaaaaaagttcgtagcaaaaccaaacaaagtaatccattaccatccatagaaattgaagttgcttgaacttcaaagaaacaaagctaaaccaattaccacaaaaagagaagatgaatgaaaccaaatctaacctggagatagtttactcaaagaaggaaagatcgaagcgatataattgaggggaatgaagcctggtccgacgtcattaaccgtaaaatgatcattcatgtatagactaatgaataaagaagagacatatatatataatcaaatatagatctaagttaagggcctcgtgccagacaacattcccctcaaaaggaaaagcttcactgaagaacatggactccatataagaaaaccctagcttttaacagagagagagagagagatgagcttaatttataaagaaataaaagctgaaagaggaggagacaagaaagcaatgatgaaaagaagagagggaggatattattaggaaaagattgtggaaatgtagggggtaaaaaaaacaaaagcttaataaaaaggcaattcgaaaaagatagaaaagtcgaaaagaacaaacatatattaaagtcataatgataaaaacaatttgatgacttatttccacctctttttttagttcatctttgaatctaataataatgatttcacatgtaaatccgtgagtcgtcaaaagggcgaattcgacccagctttcttgtacaaagtggagctcgatcgttcaaacatttggcaataaagtttcttaagattgaatcctgttgccggtcttgcgatgattatcatataatttctgttgaattacgttaagcatgtaataattaacatgtaatgcatgacgttatttatgagatgggtttttatgattagagtcccgcaattatacatttaatacgcgatagaaaacaaaatatagcgcgcaaactaggataaattatcgcgcgcggtgtcatctatgttactagatcggccggccaacttta

SEQ ID NO: 26 - DNA, 522 bp, Arabidopsis thaliana
  IPS1 target mimic
aagaaaaatggccatcccctagctaggtgaagaagaatgaaaacctctaatttatctagaggttattcatcttttaggggatggcctaaatacaaaatgaaaactctctaattaagtggttttgtgttcatgtaaggaaagcgttttaagatatggagcaatgaagactgcagaaggctgattcagactgcgagttttgtttatctccctctagaaattgggcaacttctatcctttggcaagcttcggttcccctcggaatcagcagattatgtatctttaattttgtaatactctctctcttctctatgctttgtttttcttcattatgtttgggttgtacccactcccgcgcgttgtgtgttctttgtgtgaggaataaaaaaatattcggatttgagaactaaaactagagtagttttattgatattcttgtttttcatttagtatctaataagtttggagaatagtcagaccagtgcatgtaaatttgcttccgattctctttatagtgaattcctc

SEQ ID NO: 27 - DNA, 41 bp, Artificial sequence
  containing a nat-siRNA (SRO5-P5CDH) target site
ctagaaaggggacccgagaggctaggccgggataagcttcg

SEQ ID NO: 28 - DNA, 68 bp, Artificial sequence
  containing an AtlsiRNA-1 target site
tagaaaatcatccaaagtacagtaacaggcgatcttcagaaccagaagcatctgttcatcgagcttcg

SEQ ID NO: 29 - DNA, 38 bp, Artificial sequence
  containing a D7 tasiRNA target site
tagaaaggggtcttagactaaaggtcaagaaagcttcg

SEQ ID NO: 30 - DNA, 24 bp, Artificial sequence
  motif for DB searches
  misc_feature (12)..(14): n is a, g, c or t
tagggcaacttnnntcctttggca

SEQ ID NO: 31 - DNA, 44 bp, Zea mays
  nucleotides 339-382 of ZM06MC40391_TD146076974 rc
tactaaggtagggcaacttgtatcctttggcaattgttctcatc

SEQ ID NO: 32 - DNA, 43 bp, Artificial sequence
  replacement sequence
tccggaggggggaatgaagaaacctggtccgaattgcggccgc

SEQ ID NO: 33 - DNA, 559 bp, Artificial sequence
  Zm miR166-trap
aggcttgctatagctggtccatggcaccatacatgtaagcacgcacacaggcacacacacacacgcacgcaatgatctacgtatctagcagcagcttatcatgtcgtcatcatgcatgcatggccgacggaggtcgtcatcttatctgggagcgtgtgtgtcttggcaatgggaagctgcatgcgcctctcgggcgtcggcgcgtcggcgcctagctgtagggcggcgtgccatagagctgcctcctgccgctcacaccatgctgttgacgaggactgatggtggtcatggcctctcggcgtcggtggcggcggcgccggcgccgagttttacctctctccggaggggggaatgaagaaacctggtccgaattgcggccgctatctgggtctgtctgttggctgcccggtgacggtatacggtgatgttctaatagtactcaattggtcttggatcggagttcatgctacggctcctctgttatatattacacggctgacggctccttattaatgtgtccgttgatgatgtcattaataatatgaatctgatattgtat

SEQ ID NO: 34 - DNA, 24 bp, Artificial sequence
  Target site in Zm miR166-trap
ggggaaugaagaaaccugguccga

SEQ ID NO: 35 - RNA, 21 nt, Artificial sequence
  zma-MIR166k and j
ucggaccaggcuucaaucccu

SEQ ID NO: 36 - RNA, 21 nt, Artificial sequence
  zma-MIR166l and m
ucggaccaggcuucauuccuc

SEQ ID NO: 37 - RNA, 20 nt, Artificial sequence
  zma-MIR166h,e,I,f,g,b,c,d
ucggaccaggcuucauuccc

SEQ ID NO: 38 - RNA, 21 nt, Artificial sequence
  zma-MIR166a
ucggaccaggcuucauucccc

SEQ ID NO: 39 - DNA, 2865 bp, Artificial sequence
  RTP2149-1 from bases 5386 to 8250
gaagttgaagacaaagaaggtcttaaatcctggctagcaacactgaactatgccagaaaccacatcaaagatatgggcaagcttcttggcccattatatccaaagacctcagagaaaggtgagcgaaggctcaattcagaagattggaagctgatcaataggatcaagacaatggtgagaacgcttccaaatctcactattccaccagaagatgcatacattatcattgaaacagatgcatgtgcaactggatggggagcagtatgcaagtggaagaaaaacaaggcagacccaagaaatacagagcaaatctgtaggtatgccagtggaaaatttgataagccaaaaggaacctgtgatgcagaaatctatggggttatgaatggcttagaaaagatgagattgttctacttggacaaaagagagatcacagtcagaactgacagtagtgcaatcgaaaggttctacaacaagagtgctgaacacaagccttctgagatcagatggatcaggttcatggactacatcactggtgcaggaccagagatagtcattgaacacataaaagggaagagcaatggtttagctgacatcttgtccaggctcaaagccaaattagctcagaatgaaccaacggaagagatgatcctgcttacacaagccataagggaagtaattccttatccagatcatccatacactgagcaactcagagaatggggaaacaaaattctggatccattccccacattcaagaaggacatgttcgaaagaacagagcaagcttttatgctaacagaggaaccagttctactctgtgcatgcaggaagcctgcaattcagttagtgtccagaacatctgccaacccaggaaggaaattcttcaagtgcgcaatgaacaaatgccattgctggtactgggcagatctcattgaagaacacattcaagacagaattgatgaatttctcaagaatcttgaagttctgaagaccggtggcgtgcaaacaatggaggaggaacttatgaaggaagtcaccaagctgaagatagaagagcaggagttcgaggaataccaggccacaccaagggctatgtcgccagtagccgcagaagatgtgctagatctccaagacgtaagcaatgacgattgaggaggcattgacgtcagggatgaccgcagcggagagtactgggcccattcagtggatgctccactgagttgtattattgtgtgcttttcggacaagtgtgctgtccactttcttttggcacctgtgccactttattccttgtctgccacgatgcctttgcttagcttgtaagcaaggatcgcagtgcgtgtgtgacaccaccccccttccgacgctctgcctatataaggcaccgtctgtaagctcttacgatcatcggtagttcaccagtcgacaccgggccttcacctgcggagggtaagatccgatcaccatcttctgaatttctgttcttgatctgtcatgtataataactgtctagtcttggtgttggtgagatggaaattcggtggatctcggaagggatattgttcgtttgctggggttttttttgtgtgttgtgatccgtagagaatttgtgtttatccatgttgttgatcttggtatgtattcatgacatattgacatgcatgtgttgtatgtgtcatatgtgtgcctctccttgggatttgttttggataatagaacatgttatggactcaatagtctgtgaacaaatctttttttagatggtggccaaatctgatgatgatctttcttgagaggaaaaagttcatgatagaaaaatcttttttgagatggtggcttaatgtgatgatgatctttcttgagaggaaaaaaaagattcattataggagattttgatttagctcctttccaccgatattaaatgaggagcatgcatgctgattgctgataaggatctgatttttttatcccctcttctttgaacagacaagaaataggctctgaatttctgattgattatttgtacatgcagggcgcgccaggcttgctatagctggtccatggcaccatacatgtaagcacgcacacaggcacacacacacacgcacgcaatgatctacgtatctagcagcagcttatcatgtcgtcatcatgcatgcatggccgacggaggtcgtcatcttatctgggagcgtgtgtgtcttggcaatgggaagctgcatgcgcctctcgggcgtcggcgcgtcggcgcctagctgtagggcggcgtgccatagagctgcctcctgccgctcacaccatgctgttgacgaggactgatggtggtcatggcctctcggcgtcggtggcggcggcgccggcgccgagttttacctctctccggaggggggaatgaagaaacctggtccgaattgcggccgctatctgggtctgtctgttggctgcccggtgacggtatacggtgatgttctaatagtactcaattggtcttggatcggagttcatgctacggctcctctgttatatattacacggctgacggctccttattaatgtgtccgttgatgatgtcattaataatatgaatctgatattgtatcctgcaggcctaggatcgttcaaacatttggcaataaagtttcttaagattgaatcctgttgccggtcttgcgatgattatcatataatttctgttgaattacgttaagcatgtaataattaacatgtaatgcatgacgttatttatgagatgggtttttatgattagagtcccgcaattatacatttaatacgcgatagaaaacaaaatatagcgcgcaaactaggataaattatcgcgcgcggtgtcatctatgttactagatc

SEQ ID NO: 40 - DNA, 24 bp, Artificial sequence
  target site in Zm miR159-trap
cggagcucccucacucaauccaaa

SEQ ID NO: 41 - RNA, 21 nt, Artificial sequence
  zma-miR159a
uuuggauugaagggagcucug

SEQ ID NO: 42 - RNA, 21 nt, Artificial sequence
  zma-miR159b
uuuggauugaagggagcucug

SEQ ID NO: 43 - RNA, 21 nt, Artificial sequence
  zma-miR159c
cuuggauugaagggagcuccu

SEQ ID NO: 44 - RNA, 21 nt, Artificial sequence
  zma-miR159d
cuuggauugaagggagcuccu

SEQ ID NO: 45 - DNA, 44 bp, Zea mays
  nucleotides 287-330 of GM06MC32536_sk84d08
gtttctgttggaaagggcaacttcaatcctttggcatttttcaa

SEQ ID NO: 46 - DNA, 44 bp, Artificial sequence
  containing a miR159 target site
gtttctgttggatagagctccctcaatcaatccaaatttttcaa

SEQ ID NO: 47 - DNA, 759 bp, Artificial sequence
  final miR159 target sequence (Gm miR159-trap)
agaaacaaaatccctataacacccaatcctagctacaacttcaaaccctctctgaattgcaccacccccatcatcccaaacatgtaacaccccttttgaaactttttctcatgagccaccccccctttgccccatgccaccacttccttaatcaatttggcatgtgggggtggtgaacatgttgtggatatatggtgtgtttggtgtggctataatggtatcttccttatctttccatgctccttttctttcaaggctaagcgaaaacgctccttcttgaggggcggtttctgttggatagagctccctcaatcaatccaaatttttcaactcctccatctcacctcacacactgtgatttgggctcttgagggacatctcagaatggcaacacccctttttatgtgtaccgtactattttctagttctttttcttgtacaacgaaatttagatgcagtttcttagatgttggtgttgttttttaatcaaaattagagttttatcttgatagtaccggattatcaaggtaaaactctgattcttatcagaaaatggcaccaaaaatactttaagaactgtatgcaagttttttgttgtttttttttggtaattcttgtttgtgatgtgatgatttcaactgcaaactatgcctatcagtatggttaccatagactatatgttatctaataaatttacatttgaataggcctttggccaaaatgtattattgttgtcgttaatatgaatatggttaaatc

SEQ ID NO: 48 - RNA, 24 nt, Artificial sequence
  Target site in Gm miR159-trap
uagagcucccucaaucaauccaaa

SEQ ID NO: 49 - RNA, 21 nt, Glycine max
  gma-MIR159a
uuuggauugaagggagcucua

SEQ ID NO: 50 - RNA, 21 nt, Glycine max
  gma-MIR159b
auuggagugaagggagcucca

SEQ ID NO: 51 - RNA, 21 nt, Glycine max
  gma-MIR159c
auuggagugaagggagcuccg

SEQ ID NO: 52 - DNA, 2145 bp, Artificial sequence
  RTP4811-1 from bases 4071 to 6215
ggatccctgaaagcgacgttggatgttaacatctacaaattgccttttcttatcgaccatgtacgtaagcgcttacgtttttggtggacccttgaggaaactggtagctgttgtgggcctgtggtctcaagatggatcattaatttccaccttcacctacgatggggggcatcgcaccggtgagtaatattgtacggctaagagcgaatttggcctgtaggatccctgaaagcgacgttggatgttaacatctacaaattgccttttcttatcgaccatgtacgtaagcgcttacgtttttggtggacccttgaggaaactggtagctgttgtgggcctgtggtctcaagatggatcattaatttccaccttcacctacgatggggggcatcgcaccggtgagtaatattgtacggctaagagcgaatttggcctgtaggatccctgaaagcgacgttggatgttaacatctacaaattgccttttcttatcgaccatgtacgtaagcgcttacgtttttggtggacccttgaggaaactggtagctgttgtgggcctgtggtctcaagatggatcattaatttccaccttcacctacgatggggggcatcgcaccggtgagtaatattgtacggctaagagcgaatttggcctgtaggatccgcgagctggtcaatcccattgcttttgaagcagctcaacattgatctctttctcgatcgagggagatttttcaaatcagtgcgcaagacgtgacgtaagtatccgagtcagtttttatttttctactaatttggtcgtttatttcggcgtgtaggacatggcaaccgggcctgaatttcgcgggtattctgtttctattccaactttttcttgatccgcagccattaacgacttttgaatagatacgctgacacgccaagcctcgctagtcaaaagtgtaccaaacaacgctttacagcaagaacggaatgcgcgtgacgctcgcggtgacgccatttcgccttttcagaaatggataaatagccttgcttcctattatatcttcccaaattaccaatacattacactagcatctgaatttcataaccaatctcgatacaccaaatcgaggcgcgccagaaacaaaatccctataacacccaatcctagctacaacttcaaaccctctctgaattgcaccacccccatcatcccaaacatgtaacaccccttttgaaactttttctcatgagccaccccccctttgccccatgccaccacttccttaatcaatttggcatgtgggggtggtgaacatgttgtggatatatggtgtgtttggtgtggctataatggtatcttccttatctttccatgctccttttctttcaaggctaagcgaaaacgctccttcttgaggggcggtttctgttggatagagctccctcaatcaatccaaatttttcaactcctccatctcacctcacacactgtgatttgggctcttgagggacatctcagaatggcaacacccctttttatgtgtaccgtactattttctagttctttttcttgtacaacgaaatttagatgcagtttcttagatgttggtgttgttttttaatcaaaattagagttttatcttgatagtaccggattatcaaggtaaaactctgattcttatcagaaaatggcaccaaaaatactttaagaactgtatgcaagttttttgttgtttttttttggtaattcttgtttgtgatgtgatgatttcaactgcaaactatgcctatcagtatggttaccatagactatatgttatctaataaatttacatttgaataggcctttggccaaaatgtattattgttgtcgttaatatgaatatggttaaatccctgcaggcctaggatcgttcaaacatttggcaataaagtttcttaagattgaatcctgttgccggtcttgcgatgattatcatataatttctgttgaattacgttaagcatgtaataattaacatgtaatgcatgacgttatttatgagatgggtttttatgattagagtcccgcaattatacatttaatacgcgatagaaaacaaaatatagcgcgcaaactaggataaattatcgcgcgcggtgtcatctatgttactagatc

SEQ ID NO: 53 - DNA, 44 bp, Glycine max; identical to SEQ ID NO: 45
  nucleotides 287-330 of GM06MC32536_sk84d08

SEQ ID NO: 54 - DNA, 44 bp, Artificial sequence
  containing a miR159 target site
gtttctgttggatgactacggttcaaatacctgtaatttttcaa

SEQ ID NO: 55 - DNA, 2145 bp, Artificial sequence
  RTP4808-1 from bases 3593 to 5737
ggatccctgaaagcgacgttggatgttaacatctacaaattgccttttcttatcgaccatgtacgtaagcgcttacgtttttggtggacccttgaggaaactggtagctgttgtgggcctgtggtctcaagatggatcattaatttccaccttcacctacgatggggggcatcgcaccggtgagtaatattgtacggctaagagcgaatttggcctgtaggatccctgaaagcgacgttggatgttaacatctacaaattgccttttcttatcgaccatgtacgtaagcgcttacgtttttggtggacccttgaggaaactggtagctgttgtgggcctgtggtctcaagatggatcattaatttccaccttcacctacgatggggggcatcgcaccggtgagtaatattgtacggctaagagcgaatttggcctgtaggatccctgaaagcgacgttggatgttaacatctacaaattgccttttcttatcgaccatgtacgtaagcgcttacgtttttggtggacccttgaggaaactggtagctgttgtgggcctgtggtctcaagatggatcattaatttccaccttcacctacgatggggggcatcgcaccggtgagtaatattgtacggctaagagcgaatttggcctgtaggatccgcgagctggtcaatcccattgcttttgaagcagctcaacattgatctctttctcgatcgagggagatttttcaaatcagtgcgcaagacgtgacgtaagtatccgagtcagtttttatttttctactaatttggtcgtttatttcggcgtgtaggacatggcaaccgggcctgaatttcgcgggtattctgtttctattccaactttttcttgatccgcagccattaacgacttttgaatagatacgctgacacgccaagcctcgctagtcaaaagtgtaccaaacaacgctttacagcaagaacggaatgcgcgtgacgctcgcggtgacgccatttcgccttttcagaaatggataaatagccttgcttcctattatatcttcccaaattaccaatacattacactagcatctgaatttcataaccaatctcgatacaccaaatcgaggcgcgccagaaacaaaatccctataacacccaatcctagctacaacttcaaaccctctctgaattgcaccacccccatcatcccaaacatgtaacaccccttttgaaactttttctcatgagccaccccccctttgccccatgccaccacttccttaatcaatttggcatgtgggggtggtgaacatgttgtggatatatggtgtgtttggtgtggctataatggtatcttccttatctttccatgctccttttctttcaaggctaagcgaaaacgctccttcttgaggggcggtttctgttggatgactacggttcaaatacctgtaatttttcaactcctccatctcacctcacacactgtgatttgggctcttgagggacatctcagaatggcaacacccctttttatgtgtaccgtactattttctagttctttttcttgtacaacgaaatttagatgcagtttcttagatgttggtgttgttttttaatcaaaattagagttttatcttgatagtaccggattatcaaggtaaaactctgattcttatcagaaaatggcaccaaaaatactttaagaactgtatgcaagttttttgttgtttttttttggtaattcttgtttgtgatgtgatgatttcaactgcaaactatgcctatcagtatggttaccatagactatatgttatctaataaatttacatttgaataggcctttggccaaaatgtattattgttgtcgttaatatgaatatggttaaatccctgcaggcctaggatcgttcaaacatttggcaataaagtttcttaagattgaatcctgttgccggtcttgcgatgattatcatataatttctgttgaattacgttaagcatgtaataattaacatgtaatgcatgacgttatttatgagatgggtttttatgattagagtcccgcaattatacatttaatacgcgatagaaaacaaaatatagcgcgcaaactaggataaattatcgcgcgcggtgtcatctatgttactagatc

SEQ ID NO: 56 - DNA, 2891 bp, Artificial sequence; identical to SEQ ID NO: 16
  example of the stacked GM06MC32536_sk84d08 sequences

SEQ ID NO: 57 - DNA, 24 bp, Artificial sequence
  complimentary to miR398a
aaggggtgacctaagaacaccacc

SEQ ID NO: 58 - DNA, 24 bp, Artificial sequence
  miR398a trap
aaggggtgaccctataagaacacc

SEQ ID NO: 59 - DNA, 2451 bp, Artificial sequence
  RCB346 from bases 7039-9489
aattcgaatccaaaaattacggatatgaatataggcatatccgtatccgaattatccgtttgacagctagcaacgattgtacaattgcttctttaaaaaaggaagaaagaaagaaagaaaagaatcaacatcagcgttaacaaacggccccgttacggcccaaacggtcatatagagtaacggcgttaagcgttgaaagactcctatcgaaatacgtaaccgcaaacgtgtcatagtcagatcccctcttccttcaccgcctcaaacacaaaaataatcttctacagcctatatatacaacccccccttctatctctcctttctcacaattcatcatctttctttctctacccccaattttaagaaatcctctcttctcctcttcattttcaaggtaaatctctctctctctctctctctctgttattccttgttttaattaggtatgtattattgctagtttgttaatctgcttatcttatgtatgccttatgtgaatatctttatcttgttcatctcatccgtttagaagctataaatttgttgatttgactgtgtatctacacgtggttatgtttatatctaatcagatatgaatttcttcatattgttgcgtttgtgtgtaccaatccgaaatcgttgatttttttcatttaatcgtgtagctaattgtacgtatacatatggatctacgtatcaattgttcatctgtttgtgtttgtatgtatacagatctgaaaacatcacttctctcatctgattgtgttgttacatacatagatatagatctgttatatcattttttttattaattgtgtatatatatatgtgcatagatctggattacatgattgtgattatttacatgattttgttatttacgtatgtatatatgtagatctggactttttggagttgttgacttgattgtatttgtgtgtgtatatgtgtgttctgatcttgatatgttatgtatgtgcagcccggatcaagggcgaattcgacccaagtttgtacaaaaaagcaggctccgaattcgcccttcgggatccaagcacttcatagatcgtgattttggagtaactttgatgaaacgtaattttgaattataaagttgatacatatacttttcataatttctttatagacaaaaaaaatgattacgatgacatattatgtccaaggtgtatattttgttttcatgcttacaggatagtaaaaaagcttaattttaaatataatttctataagcaaatcaatgtaaaaccatagcaaagaagcaaatcaatgccaaaaaaggtgcaaataataagatgtgagggttaaaaaaagggaacaagaccatgttcttgtctacttgaaatgtatccttaaatctttgaaacttacatgtatatagcaaattttcttactttttgcttgttgatatgactggatctactcattgaagagcctcccgccgttgatgtctccggtcatgaaaccctttgaccggagtggaagctaccaaagaatgaatccaaagagatcgcatgatccggaaaagtaagcaaaatgtttggaatttgtttttcttccatctttcgattgagaaggaaaaaaaaaacaattattggggaataaatcagcttaattaggatcaatgcgatccctttggatcctttctctagttgctgtgaagaactctctctctttcaaggtgggagcaatggtgttttaattttctcgaaggcctttgatataaaagatgaccatgatcctcttcttgttaaataaaaatataaaacacactttttctcttctttttttttttttttttttaatttccaccttctcatctttaaactttttatttttagtttattatgtccacattgagaattttactttatatttgacttggagtaaaaaagacgtctatactttagacgaaatcttgtggtcttaatcacatgatttatattttataccgttattactattatcttgcaccgttatatgatcatttcggcaactactataaccaccaaacttgaagcttatacatgtatagtattatgaacatatgaagcttatacatgcatagatttatgaacatatgactgtgtaaaactaaaactaaagatatattatcagccattatcccattgtttcaaaagggcgaattcgacccagctttcttgtacaaagtggagctcgatcgttcaaacatttggcaataaagtttcttaagattgaatcctgttgccggtcttgcgatgattatcatataatttctgttgaattacgttaagcatgtaataattaacatgtaatgcatgacgttatttatgagatgggtttttatgattagagtcccgcaattatacatttaatacgcgatagaaaacaaaatatagcgcgcaaactaggataaattatcgcgcgcggtgtcatctatgttactagatc

SEQ ID NO: 60 - DNA, 1818 bp, Artificial sequence
  RCB371 from bases 7039-8856
aattcgaatccaaaaattacggatatgaatataggcatatccgtatccgaattatccgtttgacagctagcaacgattgtacaattgcttctttaaaaaaggaagaaagaaagaaagaaaagaatcaacatcagcgttaacaaacggccccgttacggcccaaacggtcatatagagtaacggcgttaagcgttgaaagactcctatcgaaatacgtaaccgcaaacgtgtcatagtcagatcccctcttccttcaccgcctcaaacacaaaaataatcttctacagcctatatatacaacccccccttctatctctcctttctcacaattcatcatctttctttctctacccccaattttaagaaatcctctcttctcctcttcattttcaaggtaaatctctctctctctctctctctctgttattccttgttttaattaggtatgtattattgctagtttgttaatctgcttatcttatgtatgccttatgtgaatatctttatcttgttcatctcatccgtttagaagctataaatttgttgatttgactgtgtatctacacgtggttatgtttatatctaatcagatatgaatttcttcatattgttgcgtttgtgtgtaccaatccgaaatcgttgatttttttcatttaatcgtgtagctaattgtacgtatacatatggatctacgtatcaattgttcatctgtttgtgtttgtatgtatacagatctgaaaacatcacttctctcatctgattgtgttgttacatacatagatatagatctgttatatcattttttttattaattgtgtatatatatatgtgcatagatctggattacatgattgtgattatttacatgattttgttatttacgtatgtatatatgtagatctggactttttggagttgttgacttgattgtatttgtgtgtgtatatgtgtgttctgatcttgatatgttatgtatgtgcagcccggatcaagggcgaattcgacccaagtttgtacaaaaaagcaggctccgaattcgccctttgcgacacgacttgaccactacgcacaaaaccaaaagacttcaaagttttgttagaaacataggaagatgtatgtcaataatcagaaaaagtctttcacgtcaagtgttgccactaacaatgtcaaagaaatttgaatttcagttatcattagctaaatttacgtctatatgtctgatatagaacatatttgtcttaaacagcttccatgaacgtaaaatgtattacatatatatagacaatatgcaaaaagctcaaagtcatcaacattgtctctttccatgatcattcatgtcgtgcctctttaattttgtatgaaggtgaatgtctgagatgaaagagaagaacatataaggatagccaaggagactgcctgatatcttttttataagcaaaatggtcattgcttgatacaacttatagtgacttcaaacaagacactaaacattttacacaaagagtcaggcaagtcatccttggaagggcgaattcgacccagctttcttgtacaaagtggagctcgatcgttcaaacatttggcaataaagtttcttaagattgaatcctgttgccggtcttgcgatgattatcatataatttctgttgaattacgttaagcatgtaataattaacatgtaatgcatgacgttatttatgagatgggtttttatgattagagtcccgcaattatacatttaatacgcgatagaaaacaaaatatagcgcgcaaactaggataaattatcgcgcgcggtgtcatctatgttactagatc

SEQ ID NO: 61 - DNA, 2255 bp, Artificial sequence
  RCB383 from bases 7039-9293
aattcgaatccaaaaattacggatatgaatataggcatatccgtatccgaattatccgtttgacagctagcaacgattgtacaattgcttctttaaaaaaggaagaaagaaagaaagaaaagaatcaacatcagcgttaacaaacggccccgttacggcccaaacggtcatatagagtaacggcgttaagcgttgaaagactcctatcgaaatacgtaaccgcaaacgtgtcatagtcagatcccctcttccttcaccgcctcaaacacaaaaataatcttctacagcctatatatacaacccccccttctatctctcctttctcacaattcatcatctttctttctctacccccaattttaagaaatcctctcttctcctcttcattttcaaggtaaatctctctctctctctctctctctgttattccttgttttaattaggtatgtattattgctagtttgttaatctgcttatcttatgtatgccttatgtgaatatctttatcttgttcatctcatccgtttagaagctataaatttgttgatttgactgtgtatctacacgtggttatgtttatatctaatcagatatgaatttcttcatattgttgcgtttgtgtgtaccaatccgaaatcgttgatttttttcatttaatcgtgtagctaattgtacgtatacatatggatctacgtatcaattgttcatctgtttgtgtttgtatgtatacagatctgaaaacatcacttctctcatctgattgtgttgttacatacatagatatagatctgttatatcattttttttattaattgtgtatatatatatgtgcatagatctggattacatgattgtgattatttacatgattttgttatttacgtatgtatatatgtagatctggactttttggagttgttgacttgattgtatttgtgtgtgtatatgtgtgttctgatcttgatatgttatgtatgtgcagcccggatcaagggcgaattcgacccaagtttgtacaaaaaagcaggctccgaattcgcccttcgggattaaggggaatgagaagtaaacttttatttactttcgacgacaaaactcaacatacctatttaaagatatagatttaactatagcatgattaccatcctaatgtcttcggtactttagtgattataatcgcaataactctttagatccataattctgaccataattatggatctaaagagttatcctgtgtcttcagtttaggaataaagggtttatgtaaccataccttcaaatcaatatctttggaaagaagaatcttgacaagtgaatcaatggagtaaaaccctgaattgtcatgttttcccacagctttcttgagcttccaaaatgcttaatcttaaagttttttttcttcttacttttgtttaagaaaaaaacaatggaaatgaaaaagaaagttcaagaaagctgtggaaaagtatgaccaggatcttcatcttctccttcttctgaaaactaattaaacttaagagaattgttgagagatagagagagagatattagttgagcaactagcatatagaagaaactcaagaggaccactctatttatatataatacaaagtgagtgatagatatgtgaacctgcttagtagcgtgggactgaaagataaaagtagacttgtttgtttctttatgcgttttctttttgttatacagttttatataataagttccatcaagtccaaatactatgcccattttttttttaatgtaaaccactcttatgctagtgtaaaagtatacgttcgggctaaactcatcatttaaatttggtcttatatgtgtaatttatatgtgaattacttagtggtgcttagatagttagatacaatcttacaaaagttagacaacttgataattagcttagatgtgttacctcattactcgatatggaggacgctcaccgaagggcgaattcgacccagctttcttgtacaaagtggagctcgatcgttcaaacatttggcaataaagtttcttaagattgaatcctgttgccggtcttgcgatgattatcatataatttctgttgaattacgttaagcatgtaataattaacatgtaatgcatgacgttatttatgagatgggtttttatgattagagtcccgcaattatacatttaatacgcgatagaaaacaaaatatagcgcgcaaactaggataaattatcgcgcgcggtgtcatctatgttactagatc

SEQ ID NO: 62 - DNA, 2220 bp, Artificial sequence
  RCB388 from bases 7039-9258
aattcgaatccaaaaattacggatatgaatataggcatatccgtatccgaattatccgtttgacagctagcaacgattgtacaattgcttctttaaaaaaggaagaaagaaagaaagaaaagaatcaacatcagcgttaacaaacggccccgttacggcccaaacggtcatatagagtaacggcgttaagcgttgaaagactcctatcgaaatacgtaaccgcaaacgtgtcatagtcagatcccctcttccttcaccgcctcaaacacaaaaataatcttctacagcctatatatacaacccccccttctatctctcctttctcacaattcatcatctttctttctctacccccaattttaagaaatcctctcttctcctcttcattttcaaggtaaatctctctctctctctctctctctgttattccttgttttaattaggtatgtattattgctagtttgttaatctgcttatcttatgtatgccttatgtgaatatctttatcttgttcatctcatccgtttagaagctataaatttgttgatttgactgtgtatctacacgtggttatgtttatatctaatcagatatgaatttcttcatattgttgcgtttgtgtgtaccaatccgaaatcgttgatttttttcatttaatcgtgtagctaattgtacgtatacatatggatctacgtatcaattgttcatctgtttgtgtttgtatgtatacagatctgaaaacatcacttctctcatctgattgtgttgttacatacatagatatagatctgttatatcattttttttattaattgtgtatatatatatgtgcatagatctggattacatgattgtgattatttacatgattttgttatttacgtatgtatatatgtagatctggactttttggagttgttgacttgattgtatttgtgtgtgtatatgtgtgttctgatcttgatatgttatgtatgtgcagcccggatcaagggcgaattcgacccaagtttgtacaaaaaagcaggctccgaattcgcccttcgcctcgagagagacagagtggaaaaagaaacgatataatatatacatgactcgagaaaaattaaggaccagcctattaacaactaggttacattgctaatctcacttaaccacgcgttaactaatagattaagcttttttcgatactacccatctcttaaaatataatgaatgattaaaggctaaaggtctcctcccgcgtgcaagtagatggcacaaaaaatctagaaacaagaacaagccagagtttagatcgtatcttcttaccttaatatggagataaccaagagagacagagaaagattgtgtaagtgatagagagagattgagacatagagaacgaagacaggccaaagagatcagcaccggaatctgacagaaagagcagtgagcacgcaagagaagcaagtgcaatgatatgcaaattgcctttgtgtgctcactctcttctgtcagtttctttgcgtttctcttgtcccaactctttcattcacaattagtccaacttcagagatctacaagatgaaacaaagaaaacaagaaacgatgagaatcttttaagctttgtgttagatctgagttttaactggagaagacaaagaatcaaagagagggagggagagagggagagatatgagaagagaagagattccatttgagaccctttagaagatcaaatctagggtttttgtctaaatcgagaaaaaacataaccataaaaagcaaaaaaaagaaagaaagagggtaaagaaacaaagatctgatgagaagaagataagagaaaaccttatctctctctatttcaaagagtcttacctttctttatggctcttgtcgctttctttatctctcttacatgcaaagggaacagatgtctggcgaagggcgaattcgacccagctttcttgtacaaagtggagctcgatcgttcaaacatttggcaataaagtttcttaagattgaatcctgttgccggtcttgcgatgattatcatataatttctgttgaattacgttaagcatgtaataattaacatgtaatgcatgacgttatttatgagatgggtttttatgattagagtcccgcaattatacatttaatacgcgatagaaaacaaaatatagcgcgcaaactaggataaattatcgcgcgcggtgtcatctatgttactagatc

SEQ ID NO: 63 - DNA, 2372 bp, Artificial sequence
  RCB478 from bases 7038-9409
aattcgaatccaaaaattacggatatgaatataggcatatccgtatccgaattatccgtttgacagctagcaacgattgtacaattgcttctttaaaaaaggaagaaagaaagaaagaaaagaatcaacatcagcgttaacaaacggccccgttacggcccaaacggtcatatagagtaacggcgttaagcgttgaaagactcctatcgaaatacgtaaccgcaaacgtgtcatagtcagatcccctcttccttcaccgcctcaaacacaaaaataatcttctacagcctatatatacaacccccccttctatctctcctttctcacaattcatcatctttctttctctacccccaattttaagaaatcctctcttctcctcttcattttcaaggtaaatctctctctctctctctctctctgttattccttgttttaattaggtatgtattattgctagtttgttaatctgcttatcttatgtatgccttatgtgaatatctttatcttgttcatctcatccgtttagaagctataaatttgttgatttgactgtgtatctacacgtggttatgtttatatctaatcagatatgaatttcttcatattgttgcgtttgtgtgtaccaatccgaaatcgttgatttttttcatttaatcgtgtagctaattgtacgtatacatatggatctacgtatcaattgttcatctgtttgtgtttgtatgtatacagatctgaaaacatcacttctctcatctgattgtgttgttacatacatagatatagatctgttatatcattttttttattaattgtgtatatatatatgtgcatagatctggattacatgattgtgattatttacatgattttgttatttacgtatgtatatatgtagatctggactttttggagttgttgacttgattgtatttgtgtgtgtatatgtgtgttctgatcttgatatgttatgtatgtgcagcccggatcaagggcgaattcgacccaagtttgtacaaaaaagcaggctccgaattcgcccttttggggtagccattggtgaatagtaaagtgtaattttggtttatttacttacagcagtgtcaagggtaaattacactgtctgtacattttaaagctacgtcgtctgtacattttaaactaagtatgtatgctagaagtacactgtcttgaaataagggttatagtagttcgttttggtcaaacttgtgaaaggtatactttgtcttgtaattgagtgagagacaccattttggtattaaactgttttcctttttattaaaacgtttggctttgcacagtctaagttctttgaaacactaaaacatgatgcacctatgatagatctagagcgcaaaaacatgagaaaaataaagtggagagtgtgtcaaagcagggagaaaacagagagccttacaccggtttcgtgtagtcaactgtgtgcgttcgggactcttatttttctttcaatcggcatgtggaatgcttcatcaatgaatggtcctaaaccaggaaggagtgaggctgtcagagcatgacctagcttgggtttaagcaatatgtttccacattcatctcttaaccaaagatagatcatgctggcagcttcacttgttcccttgtggacttgtcttcaaaatacctgagcaacaagttgtgcaaatctcacatatttgacggatcaataattgtaaaaaacggaagctcaagaagtggagaaattgcaacagacgtgaaggcaatgaaagagaatacagaaaggagatgagagaagacagaggtgatgctttgtggtttaagaggcgctatagatacttatagaaagagatgagagaggatttgaggaacagatgttaaaaattttaagagatggttgggtaaaaaggagagagacaccacgaattaaagaagcctgaaacagtgaattaaaagacgcatcataatgcatacagctaagagaggaagaaagagagagagagagggacaaaatcaatagggctatgaagagattagagccttggccctgcatacctatatctccaccacctgtgaccctaagggcgaattcgacccagctttcttgtacaaagtggagctcgatcgttcaaacatttggcaataaagtttcttaagattgaatcctgttgccggtcttgcgatgattatcatataatttctgttgaattacgttaagcatgtaataattaacatgtaatgcatgacgttatttatgagatgggtttttatgattagagtcccgcaattatacatttaatacgcgatagaaaacaaaatatagcgcgcaaactaggataaattatcgcgcgcggtgtcatctatgttactagatc

SEQ ID NO: 64 - DNA, 2191 bp, Artificial sequence
  RCB493 from bases 7038-9228
aattcgaatccaaaaattacggatatgaatataggcatatccgtatccgaattatccgtttgacagctagcaacgattgtacaattgcttctttaaaaaaggaagaaagaaagaaagaaaagaatcaacatcagcgttaacaaacggccccgttacggcccaaacggtcatatagagtaacggcgttaagcgttgaaagactcctatcgaaatacgtaaccgcaaacgtgtcatagtcagatcccctcttccttcaccgcctcaaacacaaaaataatcttctacagcctatatatacaacccccccttctatctctcctttctcacaattcatcatctttctttctctacccccaattttaagaaatcctctcttctcctcttcattttcaaggtaaatctctctctctctctctctctctgttattccttgttttaattaggtatgtattattgctagtttgttaatctgcttatcttatgtatgccttatgtgaatatctttatcttgttcatctcatccgtttagaagctataaatttgttgatttgactgtgtatctacacgtggttatgtttatatctaatcagatatgaatttcttcatattgttgcgtttgtgtgtaccaatccgaaatcgttgatttttttcatttaatcgtgtagctaattgtacgtatacatatggatctacgtatcaattgttcatctgtttgtgtttgtatgtatacagatctgaaaacatcacttctctcatctgattgtgttgttacatacatagatatagatctgttatatcattttttttattaattgtgtatatatatatgtgcatagatctggattacatgattgtgattatttacatgattttgttatttacgtatgtatatatgtagatctggactttttggagttgttgacttgattgtatttgtgtgtgtatatgtgtgttctgatcttgatatgttatgtatgtgcagcccggatcaagggcgaattcgacccaagtttgtacaaaaaagcaggctccgaattcgccctttcaaaactcggtttgctaagtttatgaatatttgttctccgtacatatacatgatacacaaagtaagaatctgctcttgttttcttctagctataaaattaattccgaagtcaactatcaacctcaaacttgtgtaattaacctatacaaccaattcatcacttgagattaaaaaagttcgtagcaaaaccaaacaaagtaatccattaccatccatagaaattgaagttgcttgaacttcaaagaaacaaagctaaaccaattaccacaaaaagagaagatgaatgaaaccaaatctaacctggagatagtttactcaaagaaggaaagatcgaagcgatataattgaggggaatgaagcctggtccgacgtcattaaccgtaaaatgatcattcatgtatagactaatgaataaagaagagacatatatatataatcaaatatagatctaagttaagggcctcgtgccagacaacattcccctcaaaaggaaaagcttcactgaagaacatggactccatataagaaaaccctagcttttaacagagagagagagagagatgagcttaatttataaagaaataaaagctgaaagaggaggagacaagaaagcaatgatgaaaagaagagagggaggatattattaggaaaagattgtggaaatgtagggggtaaaaaaaacaaaagcttaataaaaaggcaattcgaaaaagatagaaaagtcgaaaagaacaaacatatattaaagtcataatgataaaaacaatttgatgacttatttccacctctttttttagttcatctttgaatctaataataatgatttcacatgtaaatccgtgagtcgtcaaaagggcgaattcgacccagctttcttgtacaaagtggagctcgatcgttcaaacatttggcaataaagtttcttaagattgaatcctgttgccggtcttgcgatgattatcatataatttctgttgaattacgttaagcatgtaataattaacatgtaatgcatgacgttatttatgagatgggtttttatgattagagtcccgcaattatacatttaatacgcgatagaaaacaaaatatagcgcgcaaactaggataaattatcgcgcgcggtgtcatctatgttactagatc

SEQ ID NO: 65 - DNA, 38 bp, Arabidopsis thaliana
  nucleotides 211-248 of IPS1
ctagaaattgggcaacttctatcctttggcaagcttcg

SEQ ID NO: 66 - DNA, 27 bp, Artificial sequence
  Target site in nat-siRNA (SRO5-P5CDH)-trap
ggggacccgagaggctaggccgggata

SEQ ID NO: 67 - DNA, 24 bp, Artificial sequence
  nat-siRNA (SRO5-P5CDH)
tatcccggcccctctcgggtcccc

SEQ ID NO: 68 - DNA, 38 bp, Artificial sequence; identical to SEQ ID NO: 65
  nucleotides 211-248 of IPS1

SEQ ID NO: 69 - DNA, 55 bp, Artificial sequence
  Target site in AtlsiRNA-1-trap
atcatccaaagtacagtaacaggcgatcttcagaaccagaagcatctgttcatcg

SEQ ID NO: 70 - DNA, 55 bp, Artificial sequence
  AtlsiRNA-1
cgatgaacagatgcttctggttctgaagatcgcctgttactgtactttggatgat

SEQ ID NO: 71 - DNA, 38 bp, Artificial sequence; identical to SEQ ID NO: 65
  nucleotides 211-248 of IPS1

SEQ ID NO: 72 - DNA, 24 bp, Artificial sequence
  Target site in D7 tasiRNA-trap
ggggtcttagactaaggtcaagaa

SEQ ID NO: 73 - DNA, 21 bp, Artificial sequence
  D7 tasiRNA
ttcttgaccttctaagacccc

SEQ ID NO: 74 - DNA, 38 bp, Artificial sequence; identical to SEQ ID NO: 65
  nucleotides 211-248 of IPS1

SEQ ID NO: 75 - DNA, 37 bp, Artificial sequence
  containing a D8 tasiRNA target site
tagaaagaggccttacactaaggtcaagaaagcttcg

SEQ ID NO: 76 - DNA, 24 bp, Artificial sequence
  Target site in D8 tasiRNA-trap
gaggccttacactaaggtcaagaa

SEQ ID NO: 77 - DNA, 21 bp, Artificial sequence
  D8 tasiRNA
ttcttgaccttgtaaggcctc

SEQ ID NO: 78 - RNA, 21 nt, Zea mays
  ZMmerge06292009_8362056
ucaucuguuugacgugugaca

SEQ ID NO: 79 - RNA, 21 nt, Zea mays
  ZMmerge06292009_22890211
ucaauucggcucaaucuuuuc

SEQ ID NO: 80 - RNA, 21 nt, Zea mays
  ZMmerge06292009_17459779
cagacgauguugaaccggugu

SEQ ID NO: 81 - RNA, 21 nt, Zea mays
  ZMmerge06292009_17461814
agcuacgcgcguggacugccu

SEQ ID NO: 82 - RNA, 20 nt, Zea mays
  ZMmerge06292009_24734915
uccaggaugaccguucuccc

SEQ ID NO: 83 - RNA, 20 nt, Zea mays
  ZMmerge06292009_25536317
augugccacuaggcuggacu

SEQ ID NO: 84 - RNA, 21 nt, Zea mays
  ZMmerge06292009_6587921
uccaaacagucucgcccgcau

SEQ ID NO: 85 - RNA, 20 nt, Zea mays
  ZMmerge06292009_26575193
uucaauucggcucaaucuuu

SEQ ID NO: 86 - RNA, 19 nt, Zea mays
  ZMmerge06292009_15677759
ugauauuacugaggaacgu

SEQ ID NO: 87 - RNA, 21 nt, Zea mays
  ZMmerge06292009_17498442
agcuagcuguuuggcagaacu

SEQ ID NO: 88 - RNA, 21 nt, Zea mays
  ZMmerge06292009_28411484
gcgagagugaaugaaguggga

SEQ ID NO: 89 - RNA, 20 nt, Zea mays
  ZMmerge06292009_26595842
cuccaguagauauugauggu

SEQ ID NO: 90 - RNA, 19 nt, Zea mays
  ZMmerge06292009_26597667
ccacugaaaaugagucugc

SEQ ID NO: 91 - RNA, 19 nt, Zea mays
  ZMmerge06292009_12827291
aaaccacugaaaaugaguc

SEQ ID NO: 92 - RNA, 20 nt, Zea mays
  ZMmerge06292009_17530341
ggucgcuugcauacuucgau

SEQ ID NO: 93 - RNA, 21 nt, Zea mays
  ZMmerge06292009_6638626
ccugugggccagagcgugauu

SEQ ID NO: 94 - RNA, 21 nt, Zea mays
  ZMmerge06292009_4835391
gcuugcacagaaggacugcuu

SEQ ID NO: 95 - RNA, 20 nt, Zea mays
  ZMmerge06292009_26628116
ugagugaagucgacgggaga

SEQ ID NO: 96 - RNA, 19 nt, Zea mays
  ZMmerge06292009_28445953
ggacugguuguggcacuag

SEQ ID NO: 97 - RNA, 21 nt, Zea mays
  ZMmerge06292009_22999576
cugauucggacuucuugcaga

SEQ ID NO: 98 - RNA, 21 nt, Zea mays
  ZMmerge06292009_13939242
cgcuuacacagaaggacugcu

SEQ ID NO: 99 - RNA, 21 nt, Zea mays
  ZMmerge06292009_28480302
gcuaugcaugguuccuuggua

SEQ ID NO: 100 - RNA, 20 nt, Zea mays
  ZMmerge06292009_23031424
agcaagggggaagccuagua

SEQ ID NO: 101 - RNA, 19 nt, Zea mays
  ZMmerge06292009_24850765
agugcaaucccuuuggaau

SEQ ID NO: 102 - RNA, 20 nt, Zea mays
  ZMmerge06292009_6690596
ccagacgcaaccgaacaagc

SEQ ID NO: 103 - RNA, 19 nt, Zea mays
  ZMmerge06292009_6691417
ggcagucuccuuggcuagu

SEQ ID NO: 104 - RNA, 21 nt, Zea mays
  ZMmerge06292009_19402379
ccaagcgucggaugaagacgg

SEQ ID NO: 105 - RNA, 21 nt, Zea mays
  ZMmerge06292009_21218886
gauccuuggacgacugucguc

SEQ ID NO: 106 - RNA, 21 nt, Zea mays
  ZMmerge06292009_17589764
aucaggauugaugauguaaag

SEQ ID NO: 107 - RNA, 21 nt, Zea mays
  ZMmerge06292009_13958965
gguaccgacgggauuuacucu

SEQ ID NO: 108 - RNA, 21 nt, Zea mays
  ZMmerge06292009_13969576
aggagagcugcgcaucuuugu

SEQ ID NO: 109 - RNA, 20 nt, Zea mays
  ZMmerge06292009_19421830
uguacgucguaugccuacuu

SEQ ID NO: 110 - RNA, 20 nt, Zea mays
  ZMmerge06292009_10343601
uggaccaauacaaggaagau

SEQ ID NO: 111 - RNA, 21 nt, Zea mays
  ZMmerge06292009_24875821
gcuuaaaaccgucggagauaa

SEQ ID NO: 112 - RNA, 20 nt, Zea mays
  ZMmerge06292009_10349004
cacugaaaaugagucugcua

SEQ ID NO: 113 - RNA, 20 nt, Zea mays
  ZMmerge06292009_26705173
cggggacuggggagaagagg

SEQ ID NO: 114 - RNA, 19 nt, Zea mays
  ZMmerge06292009_24888891
aacggguuacuguuauuga

SEQ ID NO: 115 - RNA, 19 nt, Zea mays
  ZMmerge06292009_15814765
agcgggaguucuggacaac

SEQ ID NO: 116 - RNA, 21 nt, Zea mays
  ZMmerge06292009_15833065
ugcucaccuauacccuuaguc

SEQ ID NO: 117 - RNA, 20 nt, Zea mays
  ZMmerge06292009_10394114
uugcucuucuuuuucggaca

SEQ ID NO: 118 - RNA, 21 nt, Zea mays
  ZMmerge06292009_17658170
guacaguaguagguaaguuag

SEQ ID NO: 119 - RNA, 19 nt, Zea mays
  ZMmerge06292009_10396798
aggacggagcaagacgacg

SEQ ID NO: 120 - RNA, 21 nt, Zea mays
  ZMmerge06292009_16474753
auuugguaauuuagggacuaa

SEQ ID NO: 121 - RNA, 19 nt, Zea mays
  ZMmerge06292009_1335963
aacuagcaccgaaaaccgu

SEQ ID NO: 122 - RNA, 21 nt, Zea mays
  ZMmerge06292009_3153662
gacucgcuuugagaagccugu

SEQ ID NO: 123 - RNA, 21 nt, Zea mays
  ZMmerge06292009_1339422
cgagcuggugagguggggguc

SEQ ID NO: 124 - RNA, 21 nt, Zea mays
  ZMmerge06292009_12231821
ggucaaaaucgucaauucacc

SEQ ID NO: 125 - RNA, 21 nt, Zea mays
  ZMmerge06292009_17684693
cggugucggcgaucggagacc

SEQ ID NO: 126 - RNA, 20 nt, Zea mays
  ZMmerge06292009_19508175
aacggugggaggauaacaag

SEQ ID NO: 127 - RNA, 19 nt, Zea mays
  ZMmerge06292009_8615914
aauaugguuucugagcaaa

SEQ ID NO: 128 - RNA, 20 nt, Zea mays
  ZMmerge06292009_23145200
cuugaaaacggucacaaaaa

SEQ ID NO: 129 - RNA, 21 nt, Zea mays
  ZMmerge06292009_23154378
gguuugagggggcuagaaucc

SEQ ID NO: 130 - RNA, 21 nt, Zea mays
  ZMmerge06292009_10456744
acuuuaccauuaaucgaacgg

SEQ ID NO: 131 - RNA, 21 nt, Zea mays
  ZMmerge06292009_21928118
gcaguccuucugugcaagcgu

SEQ ID NO: 132 - RNA, 21 nt, Zea mays
  ZMmerge06292009_10477216
ugcucggcgccauaggcuaug

SEQ ID NO: 133 - RNA, 19 nt, Zea mays
  ZMmerge06292009_23196921
aguagccagaggaaaagaa

SEQ ID NO: 134 - RNA, 19 nt, Zea mays
  ZMmerge06292009_17750598
uucucugaugguaugccuu

SEQ ID NO: 135 - RNA, 21 nt, Zea mays
  ZMmerge06292009_26835696
acgguccguaauacaaaauau

SEQ ID NO: 136 - RNA, 19 nt, Zea mays
  ZMmerge06292009_20113833
ucuuacuguugaagaugac

SEQ ID NO: 137 - RNA, 21 nt, Zea mays
  ZMmerge06292009_28690062
ccagaggacucgcccuugccc

SEQ ID NO: 138 - RNA, 21 nt, Zea mays
  ZMmerge06292009_23242563
aaaaucaauccagaccacauc

SEQ ID NO: 139 - RNA, 19 nt, Zea mays
  ZMmerge06292009_1455982
cugugccugccucuuccau

SEQ ID NO: 140 - RNA, 19 nt, Zea mays
  ZMmerge06292009_17809986
aucgccuucaucgcugcuc

SEQ ID NO: 141 - RNA, 20 nt, Zea mays
  ZMmerge06292009_10556226
gaggauuugaaaggcauuau

SEQ ID NO: 142 - RNA, 21 nt, Zea mays
  ZMmerge06292009_3302208
aggaugcggguaguugguugc

SEQ ID NO: 143 - RNA, 20 nt, Zea mays
  ZMmerge06292009_1486668
gcagagcacaacauccuuau

SEQ ID NO: 144 - RNA, 20 nt, Zea mays
  ZMmerge06292009_21471042
ggcggacugggaacacaugg

SEQ ID NO: 145 - RNA, 19 nt, Zea mays
  ZMmerge06292009_1500990
ggugggaggauaacaggcc

SEQ ID NO: 146 - RNA, 21 nt, Zea mays
  ZMmerge06292009_8766626
auuccugacuaugacuggaaa

SEQ ID NO: 147 - RNA, 21 nt, Zea mays
  ZMmerge06292009_6965747
uuugucguccgcuaguuuauu

SEQ ID NO: 148 - RNA, 21 nt, Zea mays
  ZMmerge06292009_19678573
cauuaauggauuuuguaacau

SEQ ID NO: 149 - RNA, 19 nt, Zea mays
  ZMmerge06292009_25128704
aaagcaccggaucccuuuu

SEQ ID NO: 150 - RNA, 21 nt, Zea mays
  ZMmerge06292009_10607650
cgaccaugagggccgccgccg

SEQ ID NO: 151 - RNA, 19 nt, Zea mays
  ZMmerge06292009_21513161
caagucaggauggccgagu

SEQ ID NO: 152 - RNA, 21 nt, Zea mays
  ZMmerge06292009_28819688
aagagauauuguuccuguagu

SEQ ID NO: 153 - RNA, 20 nt, Zea mays
  ZMmerge06292009_3399823
cguugcuggagaaggacacg

SEQ ID NO: 154 - RNA, 21 nt, Zea mays
  ZMmerge06292009_17931934
aaguuuaguccgggucacauc

SEQ ID NO: 155 - RNA, 20 nt, Zea mays
  ZMmerge06292009_18318787
ucuggaauugcauaucuuga

SEQ ID NO: 156 - RNA, 21 nt, Zea mays
  ZMmerge06292009_8873370
uggcgucauauauuuaagaac

SEQ ID NO: 157 - RNA, 21 nt, Zea mays
  ZMmerge06292009_25221195
ggugaagcugaagguucggag

SEQ ID NO: 158 - RNA, 19 nt, Zea mays
  ZMmerge06292009_17955572
gauggauaugcaagcauga

SEQ ID NO: 159 - RNA, 21 nt, Zea mays
  ZMmerge06292009_7067656
cacggaugccugguggacgcc

SEQ ID NO: 160 - RNA, 21 nt, Zea mays
  ZMmerge06292009_21598697
ccugacgcaacaccguuggau

SEQ ID NO: 161 - RNA, 20 nt, Zea mays
  ZMmerge06292009_10709615
augcggaagcuuugcagaau

SEQ ID NO: 162 - RNA, 19 nt, Zea mays
  ZMmerge06292009_23425367
ugaccgcaacuuccguauu

SEQ ID NO: 163 - RNA, 21 nt, Zea mays
  ZMmerge06292009_12529469
ccugaaucucgucggagucgc

SEQ ID NO: 164 - RNA, 21 nt, Zea mays
  ZMmerge06292009_21611539
cgacacguagggggcgcugua

SEQ ID NO: 165 - RNA, 21 nt, Zea mays
  ZMmerge06292009_3648264
uuucaguacaagugcucagag

SEQ ID NO: 166 - RNA, 21 nt, Zea mays
  ZMmerge06292009_23449382
ccggaugcuaacguggugugc

SEQ ID NO: 167 - RNA, 21 nt, Zea mays
  ZMmerge06292009_3476278
ucauggaaaaauugaagaaga

SEQ ID NO: 168 - RNA, 21 nt, Zea mays
  ZMmerge06292009_8931945
uaugaggauuauuacgacuaa

SEQ ID NO: 169 - RNA, 21 nt, Zea mays
  ZMmerge06292009_28914008
aagacugagccgaauugaaau

SEQ ID NO: 170 - RNA, 21 nt, Zea mays
  ZMmerge06292009_5303817
ugagugcggaccguccacagu

SEQ ID NO: 171 - RNA, 21 nt, Zea mays
  ZMmerge06292009_18325461
cucauggaccucgcggacgaa

SEQ ID NO: 172 - RNA, 19 nt, Zea mays
  ZMmerge06292009_28928570
cuggacuguccaucccaag

SEQ ID NO: 173 - RNA, 21 nt, Zea mays
  ZMmerge06292009_25307332
aagaacgugaguaccgucgaa

SEQ ID NO: 174 - RNA, 21 nt, Zea mays
  ZMmerge06292009_5337324
accaguucuuguuggccaugu

SEQ ID NO: 175 - RNA, 20 nt, Zea mays
  ZMmerge06292009_8976052
uggcucugaaccuacgugcc

SEQ ID NO: 176 - RNA, 19 nt, Zea mays
  ZMmerge06292009_8978437
uuggagcgagcuggugagg

SEQ ID NO: 177 - RNA, 21 nt, Zea mays
  ZMmerge06292009_10797581
cggcgggggcgaacugagaac

SEQ ID NO: 178 - RNA, 19 nt, Zea mays
  ZMmerge06292009_14432622
ugaauaaggaggggauuuu

SEQ ID NO: 179 - RNA, 19 nt, Zea mays
  ZMmerge06292009_16257272
caauauuaucucuggugcu

SEQ ID NO: 180 - RNA, 20 nt, Zea mays
  ZMmerge06292009_19891020
gaacugaaggaagcgcggac

SEQ ID NO: 181 - RNA, 20 nt, Zea mays
  ZMmerge06292009_21711725
gcguucagaagccgggcuca

SEQ ID NO: 182 - RNA, 21 nt, Zea mays
  ZMmerge06292009_23538351
aggaaagagggaggucgcgac

SEQ ID NO: 183 - RNA, 21 nt, Zea mays
  ZMmerge06292009_3565515
guucucuacaagcacuucacg

SEQ ID NO: 184 - RNA, 20 nt, Zea mays
  ZMmerge06292009_18090919
uuauucuauagauuuuucgc

SEQ ID NO: 185 - RNA, 20 nt, Zea mays
  ZMmerge06292009_16281759
uuaugaucugaugugauuuc

SEQ ID NO: 186 - RNA, 20 nt, Zea mays
  ZMmerge06292009_25365673
aaucuaucguuugggcucau

SEQ ID NO: 187 - RNA, 19 nt, Zea mays
  ZMmerge06292009_1776295
ucauuguguuuggacaaag

SEQ ID NO: 188 - RNA, 21 nt, Zea mays
  ZMmerge06292009_12669558
agcuugaagcugccagcauga

SEQ ID NO: 189 - RNA, 21 nt, Zea mays
  ZMmerge06292009_1995398
agauuggcuugaaauucaguu

SEQ ID NO: 190 - RNA, 21 nt, Zea mays
  ZMmerge06292009_14499861
cacugacgagggcaugaaaaa

SEQ ID NO: 191 - RNA, 21 nt, Zea mays
  ZMmerge06292009_10873072
gaccgcaacuuccguauuuau

SEQ ID NO: 192 - RNA, 21 nt, Zea mays
  ZMmerge06292009_19962577
agggaccugucggggaggaga

SEQ ID NO: 193 - RNA, 21 nt, Zea mays
  ZMmerge06292009_9259038
agguauuggcgcgccucaauc

SEQ ID NO: 194 - RNA, 21 nt, Zea mays
  ZMmerge06292009_16522192
ucugaagugggugucaucucg

SEQ ID NO: 195 - RNA, 20 nt, Zea mays
  ZMmerge06292009_14708366
uggauaacuagcaccgaaaa

SEQ ID NO: 196 - RNA, 21 nt, Zea mays
  ZMmerge06292009_12892636
agaaaugaaggcaccagauuu

SEQ ID NO: 197 - RNA, 21 nt, Zea mays
  ZMmerge06292009_21979850
cgguggcggaggauugacagc

SEQ ID NO: 198 - RNA, 19 nt, Zea mays
  ZMmerge06292009_12918938
gcucaggauacccucuuuu

SEQ ID NO: 199 - RNA, 21 nt, Zea mays
  ZMmerge06292009_1837335
acauaucuaguagucgaagua

SEQ ID NO: 200 - RNA, 19 nt, Zea mays
  ZMmerge06292009_5671636
agcuuccggaugguggcgu

SEQ ID NO: 201 - RNA, 21 nt, Zea mays
  ZMmerge06292009_12936154
agcaguccuucugugcaagcg

SEQ ID NO: 202 - RNA, 21 nt, Zea mays
  ZMmerge06292009_27241106
cgacggucagucggcgagcua

SEQ ID NO: 203 - RNA, 20 nt, Zea mays
  ZMmerge06292009_27473261
uuuucaggcugacuuuuaua

SEQ ID NO: 204 - RNA, 21 nt, Zea mays
  ZMmerge06292009_12943618
ucgaugcugacgauuggcugu

SEQ ID NO: 205 - RNA, 20 nt, Zea mays
  ZMmerge06292009_7504996
uacuacgccuacauaucugc

SEQ ID NO: 206 - RNA, 19 nt, Zea mays
  ZMmerge06292009_16590207
aaagaacaccaacggcgaa

SEQ ID NO: 207 - RNA, 19 nt, Zea mays
  ZMmerge06292009_23856088
ggcggaggcuuuagcggaa

SEQ ID NO: 208 - RNA, 19 nt, Zea mays
  ZMmerge06292009_5702394
cuuuugaacugccugcuga

SEQ ID NO: 209 - RNA, 21 nt, Zea mays
  ZMmerge06292009_18413656
auauccgcuuagcacuauaca

SEQ ID NO: 210 - RNA, 21 nt, Zea mays
  ZMmerge06292009_5704803
aaacuacauagaucacuuagg

SEQ ID NO: 211 - RNA, 21 nt, Zea mays
  ZMmerge06292009_20242454
uagucccuaaauugccggaca

SEQ ID NO: 212 - RNA, 19 nt, Zea mays
  ZMmerge06292009_9105858
uggagguuugguuaggcuu

SEQ ID NO: 213 - RNA, 21 nt, Zea mays
  ZMmerge06292009_23896504
agagggggauuggagagguuu

SEQ ID NO: 214 - RNA, 21 nt, Zea mays
  ZMmerge06292009_25718813
ugcuaugaggacuccuauuag

SEQ ID NO: 215 - RNA, 21 nt, Zea mays
  ZMmerge06292009_307052
gcaccucgcucucaaaaccua

SEQ ID NO: 216 - RNA, 21 nt, Zea mays
  ZMmerge06292009_5764425
aagggcuuguucgguuacacc

SEQ ID NO: 217 - RNA, 20 nt, Zea mays
  ZMmerge06292009_20295863
gggugcaaagacagccagga

SEQ ID NO: 218 - RNA, 21 nt, Zea mays
  ZMmerge06292009_27272436
cauaagugacaaguauuugaa

SEQ ID NO: 219 - RNA, 21 nt, Zea mays
  ZMmerge06292009_23942078
aucaaugaguggcaccggcag

SEQ ID NO: 220 - RNA, 21 nt, Zea mays
  ZMmerge06292009_23955867
gaagccugucaaacacuuccg

SEQ ID NO: 221 - RNA, 21 nt, Zea mays
  ZMmerge06292009_354896
cauauucaaacuacacucuau

SEQ ID NO: 222 - RNA, 20 nt, Zea mays
  ZMmerge06292009_2171849
uucaucgcugcuccuccagu

SEQ ID NO: 223 - RNA, 21 nt, Zea mays
  ZMmerge06292009_356453
ucacucugaucauguacgaag

SEQ ID NO: 224 - RNA, 21 nt, Zea mays
  ZMmerge06292009_18514871
uuugaauuagaucgagcuacu

SEQ ID NO: 225 - RNA, 21 nt, Zea mays
  ZMmerge06292009_11256840
ccgacucuccccaaggacguu

SEQ ID NO: 226 - RNA, 20 nt, Zea mays
  ZMmerge06292009_25788499
uugggaagcugcaucuguug

SEQ ID NO: 227 - RNA, 21 nt, Zea mays
  ZMmerge06292009_16708824
guucucuucaagcacuucacg

SEQ ID NO: 228 - RNA, 21 nt, Zea mays
  ZMmerge06292009_18535163
cagcuuucuugaacuucuucu

SEQ ID NO: 229 - RNA, 21 nt, Zea mays
  ZMmerge06292009_11273182
ugcaagcaaacuaucugaucc

SEQ ID NO: 230 - RNA, 20 nt, Zea mays
  ZMmerge06292009_23989383
cagucggcgagcuagcaagu

SEQ ID NO: 231 - RNA, 21 nt, Zea mays
  ZMmerge06292009_23997928
ucaaguauugaggcuaguaua

SEQ ID NO: 232 - RNA, 19 nt, Zea mays
  ZMmerge06292009_11288856
ggcuggucgacgaaugguc

SEQ ID NO: 233 - RNA, 21 nt, Zea mays
  ZMmerge06292009_4031256
ccacugaaaaugagucugcua

SEQ ID NO: 234 - RNA, 20 nt, Zea mays
  ZMmerge06292009_20374123
caacaaaugaagggcaaggg

SEQ ID NO: 235 - RNA, 21 nt, Zea mays
  ZMmerge06292009_16749810
aguggaauaaauuagagggac

SEQ ID NO: 236 - RNA, 21 nt, Zea mays
  ZMmerge06292009_25832693
augggugcacuagauuuaaaa

SEQ ID NO: 237 - RNA, 20 nt, Zea mays
  ZMmerge06292009_415265
uagggaucugguucacugcu

SEQ ID NO: 238 - RNA, 21 nt, Zea mays
  ZMmerge06292009_22219310
ccaagcgcgggcguggaucug

SEQ ID NO: 239 - RNA, 21 nt, Zea mays
  ZMmerge06292009_20405135
ccaacgcaacacgaccucggc

SEQ ID NO: 240 - RNA, 20 nt, Zea mays
  ZMmerge06292009_27673969
cucacugaucgagcgcccuu

SEQ ID NO: 241 - RNA, 21 nt, Zea mays
  ZMmerge06292009_2251919
uuaggcaucgguuuauugacu

SEQ ID NO: 242 - RNA, 20 nt, Zea mays
  ZMmerge06292009_1859981
gcgguucccuauucagugcu

SEQ ID NO: 243 - RNA, 19 nt, Zea mays
  ZMmerge06292009_16386013
guugagcgacuccgacgau

SEQ ID NO: 244 - RNA, 21 nt, Zea mays
  ZMmerge06292009_14981521
uugagggggauuggaggggau

SEQ ID NO: 245 - RNA, 19 nt, Zea mays
  ZMmerge06292009_11354144
ugugcucagugauuggaau

SEQ ID NO: 246 - RNA, 21 nt, Zea mays
  ZMmerge06292009_9540339
agaugacaccgacgccagacg

SEQ ID NO: 247 - RNA, 20 nt, Zea mays
  ZMmerge06292009_25892831
aauuugggaagcugcaucug

SEQ ID NO: 248 - RNA, 21 nt, Zea mays
  ZMmerge06292009_24080440
aauugcuaaacacggggacua

SEQ ID NO: 249 - RNA, 21 nt, Zea mays
  ZMmerge06292009_24095848
aucgaagaucgucgucauuuc

SEQ ID NO: 250 - RNA, 21 nt, Zea mays
  ZMmerge06292009_24104890
uuaauacgugugcuugggagu

SEQ ID NO: 251 - RNA, 20 nt, Zea mays
  ZMmerge06292009_20471382
aacggccuacuucuucacau

SEQ ID NO: 252 - RNA, 19 nt, Zea mays
  ZMmerge06292009_13209050
auggaacuuucguuuuagc

SEQ ID NO: 253 - RNA, 21 nt, Zea mays
  ZMmerge06292009_25927256
aggauauaaggcguaaccacu

SEQ ID NO: 254 - RNA, 21 nt, Zea mays
  ZMmerge06292009_16853874
cccgcuuuguacgagcagcug

SEQ ID NO: 255 - RNA, 19 nt, Zea mays
  ZMmerge06292009_13232079
acugaaaaugagucugcua

SEQ ID NO: 256 - RNA, 20 nt, Zea mays
  ZMmerge06292009_9605700
ccuccggcgauccaguccuc

SEQ ID NO: 257 - RNA, 21 nt, Zea mays
  ZMmerge06292009_7809695
cagguucgaagcaggcucucc

SEQ ID NO: 258 - RNA, 21 nt, Zea mays
  ZMmerge06292009_7821342
acaauauuaucucuggugcua

SEQ ID NO: 259 - RNA, 19 nt, Zea mays
  ZMmerge06292009_7829689
gcugacgcgcggaacgacg

SEQ ID NO: 260 - RNA, 21 nt, Zea mays
  ZMmerge06292009_25994807
aaauuggucaacgggaaaaga

SEQ ID NO: 261 - RNA, 21 nt, Zea mays
  ZMmerge06292009_18215191
cgugaacucgccccugguguc

SEQ ID NO: 262 - RNA, 21 nt, Zea mays
  ZMmerge06292009_580602
ucgaaaaacccgucaaacacu

SEQ ID NO: 263 - RNA, 21 nt, Zea mays
  ZMmerge06292009_11489603
guauccaacggcugagaagaa

SEQ ID NO: 264 - RNA, 20 nt, Zea mays
  ZMmerge06292009_22388441
cugugggccagagcgugauu

SEQ ID NO: 265 - RNA, 19 nt, Zea mays
  ZMmerge06292009_26031675
caggaagaagagacuuaua

SEQ ID NO: 266 - RNA, 21 nt, Zea mays
  ZMmerge06292009_18218988
gcgaggcgcggugauacucuc

SEQ ID NO: 267 - RNA, 21 nt, Zea mays
  ZMmerge06292009_13325862
acacugaaggucuccgguucg

SEQ ID NO: 268 - RNA, 20 nt, Zea mays
  ZMmerge06292009_13336405
auggcauucuguuuuuauug

SEQ ID NO: 269 - RNA, 21 nt, Zea mays
  ZMmerge06292009_7890351
caccggacagggcaccagacg

SEQ ID NO: 270 - RNA, 21 nt, Zea mays
  ZMmerge06292009_26059449
uucaauucggcucaaucuuuu

SEQ ID NO: 271 - RNA, 20 nt, Zea mays
  ZMmerge06292009_2460726
cuucuuuguucguccuaucu

SEQ ID NO: 272 - RNA, 21 nt, Zea mays
  ZMmerge06292009_652264
uggaucagaugguuuacuugc

SEQ ID NO: 273 - RNA, 21 nt, Zea mays
  ZMmerge06292009_9744565
uggacaugagaguuucuucuc

SEQ ID NO: 274 - RNA, 20 nt, Zea mays
  ZMmerge06292009_17010200
cuaguuugaucagggaaacc

SEQ ID NO: 275 - RNA, 19 nt, Zea mays
  ZMmerge06292009_26094236
caguaggauaguggcuagg

SEQ ID NO: 276 - RNA, 21 nt, Zea mays
  ZMmerge06292009_7941902
ugacuacuuugucuacucgug

SEQ ID NO: 277 - RNA, 20 nt, Zea mays
  ZMmerge06292009_27308638
ccuugagggcuuguucgguu

SEQ ID NO: 278 - RNA, 21 nt, Zea mays
  ZMmerge06292009_17033574
cuugcacagaaggacugcuug

SEQ ID NO: 279 - RNA, 20 nt, Zea mays
  ZMmerge06292009_24299954
cgaggaagacgugaugagga

SEQ ID NO: 280 - RNA, 20 nt, Zea mays
  ZMmerge06292009_22487666
guacccgcccggccuggaag

SEQ ID NO: 281 - RNA, 21 nt, Zea mays
  ZMmerge06292009_24304489
uggauuagccuacacuuuuuu

SEQ ID NO: 282 - RNA, 21 nt, Zea mays
  ZMmerge06292009_701344
cagcagauuggacuaaaauga

SEQ ID NO: 283 - RNA, 20 nt, Zea mays
  ZMmerge06292009_11595330
gaagaagagacuuauaauau

SEQ ID NO: 284 - RNA, 19 nt, Zea mays
  ZMmerge06292009_22492513
ggagaggucgucgacccgc

SEQ ID NO: 285 - RNA, 19 nt, Zea mays
  ZMmerge06292009_14596009
cuuuguucguccuaucuau

SEQ ID NO: 286 - RNA, 21 nt, Zea mays
  ZMmerge06292009_708176
cuaaggguauaggugagcaca

SEQ ID NO: 287 - RNA, 21 nt, Zea mays
  ZMmerge06292009_7976345
gaggguguggucuggauugau

SEQ ID NO: 288 - RNA, 21 nt, Zea mays
  ZMmerge06292009_24323808
ucacauggauuagcaacauuu

SEQ ID NO: 289 - RNA, 19 nt, Zea mays
  ZMmerge06292009_9795412
cgaugcggacaaccaauca

SEQ ID NO: 290 - RNA, 21 nt, Zea mays
  ZMmerge06292009_24325166
ggcggagucugcgcgcgcguc

SEQ ID NO: 291 - RNA, 20 nt, Zea mays
  ZMmerge06292009_21796286
ucaauucggcucaaucuuuu

SEQ ID NO: 292 - RNA, 21 nt, Zea mays
  ZMmerge06292009_26146176
uucucaugcgauguauccucu

SEQ ID NO: 293 - RNA, 20 nt, Zea mays
  ZMmerge06292009_7984102
cagugcaaucccuuuggaau

SEQ ID NO: 294 - RNA, 21 nt, Zea mays
  ZMmerge06292009_9804053
ugugagcagagaauuuucgug

SEQ ID NO: 295 - RNA, 21 nt, Zea mays
  ZMmerge06292009_7991811
uugucaaacucauuagaucag

SEQ ID NO: 296 - RNA, 20 nt, Zea mays
  ZMmerge06292009_27974457
agauaguacuguccggacua

SEQ ID NO: 297 - RNA, 21 nt, Zea mays
  ZMmerge06292009_14599034
caauccagaccacauccucca

SEQ ID NO: 298 - RNA, 20 nt, Zea mays
  ZMmerge06292009_25497766
agauaacucgucggaaauag

SEQ ID NO: 299 - RNA, 21 nt, Zea mays
  ZMmerge06292009_8020026
gauuacaugcggaggaagaua

SEQ ID NO: 300 - RNA, 21 nt, Zea mays
  ZMmerge06292009_4392233
caggguguuaguagagggggg

SEQ ID NO: 301 - RNA, 21 nt, Zea mays
  ZMmerge06292009_9844642
gaaggggauuggaggggcuaa

SEQ ID NO: 302 - RNA, 20 nt, Zea mays
  ZMmerge06292009_11664485
uuguucaaucuggaucgucc

SEQ ID NO: 303 - RNA, 21 nt, Zea mays
  ZMmerge06292009_9851521
uugguguaaccgaacaagccc

SEQ ID NO: 304 - RNA, 21 nt, Zea mays
  ZMmerge06292009_15303398
ucagucggcgagcuagcaagu

SEQ ID NO: 305 - RNA, 21 nt, Zea mays
  ZMmerge06292009_9856987
guaucgcggaccguccggccu

SEQ ID NO: 306 - RNA, 21 nt, Zea mays
  ZMmerge06292009_21867710
gacgcgaggcagcagcggggg

SEQ ID NO: 307 - RNA, 20 nt, Zea mays
  ZMmerge06292009_20758318
agacuuauaauauuguggcu

SEQ ID NO: 308 - RNA, 21 nt, Zea mays
  ZMmerge06292009_2609887
ucgaugcugacgauuggcugc

SEQ ID NO: 309 - RNA, 21 nt, Zea mays
  ZMmerge06292009_803098
ugcucaccuauacucuuaguc

SEQ ID NO: 310 - RNA, 21 nt, Zea mays
  ZMmerge06292009_26236274
acucguacgaaugcugauaaa

SEQ ID NO: 311 - RNA, 19 nt, Zea mays
  ZMmerge06292009_24419843
augcuugcauauucgucca

SEQ ID NO: 312 - RNA, 19 nt, Zea mays
  ZMmerge06292009_2631399
uccagagcucuucaaguag

SEQ ID NO: 313 - RNA, 21 nt, Zea mays
  ZMmerge06292009_9901287
cauauagcuagcuggagucuu

SEQ ID NO: 314 - RNA, 21 nt, Zea mays
  ZMmerge06292009_18240137
ugguuacgccuuauauacuga

SEQ ID NO: 315 - RNA, 20 nt, Zea mays
  ZMmerge06292009_2647725
ggggaacgagccggagcugc

SEQ ID NO: 316 - RNA, 21 nt, Zea mays
  ZMmerge06292009_839039
caggcggggcaucguuccgug

SEQ ID NO: 317 - RNA, 20 nt, Zea mays
  ZMmerge06292009_2655931
uuuaugauuguauuccaggc

SEQ ID NO: 318 - RNA, 21 nt, Zea mays
  ZMmerge06292009_22634168
ccccucuacuaacacccugcc

SEQ ID NO: 319 - RNA, 20 nt, Zea mays
  ZMmerge06292009_20821140
cagcuccuguugcagcugcu

SEQ ID NO: 320 - RNA, 21 nt, Zea mays
  ZMmerge06292009_854566
cggcgacuaauaaaaagaaac

SEQ ID NO: 321 - RNA, 21 nt, Zea mays
  ZMmerge06292009_5532490
cgaguucgauaagugguuaca

SEQ ID NO: 322 - RNA, 21 nt, Zea mays
  ZMmerge06292009_871082
uguuugacaugaucugugaag

SEQ ID NO: 323 - RNA, 21 nt, Zea mays
  ZMmerge06292009_22665648
uuuucuuauuggccggagugu

SEQ ID NO: 324 - RNA, 19 nt, Zea mays
  ZMmerge06292009_6338518
ggugucaucucgccugaag

SEQ ID NO: 325 - RNA, 21 nt, Zea mays
  ZMmerge06292009_20870846
acuagcaccgaaaaccgucuu

SEQ ID NO: 326 - RNA, 21 nt, Zea mays
  ZMmerge06292009_20884773
gcuggcgagguggcucagagg

SEQ ID NO: 327 - RNA, 20 nt, Zea mays
  ZMmerge06292009_14617202
acggacaccuggcaccgcgu

SEQ ID NO: 328 - RNA, 20 nt, Zea mays
  ZMmerge06292009_17261482
uaauugaucagaugauuugc

SEQ ID NO: 329 - RNA, 20 nt, Zea mays
  ZMmerge06292009_10005727
uugaacaaagcaucucaauc

SEQ ID NO: 330 - RNA, 21 nt, Zea mays
  ZMmerge06292009_13637867
cuauuggucaaggaaguuucu

SEQ ID NO: 331 - RNA, 21 nt, Zea mays
  ZMmerge06292009_3725502
gccuuguucguuucugucgga

SEQ ID NO: 332 - RNA, 19 nt, Zea mays
  ZMmerge06292009_6384985
aaaaaggacgagcgaagua

SEQ ID NO: 333 - RNA, 21 nt, Zea mays
  ZMmerge06292009_2767447
uuugauggcauuggagggauu

SEQ ID NO: 334 - RNA, 21 nt, Zea mays
  ZMmerge06292009_19118911
cacauguuagguguagcuggu

SEQ ID NO: 335 - RNA, 19 nt, Zea mays
  ZMmerge06292009_8222656
aaucccaaggaucggauga

SEQ ID NO: 336 - RNA, 21 nt, Zea mays
  ZMmerge06292009_17310779
ggggcggacugggaacacaug

SEQ ID NO: 337 - RNA, 21 nt, Zea mays
  ZMmerge06292009_17312184
aaaaaacaggacuaaggguaa

SEQ ID NO: 338 - RNA, 21 nt, Zea mays
  ZMmerge06292009_8234464
aggagguuagaggagcuaaaa

SEQ ID NO: 339 - RNA, 21 nt, Zea mays
  ZMmerge06292009_15510682
auguccgacggcauuaacuac

SEQ ID NO: 340 - RNA, 20 nt, Zea mays
  ZMmerge06292009_11885509
ggcgaucggauugcauuuuu

SEQ ID NO: 341 - RNA, 20 nt, Zea mays
  ZMmerge06292009_24616478
uaacggaucagaugguuugc

SEQ ID NO: 342 - RNA, 20 nt, Zea mays
  ZMmerge06292009_22799214
cgcccuuugggagaacgguc

SEQ ID NO: 343 - RNA, 21 nt, Zea mays
  ZMmerge06292009_24619090
ucucaggucgcccccgcaggg

SEQ ID NO: 344 - RNA, 19 nt, Zea mays
  ZMmerge06292009_11906757
auuuuggucgauuaaucuu

SEQ ID NO: 345 - RNA, 21 nt, Zea mays
  ZMmerge06292009_13724612
agcagacuguccauauuuugu

SEQ ID NO: 346 - RNA, 20 nt, Zea mays
  ZMmerge06292009_26443274
guuucauguagcuuggcaag

SEQ ID NO: 347 - RNA, 21 nt, Zea mays
  ZMmerge06292009_26451658
auguugaugaucgcgaggagu

SEQ ID NO: 348 - RNA, 21 nt, Zea mays
  ZMmerge06292009_6478336
aagcccggaccguccgcacaa

SEQ ID NO: 349 - RNA, 21 nt, Zea mays
  ZMmerge06292009_10127617
uaauggaucagaugguuuguu

SEQ ID NO: 350 - RNA, 21 nt, Zea mays
  ZMmerge06292009_1055425
aaggacauucaucugauuucc

SEQ ID NO: 351 - RNA, 21 nt, Zea mays
  ZMmerge06292009_15610541
uaucuccgacggcuaguuacg

SEQ ID NO: 352 - RNA, 21 nt, Zea mays
  ZMmerge06292009_4722184
gccccgccuggccgaacugaa

SEQ ID NO: 353 - RNA, 21 nt, Zea mays
  ZMmerge06292009_28332993
gccgagcucgguuccacgucg

SEQ ID NO: 354 - RNA, 21 nt, Zea mays
  ZMmerge06292009_21065614
aguaaaaccgcagacuggaua

SEQ ID NO: 355 - RNA, 22 nt, Zea mays
  ZMmerge06292009_3045765
acgguucucuauccauuugaau

SEQ ID NO: 356 - RNA, 19 nt, Zea mays
  ZMmerge06292009_5569453
ucaacuaaucuucuugagc

SEQ ID NO: 357 - RNA, 22 nt, Zea mays
  ZMmerge06292009_21204584
aucugaaucugauccggaucuu

SEQ ID NO: 358 - RNA, 21 nt, Zea mays
  ZMmerge06292009_13943094
uaucucaucguuuagucuuua

SEQ ID NO: 359 - RNA, 21 nt, Zea mays
  ZMmerge06292009_13944028
cacgagccggcugcgagggca

SEQ ID NO: 360 - RNA, 21 nt, Zea mays
  ZMmerge06292009_23026511
ccccugacacagcaccguugg

SEQ ID NO: 361 - RNA, 21 nt, Zea mays
  ZMmerge06292009_8501618
uuuaauucuucugccacuaug

SEQ ID NO: 362 - RNA, 22 nt, Zea mays
  ZMmerge06292009_19398980
gaagaucuagaauauauccaaa

SEQ ID NO: 363 - RNA, 21 nt, Zea mays
  ZMmerge06292009_4874645
uaaaugaagcacuaaaauaua

SEQ ID NO: 364 - RNA, 22 nt, Zea mays
  ZMmerge06292009_4877276
uccuucaagaccuucggcgacg

SEQ ID NO: 365 - RNA, 21 nt, Zea mays
  ZMmerge06292009_28487505
uugguuuacgguagauuuuaa

SEQ ID NO: 366 - RNA, 20 nt, Zea mays
  ZMmerge06292009_8512521
accuaauuaagaacgucggu

SEQ ID NO: 367 - RNA, 21 nt, Zea mays
  ZMmerge06292009_4885503
uuagagagaaagagguugaaa

SEQ ID NO: 368 - RNA, 20 nt, Zea mays
  ZMmerge06292009_10332912
uuagggaagaggguuggacc

SEQ ID NO: 369 - RNA, 21 nt, Zea mays
  ZMmerge06292009_19413924
uacaauuaauacaucguugcc

SEQ ID NO: 370 - RNA, 21 nt, Zea mays
  ZMmerge06292009_8519174
aacggguaccauagacagcaa

SEQ ID NO: 371 - RNA, 22 nt, Zea mays
  ZMmerge06292009_23053350
uggucacucagacucgcuuuga

SEQ ID NO: 372 - RNA, 21 nt, Zea mays
  ZMmerge06292009_10343066
uugccugacggccggacgguc

SEQ ID NO: 373 - RNA, 21 nt, Zea mays
  ZMmerge06292009_21916014
acugaucgacugcagaagagg

SEQ ID NO: 374 - RNA, 21 nt, Zea mays
  ZMmerge06292009_28516842
cagaaaacucagggcacacca

SEQ ID NO: 375 - RNA, 21 nt, Zea mays
  ZMmerge06292009_15807888
uguugcaauggucgcauguuc

SEQ ID NO: 376 - RNA, 21 nt, Zea mays
  ZMmerge06292009_27367768
ugauacuugcuugcuccuagu

SEQ ID NO: 377 - RNA, 20 nt, Zea mays
  ZMmerge06292009_18285767
cuguuugugguucuuucggu

SEQ ID NO: 378 - RNA, 22 nt, Zea mays
  ZMmerge06292009_23079887
ccuaaagaacaaauuacaagcu

SEQ ID NO: 379 - RNA, 21 nt, Zea mays
  ZMmerge06292009_17633626
acccccugacgcagcaccguu

SEQ ID NO: 380 - RNA, 20 nt, Zea mays
  ZMmerge06292009_28537201
agcguccuugaguaccucgc

SEQ ID NO: 381 - RNA, 22 nt, Zea mays
  ZMmerge06292009_26740556
aauaauaauguagaagaaagug

SEQ ID NO: 382 - RNA, 22 nt, Zea mays
  ZMmerge06292009_8583965
ugcaugugugugcuucucuucu

SEQ ID NO: 383 - RNA, 19 nt, Zea mays
  ZMmerge06292009_3140735
cuuuuagggcuuguucggu

SEQ ID NO: 384 - RNA, 21 nt, Zea mays
  ZMmerge06292009_17666125
ccgauucacgaucgagcggcu

SEQ ID NO: 385 - RNA, 22 nt, Zea mays
  ZMmerge06292009_21300061
uuaguacuaacgauuuucuuac

SEQ ID NO: 386 - RNA, 22 nt, Zea mays
  ZMmerge06292009_10411655
aaggacaauaacauaauuaaga

SEQ ID NO: 387 - RNA, 20 nt, Zea mays
  ZMmerge06292009_4967033
cagguccugauggcuucagc

SEQ ID NO: 388 - RNA, 20 nt, Zea mays
  ZMmerge06292009_6786829
aggcagaggaacaccgaagu

SEQ ID NO: 389 - RNA, 21 nt, Zea mays
  ZMmerge06292009_24952578
uauguugugcaagaugguauu

SEQ ID NO: 390 - RNA, 19 nt, Zea mays
  ZMmerge06292009_12240931
ugucccggaugaccguucu

SEQ ID NO: 391 - RNA, 19 nt, Zea mays
  ZMmerge06292009_8610394
ccuucugauuacaccaaaa

SEQ ID NO: 392 - RNA, 20 nt, Zea mays
  ZMmerge06292009_1351210
aguagauguguaugguaagg

SEQ ID NO: 393 - RNA, 21 nt, Zea mays
  ZMmerge06292009_10427993
uaaaugguaauaguaaugauu

SEQ ID NO: 394 - RNA, 20 nt, Zea mays
  ZMmerge06292009_12243644
caucugugaagguuaugaac

SEQ ID NO: 395 - RNA, 21 nt, Zea mays
  ZMmerge06292009_17693659
cccgcgaaggggaaguccugc

SEQ ID NO: 396 - RNA, 22 nt, Zea mays
  ZMmerge06292009_10434354
uaauuugaauugucugccuuug

SEQ ID NO: 397 - RNA, 20 nt, Zea mays
  ZMmerge06292009_12251513
cgccucgcauccccaucccg

SEQ ID NO: 398 - RNA, 20 nt, Zea mays
  ZMmerge06292009_28603277
ucaggcugacuuuuauaauu

SEQ ID NO: 399 - RNA, 21 nt, Zea mays
  ZMmerge06292009_17704268
agaauguaguuugaauauggg

SEQ ID NO: 400 - RNA, 20 nt, Zea mays
  ZMmerge06292009_15894166
ucuuacuguugaagaugaca

SEQ ID NO: 401 - RNA, 20 nt, Zea mays
  ZMmerge06292009_1953361
gaggcugguuuaacagagca

SEQ ID NO: 402 - RNA, 22 nt, Zea mays
  ZMmerge06292009_19530259
cuaccucaacguugcuacggug

SEQ ID NO: 403 - RNA, 21 nt, Zea mays
  ZMmerge06292009_15900910
ugacggccgucagccuuugcc

SEQ ID NO: 404 - RNA, 22 nt, Zea mays
  ZMmerge06292009_8655780
uacgucagaugacaucuuauau

SEQ ID NO: 405 - RNA, 22 nt, Zea mays
  ZMmerge06292009_14103194
gugaaguucaaagcuuucuggg

SEQ ID NO: 406 - RNA, 22 nt, Zea mays
  ZMmerge06292009_26822653
cgucagccgcgguccgcaugaa

SEQ ID NO: 407 - RNA, 22 nt, Zea mays
  ZMmerge06292009_10476822
uuaucucaucguuuagucuuua

SEQ ID NO: 408 - RNA, 21 nt, Zea mays
  ZMmerge06292009_3632817
auccugugcaacauucuagaa

SEQ ID NO: 409 - RNA, 19 nt, Zea mays
  ZMmerge06292009_23203268
guuuggcaauuuagggacu

SEQ ID NO: 410 - RNA, 21 nt, Zea mays
  ZMmerge06292009_28657837
gcauuuguacugcaugacuuc

SEQ ID NO: 411 - RNA, 22 nt, Zea mays
  ZMmerge06292009_28661047
cuaauugaaccaugcaacugug

SEQ ID NO: 412 - RNA, 19 nt, Zea mays
  ZMmerge06292009_10497827
uagagacucauuuacaaaa

SEQ ID NO: 413 - RNA, 20 nt, Zea mays
  ZMmerge06292009_8684044
aucuuacuguugaagaugac

SEQ ID NO: 414 - RNA, 21 nt, Zea mays
  ZMmerge06292009_9219975
ugaugguuugugaaucaauua

SEQ ID NO: 415 - RNA, 22 nt, Zea mays
  ZMmerge06292009_23212037
ugaagguuaugaacgaguuaaa

SEQ ID NO: 416 - RNA, 22 nt, Zea mays
  ZMmerge06292009_27382103
uuguguuucaacucuagccuac

SEQ ID NO: 417 - RNA, 20 nt, Zea mays
  ZMmerge06292009_10502701
aaaccaucugauccguuaga

SEQ ID NO: 418 - RNA, 21 nt, Zea mays
  ZMmerge06292009_21399398
cucaucaucguacaucuucgg

SEQ ID NO: 419 - RNA, 21 nt, Zea mays
  ZMmerge06292009_26849488
aggauuacucuaaugagcugc

SEQ ID NO: 420 - RNA, 22 nt, Zea mays
  ZMmerge06292009_23748309
ugaccaaguaagcaauaguuca

SEQ ID NO: 421 - RNA, 21 nt, Zea mays
  ZMmerge06292009_26856213
uuugauggcauugaagagauu

SEQ ID NO: 422 - RNA, 22 nt, Zea mays
  ZMmerge06292009_3253037
ucaaacaaaagaccaucuaaca

SEQ ID NO: 423 - RNA, 21 nt, Zea mays
  ZMmerge06292009_14668634
augcucuagauuuaaaaugug

SEQ ID NO: 424 - RNA, 22 nt, Zea mays
  ZMmerge06292009_21411128
ccggcagaaacgaacaaggccu

SEQ ID NO: 425 - RNA, 22 nt, Zea mays
  ZMmerge06292009_15965678
gauccucgucgggucgagaugu

SEQ ID NO: 426 - RNA, 22 nt, Zea mays
  ZMmerge06292009_19598603
uuguucguuucugucggauugc

SEQ ID NO: 427 - RNA, 19 nt, Zea mays
  ZMmerge06292009_3259728
uucgaagaaugguagauuu

SEQ ID NO: 428 - RNA, 21 nt, Zea mays
  ZMmerge06292009_28689463
ucgcaucaggauugaugaugu

SEQ ID NO: 429 - RNA, 20 nt, Zea mays
  ZMmerge06292009_23240314
ggggccggguugucaggcgc

SEQ ID NO: 430 - RNA, 21 nt, Zea mays
  ZMmerge06292009_25568299
augaacuaugaggaccuacaa

SEQ ID NO: 431 - RNA, 19 nt, Zea mays
  ZMmerge06292009_14164352
ucugaaagaaagguaucag

SEQ ID NO: 432 - RNA, 22 nt, Zea mays
  ZMmerge06292009_6901646
ccaguucagcugguucugacca

SEQ ID NO: 433 - RNA, 20 nt, Zea mays
  ZMmerge06292009_14168230
aucggcaaguuguucuuggc

SEQ ID NO: 434 - RNA, 22 nt, Zea mays
  ZMmerge06292009_8725517
ugccguuucauuauuuuauaaa

SEQ ID NO: 435 - RNA, 19 nt, Zea mays
  ZMmerge06292009_25070599
caagcacucggcaaacaug

SEQ ID NO: 436 - RNA, 21 nt, Zea mays
  ZMmerge06292009_8728162
cuagaucuggcaaauggggga

SEQ ID NO: 437 - RNA, 21 nt, Zea mays
  ZMmerge06292009_16488957
caguacaaucgaccaacagaa

SEQ ID NO: 438 - RNA, 21 nt, Zea mays
  ZMmerge06292009_14194536
ugcagaugaagaugaagagau

SEQ ID NO: 439 - RNA, 21 nt, Zea mays
  ZMmerge06292009_3302959
uggcacacaaggaaugaguau

SEQ ID NO: 440 - RNA, 19 nt, Zea mays
  ZMmerge06292009_23277503
cgccaucggcacgcucguc

SEQ ID NO: 441 - RNA, 21 nt, Zea mays
  ZMmerge06292009_19649755
uuuacaaaaccccccugacac

SEQ ID NO: 442 - RNA, 22 nt, Zea mays
  ZMmerge06292009_19653056
uucaaguagauuauuuguuuuu

SEQ ID NO: 443 - RNA, 21 nt, Zea mays
  ZMmerge06292009_8758347
auucccuaaauugccaaacac

SEQ ID NO: 444 - RNA, 21 nt, Zea mays
  ZMmerge06292009_150141
uucgauccauccccuccuugg

SEQ ID NO: 445 - RNA, 20 nt, Zea mays
  ZMmerge06292009_25109873
uacggccgucucuaggaagu

SEQ ID NO: 446 - RNA, 21 nt, Zea mays
  ZMmerge06292009_16031113
ccgcgauccggagggaggcac

SEQ ID NO: 447 - RNA, 20 nt, Zea mays
  ZMmerge06292009_19987381
agccauacuagcucgauauc

SEQ ID NO: 448 - RNA, 21 nt, Zea mays
  ZMmerge06292009_8776521
ucccuucgugguguagccagc

SEQ ID NO: 449 - RNA, 22 nt, Zea mays
  ZMmerge06292009_16039328
aagagaagcgcacagaugaagu

SEQ ID NO: 450 - RNA, 21 nt, Zea mays
  ZMmerge06292009_28765943
ucaaauugagccccugugaca

SEQ ID NO: 451 - RNA, 22 nt, Zea mays
  ZMmerge06292009_17866612
aagguacuaccugucagucucg

SEQ ID NO: 452 - RNA, 21 nt, Zea mays
  ZMmerge06292009_12419233
aacuuuucguacguggcagcc

SEQ ID NO: 453 - RNA, 22 nt, Zea mays
  ZMmerge06292009_26952068
uauaagaaaguuugguuucgag

SEQ ID NO: 454 - RNA, 22 nt, Zea mays
  ZMmerge06292009_25147265
auugaucucagaagaaagcaaa

SEQ ID NO: 455 - RNA, 22 nt, Zea mays
  ZMmerge06292009_12433028
ugaugaugaugaaaaguucugc

SEQ ID NO: 456 - RNA, 21 nt, Zea mays
  ZMmerge06292009_23335104
uauccggcgacuaauaaaaag

SEQ ID NO: 457 - RNA, 21 nt, Zea mays
  ZMmerge06292009_28788943
gcaauggcgauuagacaggcu

SEQ ID NO: 458 - RNA, 21 nt, Zea mays
  ZMmerge06292009_5188336
ucaucggagagagcauucaca

SEQ ID NO: 459 - RNA, 21 nt, Zea mays
  ZMmerge06292009_1561939
auugcuucagguccucgaagg

SEQ ID NO: 460 - RNA, 22 nt, Zea mays
  ZMmerge06292009_3383384
agugcacugcaggcagggcugc

SEQ ID NO: 461 - RNA, 21 nt, Zea mays
  ZMmerge06292009_8831684
uauuuugugaagcuaacuugu

SEQ ID NO: 462 - RNA, 20 nt, Zea mays
  ZMmerge06292009_17913455
uacggaaccaaggucgaaag

SEQ ID NO: 463 - RNA, 21 nt, Zea mays
  ZMmerge06292009_10659494
augaacagagcaagcacaucc

SEQ ID NO: 464 - RNA, 22 nt, Zea mays
  ZMmerge06292009_12475782
cgaugacauacucuuagcuagu

SEQ ID NO: 465 - RNA, 21 nt, Zea mays
  ZMmerge06292009_28837314
aacgacgacgaggagaacguc

SEQ ID NO: 466 - RNA, 19 nt, Zea mays
  ZMmerge06292009_25209315
cagagcgcagaagaacccg

SEQ ID NO: 467 - RNA, 21 nt, Zea mays
  ZMmerge06292009_18317587
aaggguuuugugaagauaucg

SEQ ID NO: 468 - RNA, 22 nt, Zea mays
  ZMmerge06292009_12500164
aagggcaagccaccugagcucu

SEQ ID NO: 469 - RNA, 22 nt, Zea mays
  ZMmerge06292009_19764887
cuucaaugagacgguuccuaug

SEQ ID NO: 470 - RNA, 22 nt, Zea mays
  ZMmerge06292009_16133733
caaaagguuggcgucacucgac

SEQ ID NO: 471 - RNA, 21 nt, Zea mays
  ZMmerge06292009_21585028
uuguucaaucuggaucgucca

SEQ ID NO: 472 - RNA, 21 nt, Zea mays
  ZMmerge06292009_27037797
ccugcauuuaugaguucuguu

SEQ ID NO: 473 - RNA, 22 nt, Zea mays
  ZMmerge06292009_23409900
auggauacaguuagacuucuua

SEQ ID NO: 474 - RNA, 21 nt, Zea mays
  ZMmerge06292009_8883159
ggauuguucguuuacgucgga

SEQ ID NO: 475 - RNA, 22 nt, Zea mays
  ZMmerge06292009_12514867
aaaaccugcagaauuaacucgu

SEQ ID NO: 476 - RNA, 21 nt, Zea mays
  ZMmerge06292009_3440761
ucgauuacgguuggacuuaaa

SEQ ID NO: 477 - RNA, 20 nt, Zea mays
  ZMmerge06292009_14338974
aauccagcagaaacgaacaa

SEQ ID NO: 478 - RNA, 19 nt, Zea mays
  ZMmerge06292009_16159120
ugacguagagagcaucagg

SEQ ID NO: 479 - RNA, 22 nt, Zea mays
  ZMmerge06292009_27060120
uccagccuuuucucguucaccu

SEQ ID NO: 480 - RNA, 22 nt, Zea mays
  ZMmerge06292009_17980873
caaucucucucccuugcaauga

SEQ ID NO: 481 - RNA, 22 nt, Zea mays
  ZMmerge06292009_17981406
ucuaaaccgagcagugaccguc

SEQ ID NO: 482 - RNA, 22 nt, Zea mays
  ZMmerge06292009_7092261
uaaggauugcauuguucauuau

SEQ ID NO: 483 - RNA, 19 nt, Zea mays
  ZMmerge06292009_7093853
ugggaagagaucauccgug

SEQ ID NO: 484 - RNA, 21 nt, Zea mays
  ZMmerge06292009_25256320
uucuacagacgguuccuuaag

SEQ ID NO: 485 - RNA, 22 nt, Zea mays
  ZMmerge06292009_1649611
uuuuaccauccuguaacuuuga

SEQ ID NO: 486 - RNA, 20 nt, Zea mays
  ZMmerge06292009_19807256
cacgcucgucgucgacaccg

SEQ ID NO: 487 - RNA, 22 nt, Zea mays
  ZMmerge06292009_12545216
accggcucaacaucgucuggcc

SEQ ID NO: 488 - RNA, 20 nt, Zea mays
  ZMmerge06292009_166033
auaauacaacaaugaggaca

SEQ ID NO: 489 - RNA, 19 nt, Zea mays
  ZMmerge06292009_12556925
aauccucuucauauucaau

SEQ ID NO: 490 - RNA, 22 nt, Zea mays
  ZMmerge06292009_16193095
uuuuuaagcugcuacaagagaa

SEQ ID NO: 491 - RNA, 22 nt, Zea mays
  ZMmerge06292009_10747049
auuuugugaagcuaacuuguga

SEQ ID NO: 492 - RNA, 21 nt, Zea mays
  ZMmerge06292009_23470242
ugaccaaguaagcaauaguuc

SEQ ID NO: 493 - RNA, 21 nt, Zea mays
  ZMmerge06292009_19845772
auaaguugauggguaugacua

SEQ ID NO: 494 - RNA, 22 nt, Zea mays
  ZMmerge06292009_16221038
agaauaccaggccaacucuuug

SEQ ID NO: 495 - RNA, 22 nt, Zea mays
  ZMmerge06292009_10784439
aaguccguugccagcagugucu

SEQ ID NO: 496 - RNA, 22 nt, Zea mays
  ZMmerge06292009_19864458
uacccuggauuaguacaaauua

SEQ ID NO: 497 - RNA, 20 nt, Zea mays
  ZMmerge06292009_25316136
ggcaggucuucuuggcuagc

SEQ ID NO: 498 - RNA, 21 nt, Zea mays
  ZMmerge06292009_16236632
uuccucagaucgacgaccucu

SEQ ID NO: 499 - RNA, 21 nt, Zea mays
  ZMmerge06292009_8976965
agauauuuagggcagcauccu

SEQ ID NO: 500 - RNA, 21 nt, Zea mays
  ZMmerge06292009_19873432
uuauguuugacaugcuacuug

SEQ ID NO: 501 - RNA, 21 nt, Zea mays
  ZMmerge06292009_28959788
gacgacguuaguaucaauggu

SEQ ID NO: 502 - RNA, 19 nt, Zea mays
  ZMmerge06292009_5349854
aaggaugagauggaucaac

SEQ ID NO: 503 - RNA, 22 nt, Zea mays
  ZMmerge06292009_14428005
ucaaugaagaccguuggugggc

SEQ ID NO: 504 - RNA, 20 nt, Zea mays
  ZMmerge06292009_19882551
uagacuucaaucgaaggucg

SEQ ID NO: 505 - RNA, 21 nt, Zea mays
  ZMmerge06292009_25338458
ugcugacaacggacuucgaau

SEQ ID NO: 506 - RNA, 19 nt, Zea mays
  ZMmerge06292009_8994163
ugguuucaagcuuugguac

SEQ ID NO: 507 - RNA, 21 nt, Zea mays
  ZMmerge06292009_16260539
ccagaaugugagcaaaucuuc

SEQ ID NO: 508 - RNA, 21 nt, Zea mays
  ZMmerge06292009_7186996
cgugaauucacccuugucucc

SEQ ID NO: 509 - RNA, 21 nt, Zea mays
  ZMmerge06292009_19899205
acaugguuuggcuucuuugga

SEQ ID NO: 510 - RNA, 21 nt, Zea mays
  ZMmerge06292009_21965059
aucaaguguaguaucuguucu

SEQ ID NO: 511 - RNA, 20 nt, Zea mays
  ZMmerge06292009_16286437
uaugaaguauuggaaucauc

SEQ ID NO: 512 - RNA, 21 nt, Zea mays
  ZMmerge06292009_12655435
ugucauuuuaguccaaucggc

SEQ ID NO: 513 - RNA, 21 nt, Zea mays
  ZMmerge06292009_25370399
gauuauuucaggagaugagcu

SEQ ID NO: 514 - RNA, 21 nt, Zea mays
  ZMmerge06292009_16290580
uacuugacaaaaagucgucgu

SEQ ID NO: 515 - RNA, 22 nt, Zea mays
  ZMmerge06292009_21739970
cgaauuuaauuuaagaacgugg

SEQ ID NO: 516 - RNA, 22 nt, Zea mays
  ZMmerge06292009_29023229
aggaauaaaaugggcacuaggu

SEQ ID NO: 517 - RNA, 21 nt, Zea mays
  ZMmerge06292009_14492236
acgucgacgacggagcagacg

SEQ ID NO: 518 - RNA, 21 nt, Zea mays
  ZMmerge06292009_19940348
aacacgacuaaggguaaaaau

SEQ ID NO: 519 - RNA, 19 nt, Zea mays
  ZMmerge06292009_18124938
cgcguucgagaagcucacg

SEQ ID NO: 520 - RNA, 21 nt, Zea mays
  ZMmerge06292009_18127644
uauguggauacucggcuauaa

SEQ ID NO: 521 - RNA, 20 nt, Zea mays
  ZMmerge06292009_21763702
uuguaguagaggcauguauc

SEQ ID NO: 522 - RNA, 22 nt, Zea mays
  ZMmerge06292009_12888291
uacuaggcuucccccuugcuuc

SEQ ID NO: 523 - RNA, 19 nt, Zea mays
  ZMmerge06292009_12691354
gagucugacaugugugcga

SEQ ID NO: 524 - RNA, 21 nt, Zea mays
  ZMmerge06292009_19955927
ucuuaccccugaacagcuucc

SEQ ID NO: 525 - RNA, 21 nt, Zea mays
  ZMmerge06292009_21774275
ugcaacacauguagauacaac

SEQ ID NO: 526 - RNA, 22 nt, Zea mays
  ZMmerge06292009_12696350
ggauaaaacauguggugcuugu

SEQ ID NO: 527 - RNA, 21 nt, Zea mays
  ZMmerge06292009_9068467
uaagacgccacaaugugccaa

SEQ ID NO: 528 - RNA, 22 nt, Zea mays
  ZMmerge06292009_9071081
uuacccaauuguuuuugacuau

SEQ ID NO: 529 - RNA, 22 nt, Zea mays
  ZMmerge06292009_21785439
aggacuaaacaagaagguaaac

SEQ ID NO: 530 - RNA, 22 nt, Zea mays
  ZMmerge06292009_10891432
aggccuuggauagauauguaag

SEQ ID NO: 531 - RNA, 20 nt, Zea mays
  ZMmerge06292009_11078644
auggucuugacaggcgggcc

SEQ ID NO: 532 - RNA, 21 nt, Zea mays
  ZMmerge06292009_16530762
cgccaacuuuuccuacguggc

SEQ ID NO: 533 - RNA, 20 nt, Zea mays
  ZMmerge06292009_23799514
uuccacagcuuucuugaacu

SEQ ID NO: 534 - RNA, 21 nt, Zea mays
  ZMmerge06292009_12907955
auaucuaucuaucuaucuauc

SEQ ID NO: 535 - RNA, 22 nt, Zea mays
  ZMmerge06292009_14728502
aaccaaacccgacucaucgagg

SEQ ID NO: 536 - RNA, 22 nt, Zea mays
  ZMmerge06292009_205804
uggagacaagggugaauucacg

SEQ ID NO: 537 - RNA, 21 nt, Zea mays
  ZMmerge06292009_18364550
ucucaagauuguuaggacacc

SEQ ID NO: 538 - RNA, 20 nt, Zea mays
  ZMmerge06292009_12916084
aaaauuguauccaauagacu

SEQ ID NO: 539 - RNA, 22 nt, Zea mays
  ZMmerge06292009_7282168
cugcaggaugcgaccggauuaa

SEQ ID NO: 540 - RNA, 22 nt, Zea mays
  ZMmerge06292009_18366277
uaauauacauuagaaaaccuuu

SEQ ID NO: 541 - RNA, 21 nt, Zea mays
  ZMmerge06292009_5660167
guugagccgguguacucuguc

SEQ ID NO: 542 - RNA, 21 nt, Zea mays
  ZMmerge06292009_2038014
auguguuuggcaauuuaggga

SEQ ID NO: 543 - RNA, 21 nt, Zea mays
  ZMmerge06292009_20194448
agcagcgacucagaugagauu

SEQ ID NO: 544 - RNA, 20 nt, Zea mays
  ZMmerge06292009_10915623
ucugaugcagaugcucgugc

SEQ ID NO: 545 - RNA, 21 nt, Zea mays
  ZMmerge06292009_3633616
cugugcaugaucuccuucguc

SEQ ID NO: 546 - RNA, 21 nt, Zea mays
  ZMmerge06292009_27469096
caacauugcucgaguucuuuu

SEQ ID NO: 547 - RNA, 22 nt, Zea mays
  ZMmerge06292009_23839958
aaaggacaauaacauaauuaag

SEQ ID NO: 548 - RNA, 20 nt, Zea mays
  ZMmerge06292009_23841578
gaccucgcggacgaacggcu

SEQ ID NO: 549 - RNA, 22 nt, Zea mays
  ZMmerge06292009_11137598
cauauaggauaaaucacaugag

SEQ ID NO: 550 - RNA, 21 nt, Zea mays
  ZMmerge06292009_246680
ucaacucuagccuacuccaac

SEQ ID NO: 551 - RNA, 21 nt, Zea mays
  ZMmerge06292009_9325239
agaaaaugacacacaaaaugc

SEQ ID NO: 552 - RNA, 21 nt, Zea mays
  ZMmerge06292009_14781057
uuuacgacugcuacugccggu

SEQ ID NO: 553 - RNA, 22 nt, Zea mays
  ZMmerge06292009_18421595
cuggccaacauugaaaaucuga

SEQ ID NO: 554 - RNA, 22 nt, Zea mays
  ZMmerge06292009_14790141
uuuuuggagcgcugacgucaug

SEQ ID NO: 555 - RNA, 21 nt, Zea mays
  ZMmerge06292009_12735292
cagcguccuugaguaccucgc

SEQ ID NO: 556 - RNA, 22 nt, Zea mays
  ZMmerge06292009_7529843
cucuuguagcagcuuaagaagc

SEQ ID NO: 557 - RNA, 22 nt, Zea mays
  ZMmerge06292009_9348103
ggguaaggaagcuaguugagcc

SEQ ID NO: 558 - RNA, 19 nt, Zea mays
  ZMmerge06292009_272243
uuacuaaauaugaacuaug

SEQ ID NO: 559 - RNA, 22 nt, Zea mays
  ZMmerge06292009_10921044
ccccuacgugucgguccccuuc

SEQ ID NO: 560 - RNA, 21 nt, Zea mays
  ZMmerge06292009_23885974
cgacggcaucguagacagccg

SEQ ID NO: 561 - RNA, 22 nt, Zea mays
  ZMmerge06292009_2100138
caguagucuggaaauuuuggua

SEQ ID NO: 562 - RNA, 21 nt, Zea mays
  ZMmerge06292009_18440847
uaauuuagggacuaaaauaaa

SEQ ID NO: 563 - RNA, 21 nt, Zea mays
  ZMmerge06292009_12993526
agcuugaaaccugcuucguca

SEQ ID NO: 564 - RNA, 21 nt, Zea mays
  ZMmerge06292009_11187726
auagagugcccccuacgugcc

SEQ ID NO: 565 - RNA, 21 nt, Zea mays
  ZMmerge06292009_25719083
uaaucugaugaauacccgacg

SEQ ID NO: 566 - RNA, 21 nt, Zea mays
  ZMmerge06292009_5744604
aaguagcaugucaaacauaaa

SEQ ID NO: 567 - RNA, 21 nt, Zea mays
  ZMmerge06292009_14833824
ccagcuauggucuccggucgc

SEQ ID NO: 568 - RNA, 20 nt, Zea mays
  ZMmerge06292009_18468594
aggcagaguugugagcuucc

SEQ ID NO: 569 - RNA, 21 nt, Zea mays
  ZMmerge06292009_3663430
auccccuccgauccauaugga

SEQ ID NO: 570 - RNA, 21 nt, Zea mays
  ZMmerge06292009_16655810
uaaauucagcugcucauuucu

SEQ ID NO: 571 - RNA, 19 nt, Zea mays
  ZMmerge06292009_25740720
agucuugguuggccgcgag

SEQ ID NO: 572 - RNA, 21 nt, Zea mays
  ZMmerge06292009_25742869
auggauuagaugguuuguuug

SEQ ID NO: 573 - RNA, 21 nt, Zea mays
  ZMmerge06292009_319775
uugugcacguauuuuuuuaaa

SEQ ID NO: 574 - RNA, 21 nt, Zea mays
  ZMmerge06292009_20293244
cggaagacggcgcacuccgcu

SEQ ID NO: 575 - RNA, 21 nt, Zea mays
  ZMmerge06292009_27564815
ucccugcgucuacuguucucc

SEQ ID NO: 576 - RNA, 22 nt, Zea mays
  ZMmerge06292009_5773165
ugucagaucuuugccggagaaa

SEQ ID NO: 577 - RNA, 21 nt, Zea mays
  ZMmerge06292009_18487534
aguucuuguuggccauguucu

SEQ ID NO: 578 - RNA, 22 nt, Zea mays
  ZMmerge06292009_25755316
ccagggcaauugcgucgacugu

SEQ ID NO: 579 - RNA, 21 nt, Zea mays
  ZMmerge06292009_25757223
uagaagauguugugcuguuuc

SEQ ID NO: 580 - RNA, 22 nt, Zea mays
  ZMmerge06292009_20313083
gaagaucauaguugaguaacuc

SEQ ID NO: 581 - RNA, 21 nt, Zea mays
  ZMmerge06292009_13063455
aaauagcauuauguccgacgg

SEQ ID NO: 582 - RNA, 21 nt, Zea mays
  ZMmerge06292009_16696767
uggaauccggacgacauagcg

SEQ ID NO: 583 - RNA, 22 nt, Zea mays
  ZMmerge06292009_16698401
aacaauaggaacauuuugcauu

SEQ ID NO: 584 - RNA, 22 nt, Zea mays
  ZMmerge06292009_25786049
ccagaauucgucuuccuugagc

SEQ ID NO: 585 - RNA, 22 nt, Zea mays
  ZMmerge06292009_5483487
gucgaucucgucguuugccguc

SEQ ID NO: 586 - RNA, 21 nt, Zea mays
  ZMmerge06292009_11259982
uuaugauuuguugcaaugguc

SEQ ID NO: 587 - RNA, 21 nt, Zea mays
  ZMmerge06292009_23973403
uuuagucccuacauuuuauuu

SEQ ID NO: 588 - RNA, 22 nt, Zea mays
  ZMmerge06292009_3635107
uuuuucaggcugacuuuuauaa

SEQ ID NO: 589 - RNA, 22 nt, Zea mays
  ZMmerge06292009_16714006
uaacccguuucguuuugccguu

SEQ ID NO: 590 - RNA, 22 nt, Zea mays
  ZMmerge06292009_7636897
cuguucuauaggaucguacugu

SEQ ID NO: 591 - RNA, 20 nt, Zea mays
  ZMmerge06292009_5826029
uacuaggaugggugaccucc

SEQ ID NO: 592 - RNA, 22 nt, Zea mays
  ZMmerge06292009_18538712
cagccgacucgcgggagacgcc

SEQ ID NO: 593 - RNA, 19 nt, Zea mays
  ZMmerge06292009_20354210
aggucaugcuguaguuuca

SEQ ID NO: 594 - RNA, 21 nt, Zea mays
  ZMmerge06292009_7643972
uagaagaguguauacuuauau

SEQ ID NO: 595 - RNA, 21 nt, Zea mays
  ZMmerge06292009_7647139
uuuccaucugguagacgaaag

SEQ ID NO: 596 - RNA, 22 nt, Zea mays
  ZMmerge06292009_18542895
agaaucaucugaggggucguuu

SEQ ID NO: 597 - RNA, 22 nt, Zea mays
  ZMmerge06292009_2205337
guuaacauagauagaacuucag

SEQ ID NO: 598 - RNA, 19 nt, Zea mays
  ZMmerge06292009_2205645
uaccagcacuaaagcaccg

SEQ ID NO: 599 - RNA, 22 nt, Zea mays
  ZMmerge06292009_7663918
cuuuauguuugacaugcuacuu

SEQ ID NO: 600 - RNA, 21 nt, Zea mays
  ZMmerge06292009_24011967
aacuugucacacuuugccuaa

SEQ ID NO: 601 - RNA, 21 nt, Zea mays
  ZMmerge06292009_407801
auaauucgacaucuccuuuua

SEQ ID NO: 602 - RNA, 21 nt, Zea mays
  ZMmerge06292009_24022535
agcgggaguguuugacaggcu

SEQ ID NO: 603 - RNA, 21 nt, Zea mays
  ZMmerge06292009_21793017
cuccaauccccuccgauuuug

SEQ ID NO: 604 - RNA, 21 nt, Zea mays
  ZMmerge06292009_2241655
auacaugaaucaauauccucu

SEQ ID NO: 605 - RNA, 21 nt, Zea mays
  ZMmerge06292009_22222847
auuacguuauucccgucggcc

SEQ ID NO: 606 - RNA, 20 nt, Zea mays
  ZMmerge06292009_5881777
ucaaugauguuggccauaag

SEQ ID NO: 607 - RNA, 21 nt, Zea mays
  ZMmerge06292009_22229340
agcauggcauucucuguaccc

SEQ ID NO: 608 - RNA, 22 nt, Zea mays
  ZMmerge06292009_9519553
uguuauguagaauuuguaugca

SEQ ID NO: 609 - RNA, 21 nt, Zea mays
  ZMmerge06292009_14970442
aauacaguuugaaaaggaucu

SEQ ID NO: 610 - RNA, 20 nt, Zea mays
  ZMmerge06292009_16788935
acuuauaagggcgggccucc

SEQ ID NO: 611 - RNA, 20 nt, Zea mays
  ZMmerge06292009_4079523
ugugacucuagccggcuugc

SEQ ID NO: 612 - RNA, 22 nt, Zea mays
  ZMmerge06292009_11345564
uagaucaucgucaaacccuuuc

SEQ ID NO: 613 - RNA, 21 nt, Zea mays
  ZMmerge06292009_18608587
agaaguggagguccucggaga

SEQ ID NO: 614 - RNA, 19 nt, Zea mays
  ZMmerge06292009_22247548
aauuuagggacuaaaauaa

SEQ ID NO: 615 - RNA, 19 nt, Zea mays
  ZMmerge06292009_22254069
aggcagccgucggagauaa

SEQ ID NO: 616 - RNA, 20 nt, Zea mays
  ZMmerge06292009_25889112
uacgacgaggacgagaggcg

SEQ ID NO: 617 - RNA, 21 nt, Zea mays
  ZMmerge06292009_14995104
uaacuggaaaaggaccacaga

SEQ ID NO: 618 - RNA, 21 nt, Zea mays
  ZMmerge06292009_16827744
ucagagggcaauggauccauc

SEQ ID NO: 619 - RNA, 21 nt, Zea mays
  ZMmerge06292009_7747850
cuccgucgucgacgugcggcg

SEQ ID NO: 620 - RNA, 21 nt, Zea mays
  ZMmerge06292009_7310513
ucugaugaauacccgacgcaa

SEQ ID NO: 621 - RNA, 22 nt, Zea mays
  ZMmerge06292009_2310139
cggugucgacgacgagcgugcc

SEQ ID NO: 622 - RNA, 22 nt, Zea mays
  ZMmerge06292009_21838466
uugucauaugaaccuaauaaca

SEQ ID NO: 623 - RNA, 21 nt, Zea mays
  ZMmerge06292009_2317299
agaaauauggguuugacauua

SEQ ID NO: 624 - RNA, 21 nt, Zea mays
  ZMmerge06292009_13213235
gcaagcaaaucaucugaucca

SEQ ID NO: 625 - RNA, 21 nt, Zea mays
  ZMmerge06292009_27746129
aaggccacucuugucaucaua

SEQ ID NO: 626 - RNA, 21 nt, Zea mays
  ZMmerge06292009_27748524
uuaaaucuggugcauucauuu

SEQ ID NO: 627 - RNA, 19 nt, Zea mays
  ZMmerge06292009_7774313
gccuaagccggugcccagg

SEQ ID NO: 628 - RNA, 21 nt, Zea mays
  ZMmerge06292009_7780112
caagcaaacaaucugauccau

SEQ ID NO: 629 - RNA, 22 nt, Zea mays
  ZMmerge06292009_7313409
cggacgguccguggccuggggc

SEQ ID NO: 630 - RNA, 21 nt, Zea mays
  ZMmerge06292009_22327213
ucgcgagauuggaacauggcc

SEQ ID NO: 631 - RNA, 22 nt, Zea mays
  ZMmerge06292009_4174845
uuugauugauaguuuuaaagcu

SEQ ID NO: 632 - RNA, 19 nt, Zea mays
  ZMmerge06292009_15071485
aaaaucuguagaaucaagc

SEQ ID NO: 633 - RNA, 22 nt, Zea mays
  ZMmerge06292009_27786460
aagaaaaucguuaguacuaauc

SEQ ID NO: 634 - RNA, 20 nt, Zea mays
  ZMmerge06292009_7809137
ucgcgagcuaaacgagcuag

SEQ ID NO: 635 - RNA, 21 nt, Zea mays
  ZMmerge06292009_16891055
cugcuuguuucacuuccacgc

SEQ ID NO: 636 - RNA, 21 nt, Zea mays
  ZMmerge06292009_24155414
uccaggaugguaaaagauggu

SEQ ID NO: 637 - RNA, 22 nt, Zea mays
  ZMmerge06292009_11445199
gaugcugcccgucggacccugu

SEQ ID NO: 638 - RNA, 22 nt, Zea mays
  ZMmerge06292009_7820542
caaacaaaagaccaucuaacag

SEQ ID NO: 639 - RNA, 19 nt, Zea mays
  ZMmerge06292009_1872016
aucggcacgcucgucgucg

SEQ ID NO: 640 - RNA, 21 nt, Zea mays
  ZMmerge06292009_7826646
cuuauguccgacgguuuuaag

SEQ ID NO: 641 - RNA, 21 nt, Zea mays
  ZMmerge06292009_13274818
ugagaguaguaguagcaccuc

SEQ ID NO: 642 - RNA, 21 nt, Zea mays
  ZMmerge06292009_11460971
uugaccgacgggaauaaagua

SEQ ID NO: 643 - RNA, 21 nt, Zea mays
  ZMmerge06292009_18724628
ggcagugacgacucgguaaaa

SEQ ID NO: 644 - RNA, 22 nt, Zea mays
  ZMmerge06292009_569555
agugauccaaaauucccgcucu

SEQ ID NO: 645 - RNA, 20 nt, Zea mays
  ZMmerge06292009_20547245
ccaggccagagaacaucagc

SEQ ID NO: 646 - RNA, 22 nt, Zea mays
  ZMmerge06292009_7839034
cuuacaauuaauacaucguugc

SEQ ID NO: 647 - RNA, 21 nt, Zea mays
  ZMmerge06292009_23664592
ucuacugcauacgucugcucc

SEQ ID NO: 648 - RNA, 21 nt, Zea mays
  ZMmerge06292009_2407342
uaaggaacuguauguagaaau

SEQ ID NO: 649 - RNA, 21 nt, Zea mays
  ZMmerge06292009_21848238
acgucgguauccgguuugagc

SEQ ID NO: 650 - RNA, 22 nt, Zea mays
  ZMmerge06292009_27833400
acucaagguacuacaaaugcag

SEQ ID NO: 651 - RNA, 21 nt, Zea mays
  ZMmerge06292009_15121254
ugugaugaaaacacagggugg

SEQ ID NO: 652 - RNA, 21 nt, Zea mays
  ZMmerge06292009_22385770
gcaaagaucuuugccgagugu

SEQ ID NO: 653 - RNA, 21 nt, Zea mays
  ZMmerge06292009_2413424
caucuguuugacgugugacau

SEQ ID NO: 654 - RNA, 22 nt, Zea mays
  ZMmerge06292009_2414887
ucucgaagcgagucugagugac

SEQ ID NO: 655 - RNA, 21 nt, Zea mays
  ZMmerge06292009_22389087
uacugcugcaggacaagcugu

SEQ ID NO: 656 - RNA, 22 nt, Zea mays
  ZMmerge06292009_11495016
ucucagcgacccgcaccucagc

SEQ ID NO: 657 - RNA, 19 nt, Zea mays
  ZMmerge06292009_16401421
uccaucgucgagaccaaac

SEQ ID NO: 658 - RNA, 22 nt, Zea mays
  ZMmerge06292009_9695080
uaaugccuccauaucuucaaag

SEQ ID NO: 659 - RNA, 21 nt, Zea mays
  ZMmerge06292009_26042098
auacaugaaucaauauccucc

SEQ ID NO: 660 - RNA, 19 nt, Zea mays
  ZMmerge06292009_26044472
uagggucagaccuucuaug

SEQ ID NO: 661 - RNA, 20 nt, Zea mays
  ZMmerge06292009_13329971
aaggauaagagcauauuaca

SEQ ID NO: 662 - RNA, 22 nt, Zea mays
  ZMmerge06292009_7882951
gccggaacauuucugcugaugu

SEQ ID NO: 663 - RNA, 20 nt, Zea mays
  ZMmerge06292009_6068884
cuucgagagaacggucaucc

SEQ ID NO: 664 - RNA, 21 nt, Zea mays
  ZMmerge06292009_26047450
aggauaacugaauuauagaaa

SEQ ID NO: 665 - RNA, 22 nt, Zea mays
  ZMmerge06292009_14531058
uguagugguaugguaugaagga

SEQ ID NO: 666 - RNA, 21 nt, Zea mays
  ZMmerge06292009_18792203
uacaguugauucacaugauag

SEQ ID NO: 667 - RNA, 21 nt, Zea mays
  ZMmerge06292009_6086141
cgcaggcaguaacaagucccc

SEQ ID NO: 668 - RNA, 19 nt, Zea mays
  ZMmerge06292009_641276
ucgacgacggagcagacgg

SEQ ID NO: 669 - RNA, 22 nt, Zea mays
  ZMmerge06292009_2461671
auuggacuuucgguauuauaac

SEQ ID NO: 670 - RNA, 22 nt, Zea mays
  ZMmerge06292009_13357536
aagaacucuuggcuugacucga

SEQ ID NO: 671 - RNA, 21 nt, Zea mays
  ZMmerge06292009_649079
uaacgaucugaugcauucaau

SEQ ID NO: 672 - RNA, 21 nt, Zea mays
  ZMmerge06292009_26073931
ucuuaaauauaugacgucauu

SEQ ID NO: 673 - RNA, 19 nt, Zea mays
  ZMmerge06292009_18808688
ucggcuggcccggucgccc

SEQ ID NO: 674 - RNA, 22 nt, Zea mays
  ZMmerge06292009_6099414
ucuaacacucuuguacuaugcu

SEQ ID NO: 675 - RNA, 21 nt, Zea mays
  ZMmerge06292009_15183811
uagccaagaaugacuugccua

SEQ ID NO: 676 - RNA, 22 nt, Zea mays
  ZMmerge06292009_27904909
ugacgggguggguccaccuggu

SEQ ID NO: 677 - RNA, 21 nt, Zea mays
  ZMmerge06292009_22457174
uaugacaggggcuaaauuuua

SEQ ID NO: 678 - RNA, 21 nt, Zea mays
  ZMmerge06292009_2494360
uuuggcacagaaagguuccuu

SEQ ID NO: 679 - RNA, 21 nt, Zea mays
  ZMmerge06292009_7329852
cauuuuaaaucugagacaucc

SEQ ID NO: 680 - RNA, 22 nt, Zea mays
  ZMmerge06292009_27931902
cuaagcguauucgauuaucuga

SEQ ID NO: 681 - RNA, 22 nt, Zea mays
  ZMmerge06292009_696038
ucguucagaacauuccugcaua

SEQ ID NO: 682 - RNA, 21 nt, Zea mays
  ZMmerge06292009_2516012
uuggcaggugucacacugggc

SEQ ID NO: 683 - RNA, 21 nt, Zea mays
  ZMmerge06292009_6147012
uucguugacggauauugagau

SEQ ID NO: 684 - RNA, 22 nt, Zea mays
  ZMmerge06292009_2521932
aaaguaaugauggcuuagaaac

SEQ ID NO: 685 - RNA, 21 nt, Zea mays
  ZMmerge06292009_22506256
cgugcaguccgucgcgcagca

SEQ ID NO: 686 - RNA, 20 nt, Zea mays
  ZMmerge06292009_4348784
gcucguugugacacuggccg

SEQ ID NO: 687 - RNA, 22 nt, Zea mays
  ZMmerge06292009_2534667
aucgucgagaccaaaccauagu

SEQ ID NO: 688 - RNA, 21 nt, Zea mays
  ZMmerge06292009_16413248
acauaguacaccggcucaaca

SEQ ID NO: 689 - RNA, 22 nt, Zea mays
  ZMmerge06292009_24329162
gaguuugggcaguacaugaugg

SEQ ID NO: 690 - RNA, 21 nt, Zea mays
  ZMmerge06292009_6184207
uagccaaggcuuagcucagga

SEQ ID NO: 691 - RNA, 21 nt, Zea mays
  ZMmerge06292009_18907089
cguucgccggaugcacgugca

SEQ ID NO: 692 - RNA, 22 nt, Zea mays
  ZMmerge06292009_24365763
cuuguauggguaacuuucugca

SEQ ID NO: 693 - RNA, 22 nt, Zea mays
  ZMmerge06292009_28000648
uggcacagaaagguuccuuccu

SEQ ID NO: 694 - RNA, 22 nt, Zea mays
  ZMmerge06292009_11653940
aagaauacucauaucgcucuaa

SEQ ID NO: 695 - RNA, 21 nt, Zea mays
  ZMmerge06292009_20732913
ugacugaauauaugcagaaag

SEQ ID NO: 696 - RNA, 22 nt, Zea mays
  ZMmerge06292009_15287517
aaguacuauuucaaccguuuuu

SEQ ID NO: 697 - RNA, 20 nt, Zea mays
  ZMmerge06292009_24370311
caagagcgucagugcaagcc

SEQ ID NO: 698 - RNA, 21 nt, Zea mays
  ZMmerge06292009_5523103
aucacauagaagaacgcucuc

SEQ ID NO: 699 - RNA, 21 nt, Zea mays
  ZMmerge06292009_6218059
uaaccaucggcuucggcuucg

SEQ ID NO: 700 - RNA, 21 nt, Zea mays
  ZMmerge06292009_13486600
aaaggacgagcgaaguaagua

SEQ ID NO: 701 - RNA, 21 nt, Zea mays
  ZMmerge06292009_6236236
uccgaaaacgaaagucagcca

SEQ ID NO: 702 - RNA, 21 nt, Zea mays
  ZMmerge06292009_4426948
ugccacaggcggacuguccgg

SEQ ID NO: 703 - RNA, 21 nt, Zea mays
  ZMmerge06292009_20780620
uguuacgcagggcaugaauca

SEQ ID NO: 704 - RNA, 22 nt, Zea mays
  ZMmerge06292009_4441492
aaaucgcagaucuucaacaaaa

SEQ ID NO: 705 - RNA, 20 nt, Zea mays
  ZMmerge06292009_28053778
uuuuucggauuauguuugga

SEQ ID NO: 706 - RNA, 21 nt, Zea mays
  ZMmerge06292009_8074740
auauugcuaucguuuggcuaa

SEQ ID NO: 707 - RNA, 21 nt, Zea mays
  ZMmerge06292009_3713749
uaguucauaaggggauaaaca

SEQ ID NO: 708 - RNA, 22 nt, Zea mays
  ZMmerge06292009_28057283
uagagacagugcucuacacgau

SEQ ID NO: 709 - RNA, 20 nt, Zea mays
  ZMmerge06292009_17160579
acguggacaauuuuguguac

SEQ ID NO: 710 - RNA, 21 nt, Zea mays
  ZMmerge06292009_6279138
agcaaaccaucugaucuauua

SEQ ID NO: 711 - RNA, 22 nt, Zea mays
  ZMmerge06292009_13543909
cauaacauuagccugcccaugc

SEQ ID NO: 712 - RNA, 21 nt, Zea mays
  ZMmerge06292009_838887
agugaugucacuaaagaucuc

SEQ ID NO: 713 - RNA, 21 nt, Zea mays
  ZMmerge06292009_13548780
cuggugucuaggacccucggu

SEQ ID NO: 714 - RNA, 22 nt, Zea mays
  ZMmerge06292009_4475384
cagcgcagcacguaccucggcg

SEQ ID NO: 715 - RNA, 22 nt, Zea mays
  ZMmerge06292009_844603
ucugaauuacuugcugaagaga

SEQ ID NO: 716 - RNA, 21 nt, Zea mays
  ZMmerge06292009_13553185
uacugaccagacugaucggga

SEQ ID NO: 717 - RNA, 21 nt, Zea mays
  ZMmerge06292009_6291063
uaacacucggcaaagaagguu

SEQ ID NO: 718 - RNA, 22 nt, Zea mays
  ZMmerge06292009_20817348
augcccuggcugcuggauacau

SEQ ID NO: 719 - RNA, 21 nt, Zea mays
  ZMmerge06292009_19009313
ugacaggcuucucgaagcgag

SEQ ID NO: 720 - RNA, 22 nt, Zea mays
  ZMmerge06292009_5533630
gauauguuguaugagcuguguu

SEQ ID NO: 721 - RNA, 21 nt, Zea mays
  ZMmerge06292009_11773653
cuacuuggggcauuuugugug

SEQ ID NO: 722 - RNA, 22 nt, Zea mays
  ZMmerge06292009_11776202
ucacagcguccaagagaguagc

SEQ ID NO: 723 - RNA, 21 nt, Zea mays
  ZMmerge06292009_9962114
gguucaccugccaccuccggu

SEQ ID NO: 724 - RNA, 21 nt, Zea mays
  ZMmerge06292009_9963643
uaaaacuuggaccacaacaua

SEQ ID NO: 725 - RNA, 22 nt, Zea mays
  ZMmerge06292009_2706676
uagaaggggaugcaugcucaua

SEQ ID NO: 726 - RNA, 22 nt, Zea mays
  ZMmerge06292009_893245
uucugacaagcagcugaacuga

SEQ ID NO: 727 - RNA, 21 nt, Zea mays
  ZMmerge06292009_24500879
uaucuagucaucuguuaguca

SEQ ID NO: 728 - RNA, 21 nt, Zea mays
  ZMmerge06292009_4528317
gucgacgacgagcgugccgau

SEQ ID NO: 729 - RNA, 22 nt, Zea mays
  ZMmerge06292009_913551
acggcacuaagcacuauuaggc

SEQ ID NO: 730 - RNA, 22 nt, Zea mays
  ZMmerge06292009_20886482
ucucgcacucugguauggaacu

SEQ ID NO: 731 - RNA, 21 nt, Zea mays
  ZMmerge06292009_2730725
cgucugcuccgucgucgacgu

SEQ ID NO: 732 - RNA, 22 nt, Zea mays
  ZMmerge06292009_4549567
uaugaacugaaagaguuaaggu

SEQ ID NO: 733 - RNA, 21 nt, Zea mays
  ZMmerge06292009_24525430
ccggcucaacaucgucuggcc

SEQ ID NO: 734 - RNA, 20 nt, Zea mays
  ZMmerge06292009_19082298
gaauguugucuggcucgagg

SEQ ID NO: 735 - RNA, 21 nt, Zea mays
  ZMmerge06292009_19083871
cuuagagagaaagagguugaa

SEQ ID NO: 736 - RNA, 22 nt, Zea mays
  ZMmerge06292009_28167793
aaggcuacaggcagguaaaagg

SEQ ID NO: 737 - RNA, 19 nt, Zea mays
  ZMmerge06292009_928277
cauacugucucauagcaau

SEQ ID NO: 738 - RNA, 21 nt, Zea mays
  ZMmerge06292009_17271997
uucgaagaaggugaggaaagc

SEQ ID NO: 739 - RNA, 22 nt, Zea mays
  ZMmerge06292009_26356912
ugaggugcaggucgcugagaca

SEQ ID NO: 740 - RNA, 21 nt, Zea mays
  ZMmerge06292009_26369970
ugccucccuguuggcugccgu

SEQ ID NO: 741 - RNA, 19 nt, Zea mays
  ZMmerge06292009_20933595
gaggaagacaugaugagga

SEQ ID NO: 742 - RNA, 21 nt, Zea mays
  ZMmerge06292009_10041441
augaacugaaagaguuaaggu

SEQ ID NO: 743 - RNA, 22 nt, Zea mays
  ZMmerge06292009_17307341
agcgggugaaugaugcauuuau

SEQ ID NO: 744 - RNA, 21 nt, Zea mays
  ZMmerge06292009_22759063
ccgacgggaauaagguaaucu

SEQ ID NO: 745 - RNA, 21 nt, Zea mays
  ZMmerge06292009_22761295
uuuuauuagucgccggauagu

SEQ ID NO: 746 - RNA, 19 nt, Zea mays
  ZMmerge06292009_28218096
gacuuugaucguuauggau

SEQ ID NO: 747 - RNA, 21 nt, Zea mays
  ZMmerge06292009_19135288
caucuugaagaggcugaacag

SEQ ID NO: 748 - RNA, 20 nt, Zea mays
  ZMmerge06292009_20952642
ugacgaggagugagagaagg

SEQ ID NO: 749 - RNA, 22 nt, Zea mays
  ZMmerge06292009_13693492
ucgguacugacgucaucuggcg

SEQ ID NO: 750 - RNA, 21 nt, Zea mays
  ZMmerge06292009_22773973
aacccuuauguuagugacugc

SEQ ID NO: 751 - RNA, 22 nt, Zea mays
  ZMmerge06292009_26419645
caaagaucuggaaauuuaucuu

SEQ ID NO: 752 - RNA, 22 nt, Zea mays
  ZMmerge06292009_8261868
acacugcugacaacggacuucg

SEQ ID NO: 753 - RNA, 20 nt, Zea mays
  ZMmerge06292009_4652613
uuacuagagacagccguagg

SEQ ID NO: 754 - RNA, 20 nt, Zea mays
  ZMmerge06292009_13737408
ucaucaucggcgagagguuc

SEQ ID NO: 755 - RNA, 22 nt, Zea mays
  ZMmerge06292009_26455702
ucaggccccggacgguccgcag

SEQ ID NO: 756 - RNA, 21 nt, Zea mays
  ZMmerge06292009_21011299
auucuggcccccucaaaccca

SEQ ID NO: 757 - RNA, 20 nt, Zea mays
  ZMmerge06292009_28281296
aagcugccagcaugaucugg

SEQ ID NO: 758 - RNA, 21 nt, Zea mays
  ZMmerge06292009_13750797
guucugaaaguauuguaugga

SEQ ID NO: 759 - RNA, 22 nt, Zea mays
  ZMmerge06292009_8303659
aucuuggcaucgucccuaaugu

SEQ ID NO: 760 - RNA, 22 nt, Zea mays
  ZMmerge06292009_15569093
gagagggcggugaauuugcuga

SEQ ID NO: 761 - RNA, 19 nt, Zea mays
  ZMmerge06292009_22837689
uccugaggucgagaguucg

SEQ ID NO: 762 - RNA, 22 nt, Zea mays
  ZMmerge06292009_4685558
uggugcggauucuuugcgaugg

SEQ ID NO: 763 - RNA, 19 nt, Zea mays
  ZMmerge06292009_19212121
gcaggucuucuuggcuagc

SEQ ID NO: 764 - RNA, 21 nt, Zea mays
  ZMmerge06292009_10998805
acgccuccaaaucgucgaagc

SEQ ID NO: 765 - RNA, 21 nt, Zea mays
  ZMmerge06292009_26485224
gcaagcaaaccaucugaucca

SEQ ID NO: 766 - RNA, 20 nt, Zea mays
  ZMmerge06292009_10138835
ugauuuaaauagaugcuuug

SEQ ID NO: 767 - RNA, 22 nt, Zea mays
  ZMmerge06292009_1068374
ucuagucaggacugcggacggu

SEQ ID NO: 768 - RNA, 22 nt, Zea mays
  ZMmerge06292009_26499344
gaucaugcaugacagccucauu

SEQ ID NO: 769 - RNA, 21 nt, Zea mays
  ZMmerge06292009_13783357
caucaaauucacaaguuagcu

SEQ ID NO: 770 - RNA, 21 nt, Zea mays
  ZMmerge06292009_18264222
aucuggugccuucauuucuca

SEQ ID NO: 771 - RNA, 22 nt, Zea mays
  ZMmerge06292009_15603287
aagaccauuugaauguauccuu

SEQ ID NO: 772 - RNA, 22 nt, Zea mays
  ZMmerge06292009_19236625
auauuuuaccauccuguaacuu

SEQ ID NO: 773 - RNA, 21 nt, Zea mays
  ZMmerge06292009_1080672
ugcuaacaaagucaaggucug

SEQ ID NO: 774 - RNA, 19 nt, Zea mays
  ZMmerge06292009_21055767
auacccgcgagacaaaacu

SEQ ID NO: 775 - RNA, 22 nt, Zea mays
  ZMmerge06292009_21061016
gaugaagcugccagcaugaucu

SEQ ID NO: 776 - RNA, 22 nt, Zea mays
  ZMmerge06292009_2906310
uccgugaaaaaagucuucuaag

SEQ ID NO: 777 - RNA, 21 nt, Zea mays
  ZMmerge06292009_7272252
uuuauccccuuaugaauuagg

SEQ ID NO: 778 - RNA, 19 nt, Zea mays
  ZMmerge06292009_10171487
uaugcucuacuccaggaaa

SEQ ID NO: 779 - RNA, 19 nt, Zea mays
  ZMmerge06292009_28335342
uucccacaaauucggaauu

SEQ ID NO: 780 - RNA, 21 nt, Zea mays
  ZMmerge06292009_24707035
uauguccgacgguuuuaagcc

SEQ ID NO: 781 - RNA, 22 nt, Zea mays
  ZMmerge06292009_12001996
aucauugaauauuagcugguac

SEQ ID NO: 782 - RNA, 22 nt, Zea mays
  ZMmerge06292009_4740567
acuccgcccagguagcaucucu

SEQ ID NO: 783 - RNA, 21 nt, Zea mays
  ZMmerge06292009_1112986
caucgucgucaucaccaguuc

SEQ ID NO: 784 - RNA, 21 nt, Zea mays
  ZMmerge06292009_21086126
aggaccgucauguaccucagc

SEQ ID NO: 785 - RNA, 22 nt, Zea mays
  ZMmerge06292009_12013099
aucuguuagauggucuuuuguu

SEQ ID NO: 786 - RNA, 21 nt, Zea mays
  ZMmerge06292009_21096095
caacaucgacaaggucaagug

SEQ ID NO: 787 - RNA, 22 nt, Zea mays
  ZMmerge06292009_4756987
agaugauugggaaauuugaugu

SEQ ID NO: 788 - RNA, 22 nt, Zea mays
  ZMmerge06292009_17471596
uggauggaugcuuuuguucguu

SEQ ID NO: 789 - RNA, 22 nt, Zea mays
  ZMmerge06292009_12029951
uaucaaaccguagugcguaaua

SEQ ID NO: 790 - RNA, 22 nt, Zea mays
  ZMmerge06292009_12031649
aaaaaacacgacuaaggguaua

SEQ ID NO: 791 - RNA, 21 nt, Zea mays
  ZMmerge06292009_1146293
cugacgacgaugaugggcgcc

SEQ ID NO: 792 - RNA, 19 nt, Zea mays
  ZMmerge06292009_10242552
ugacaggaaagcgaauguu

SEQ ID NO: 793 - RNA, 21 nt, Zea mays
  ZMmerge06292009_28417041
uaaccaugcaugauaaauuga

SEQ ID NO: 794 - RNA, 20 nt, Zea mays
  ZMmerge06292009_10253101
agccgucggagauagguuau

SEQ ID NO: 795 - RNA, 22 nt, Zea mays
  ZMmerge06292009_19337614
aaggcuagagaauaagauuggg

SEQ ID NO: 796 - RNA, 22 nt, Zea mays
  ZMmerge06292009_1934468
agcaaauucaccgcccccuccc

SEQ ID NO: 797 - RNA, 21 nt, Zea mays
  ZMmerge06292009_6632755
cauaguacaccggcucaacau

SEQ ID NO: 798 - RNA, 20 nt, Zea mays
  ZMmerge06292009_1199780
aagcaccauggaccaggcuc

SEQ ID NO: 799 - RNA, 19 nt, Zea mays
  ZMmerge06292009_27359256
ugcagaaccuaaauacuag

SEQ ID NO: 800 - RNA, 21 nt, Zea mays
  ZMmerge06292009_28441164
uuauaaccuagcacaccagcc

SEQ ID NO: 801 - RNA, 22 nt, Zea mays
  ZMmerge06292009_6646902
gauagagcaguucaggacacag

SEQ ID NO: 802 - RNA, 20 nt, Zea mays
  ZMmerge06292009_3752020
aaggagaagaaggagaaucc

SEQ ID NO: 803 - RNA, 20 nt, Zea mays
  ZMmerge06292009_1208120
ucguguuuggagcgagcugg

SEQ ID NO: 804 - RNA, 22 nt, Zea mays
  ZMmerge06292009_4841745
aauucggcacaaacgaacaagg

SEQ ID NO: 805 - RNA, 21 nt, Zea mays
  ZMmerge06292009_3028740
cgguacaaacgaacaaggccu

SEQ ID NO: 806 - RNA, 21 nt, Zea mays
  ZMmerge06292009_19381835
uccacuggaagauuuaauuga

SEQ ID NO: 807 - RNA, 21 nt, Zea mays
  ZMmerge06292009_22567175
cgaggucguguugcguuggca

SEQ ID NO: 808 - RNA, 21 nt, Zea mays
  ZMmerge06292009_11683317
ucggcugccacguaggaaaag

SEQ ID NO: 809 - RNA, 21 nt, Zea mays
  ZMmerge06292009_8070049
augaagaagcugauggguaug

SEQ ID NO: 810 - RNA, 21 nt, Zea mays
  ZMmerge06292009_13530671
cacguaggaaaaguuggcgcc

SEQ ID NO: 811 - RNA, 21 nt, Zea mays
  ZMmerge06292009_824557
uuuaauuaaucgccgucggcc

SEQ ID NO: 812 - RNA, 21 nt, Zea mays
  ZMmerge06292009_8097585
agaguguaguuugaauauggg

SEQ ID NO: 813 - RNA, 21 nt, Zea mays
  ZMmerge06292009_4474957
cuguacggcaucgaguucgcc

SEQ ID NO: 814 - RNA, 21 nt, Zea mays
  ZMmerge06292009_24449611
uuuccuacguggcagccgaug

SEQ ID NO: 815 - RNA, 21 nt, Zea mays
  ZMmerge06292009_2661500
accggcucaacaucgucuggc

SEQ ID NO: 816 - RNA, 21 nt, Zea mays
  ZMmerge06292009_20818245
guucaauaaagcugugggaaa

SEQ ID NO: 817 - RNA, 21 nt, Zea mays
  ZMmerge06292009_6293776
gaacagaacucauuaaaggca

SEQ ID NO: 818 - RNA, 19 nt, Zea mays
  ZMmerge06292009_6296212
gaaggggcaugcagaggag

SEQ ID NO: 819 - RNA, 19 nt, Zea mays
  ZMmerge06292009_14611346
uuucuguacggcaucgagu

SEQ ID NO: 820 - RNA, 21 nt, Zea mays
  ZMmerge06292009_18243337
uggaaggggcaugcagaggag

SEQ ID NO: 821 - RNA, 21 nt, Zea mays
  ZMmerge06292009_864691
ugugaguugaggcagaggaac

SEQ ID NO: 822 - RNA, 20 nt, Zea mays
  ZMmerge06292009_24480689
uguguucucaggucgccccc

SEQ ID NO: 823 - RNA, 21 nt, Zea mays
  ZMmerge06292009_8143686
ucuaaauuuagaggacacugc

SEQ ID NO: 824 - RNA, 21 nt, Zea mays
  ZMmerge06292009_17226468
agacucaaguucugauccucu

SEQ ID NO: 825 - RNA, 21 nt, Zea mays
  ZMmerge06292009_28127372
uuguuugggagcaaguggaau

SEQ ID NO: 826 - RNA, 21 nt, Zea mays
  ZMmerge06292009_22688844
ccaaggaugacuugccgaucg

SEQ ID NO: 827 - RNA, 20 nt, Zea mays
  ZMmerge06292009_13609938
uggagaagcagggcacgugc

SEQ ID NO: 828 - RNA, 21 nt, Zea mays
  ZMmerge06292009_10025462
gcaggugagcacgagaucuau

SEQ ID NO: 829 - RNA, 20 nt, Zea mays
  ZMmerge06292009_19114030
ggauuguugucuggcucggu

SEQ ID NO: 830 - RNA, 21 nt, Zea mays
  ZMmerge06292009_4591245
auuuucagauaaccaucagua

SEQ ID NO: 831 - RNA, 20 nt, Zea mays
  ZMmerge06292009_28208409
agcucaggagggauagcgcc

SEQ ID NO: 832 - RNA, 21 nt, Zea mays
  ZMmerge06292009_17309637
uggagaagcagggcacgugca

SEQ ID NO: 833 - RNA, 21 nt, Zea mays
  ZMmerge06292009_20943632
ucauggguugucugacagguu

SEQ ID NO: 834 - RNA, 21 nt, Zea mays
  ZMmerge06292009_28212942
aaaaaggugcagcugacagac

SEQ ID NO: 835 - RNA, 21 nt, Zea mays
  ZMmerge06292009_2802831
aagcgacuaaggugagaguga

SEQ ID NO: 836 - RNA, 21 nt, Zea mays
  ZMmerge06292009_11880322
uaggugcaguagauguguaug

SEQ ID NO: 837 - RNA, 21 nt, Zea mays
  ZMmerge06292009_6443739
aucggcacgcucgucgucgac

SEQ ID NO: 838 - RNA, 21 nt, Zea mays
  ZMmerge06292009_6448077
ucgcuuggugcagaucgggac

SEQ ID NO: 839 - RNA, 19 nt, Zea mays
  ZMmerge06292009_26427949
ugguagagcaauugacugc

SEQ ID NO: 840 - RNA, 21 nt, Zea mays
  ZMmerge06292009_19160552
uaaacuagcggacgacaaaua

SEQ ID NO: 841 - RNA, 21 nt, Zea mays
  ZMmerge06292009_24610523
ggucaagaaagcugugggaag

SEQ ID NO: 842 - RNA, 20 nt, Zea mays
  ZMmerge06292009_5548791
ugaagcugccagcaugaucu

SEQ ID NO: 843 - RNA, 21 nt, Zea mays
  ZMmerge06292009_8286565
cucggaccaggcuucauuccc

SEQ ID NO: 844 - RNA, 21 nt, Zea mays
  ZMmerge06292009_8287950
ugaauugacgauuuugccccu

SEQ ID NO: 845 - RNA, 21 nt, Zea mays
  ZMmerge06292009_4661559
aaucccccuucaauccacucc

SEQ ID NO: 846 - RNA, 21 nt, Zea mays
  ZMmerge06292009_26457529
uacgauaaguucgacgguuuu

SEQ ID NO: 847 - RNA, 21 nt, Zea mays
  ZMmerge06292009_15570699
guagauguguaugguaaggca

SEQ ID NO: 848 - RNA, 21 nt, Zea mays
  ZMmerge06292009_5552426
agagaacgaucauccuggaca

SEQ ID NO: 849 - RNA, 20 nt, Zea mays
  ZMmerge06292009_22845914
cggaccaggcuucaaucccu

SEQ ID NO: 850 - RNA, 19 nt, Zea mays
  ZMmerge06292009_17406412
aucccaucagaacuccgaa

SEQ ID NO: 851 - RNA, 20 nt, Zea mays
  ZMmerge06292009_15594442
uuagggcgagaucaggaaug

SEQ ID NO: 852 - RNA, 21 nt, Zea mays
  ZMmerge06292009_24676003
uagcuuagucgguagagcaca

SEQ ID NO: 853 - RNA, 21 nt, Zea mays
  ZMmerge06292009_28322287
auguugucuggcucgaggugc

SEQ ID NO: 854 - RNA, 20 nt, Zea mays
  ZMmerge06292009_4733635
uagagcacaaaagagacaau

SEQ ID NO: 855 - RNA, 21 nt, Zea mays
  ZMmerge06292009_12012000
uuuccuacguggcagacgaug

SEQ ID NO: 856 - RNA, 20 nt, Zea mays
  ZMmerge06292009_13827643
cgcuaucuauccugagcucc

SEQ ID NO: 857 - RNA, 19 nt, Zea mays
  ZMmerge06292009_21091263
aucauguugcagcuucacu

SEQ ID NO: 858 - RNA, 21 nt, Zea mays
  ZMmerge06292009_12019685
gccgccgucggcgacgaggag

SEQ ID NO: 859 - RNA, 21 nt, Zea mays
  ZMmerge06292009_22915305
uuucggaccaggcuucauucc

SEQ ID NO: 860 - RNA, 21 nt, Zea mays
  ZMmerge06292009_28371816
uuccacagcuuucuugaacuu

SEQ ID NO: 861 - RNA, 21 nt, Zea mays
  ZMmerge06292009_22922215
cgccgcacgucgacgacggag

SEQ ID NO: 862 - RNA, 21 nt, Zea mays
  ZMmerge06292009_28380669
ugaagcugccagcaugaucua

SEQ ID NO: 863 - RNA, 21 nt, Zea mays
  ZMmerge06292009_1931162
ucgaaguccguugccagcagu

SEQ ID NO: 864 - RNA, 21 nt, Zea mays
  ZMmerge06292009_24749065
aacaagcagagccugucugga

SEQ ID NO: 865 - RNA, 21 nt, Zea mays
  ZMmerge06292009_6594063
ucgcuagaucguugagggauu

SEQ ID NO: 866 - RNA, 20 nt, Zea mays
  ZMmerge06292009_17494219
uccacaggcuuucuugaacu

SEQ ID NO: 867 - RNA, 21 nt, Zea mays
  ZMmerge06292009_8423939
cggaccaggcuucauuccccu

SEQ ID NO: 868 - RNA, 21 nt, Zea mays
  ZMmerge06292009_13876635
auguguucucaggucgccccc

SEQ ID NO: 869 - RNA, 20 nt, Zea mays
  ZMmerge06292009_26595429
ucggaccaggcuucauuccc

SEQ ID NO: 870 - RNA, 21 nt, Zea mays
  ZMmerge06292009_21148692
ugccaaaggagaauugcccug

SEQ ID NO: 871 - RNA, 21 nt, Zea mays
  ZMmerge06292009_10256238
cuauuaguaaucgugucgugc

SEQ ID NO: 872 - RNA, 20 nt, Zea mays
  ZMmerge06292009_4827536
guggcagaagaauuaaaguu

SEQ ID NO: 873 - RNA, 21 nt, Zea mays
  ZMmerge06292009_28459882
cgcggaagcgucguccgagcc

SEQ ID NO: 874 - RNA, 21 nt, Zea mays
  ZMmerge06292009_3039415
cgaaggagaucaugcacagua

SEQ ID NO: 875 - RNA, 21 nt, Zea mays
  ZMmerge06292009_1227104
uugagccgcgucaauaucucc

SEQ ID NO: 876 - RNA, 21 nt, Zea mays
  ZMmerge06292009_4859976
agcuucucgaacgcgucgggg

SEQ ID NO: 877 - RNA, 21 nt, Zea mays
  ZMmerge06292009_19391714
cgauguaaacgaacaaggccu

SEQ ID NO: 878 - RNA, 21 nt, Zea mays
  ZMmerge06292009_26664932
aaugagcagcugaauuuaauc

SEQ ID NO: 879 - RNA, 21 nt, Zea mays
  ZMmerge06292009_20097879
cgaccccccucaguucugcau

SEQ ID NO: 880 - RNA, 19 nt, Zea mays
  ZMmerge06292009_23034627
ucaauaaagcugugggaaa

SEQ ID NO: 881 - RNA, 20 nt, Zea mays
  ZMmerge06292009_23037810
ccgccuugcaccaagugaau

SEQ ID NO: 882 - RNA, 21 nt, Zea mays
  ZMmerge06292009_23040849
gacguggaaccgagcucggcg

SEQ ID NO: 883 - RNA, 21 nt, Zea mays
  ZMmerge06292009_13968556
uuccacagcuuucuugaacug

SEQ ID NO: 884 - RNA, 21 nt, Zea mays
  ZMmerge06292009_3080234
agauauguguagauucuuggc

SEQ ID NO: 885 - RNA, 21 nt, Zea mays
  ZMmerge06292009_17607450
uuuguggucucaaagugauau

SEQ ID NO: 886 - RNA, 19 nt, Zea mays
  ZMmerge06292009_15806254
uaagcagaaggccguaggu

SEQ ID NO: 887 - RNA, 21 nt, Zea mays
  ZMmerge06292009_8544445
gaagcugauggguaugacuac

SEQ ID NO: 888 - RNA, 21 nt, Zea mays
  ZMmerge06292009_10370206
gucgcuagaucguugagggau

SEQ ID NO: 889 - RNA, 20 nt, Zea mays
  ZMmerge06292009_8562894
ucugagcaacaccugauaga

SEQ ID NO: 890 - RNA, 21 nt, Zea mays
  ZMmerge06292009_23092162
uuucaugcuaucgucaguggc

SEQ ID NO: 891 - RNA, 21 nt, Zea mays
  ZMmerge06292009_10388511
acaugcuuacaagaaugauga

SEQ ID NO: 892 - RNA, 21 nt, Zea mays
  ZMmerge06292009_18290236
uuuccagaucuuugugcauaa

SEQ ID NO: 893 - RNA, 21 nt, Zea mays
  ZMmerge06292009_23739653
cagccaaggaugacuugccga

SEQ ID NO: 894 - RNA, 21 nt, Zea mays
  ZMmerge06292009_1328977
cgucguagaaauccaucgguu

SEQ ID NO: 895 - RNA, 21 nt, Zea mays
  ZMmerge06292009_14036725
uuagugauuaagaugcuuugu

SEQ ID NO: 896 - RNA, 21 nt, Zea mays
  ZMmerge06292009_24936386
acgacggucagucggcgagcu

SEQ ID NO: 897 - RNA, 19 nt, Zea mays
  ZMmerge06292009_1348295
gacagaagagagugagcac

SEQ ID NO: 898 - RNA, 21 nt, Zea mays
  ZMmerge06292009_12240179
cgacguggaaccgagcucggc

SEQ ID NO: 899 - RNA, 21 nt, Zea mays
  ZMmerge06292009_4982170
ggaggagaugggaguggcuaa

SEQ ID NO: 900 - RNA, 20 nt, Zea mays
  ZMmerge06292009_1352066
uaaauagacgaguaggugug

SEQ ID NO: 901 - RNA, 20 nt, Zea mays
  ZMmerge06292009_16479219
cccgccuugcaccaagugaa

SEQ ID NO: 902 - RNA, 21 nt, Zea mays
  ZMmerge06292009_14072914
gugcaugaagacacccucuga

SEQ ID NO: 903 - RNA, 21 nt, Zea mays
  ZMmerge06292009_19524075
ggaauguugucuggcucgagg

SEQ ID NO: 904 - RNA, 21 nt, Zea mays
  ZMmerge06292009_23744840
acguggaaccgagcucggcgc

SEQ ID NO: 905 - RNA, 20 nt, Zea mays
  ZMmerge06292009_19533906
uggaaggggcaugcagagga

SEQ ID NO: 906 - RNA, 21 nt, Zea mays
  ZMmerge06292009_24987915
ggaugggugcugcgcgguggu

SEQ ID NO: 907 - RNA, 21 nt, Zea mays
  ZMmerge06292009_10469701
ggaauguugucugguucaagg

SEQ ID NO: 908 - RNA, 21 nt, Zea mays
  ZMmerge06292009_5588510
acuuauccaacucagggucgg

SEQ ID NO: 909 - RNA, 21 nt, Zea mays
  ZMmerge06292009_1418962
ucaccgaucuagcaaccauaa

SEQ ID NO: 910 - RNA, 20 nt, Zea mays
  ZMmerge06292009_25024924
uccaaagggaucgcauugau

SEQ ID NO: 911 - RNA, 21 nt, Zea mays
  ZMmerge06292009_6874509
uuacauguugaagcucaauuu

SEQ ID NO: 912 - RNA, 21 nt, Zea mays
  ZMmerge06292009_23750768
ucuuccuccgcauauaagccu

SEQ ID NO: 913 - RNA, 21 nt, Zea mays
  ZMmerge06292009_1442518
aucggcaaguuguucuuggcu

SEQ ID NO: 914 - RNA, 19 nt, Zea mays
  ZMmerge06292009_6890889
uuggauugaagggagcucc

SEQ ID NO: 915 - RNA, 21 nt, Zea mays
  ZMmerge06292009_14162462
aaagaguuguuugguaguugg

SEQ ID NO: 916 - RNA, 20 nt, Zea mays
  ZMmerge06292009_17814199
ggaauguugucuggcucgag

SEQ ID NO: 917 - RNA, 21 nt, Zea mays
  ZMmerge06292009_19644322
agaacaguagacgcagggaga

SEQ ID NO: 918 - RNA, 21 nt, Zea mays
  ZMmerge06292009_6934287
uugcacagaacuaccgacgau

SEQ ID NO: 919 - RNA, 21 nt, Zea mays
  ZMmerge06292009_19660026
cuccucgucgccgacggcggc

SEQ ID NO: 920 - RNA, 19 nt, Zea mays
  ZMmerge06292009_12723497
agcugccgacucauucacc

SEQ ID NO: 921 - RNA, 20 nt, Zea mays
  ZMmerge06292009_3340396
gugacucuagccggcuugcc

SEQ ID NO: 922 - RNA, 19 nt, Zea mays
  ZMmerge06292009_20126828
aucugaugcugaaaugaaa

SEQ ID NO: 923 - RNA, 21 nt, Zea mays
  ZMmerge06292009_14245461
caguccuucugugcaagcgug

SEQ ID NO: 924 - RNA, 19 nt, Zea mays
  ZMmerge06292009_10620602
aauguugucuggcucgagg

SEQ ID NO: 925 - RNA, 20 nt, Zea mays
  ZMmerge06292009_19700316
cgcuuggugcagaucgggac

SEQ ID NO: 926 - RNA, 21 nt, Zea mays
  ZMmerge06292009_25150288
ucgacguggaaccgagcucgg

SEQ ID NO: 927 - RNA, 21 nt, Zea mays
  ZMmerge06292009_5197793
cgauagaaacgaacaaggccu

SEQ ID NO: 928 - RNA, 21 nt, Zea mays
  ZMmerge06292009_14685382
aagagaaaaucuuugacuuca

SEQ ID NO: 929 - RNA, 21 nt, Zea mays
  ZMmerge06292009_28826068
uggacaaacaaaagagggaau

SEQ ID NO: 930 - RNA, 20 nt, Zea mays
  ZMmerge06292009_17926181
gaagcugccagcaugaucug

SEQ ID NO: 931 - RNA, 21 nt, Zea mays
  ZMmerge06292009_21562443
aguucauaaggggauaaacaa

SEQ ID NO: 932 - RNA, 21 nt, Zea mays
  ZMmerge06292009_14299712
uguggucuggauugauuuugc

SEQ ID NO: 933 - RNA, 19 nt, Zea mays
  ZMmerge06292009_3416727
guaguacuaggauggguga

SEQ ID NO: 934 - RNA, 21 nt, Zea mays
  ZMmerge06292009_3418827
uacuguggacgguucgcaccu

SEQ ID NO: 935 - RNA, 21 nt, Zea mays
  ZMmerge06292009_19760450
aacggugcugcgucagggggg

SEQ ID NO: 936 - RNA, 21 nt, Zea mays
  ZMmerge06292009_14317313
ucagaucauguggcaguuuca

SEQ ID NO: 937 - RNA, 20 nt, Zea mays
  ZMmerge06292009_14689855
agcugccgacucauucaccc

SEQ ID NO: 938 - RNA, 21 nt, Zea mays
  ZMmerge06292009_28875191
agacccgcgguacuuguuuau

SEQ ID NO: 939 - RNA, 21 nt, Zea mays
  ZMmerge06292009_14375052
uuuuacccuuagucguguuuu

SEQ ID NO: 940 - RNA, 19 nt, Zea mays
  ZMmerge06292009_21640600
ucgcuuggugcagaucggg

SEQ ID NO: 941 - RNA, 19 nt, Zea mays
  ZMmerge06292009_25282178
ucaggagagaugacaccga

SEQ ID NO: 942 - RNA, 21 nt, Zea mays
  ZMmerge06292009_12570833
uuuggcaauuuagagacuaaa

SEQ ID NO: 943 - RNA, 21 nt, Zea mays
  ZMmerge06292009_27115982
ggaauguuggcuggcucgagg

SEQ ID NO: 944 - RNA, 20 nt, Zea mays
  ZMmerge06292009_27413274
uccagaauuuucuuacaagc

SEQ ID NO: 945 - RNA, 21 nt, Zea mays
  ZMmerge06292009_12623386
ggaaguguguagugaugcguc

SEQ ID NO: 946 - RNA, 21 nt, Zea mays
  ZMmerge06292009_28972675
cggugcugugucaggggguuu

SEQ ID NO: 947 - RNA, 21 nt, Zea mays
  ZMmerge06292009_21964760
gggcggacugggaacacaugg

SEQ ID NO: 948 - RNA, 21 nt, Zea mays
  ZMmerge06292009_7201046
ugagccgaaccaauaucacuc

SEQ ID NO: 949 - RNA, 21 nt, Zea mays
  ZMmerge06292009_27178992
cucggucuucaccuugucggu

SEQ ID NO: 950 - RNA, 21 nt, Zea mays
  ZMmerge06292009_21746182
aauguuggcuggcucgaggca

SEQ ID NO: 951 - RNA, 20 nt, Zea mays
  ZMmerge06292009_25381358
aaaacaggcagaauucuaca

SEQ ID NO: 952 - RNA, 21 nt, Zea mays
  ZMmerge06292009_10853375
ugauugagccgugccaauauc

SEQ ID NO: 953 - RNA, 21 nt, Zea mays
  ZMmerge06292009_10854564
agcaaacuaucugauccauua

SEQ ID NO: 954 - RNA, 19 nt, Zea mays
  ZMmerge06292009_19934321
agcucccuucgauccaauc

SEQ ID NO: 955 - RNA, 21 nt, Zea mays
  ZMmerge06292009_18140222
guucccuacaagcacuucaca

SEQ ID NO: 956 - RNA, 21 nt, Zea mays
  ZMmerge06292009_12696184
uggaucagaugguuugcuugc

SEQ ID NO: 957 - RNA, 21 nt, Zea mays
  ZMmerge06292009_28159010
cacguggucuccuucuccauc

SEQ ID NO: 958 - RNA, 21 nt, Zea mays
  ZMmerge06292009_18171048
auggaauaccccuggaacgau

SEQ ID NO: 959 - RNA, 21 nt, Zea mays
  ZMmerge06292009_14547069
aagugaagggguacaaggaua

SEQ ID NO: 960 - RNA, 19 nt, Zea mays
  ZMmerge06292009_13638991
gcuaucuauccugagcucc

SEQ ID NO: 961 - RNA, 19 nt, Zea mays
  ZMmerge06292009_20926326
gugcuugggcgagaguagu

SEQ ID NO: 962 - RNA, 21 nt, Zea mays
  ZMmerge06292009_27294106
ucccucaccgaucuagcaacc

SEQ ID NO: 963 - RNA, 21 nt, Zea mays
  ZMmerge06292009_12766723
ucgaccgcaucguccaccgca

SEQ ID NO: 964 - RNA, 21 nt, Zea mays
  ZMmerge06292009_26427969
acgaaggucaagaaagcugug

SEQ ID NO: 965 - RNA, 21 nt, Zea mays
  ZMmerge06292009_2823215
ccgacacguagggggcgcugu

SEQ ID NO: 966 - RNA, 20 nt, Zea mays
  ZMmerge06292009_11902586
gaucauguugcagcuucacu

SEQ ID NO: 967 - RNA, 19 nt, Zea mays
  ZMmerge06292009_10100923
ggcagucuccuuggcuagc

SEQ ID NO: 968 - RNA, 21 nt, Zea mays
  ZMmerge06292009_6491509
uacgcagggcaugaaucauau

SEQ ID NO: 969 - RNA, 21 nt, Zea mays
  ZMmerge06292009_16497912
aucacugacaucggcaaaggc

SEQ ID NO: 970 - RNA, 21 nt, Zea mays
  ZMmerge06292009_12900746
auggccaacaagaacuggugc

SEQ ID NO: 971 - RNA, 19 nt, Zea mays
  ZMmerge06292009_8357390
ggaaggggcaugcagagga

SEQ ID NO: 972 - RNA, 20 nt, Zea mays
  ZMmerge06292009_22937131
caucuggauggcacugcaac

SEQ ID NO: 973 - RNA, 21 nt, Zea mays
  ZMmerge06292009_20258625
acgaaggagaucaugcacagu

SEQ ID NO: 974 - RNA, 21 nt, Zea mays
  ZMmerge06292009_25620224
guucaagaaagcccauggaaa

SEQ ID NO: 975 - RNA, 20 nt, Zea mays
  ZMmerge06292009_9366805
cgaggaagacaugaugagga

SEQ ID NO: 976 - RNA, 21 nt, Zea mays
  ZMmerge06292009_3014199
ggugggaugugagagaccggu

SEQ ID NO: 977 - RNA, 21 nt, Zea mays
  ZMmerge06292009_14823015
ugggaggauaacaggccggcu

SEQ ID NO: 978 - RNA, 20 nt, Zea mays
  ZMmerge06292009_299977
caacggugggaggauaacaa

SEQ ID NO: 979 - RNA, 21 nt, Zea mays
  ZMmerge06292009_27545319
acaaguaggcguaacggugga

SEQ ID NO: 980 - RNA, 19 nt, Zea mays
  ZMmerge06292009_3038093
auggugaauacucuucugc

SEQ ID NO: 981 - RNA, 21 nt, Zea mays
  ZMmerge06292009_12116585
ucgccaggucucgacgcgcgc

SEQ ID NO: 982 - RNA, 20 nt, Zea mays
  ZMmerge06292009_19399771
uuggauugaagggagcucug

SEQ ID NO: 983 - RNA, 21 nt, Zea mays
  ZMmerge06292009_18357957
guucccuucaagcacuucaca

SEQ ID NO: 984 - RNA, 21 nt, Zea mays
  ZMmerge06292009_3095564
cucugcagggcgcacaacauu

SEQ ID NO: 985 - RNA, 21 nt, Zea mays
  ZMmerge06292009_10381933
aggauuagaggcaacugaacc

SEQ ID NO: 986 - RNA, 21 nt, Zea mays
  ZMmerge06292009_14018117
uccuagaaacggcgacuggca

SEQ ID NO: 987 - RNA, 19 nt, Zea mays
  ZMmerge06292009_9489031
agcaccggaucccaucaga

SEQ ID NO: 988 - RNA, 19 nt, Zea mays
  ZMmerge06292009_439240
ugugccugccucuuccauu

SEQ ID NO: 989 - RNA, 21 nt, Zea mays
  ZMmerge06292009_4988764
ccugugccugccucuuccauu

SEQ ID NO: 990 - RNA, 21 nt, Zea mays
  ZMmerge06292009_26788990
uagccaaggaugagcugccug

SEQ ID NO: 991 - RNA, 20 nt, Zea mays
  ZMmerge06292009_10495066
gcggcgaucggauugcauuu

SEQ ID NO: 992 - RNA, 20 nt, Zea mays
  ZMmerge06292009_521313
ggacuggaucgccggagggu

SEQ ID NO: 993 - RNA, 20 nt, Zea mays
  ZMmerge06292009_3278394
ugauuguauuccaggcagag

SEQ ID NO: 994 - RNA, 21 nt, Zea mays
  ZMmerge06292009_15098382
auugaccgcaacuuccguauu

SEQ ID NO: 995 - RNA, 20 nt, Zea mays
  ZMmerge06292009_19660754
ggcagcucuccucuggcagg

SEQ ID NO: 996 - RNA, 21 nt, Zea mays
  ZMmerge06292009_22001371
augugguagcucaauccagga

SEQ ID NO: 997 - RNA, 20 nt, Zea mays
  ZMmerge06292009_19671868
gaaucuugaugaugcugcau

SEQ ID NO: 998 - RNA, 21 nt, Zea mays
  ZMmerge06292009_15143357
aagcaaacuaucugauccauu

SEQ ID NO: 999 - RNA, 21 nt, Zea mays
  ZMmerge06292009_13372704
ugugaggagaccaggaagcac

SEQ ID NO: 1000 - RNA, 21 nt, Zea mays
  ZMmerge06292009_13384283
aucccuugggucgguagcuug

SEQ ID NO: 1001 - RNA, 19 nt, Zea mays
  ZMmerge06292009_7942246
cacugagagcccaacucgg

SEQ ID NO: 1002 - RNA, 21 nt, Zea mays
  ZMmerge06292009_26133407
aaagacugagccgaauugaaa

SEQ ID NO: 1003 - RNA, 21 nt, Zea mays
  ZMmerge06292009_19797616
gaggugugggcauaagaggaa

SEQ ID NO: 1004 - RNA, 19 nt, Zea mays
  ZMmerge06292009_10732354
agggacgaggcagagcaug

SEQ ID NO: 1005 - RNA, 21 nt, Zea mays
  ZMmerge06292009_20787736
aucauuuuggaaccacaaaua

SEQ ID NO: 1006 - RNA, 21 nt, Zea mays
  ZMmerge06292009_23526814
gcugucaggguagccgucgga

SEQ ID NO: 1007 - RNA, 21 nt, Zea mays
  ZMmerge06292009_18085071
uaaggauucaaacaggaagag

SEQ ID NO: 1008 - RNA, 20 nt, Zea mays
  ZMmerge06292009_9009720
gcagcaccaccaagauucac

SEQ ID NO: 1009 - RNA, 21 nt, Zea mays
  ZMmerge06292009_28994592
aucucggaccaggcuucauuc

SEQ ID NO: 1010 - RNA, 21 nt, Zea mays
  ZMmerge06292009_22645963
uagccaaggaugacuugccug

SEQ ID NO: 1011 - RNA, 21 nt, Zea mays
  ZMmerge06292009_9942074
agacagggacgaggcagagca

SEQ ID NO: 1012 - RNA, 19 nt, Zea mays
  ZMmerge06292009_7222299
cacaucgaucgacgaccau

SEQ ID NO: 1013 - RNA, 21 nt, Zea mays
  ZMmerge06292009_21755754
aucuuaucgaaucugacucca

SEQ ID NO: 1014 - RNA, 19 nt, Zea mays
  ZMmerge06292009_17219649
ccugugccugccucuucca

SEQ ID NO: 1015 - RNA, 19 nt, Zea mays
  ZMmerge06292009_22693197
gacagaagagagagagcac

SEQ ID NO: 1016 - RNA, 21 nt, Zea mays
  ZMmerge06292009_25442961
uucauuuuggaguguggguag

SEQ ID NO: 1017 - RNA, 20 nt, Zea mays
  ZMmerge06292009_14557033
aagacugagccgaauugaaa

SEQ ID NO: 1018 - RNA, 21 nt, Zea mays
  ZMmerge06292009_25465635
acaaaaugaagggacuaaaca

SEQ ID NO: 1019 - RNA, 21 nt, Zea mays
  ZMmerge06292009_26384637
uaucggcaaguuguucuuggc

SEQ ID NO: 1020 - RNA, 20 nt, Zea mays
  ZMmerge06292009_10976322
acgggcaacggaugagguua

SEQ ID NO: 1021 - RNA, 21 nt, Zea mays
  ZMmerge06292009_20066312
uagccaaggaugacuugccua

SEQ ID NO: 1022 - RNA, 21 nt, Zea mays
  ZMmerge06292009_24666734
gcgugcaaggagccaagcaug

SEQ ID NO: 1023 - RNA, 20 nt, Zea mays
  ZMmerge06292009_5806566
cugugccugccucuuccauu

SEQ ID NO: 1024 - RNA, 20 nt, Zea mays
  ZMmerge06292009_4000008
auguguucucaggucgcccc

SEQ ID NO: 1025 - RNA, 20 nt, Zea mays
  ZMmerge06292009_8546612
gaggacaguagcgcgguggu

SEQ ID NO: 1026 - RNA, 19 nt, Zea mays
  ZMmerge06292009_10392027
gaucauguugcagcuucac

SEQ ID NO: 1027 - RNA, 21 nt, Zea mays
  ZMmerge06292009_2261025
ggcggacugggaacacauggg

SEQ ID NO: 1028 - RNA, 20 nt, Zea mays
  ZMmerge06292009_14982322
auuuuuaucagaggacaaua

SEQ ID NO: 1029 - RNA, 19 nt, Zea mays
  ZMmerge06292009_11367049
gagguugaugauaugguuu

SEQ ID NO: 1030 - RNA, 21 nt, Zea mays
  ZMmerge06292009_2324301
aaagccuaauccccgucggcc

SEQ ID NO: 1031 - RNA, 21 nt, Zea mays
  ZMmerge06292009_20209286
gaagggcuuccugaucgagga

SEQ ID NO: 1032 - RNA, 21 nt, Zea mays
  ZMmerge06292009_588791
ggggcgaacugagaacacaug

SEQ ID NO: 1033 - RNA, 21 nt, Zea mays
  ZMmerge06292009_23628500
gggaauguugucuggcucgag

SEQ ID NO: 1034 - RNA, 20 nt, Zea mays
  ZMmerge06292009_1646933
caugaugaggaaagaaauac

SEQ ID NO: 1035 - RNA, 19 nt, Zea mays
  ZMmerge06292009_1660038
agacaagggugaauucacg

SEQ ID NO: 1036 - RNA, 19 nt, Zea mays
  ZMmerge06292009_14396712
ccgcugcacuucgagccca

SEQ ID NO: 1037 - RNA, 20 nt, Zea mays
  ZMmerge06292009_11722232
gggaggauaacaggccggcu

SEQ ID NO: 1038 - RNA, 21 nt, Zea mays
  ZMmerge06292009_27161853
gaccggaaucucucgucggag

SEQ ID NO: 1039 - RNA, 20 nt, Zea mays
  ZMmerge06292009_27162153
auguugcagcuucacucucu

SEQ ID NO: 1040 - RNA, 21 nt, Zea mays
  ZMmerge06292009_9916878
uugucccggaugaccguucuc

SEQ ID NO: 1041 - RNA, 21 nt, Zea mays
  ZMmerge06292009_17196951
acgccacgucgguauccgguu

SEQ ID NO: 1042 - RNA, 19 nt, Zea mays
  ZMmerge06292009_20227888
uuccacagcuuucuugaac

SEQ ID NO: 1043 - RNA, 20 nt, Zea mays
  ZMmerge06292009_12967215
ugaaguguuugggggaacuc

SEQ ID NO: 1044 - RNA, 21 nt, Zea mays
  ZMmerge06292009_12968003
uugagcgcagcguugaugagc

SEQ ID NO: 1045 - RNA, 19 nt, Zea mays
  ZMmerge06292009_27507838
ugaaugaagcgggagguaa

SEQ ID NO: 1046 - RNA, 21 nt, Zea mays
  ZMmerge06292009_11167416
uugagccgguguacuaugucc

SEQ ID NO: 1047 - RNA, 20 nt, Zea mays
  ZMmerge06292009_18432473
cggaccaggcuucauuccuc

SEQ ID NO: 1048 - RNA, 20 nt, Zea mays
  ZMmerge06292009_16616941
cggaccaggcuucauucccc

SEQ ID NO: 1049 - RNA, 21 nt, Zea mays
  ZMmerge06292009_27516931
gaagcugccagcaugaucugg

SEQ ID NO: 1050 - RNA, 21 nt, Zea mays
  ZMmerge06292009_18186835
uccaaagggaucgcauugauc

SEQ ID NO: 1051 - RNA, 21 nt, Zea mays
  ZMmerge06292009_20275868
cauguguucucaggucgcccc

SEQ ID NO: 1052 - RNA, 21 nt, Zea mays
  ZMmerge06292009_13019497
uuugucaaacucauuagauca

SEQ ID NO: 1053 - RNA, 21 nt, Zea mays
  ZMmerge06292009_27558364
acaugaaugaauuccgucucu

SEQ ID NO: 1054 - RNA, 21 nt, Zea mays
  ZMmerge06292009_319428
ccagacgauguugagccggug

SEQ ID NO: 1055 - RNA, 20 nt, Zea mays
  ZMmerge06292009_20298640
uucaauaaagcugugggaaa

SEQ ID NO: 1056 - RNA, 21 nt, Zea mays
  ZMmerge06292009_3965173
ugccuggcucccuguaugcca

SEQ ID NO: 1057 - RNA, 21 nt, Zea mays
  ZMmerge06292009_23966824
gcucacuucucuuucugucag

SEQ ID NO: 1058 - RNA, 21 nt, Zea mays
  ZMmerge06292009_9440526
gaauguugucuggcucgaggu

SEQ ID NO: 1059 - RNA, 20 nt, Zea mays
  ZMmerge06292009_9445770
gguuacuguuauugaucggc

SEQ ID NO: 1060 - RNA, 21 nt, Zea mays
  ZMmerge06292009_18526164
ucagugcaaucccuuuggaau

SEQ ID NO: 1061 - RNA, 21 nt, Zea mays
  ZMmerge06292009_4007459
cgaacucgaugccguacagaa

SEQ ID NO: 1062 - RNA, 21 nt, Zea mays
  ZMmerge06292009_7646074
uaacuagccgucggagauaag

SEQ ID NO: 1063 - RNA, 20 nt, Zea mays
  ZMmerge06292009_9468058
cgagaguaguacuaggaugg

SEQ ID NO: 1064 - RNA, 21 nt, Zea mays
  ZMmerge06292009_18552342
cgcuugcacagaaggacugcu

SEQ ID NO: 1065 - RNA, 20 nt, Zea mays
  ZMmerge06292009_4038104
ggaaggggcaugcagaggag

SEQ ID NO: 1066 - RNA, 21 nt, Zea mays
  ZMmerge06292009_407235
ucaacuccagaauuuucuuac

SEQ ID NO: 1067 - RNA, 20 nt, Zea mays
  ZMmerge06292009_24015155
ucaucauucugaguucuggc

SEQ ID NO: 1068 - RNA, 19 nt, Zea mays
  ZMmerge06292009_16754781
ucggaccaggcuucauucc

SEQ ID NO: 1069 - RNA, 21 nt, Zea mays
  ZMmerge06292009_18570023
uguaaaggagacccgagguac

SEQ ID NO: 1070 - RNA, 21 nt, Zea mays
  ZMmerge06292009_13125316
uggcacacaagggaugaguau

SEQ ID NO: 1071 - RNA, 20 nt, Zea mays
  ZMmerge06292009_11318732
aggucaugcuguaguuucau

SEQ ID NO: 1072 - RNA, 21 nt, Zea mays
  ZMmerge06292009_428355
guucccuacaagcacuucacg

SEQ ID NO: 1073 - RNA, 20 nt, Zea mays
  ZMmerge06292009_24045403
ucgcuuggugcagaucggga

SEQ ID NO: 1074 - RNA, 21 nt, Zea mays
  ZMmerge06292009_25866400
ucuaagagaggacgcggcucu

SEQ ID NO: 1075 - RNA, 21 nt, Zea mays
  ZMmerge06292009_2275292
gcucacccucuaucugucagu

SEQ ID NO: 1076 - RNA, 21 nt, Zea mays
  ZMmerge06292009_45751
agugagcauucuguuucguua

SEQ ID NO: 1077 - RNA, 21 nt, Zea mays
  ZMmerge06292009_16801334
cccgccuugcaccaagugaau

SEQ ID NO: 1078 - RNA, 21 nt, Zea mays
  ZMmerge06292009_12754694
uguuggcauggcucaaucaac

SEQ ID NO: 1079 - RNA, 21 nt, Zea mays
  ZMmerge06292009_27704138
uggucuugccaccgugucguc

SEQ ID NO: 1080 - RNA, 21 nt, Zea mays
  ZMmerge06292009_13194406
gagcaugaucucccgccguag

SEQ ID NO: 1081 - RNA, 21 nt, Zea mays
  ZMmerge06292009_25911621
uaagguucacgcgaugucggg

SEQ ID NO: 1082 - RNA, 19 nt, Zea mays
  ZMmerge06292009_13200927
agaucauguugcagcuuca

SEQ ID NO: 1083 - RNA, 20 nt, Zea mays
  ZMmerge06292009_4135241
ucauggguugucugacaggu

SEQ ID NO: 1084 - RNA, 20 nt, Zea mays
  ZMmerge06292009_9593205
uucaagaaagcccauggaaa

SEQ ID NO: 1085 - RNA, 21 nt, Zea mays
  ZMmerge06292009_22309023
acgcacaaagaucuggaaauu

SEQ ID NO: 1086 - RNA, 20 nt, Zea mays
  ZMmerge06292009_25946209
gagcuccuaucauuccaaug

SEQ ID NO: 1087 - RNA, 21 nt, Zea mays
  ZMmerge06292009_22312385
uguguucucaggucgcccccg

SEQ ID NO: 1088 - RNA, 19 nt, Zea mays
  ZMmerge06292009_11417081
uggaaggggcaugcagagg

SEQ ID NO: 1089 - RNA, 20 nt, Zea mays
  ZMmerge06292009_5969670
cagggacgaggcagagcaug

SEQ ID NO: 1090 - RNA, 21 nt, Zea mays
  ZMmerge06292009_5989502
ucuaacggaccagaaugcuca

SEQ ID NO: 1091 - RNA, 19 nt, Zea mays
  ZMmerge06292009_20515529
ccuccugggaaguccucgu

SEQ ID NO: 1092 - RNA, 21 nt, Zea mays
  ZMmerge06292009_2361342
uacaggaacaauaucucuuua

SEQ ID NO: 1093 - RNA, 21 nt, Zea mays
  ZMmerge06292009_6007219
ugaagcugccagcaugaucug

SEQ ID NO: 1094 - RNA, 19 nt, Zea mays
  ZMmerge06292009_2391941
cauaggcaacacaggacgg

SEQ ID NO: 1095 - RNA, 21 nt, Zea mays
  ZMmerge06292009_27822053
aauuuguacugcggacggucc

SEQ ID NO: 1096 - RNA, 21 nt, Zea mays
  ZMmerge06292009_14583222
auacuugaagaacauggcaua

SEQ ID NO: 1097 - RNA, 19 nt, Zea mays
  ZMmerge06292009_6030698
cagggacgaggcagagcau

SEQ ID NO: 1098 - RNA, 19 nt, Zea mays
  ZMmerge06292009_27828262
gcacugccucuucccuggc

SEQ ID NO: 1099 - RNA, 21 nt, Zea mays
  ZMmerge06292009_13298398
uuggacuuucgguauuauaac

SEQ ID NO: 1100 - RNA, 21 nt, Zea mays
  ZMmerge06292009_16935076
cagacgauguugagccggugu

SEQ ID NO: 1101 - RNA, 21 nt, Zea mays
  ZMmerge06292009_15131271
uauacugaugguuauuugaaa

SEQ ID NO: 1102 - RNA, 21 nt, Zea mays
  ZMmerge06292009_13315269
cacauuucugacaaucuucgc

SEQ ID NO: 1103 - RNA, 20 nt, Zea mays
  ZMmerge06292009_25483341
cgcccuuugguagaacgguc

SEQ ID NO: 1104 - RNA, 21 nt, Zea mays
  ZMmerge06292009_26034804
cuggcccugcagaagaaaaca

SEQ ID NO: 1105 - RNA, 20 nt, Zea mays
  ZMmerge06292009_20599632
ugcacugccucuucccuggc

SEQ ID NO: 1106 - RNA, 21 nt, Zea mays
  ZMmerge06292009_5509549
ugugauaggggcuaaauuuua

SEQ ID NO: 1107 - RNA, 20 nt, Zea mays
  ZMmerge06292009_22425356
uagccaagaaugacuugccu

SEQ ID NO: 1108 - RNA, 19 nt, Zea mays
  ZMmerge06292009_6112370
uccaaagggaucgcauuga

SEQ ID NO: 1109 - RNA, 19 nt, Zea mays
  ZMmerge06292009_13375100
cuguugagucggaagccgg

SEQ ID NO: 1110 - RNA, 20 nt, Zea mays
  ZMmerge06292009_27907867
aaguccucguguugcauucc

SEQ ID NO: 1111 - RNA, 19 nt, Zea mays
  ZMmerge06292009_11562329
uccaacggugggaggauaa

SEQ ID NO: 1112 - RNA, 21 nt, Zea mays
  ZMmerge06292009_12776408
uccacaggcuuucuugaacug

SEQ ID NO: 1113 - RNA, 21 nt, Zea mays
  ZMmerge06292009_4314534
ucgcacacggcaaaagacaca

SEQ ID NO: 1114 - RNA, 19 nt, Zea mays
  ZMmerge06292009_17025518
cgucuguagguggcuuuuc

SEQ ID NO: 1115 - RNA, 21 nt, Zea mays
  ZMmerge06292009_4324924
aucuggaugagaaggugcuua

SEQ ID NO: 1116 - RNA, 21 nt, Zea mays
  ZMmerge06292009_27946493
ugauccggaucuucgcuuccu

SEQ ID NO: 1117 - RNA, 21 nt, Zea mays
  ZMmerge06292009_711966
auggaucagaugguuugcuug

SEQ ID NO: 1118 - RNA, 21 nt, Zea mays
  ZMmerge06292009_17055667
agaggcuacuucgaacccgcg

SEQ ID NO: 1119 - RNA, 21 nt, Zea mays
  ZMmerge06292009_20689487
aguggauugaagggggauugg

SEQ ID NO: 1120 - RNA, 21 nt, Zea mays
  ZMmerge06292009_24335042
uucuuuuuauuagucgccgga

SEQ ID NO: 1121 - RNA, 19 nt, Zea mays
  ZMmerge06292009_26165524
cuaagcagaccaccaucuu

SEQ ID NO: 1122 - RNA, 22 nt, Zea mays
  ZMmerge06292009_13615025
gggaugagaacaugaaggaacg

SEQ ID NO: 1123 - RNA, 22 nt, Zea mays
  ZMmerge06292009_20878559
agccuccccgggcuugcuacua

SEQ ID NO: 1124 - RNA, 22 nt, Zea mays
  ZMmerge06292009_4633363
ugaucugggaggagaucguccg

SEQ ID NO: 1125 - RNA, 19 nt, Zea mays
  ZMmerge06292009_2732833
uugagccgugccaauauca

SEQ ID NO: 1126 - RNA, 22 nt, Zea mays
  ZMmerge06292009_1003081
cgcgcucuguuguuugcccucc

SEQ ID NO: 1127 - RNA, 21 nt, Zea mays
  ZMmerge06292009_1018640
cuaacuuccuacggccggcuc

SEQ ID NO: 1128 - RNA, 21 nt, Zea mays
  ZMmerge06292009_7372705
uauagucaucgccguccucuu

SEQ ID NO: 1129 - RNA, 21 nt, Zea mays
  ZMmerge06292009_26445180
cucgagcuuccugucgugcac

SEQ ID NO: 1130 - RNA, 21 nt, Zea mays
  ZMmerge06292009_7378246
uacacagugucguccucuucg

SEQ ID NO: 1131 - RNA, 21 nt, Zea mays
  ZMmerge06292009_5567438
auagucaucgccguccucuuc

SEQ ID NO: 1132 - RNA, 21 nt, Zea mays
  ZMmerge06292009_23729934
gaucaaaugguuugcuugcac

SEQ ID NO: 1133 - RNA, 21 nt, Zea mays
  ZMmerge06292009_21917947
ccuccugaaucucgucggagu

SEQ ID NO: 1134 - RNA, 21 nt, Zea mays
  ZMmerge06292009_921491
ucaauccggacgccgaugugg

SEQ ID NO: 1135 - RNA, 21 nt, Zea mays
  ZMmerge06292009_11950357
gagcuggaaggaagcgaagau

SEQ ID NO: 1136 - RNA, 20 nt, Zea mays
  ZMmerge06292009_15582744
cggacgccacggacgcggcg

SEQ ID NO: 1137 - RNA, 22 nt, Zea mays
  ZMmerge06292009_7416533
cggaccgggcccaaacagcggg

SEQ ID NO: 1138 - RNA, 20 nt, Zea mays
  ZMmerge06292009_7439870
caaagaauucugaggccaaa

SEQ ID NO: 1139 - RNA, 21 nt, Zea mays
  ZMmerge06292009_8352987
aggggaaccgcugcgggagau

SEQ ID NO: 1140 - RNA, 20 nt, Zea mays
  ZMmerge06292009_8353039
gaauguugucugguucaagg

SEQ ID NO: 1141 - RNA, 22 nt, Zea mays
  ZMmerge06292009_21807796
acgaagaggacgacacugugua

SEQ ID NO: 1142 - RNA, 22 nt, Zea mays
  ZMmerge06292009_20164294
cauuagagagcaagcauaagcc

SEQ ID NO: 1143 - RNA, 21 nt, Zea mays
  ZMmerge06292009_14724904
guaagucaaaaucccucucaa

SEQ ID NO: 1144 - RNA, 22 nt, Zea mays
  ZMmerge06292009_4741046
ggaggacuggacagagguggau

SEQ ID NO: 1145 - RNA, 20 nt, Zea mays
  ZMmerge06292009_17456000
ucaucaccaugcacggucgu

SEQ ID NO: 1146 - RNA, 21 nt, Zea mays
  ZMmerge06292009_20185644
gacuuggguagcuugaagauu

SEQ ID NO: 1147 - RNA, 22 nt, Zea mays
  ZMmerge06292009_24729937
uaauuaguuaggguucuagauu

SEQ ID NO: 1148 - RNA, 22 nt, Zea mays
  ZMmerge06292009_9098475
ucuguuagauggucuuuuguuu

SEQ ID NO: 1149 - RNA, 20 nt, Zea mays
  ZMmerge06292009_26549106
aguuaucuccgacggcuuaa

SEQ ID NO: 1150 - RNA, 19 nt, Zea mays
  ZMmerge06292009_23839439
aaggauggugcgucguaga

SEQ ID NO: 1151 - RNA, 21 nt, Zea mays
  ZMmerge06292009_13850833
uugacugagccgugccaauau

SEQ ID NO: 1152 - RNA, 22 nt, Zea mays
  ZMmerge06292009_28383947
uugugagcauuguaagaagacc

SEQ ID NO: 1153 - RNA, 19 nt, Zea mays
  ZMmerge06292009_17491047
aucccauggaccaagcggg

SEQ ID NO: 1154 - RNA, 22 nt, Zea mays
  ZMmerge06292009_9320354
ccgagcucggugccacgucggu

SEQ ID NO: 1155 - RNA, 22 nt, Zea mays
  ZMmerge06292009_22942068
aaguucaaaguuccaccugacu

SEQ ID NO: 1156 - RNA, 22 nt, Zea mays
  ZMmerge06292009_13864370
aagaggacggcgaugacuauau

SEQ ID NO: 1157 - RNA, 20 nt, Zea mays
  ZMmerge06292009_24767011
gugaaugaagcgggagguaa

SEQ ID NO: 1158 - RNA, 22 nt, Zea mays
  ZMmerge06292009_24768061
accucucuuccuccuggacaca

SEQ ID NO: 1159 - RNA, 21 nt, Zea mays
  ZMmerge06292009_1165986
augcacgcccuggguuaguac

SEQ ID NO: 1160 - RNA, 22 nt, Zea mays
  ZMmerge06292009_19998403
gaucaauuuccagaucuuugug

SEQ ID NO: 1161 - RNA, 21 nt, Zea mays
  ZMmerge06292009_17524322
aguuaagccgugugauaaauc

SEQ ID NO: 1162 - RNA, 20 nt, Zea mays
  ZMmerge06292009_15718425
cgaucugccuaccuuguggc

SEQ ID NO: 1163 - RNA, 21 nt, Zea mays
  ZMmerge06292009_27536625
cuugaccuugucgaugcugua

SEQ ID NO: 1164 - RNA, 21 nt, Zea mays
  ZMmerge06292009_9375919
uagaggcagccguaggaaguu

SEQ ID NO: 1165 - RNA, 21 nt, Zea mays
  ZMmerge06292009_22088642
uggacaacacggaggcaaggc

SEQ ID NO: 1166 - RNA, 19 nt, Zea mays
  ZMmerge06292009_17557727
aaaacgaacaagcccuuaa

SEQ ID NO: 1167 - RNA, 21 nt, Zea mays
  ZMmerge06292009_14837065
cccgcuuauucgugucgggcc

SEQ ID NO: 1168 - RNA, 21 nt, Zea mays
  ZMmerge06292009_16661486
cgaagaggacgacacugugua

SEQ ID NO: 1169 - RNA, 19 nt, Zea mays
  ZMmerge06292009_32137
gagcagaaguccgggcgcc

SEQ ID NO: 1170 - RNA, 21 nt, Zea mays
  ZMmerge06292009_328411
ucaucgccguccucuucauuc

SEQ ID NO: 1171 - RNA, 21 nt, Zea mays
  ZMmerge06292009_9408757
gccuaguaagggacgacggcg

SEQ ID NO: 1172 - RNA, 21 nt, Zea mays
  ZMmerge06292009_16678310
auaauacauccaugucgucgg

SEQ ID NO: 1173 - RNA, 21 nt, Zea mays
  ZMmerge06292009_33782
cgagcucgguuccacgucgac

SEQ ID NO: 1174 - RNA, 21 nt, Zea mays
  ZMmerge06292009_19406104
caaacaaauaauugauuguca

SEQ ID NO: 1175 - RNA, 21 nt, Zea mays
  ZMmerge06292009_21222323
uggaaccggugaccagcugca

SEQ ID NO: 1176 - RNA, 21 nt, Zea mays
  ZMmerge06292009_25766058
ccaggucucgacgcgcgcgca

SEQ ID NO: 1177 - RNA, 20 nt, Zea mays
  ZMmerge06292009_7604785
ccugaaccgaaauacgucau

SEQ ID NO: 1178 - RNA, 21 nt, Zea mays
  ZMmerge06292009_942481
ccgacgggcguuacguuauuc

SEQ ID NO: 1179 - RNA, 20 nt, Zea mays
  ZMmerge06292009_25770491
caggggcgaguucacggcaa

SEQ ID NO: 1180 - RNA, 20 nt, Zea mays
  ZMmerge06292009_9427336
uaccgucguuuugcccauau

SEQ ID NO: 1181 - RNA, 22 nt, Zea mays
  ZMmerge06292009_16711613
gacgaucggacgguccgcgccc

SEQ ID NO: 1182 - RNA, 22 nt, Zea mays
  ZMmerge06292009_19440761
guaaaaucuagguuccaggcug

SEQ ID NO: 1183 - RNA, 21 nt, Zea mays
  ZMmerge06292009_19442705
uacggguuccgguugacguca

SEQ ID NO: 1184 - RNA, 19 nt, Zea mays
  ZMmerge06292009_13999423
auauuggcgcgguucaauc

SEQ ID NO: 1185 - RNA, 20 nt, Zea mays
  ZMmerge06292009_7644752
ugucugucgaagggcgcacc

SEQ ID NO: 1186 - RNA, 22 nt, Zea mays
  ZMmerge06292009_12187489
auacacagugucguccucuucg

SEQ ID NO: 1187 - RNA, 21 nt, Zea mays
  ZMmerge06292009_12749527
uguacuguggacgguucgcac

SEQ ID NO: 1188 - RNA, 20 nt, Zea mays
  ZMmerge06292009_1856654
cucaaagcgucgaauguccc

SEQ ID NO: 1189 - RNA, 22 nt, Zea mays
  ZMmerge06292009_4954895
uguuucaguacaagugcucaga

SEQ ID NO: 1190 - RNA, 22 nt, Zea mays
  ZMmerge06292009_16762831
uacccuuagucguguuuuuugc

SEQ ID NO: 1191 - RNA, 19 nt, Zea mays
  ZMmerge06292009_4061039
ugaagacauugacuggcaa

SEQ ID NO: 1192 - RNA, 22 nt, Zea mays
  ZMmerge06292009_434599
cgcuuauucgugccgggccggg

SEQ ID NO: 1193 - RNA, 21 nt, Zea mays
  ZMmerge06292009_22231072
ccaaagguuguuaaggcguuu

SEQ ID NO: 1194 - RNA, 21 nt, Zea mays
  ZMmerge06292009_14062656
aacggugcugcgucagggggu

SEQ ID NO: 1195 - RNA, 20 nt, Zea mays
  ZMmerge06292009_24064884
caaggaugacuugccgaucg

SEQ ID NO: 1196 - RNA, 21 nt, Zea mays
  ZMmerge06292009_46120
ucaucacaggcuucaacuaca

SEQ ID NO: 1197 - RNA, 22 nt, Zea mays
  ZMmerge06292009_14076675
uuccugaugccucucauuccua

SEQ ID NO: 1198 - RNA, 21 nt, Zea mays
  ZMmerge06292009_10449449
guagcagguaguaaaagguuu

SEQ ID NO: 1199 - RNA, 21 nt, Zea mays
  ZMmerge06292009_19534963
aucugucgaaucuuaucuagc

SEQ ID NO: 1200 - RNA, 19 nt, Zea mays
  ZMmerge06292009_12272207
caacgggcaacggaugagg

SEQ ID NO: 1201 - RNA, 21 nt, Zea mays
  ZMmerge06292009_14089658
ugaaaccgacgggaauaagcc

SEQ ID NO: 1202 - RNA, 20 nt, Zea mays
  ZMmerge06292009_12285731
aagggcggcaaucaaaugaa

SEQ ID NO: 1203 - RNA, 21 nt, Zea mays
  ZMmerge06292009_27726059
aauggaucaaaugguuugcuu

SEQ ID NO: 1204 - RNA, 21 nt, Zea mays
  ZMmerge06292009_11386103
aucuguucuauaggaucguac

SEQ ID NO: 1205 - RNA, 21 nt, Zea mays
  ZMmerge06292009_22282168
uucaucacaggcuucaacuac

SEQ ID NO: 1206 - RNA, 19 nt, Zea mays
  ZMmerge06292009_492555
gacggagcagacggcgacg

SEQ ID NO: 1207 - RNA, 20 nt, Zea mays
  ZMmerge06292009_21378875
ucaucggggauaaugggauc

SEQ ID NO: 1208 - RNA, 21 nt, Zea mays
  ZMmerge06292009_20477495
agccaaggaugacuugccggc

SEQ ID NO: 1209 - RNA, 20 nt, Zea mays
  ZMmerge06292009_513323
aagaagguuucgugguguag

SEQ ID NO: 1210 - RNA, 19 nt, Zea mays
  ZMmerge06292009_12314839
cuuucuguacggcaucgag

SEQ ID NO: 1211 - RNA, 21 nt, Zea mays
  ZMmerge06292009_26848921
cggcaucgaguucgccguaga

SEQ ID NO: 1212 - RNA, 22 nt, Zea mays
  ZMmerge06292009_1430402
uucaguuuccucuaauaucuca

SEQ ID NO: 1213 - RNA, 21 nt, Zea mays
  ZMmerge06292009_26854469
cgagaggaagauggaugauga

SEQ ID NO: 1214 - RNA, 19 nt, Zea mays
  ZMmerge06292009_523531
agaauauaugguauagagu

SEQ ID NO: 1215 - RNA, 21 nt, Zea mays
  ZMmerge06292009_11419161
gcucucugcucucacugucau

SEQ ID NO: 1216 - RNA, 22 nt, Zea mays
  ZMmerge06292009_24146043
uauagucaucgccguccucuuc

SEQ ID NO: 1217 - RNA, 22 nt, Zea mays
  ZMmerge06292009_11434369
caggacaaugcuugggggauaa

SEQ ID NO: 1218 - RNA, 21 nt, Zea mays
  ZMmerge06292009_16882171
acccauaugguacgucgucuu

SEQ ID NO: 1219 - RNA, 21 nt, Zea mays
  ZMmerge06292009_2359749
cacuugggacacucggcaaag

SEQ ID NO: 1220 - RNA, 22 nt, Zea mays
  ZMmerge06292009_1870239
ugucccccauuguuguuaggac

SEQ ID NO: 1221 - RNA, 20 nt, Zea mays
  ZMmerge06292009_5991865
gcgcgccgaggccggggacu

SEQ ID NO: 1222 - RNA, 21 nt, Zea mays
  ZMmerge06292009_14164558
cgacuucaucaaccuuccgcc

SEQ ID NO: 1223 - RNA, 21 nt, Zea mays
  ZMmerge06292009_12350133
gagcgggaguucuggacaacc

SEQ ID NO: 1224 - RNA, 22 nt, Zea mays
  ZMmerge06292009_15081519
uuaauccggucgcauccugcag

SEQ ID NO: 1225 - RNA, 21 nt, Zea mays
  ZMmerge06292009_21794398
uuauagaagcuggcuaaaaag

SEQ ID NO: 1226 - RNA, 22 nt, Zea mays
  ZMmerge06292009_560249
ugaauuaaaauaggcuuagaau

SEQ ID NO: 1227 - RNA, 21 nt, Zea mays
  ZMmerge06292009_2390885
cgucggaccaggcuucauucc

SEQ ID NO: 1228 - RNA, 22 nt, Zea mays
  ZMmerge06292009_965995
aaauagaaggcaaacgaagggu

SEQ ID NO: 1229 - RNA, 22 nt, Zea mays
  ZMmerge06292009_6932967
cgaagaggacgacacuguguau

SEQ ID NO: 1230 - RNA, 21 nt, Zea mays
  ZMmerge06292009_14196937
uucagagacuacgaguguaau

SEQ ID NO: 1231 - RNA, 20 nt, Zea mays
  ZMmerge06292009_12381613
cgagaguaguacucggaugg

SEQ ID NO: 1232 - RNA, 21 nt, Zea mays
  ZMmerge06292009_26912977
cauuuaucuucgaggaacaac

SEQ ID NO: 1233 - RNA, 20 nt, Zea mays
  ZMmerge06292009_6942671
caggauuuggacgucuucgg

SEQ ID NO: 1234 - RNA, 19 nt, Zea mays
  ZMmerge06292009_26920983
agaggaaugacgcauauca

SEQ ID NO: 1235 - RNA, 22 nt, Zea mays
  ZMmerge06292009_20568523
aggcaaaguguggcacaguuag

SEQ ID NO: 1236 - RNA, 21 nt, Zea mays
  ZMmerge06292009_2414949
uugcgucaggggguuuuugua

SEQ ID NO: 1237 - RNA, 21 nt, Zea mays
  ZMmerge06292009_16037620
ccgagcucgguuccacgucga

SEQ ID NO: 1238 - RNA, 22 nt, Zea mays
  ZMmerge06292009_61128
ugcucugacuucuacgcgcacu

SEQ ID NO: 1239 - RNA, 20 nt, Zea mays
  ZMmerge06292009_28758660
agcuugacgccguuggauuu

SEQ ID NO: 1240 - RNA, 21 nt, Zea mays
  ZMmerge06292009_18776244
ggaauaccccuggaacgauga

SEQ ID NO: 1241 - RNA, 21 nt, Zea mays
  ZMmerge06292009_18778869
uaacggcaauggcauuuaagg

SEQ ID NO: 1242 - RNA, 21 nt, Zea mays
  ZMmerge06292009_24233127
acuacgccuacauaucugccc

SEQ ID NO: 1243 - RNA, 21 nt, Zea mays
  ZMmerge06292009_4270671
uguuggcacgguucaaucaaa

SEQ ID NO: 1244 - RNA, 19 nt, Zea mays
  ZMmerge06292009_10048631
agcucaggagggauagcgc

SEQ ID NO: 1245 - RNA, 22 nt, Zea mays
  ZMmerge06292009_26065589
cgguggaucucccucgcauucg

SEQ ID NO: 1246 - RNA, 21 nt, Zea mays
  ZMmerge06292009_21538001
uucuuggcacauuucaauuug

SEQ ID NO: 1247 - RNA, 20 nt, Zea mays
  ZMmerge06292009_27903709
guucguuuccgucggauugc

SEQ ID NO: 1248 - RNA, 22 nt, Zea mays
  ZMmerge06292009_22455857
cgacuucaucgaccuuccagcg

SEQ ID NO: 1249 - RNA, 22 nt, Zea mays
  ZMmerge06292009_27910360
ucgauaccuucgggcccaagga

SEQ ID NO: 1250 - RNA, 22 nt, Zea mays
  ZMmerge06292009_18829736
aaggaucagcuugcagacgugc

SEQ ID NO: 1251 - RNA, 22 nt, Zea mays
  ZMmerge06292009_25191789
gagauggcggaggugaugauuc

SEQ ID NO: 1252 - RNA, 21 nt, Zea mays
  ZMmerge06292009_25490850
ugauuggaugcaucggaucgu

SEQ ID NO: 1253 - RNA, 21 nt, Zea mays
  ZMmerge06292009_23673892
ggauauuggugcgguucaauc

SEQ ID NO: 1254 - RNA, 21 nt, Zea mays
  ZMmerge06292009_20657698
uaguuaagccgugugauaaau

SEQ ID NO: 1255 - RNA, 19 nt, Zea mays
  ZMmerge06292009_2502123
cgccagcagcuccagaaua

SEQ ID NO: 1256 - RNA, 20 nt, Zea mays
  ZMmerge06292009_6135901
cgaggucguguugcguuggc

SEQ ID NO: 1257 - RNA, 21 nt, Zea mays
  ZMmerge06292009_2522439
cuuauucccgucgguuucagg

SEQ ID NO: 1258 - RNA, 21 nt, Zea mays
  ZMmerge06292009_7068824
cggcaagucaucuggggcuac

SEQ ID NO: 1259 - RNA, 21 nt, Zea mays
  ZMmerge06292009_1627176
cucuucgucaagccggcaggu

SEQ ID NO: 1260 - RNA, 22 nt, Zea mays
  ZMmerge06292009_8892581
guuagagugggcauuuuacuuc

SEQ ID NO: 1261 - RNA, 22 nt, Zea mays
  ZMmerge06292009_20696566
ccaccuucgccgccacauguau

SEQ ID NO: 1262 - RNA, 22 nt, Zea mays
  ZMmerge06292009_1638471
cuauuuugugacaaugagaucg

SEQ ID NO: 1263 - RNA, 19 nt, Zea mays
  ZMmerge06292009_25255166
gccgaacucaagacccacg

SEQ ID NO: 1264 - RNA, 21 nt, Zea mays
  ZMmerge06292009_15271915
ccaacgguguugugucagggg

SEQ ID NO: 1265 - RNA, 19 nt, Zea mays
  ZMmerge06292009_12549567
uggaacaugagagugcaua

SEQ ID NO: 1266 - RNA, 22 nt, Zea mays
  ZMmerge06292009_15284935
aagaaucgucauccuccucguc

SEQ ID NO: 1267 - RNA, 20 nt, Zea mays
  ZMmerge06292009_11654207
gaacaucgauggccuuauau

SEQ ID NO: 1268 - RNA, 21 nt, Zea mays
  ZMmerge06292009_18010054
aacauggccaacaagaacugg

SEQ ID NO: 1269 - RNA, 22 nt, Zea mays
  ZMmerge06292009_26188352
cuuaugcuugcucucuaaugac

SEQ ID NO: 1270 - RNA, 20 nt, Zea mays
  ZMmerge06292009_16222127
auagcuuguuuugcaucgga

SEQ ID NO: 1271 - RNA, 20 nt, Zea mays
  ZMmerge06292009_16224498
uugucaaacucauuagauca

SEQ ID NO: 1272 - RNA, 21 nt, Zea mays
  ZMmerge06292009_18042687
gagcacgaguagacaaaguag

SEQ ID NO: 1273 - RNA, 22 nt, Zea mays
  ZMmerge06292009_19860589
aacuauguguucacuucgauau

SEQ ID NO: 1274 - RNA, 22 nt, Zea mays
  ZMmerge06292009_27319237
augacuguaugugugauagcau

SEQ ID NO: 1275 - RNA, 22 nt, Zea mays
  ZMmerge06292009_23500755
uguuccauuaaguagacauacc

SEQ ID NO: 1276 - RNA, 22 nt, Zea mays
  ZMmerge06292009_28955890
ucuucaaugaaaucggugucag

SEQ ID NO: 1277 - RNA, 20 nt, Zea mays
  ZMmerge06292009_3532625
gacugcaaucuucggcuuca

SEQ ID NO: 1278 - RNA, 22 nt, Zea mays
  ZMmerge06292009_5350860
auauagucaucgccguccucuu

SEQ ID NO: 1279 - RNA, 19 nt, Zea mays
  ZMmerge06292009_8990588
uagcucuacuuagaucguu

SEQ ID NO: 1280 - RNA, 22 nt, Zea mays
  ZMmerge06292009_21708975
gaaguacuugagcucacccauc

SEQ ID NO: 1281 - RNA, 22 nt, Zea mays
  ZMmerge06292009_23531552
acauacagcggaugagauggac

SEQ ID NO: 1282 - RNA, 21 nt, Zea mays
  ZMmerge06292009_4477939
agaaguacuugagcucaccca

SEQ ID NO: 1283 - RNA, 22 nt, Zea mays
  ZMmerge06292009_5391770
aauauccuuggaaccuuccaac

SEQ ID NO: 1284 - RNA, 21 nt, Zea mays
  ZMmerge06292009_10841389
uggcauucuguuuuuauugua

SEQ ID NO: 1285 - RNA, 22 nt, Zea mays
  ZMmerge06292009_3585142
gaaucaaggaacugaagcaugu

SEQ ID NO: 1286 - RNA, 20 nt, Zea mays
  ZMmerge06292009_3586245
caaauguccgagguaccaac

SEQ ID NO: 1287 - RNA, 21 nt, Zea mays
  ZMmerge06292009_9034247
acgaagaggacgacacugugu

SEQ ID NO: 1288 - RNA, 19 nt, Zea mays
  ZMmerge06292009_18122487
gaggacaguagcgcggugg

SEQ ID NO: 1289 - RNA, 20 nt, Zea mays
  ZMmerge06292009_28125058
gugcucccuucaaaccaaua

SEQ ID NO: 1290 - RNA, 21 nt, Zea mays
  ZMmerge06292009_9055730
ugucugguggccggacggucc

SEQ ID NO: 1291 - RNA, 22 nt, Zea mays
  ZMmerge06292009_21768230
guuguuuuauaugcuucgcugu

SEQ ID NO: 1292 - RNA, 21 nt, Zea mays
  ZMmerge06292009_21769480
gaguacuuucugucgggcacu

SEQ ID NO: 1293 - RNA, 21 nt, Zea mays
  ZMmerge06292009_16323420
uagaacgaagaggacgacacu

SEQ ID NO: 1294 - RNA, 21 nt, Zea mays
  ZMmerge06292009_5429565
aagaggacggcgaugacuaua

SEQ ID NO: 1295 - RNA, 22 nt, Zea mays
  ZMmerge06292009_891681
gaaaaaguagaauaaacggugc

SEQ ID NO: 1296 - RNA, 19 nt, Zea mays
  ZMmerge06292009_3721400
gaggucaagguggaggucg

SEQ ID NO: 1297 - RNA, 20 nt, Zea mays
  ZMmerge06292009_5563306
ucaugaaccagguccagcuc

SEQ ID NO: 1298 - RNA, 20 nt, Zea mays
  ZMmerge06292009_132847
uaggacgguaucuuaagggu

SEQ ID NO: 1299 - RNA, 20 nt, Zea mays
  ZMmerge06292009_24526703
agacugagccgaauugaaau

SEQ ID NO: 1300 - RNA, 19 nt, Zea mays
  ZMmerge06292009_23619915
gaucccauuagaacuccga

SEQ ID NO: 1301 - RNA, 20 nt, Zea mays
  ZMmerge06292009_6507196
gggcggacugggaacacaug

SEQ ID NO: 1302 - RNA, 21 nt, Zea mays
  ZMmerge06292009_20126262
uggugcaucauggguucauuc

SEQ ID NO: 1303 - RNA, 22 nt, Zea mays
  ZMmerge06292009_2879398
gccuuguucguuuaugucggau

SEQ ID NO: 1304 - RNA, 21 nt, Zea mays
  ZMmerge06292009_11961180
uuuccaagaugacaaccuuua

SEQ ID NO: 1305 - RNA, 22 nt, Zea mays
  ZMmerge06292009_27400142
aaacauuuguaacgcuccuagu

SEQ ID NO: 1306 - RNA, 21 nt, Zea mays
  ZMmerge06292009_20134046
guucgucgaggccgcggcgga

SEQ ID NO: 1307 - RNA, 21 nt, Zea mays
  ZMmerge06292009_28164768
uugugacucuagccggcuugc

SEQ ID NO: 1308 - RNA, 21 nt, Zea mays
  ZMmerge06292009_16517480
agcuccuucaauccccuccgg

SEQ ID NO: 1309 - RNA, 21 nt, Zea mays
  ZMmerge06292009_24691992
aacggugggaggauaacaagc

SEQ ID NO: 1310 - RNA, 20 nt, Zea mays
  ZMmerge06292009_26527319
agacaguucggucccuaucu

SEQ ID NO: 1311 - RNA, 22 nt, Zea mays
  ZMmerge06292009_10193029
uggccugugacgaaacucagca

SEQ ID NO: 1312 - RNA, 21 nt, Zea mays
  ZMmerge06292009_8190673
uaccuuuacucccaaacaagc

SEQ ID NO: 1313 - RNA, 22 nt, Zea mays
  ZMmerge06292009_27476325
gaaucuuuuccaggcugauuuc

SEQ ID NO: 1314 - RNA, 19 nt, Zea mays
  ZMmerge06292009_25719501
agacaaagaauuaagguac

SEQ ID NO: 1315 - RNA, 21 nt, Zea mays
  ZMmerge06292009_28454624
cacugccucuucccuggcucc

SEQ ID NO: 1316 - RNA, 19 nt, Zea mays
  ZMmerge06292009_2136135
cacguggucuccuucucca

SEQ ID NO: 1317 - RNA, 20 nt, Zea mays
  ZMmerge06292009_28491124
ugaagaucagccucuacucg

SEQ ID NO: 1318 - RNA, 20 nt, Zea mays
  ZMmerge06292009_2159200
cauauggauugaggggguuu

SEQ ID NO: 1319 - RNA, 21 nt, Zea mays
  ZMmerge06292009_23952522
guuuauccccuuaugaauuag

SEQ ID NO: 1320 - RNA, 21 nt, Zea mays
  ZMmerge06292009_7621679
ggcagauuguggcgucuuagg

SEQ ID NO: 1321 - RNA, 20 nt, Zea mays
  ZMmerge06292009_11259453
auaucgacggcgguguuugg

SEQ ID NO: 1322 - RNA, 21 nt, Zea mays
  ZMmerge06292009_16714716
uccagcauacuuacccucaag

SEQ ID NO: 1323 - RNA, 20 nt, Zea mays
  ZMmerge06292009_2193959
gcacgccugucgagacccga

SEQ ID NO: 1324 - RNA, 21 nt, Zea mays
  ZMmerge06292009_2196087
uuuuagucccuaaauugucaa

SEQ ID NO: 1325 - RNA, 21 nt, Zea mays
  ZMmerge06292009_2208972
uccgacgaucucuacuucugc

SEQ ID NO: 1326 - RNA, 20 nt, Zea mays
  ZMmerge06292009_27643827
gcgggugcgcuggcuuacca

SEQ ID NO: 1327 - RNA, 19 nt, Zea mays
  ZMmerge06292009_12220199
gcuggcggaggcuuuagcg

SEQ ID NO: 1328 - RNA, 20 nt, Zea mays
  ZMmerge06292009_24934317
aagcaaaccaucugauucau

SEQ ID NO: 1329 - RNA, 20 nt, Zea mays
  ZMmerge06292009_13132888
cuaugcauucaucuaaccag

SEQ ID NO: 1330 - RNA, 19 nt, Zea mays
  ZMmerge06292009_18587175
gccgcugcacuuugaaccc

SEQ ID NO: 1331 - RNA, 20 nt, Zea mays
  ZMmerge06292009_15867662
guuguggauuggaugaugga

SEQ ID NO: 1332 - RNA, 21 nt, Zea mays
  ZMmerge06292009_15868357
acucauuccuuguaugccacu

SEQ ID NO: 1333 - RNA, 21 nt, Zea mays
  ZMmerge06292009_2255105
aauaagguaaucccgucggcc

SEQ ID NO: 1334 - RNA, 21 nt, Zea mays
  ZMmerge06292009_20923275
auuccuccuacucauucugaa

SEQ ID NO: 1335 - RNA, 21 nt, Zea mays
  ZMmerge06292009_17688769
ucggauuuggcgaacagguug

SEQ ID NO: 1336 - RNA, 20 nt, Zea mays
  ZMmerge06292009_27705737
acggcuaugaguucagcucu

SEQ ID NO: 1337 - RNA, 21 nt, Zea mays
  ZMmerge06292009_13178001
aaggccucguuucaaucucac

SEQ ID NO: 1338 - RNA, 19 nt, Zea mays
  ZMmerge06292009_27719761
ccgugaaccuuuaucaaac

SEQ ID NO: 1339 - RNA, 21 nt, Zea mays
  ZMmerge06292009_25014368
aucggcugccacguaggaaaa

SEQ ID NO: 1340 - RNA, 21 nt, Zea mays
  ZMmerge06292009_19571746
auggaauaccccugaaacaau

SEQ ID NO: 1341 - RNA, 21 nt, Zea mays
  ZMmerge06292009_10495377
aaaccggagaggauuggaggg

SEQ ID NO: 1342 - RNA, 21 nt, Zea mays
  ZMmerge06292009_26841100
uuccuacguggcagccgaugu

SEQ ID NO: 1343 - RNA, 19 nt, Zea mays
  ZMmerge06292009_1423928
aacucugagccucggcaua

SEQ ID NO: 1344 - RNA, 21 nt, Zea mays
  ZMmerge06292009_15951386
gcauucguacgaguauugggu

SEQ ID NO: 1345 - RNA, 21 nt, Zea mays
  ZMmerge06292009_2335211
aggauaugauggaggguauga

SEQ ID NO: 1346 - RNA, 21 nt, Zea mays
  ZMmerge06292009_24135309
auggucgcuagaucguugagg

SEQ ID NO: 1347 - RNA, 20 nt, Zea mays
  ZMmerge06292009_3271363
uucccgcugaacugagccau

SEQ ID NO: 1348 - RNA, 21 nt, Zea mays
  ZMmerge06292009_11443400
auguccgacggcuuuaaacug

SEQ ID NO: 1349 - RNA, 20 nt, Zea mays
  ZMmerge06292009_7812722
gaggacgcgagcgugguggu

SEQ ID NO: 1350 - RNA, 20 nt, Zea mays
  ZMmerge06292009_28705458
cgccacgcgggcguucccca

SEQ ID NO: 1351 - RNA, 21 nt, Zea mays
  ZMmerge06292009_12359937
cugaacacuuguacugaaaca

SEQ ID NO: 1352 - RNA, 21 nt, Zea mays
  ZMmerge06292009_21789426
uagucccucuauuuuauucca

SEQ ID NO: 1353 - RNA, 21 nt, Zea mays
  ZMmerge06292009_15492094
ggggaauguugucugguugga

SEQ ID NO: 1354 - RNA, 20 nt, Zea mays
  ZMmerge06292009_8769713
auacaaaaacaagagcuggc

SEQ ID NO: 1355 - RNA, 19 nt, Zea mays
  ZMmerge06292009_7864419
agcaaugaugaaacgcuca

SEQ ID NO: 1356 - RNA, 19 nt, Zea mays
  ZMmerge06292009_968376
aguagcggcgagcgagagc

SEQ ID NO: 1357 - RNA, 21 nt, Zea mays
  ZMmerge06292009_4237955
cccucaccgaucuagcaacca

SEQ ID NO: 1358 - RNA, 21 nt, Zea mays
  ZMmerge06292009_3338522
aacccacgaacauaacucaau

SEQ ID NO: 1359 - RNA, 19 nt, Zea mays
  ZMmerge06292009_617656
acgguggaaggauaacagg

SEQ ID NO: 1360 - RNA, 21 nt, Zea mays
  ZMmerge06292009_27861914
accccuucaaucccccucugg

SEQ ID NO: 1361 - RNA, 21 nt, Zea mays
  ZMmerge06292009_6988367
cuucauguuuggaucuuuagc

SEQ ID NO: 1362 - RNA, 20 nt, Zea mays
  ZMmerge06292009_22426088
cggcucaccagcgcugcacu

SEQ ID NO: 1363 - RNA, 21 nt, Zea mays
  ZMmerge06292009_21517690
aguaaaucccgucgguacccg

SEQ ID NO: 1364 - RNA, 19 nt, Zea mays
  ZMmerge06292009_21524463
cuguagcucaguggauaga

SEQ ID NO: 1365 - RNA, 21 nt, Zea mays
  ZMmerge06292009_8815287
agaucucgugcucacuugcug

SEQ ID NO: 1366 - RNA, 21 nt, Zea mays
  ZMmerge06292009_5193835
aguucgacgguacccauguuc

SEQ ID NO: 1367 - RNA, 19 nt, Zea mays
  ZMmerge06292009_10649269
uuagcucuaguacauucaa

SEQ ID NO: 1368 - RNA, 20 nt, Zea mays
  ZMmerge06292009_3396136
guacgugggcuuucuguacg

SEQ ID NO: 1369 - RNA, 19 nt, Zea mays
  ZMmerge06292009_3397995
uggggcaaucagacggauc

SEQ ID NO: 1370 - RNA, 20 nt, Zea mays
  ZMmerge06292009_26102980
agcagagccugucuggauga

SEQ ID NO: 1371 - RNA, 19 nt, Zea mays
  ZMmerge06292009_27034444
ugcacugccucuucccugg

SEQ ID NO: 1372 - RNA, 21 nt, Zea mays
  ZMmerge06292009_8875874
cggcucaccagcgcugcacuc

SEQ ID NO: 1373 - RNA, 20 nt, Zea mays
  ZMmerge06292009_7967573
augugcccaucuucuccacc

SEQ ID NO: 1374 - RNA, 20 nt, Zea mays
  ZMmerge06292009_7075466
gcccugggcuuccuuggacc

SEQ ID NO: 1375 - RNA, 21 nt, Zea mays
  ZMmerge06292009_28871870
gugguauuguuucggcucaug

SEQ ID NO: 1376 - RNA, 19 nt, Zea mays
  ZMmerge06292009_732031
gcaagggaugagcgcgaaa

SEQ ID NO: 1377 - RNA, 21 nt, Zea mays
  ZMmerge06292009_10725447
auaacuuuccaccaacguauc

SEQ ID NO: 1378 - RNA, 20 nt, Zea mays
  ZMmerge06292009_22530654
ccugggcuuccuuggaccua

SEQ ID NO: 1379 - RNA, 20 nt, Zea mays
  ZMmerge06292009_28902104
agcgugauuaacggccagga

SEQ ID NO: 1380 - RNA, 19 nt, Zea mays
  ZMmerge06292009_5292039
ggcuggacuaccucggcaa

SEQ ID NO: 1381 - RNA, 21 nt, Zea mays
  ZMmerge06292009_17096625
uuuaguccccguguuuggcaa

SEQ ID NO: 1382 - RNA, 19 nt, Zea mays
  ZMmerge06292009_18004150
aucacugcccgcuuccaac

SEQ ID NO: 1383 - RNA, 19 nt, Zea mays
  ZMmerge06292009_757081
guucgcgcggccccugcca

SEQ ID NO: 1384 - RNA, 20 nt, Zea mays
  ZMmerge06292009_8964318
ugagcgcagcguugaugagc

SEQ ID NO: 1385 - RNA, 21 nt, Zea mays
  ZMmerge06292009_800932
uuagccccucuaaucuccucc

SEQ ID NO: 1386 - RNA, 22 nt, Zea mays
  ZMmerge06292009_11881930
auuaaggagaauaaaaaggucc

SEQ ID NO: 1387 - RNA, 20 nt, Zea mays
  ZMmerge06292009_21700858
gcucacccucuaucugucag

SEQ ID NO: 1388 - RNA, 19 nt, Zea mays
  ZMmerge06292009_26246201
cgccuugcaccaagugaau

SEQ ID NO: 1389 - RNA, 19 nt, Zea mays
  ZMmerge06292009_14442116
ucugcgcucuuuggacuuu

SEQ ID NO: 1390 - RNA, 19 nt, Zea mays
  ZMmerge06292009_28978594
gcuggaggauggucgcacc

SEQ ID NO: 1391 - RNA, 19 nt, Zea mays
  ZMmerge06292009_13543863
gcaucuucuucuucggacc

SEQ ID NO: 1392 - RNA, 19 nt, Zea mays
  ZMmerge06292009_28988580
gagaagcagggcacgugca

SEQ ID NO: 1393 - RNA, 21 nt, Zea mays
  ZMmerge06292009_1748379
acccgacucuccccaaggacg

SEQ ID NO: 1394 - RNA, 21 nt, Zea mays
  ZMmerge06292009_18116351
agucaucgauucuggggggag

SEQ ID NO: 1395 - RNA, 21 nt, Zea mays
  ZMmerge06292009_20880307
gugcaguucuccucuggcacg

SEQ ID NO: 1396 - RNA, 19 nt, Zea mays
  ZMmerge06292009_16307422
caagccuuggaccucucua

SEQ ID NO: 1397 - RNA, 21 nt, Zea mays
  ZMmerge06292009_14495060
ggugaccuccugggaaguccu

SEQ ID NO: 1398 - RNA, 20 nt, Zea mays
  ZMmerge06292009_13601590
ccugugccugccucuuccau

SEQ ID NO: 1399 - RNA, 21 nt, Zea mays
  ZMmerge06292009_1809865
gaucgugcugcgcaguuucac

SEQ ID NO: 1400 - RNA, 21 nt, Zea mays
  ZMmerge06292009_20877973
gagcucgguuccacgucgacg

SEQ ID NO: 1401 - RNA, 22 nt, Zea mays
  ZMmerge06292009_13712449
guuaguuaauaaguccugguuu

SEQ ID NO: 1402 - RNA, 20 nt, Zea mays
  ZMmerge06292009_11901492
ugccaaaggagaguugcccu

SEQ ID NO: 1403 - RNA, 21 nt, Zea mays
  ZMmerge06292009_4642601
aggacuaaacaagaagguaaa

SEQ ID NO: 1404 - RNA, 21 nt, Glycine max
  GMmerge_6298403
gucuccuauguuguaguccua

SEQ ID NO: 1405 - RNA, 21 nt, Glycine max
  GMmerge_5250432
gucgaugucggugucgugucg

SEQ ID NO: 1406 - RNA, 21 nt, Glycine max
  GMmerge_5554228
gccgagugacgcgccagcgcu

SEQ ID NO: 1407 - RNA, 21 nt, Glycine max
  GMmerge_7863177
gucaugucggugucggacacu

SEQ ID NO: 1408 - RNA, 22 nt, Glycine max
  GMmerge_9800122
gauauggaugaagguuuggaga

SEQ ID NO: 1409 - RNA, 21 nt, Glycine max
  GMmerge_4910730
guaugggugucgugucggugu

SEQ ID NO: 1410 - RNA, 21 nt, Glycine max
  GMmerge_6787862
gaguaaggaugaugcucuuca

SEQ ID NO: 1411 - RNA, 20 nt, Glycine max
  GMmerge_1904992
gacagaagagagugagcacu

SEQ ID NO: 1412 - RNA, 22 nt, Glycine max
  GMmerge_6035688
gaaugccuguggaaugggaaga

SEQ ID NO: 1413 - RNA, 21 nt, Glycine max
  GMmerge_6392627
guacuuuuccaguuuugccuu

SEQ ID NO: 1414 - RNA, 21 nt, Glycine max
  GMmerge_7274805
guacggguguugugucggugu

SEQ ID NO: 1415 - RNA, 21 nt, Glycine max
  GMmerge_10572756
guacgggugucgugucggugu

SEQ ID NO: 1416 - RNA, 22 nt, Glycine max
  GMmerge_994490
guaagucauuuuuaauuaauaa

SEQ ID NO: 1417 - RNA, 21 nt, Glycine max
  GMmerge_9875976
cuuugaagcaacaagcaaugu

SEQ ID NO: 1418 - RNA, 22 nt, Glycine max
  GMmerge_10018959
guaagaauucacggguaagguu

SEQ ID NO: 1419 - RNA, 21 nt, Glycine max
  GMmerge_4333204
guaaaaggcuuacggaucaag

SEQ ID NO: 1420 - RNA, 22 nt, Glycine max
  GMmerge_807155
gguuguaaggugaagauugucc

SEQ ID NO: 1421 - RNA, 22 nt, Glycine max
  GMmerge_3460061
cugaaagaaggaugcucuggaa

SEQ ID NO: 1422 - RNA, 21 nt, Glycine max
  GMmerge_7447045
cuaacggcguuacuuuaaaau

SEQ ID NO: 1423 - RNA, 22 nt, Glycine max
  GMmerge_8260964
gguggcgucgaggcggugcaug

SEQ ID NO: 1424 - RNA, 22 nt, Glycine max
  GMmerge_79899
ggucuucgucuugcauuugaau

SEQ ID NO: 1425 - RNA, 22 nt, Glycine max
  GMmerge_4724523
gggucguccugagaucacauga

SEQ ID NO: 1426 - RNA, 21 nt, Glycine max
  GMmerge_9332408
gggucaaacgggccgguccgc

SEQ ID NO: 1427 - RNA, 22 nt, Glycine max
  GMmerge_9039938
cauuaugauauccgugaugacg

SEQ ID NO: 1428 - RNA, 22 nt, Glycine max
  GMmerge_86422
caggaucgacguugaccacagg

SEQ ID NO: 1429 - RNA, 22 nt, Glycine max
  GMmerge_7034293
cagaaugaggaugauuguuuug

SEQ ID NO: 1430 - RNA, 21 nt, Glycine max
  GMmerge_10109576
caccuuugcauaaucuuuaau

SEQ ID NO: 1431 - RNA, 19 nt, Glycine max
  GMmerge_2272650
caaguuggaaccuauuacu

SEQ ID NO: 1432 - RNA, 22 nt, Glycine max
  GMmerge_4922285
caaagcugauccagaacaagug

SEQ ID NO: 1433 - RNA, 19 nt, Glycine max
  GMmerge_4014482
ggggagacaucgcggcaga

SEQ ID NO: 1434 - RNA, 21 nt, Glycine max
  GMmerge_8215694
ggggacugcuaaccuacuccc

SEQ ID NO: 1435 - RNA, 21 nt, Glycine max
  GMmerge_7539598
gggcaaacgggaaguagaagu

SEQ ID NO: 1436 - RNA, 21 nt, Glycine max
  GMmerge_10019107
gggacgccaacggccuuucgu

SEQ ID NO: 1437 - RNA, 22 nt, Glycine max
  GMmerge_1048145
aucgagaccaauggaaggcuuu

SEQ ID NO: 1438 - RNA, 22 nt, Glycine max
  GMmerge_9194165
ggcugauaguucaacaaggcaa

SEQ ID NO: 1439 - RNA, 21 nt, Glycine max
  GMmerge_1614356
ggccuagauugaugaccucca

SEQ ID NO: 1440 - RNA, 22 nt, Glycine max
  GMmerge_943071
agugcaaacaggaguuacauga

SEQ ID NO: 1441 - RNA, 21 nt, Glycine max
  GMmerge_6819958
ggaggacacauaaacccggcg

SEQ ID NO: 1442 - RNA, 21 nt, Glycine max
  GMmerge_5729970
agcuuguugaauuguuggaau

SEQ ID NO: 1443 - RNA, 22 nt, Glycine max
  GMmerge_4570443
agaggcccuuggggaggaguaa

SEQ ID NO: 1444 - RNA, 22 nt, Glycine max
  GMmerge_5205192
ggaccucuuuaucaucgucugc

SEQ ID NO: 1445 - RNA, 19 nt, Glycine max
  GMmerge_10795813
ggacacgacacggacacgu

SEQ ID NO: 1446 - RNA, 21 nt, Glycine max
  GMmerge_7342081
ggacaagauauaggggaagaa

SEQ ID NO: 1447 - RNA, 21 nt, Glycine max
  GMmerge_6531700
ggaauuggaauugugggauuc

SEQ ID NO: 1448 - RNA, 21 nt, Glycine max
  GMmerge_4990122
ggaaguggagggauagguaaa

SEQ ID NO: 1449 - RNA, 19 nt, Glycine max
  GMmerge_6933561
ggaagacacauccguaaau

SEQ ID NO: 1450 - RNA, 22 nt, Glycine max
  GMmerge_475178
ggaagaagguucucccgcuguu

SEQ ID NO: 1451 - RNA, 22 nt, Glycine max
  GMmerge_8532401
acuuguucuggagcagcauuug

SEQ ID NO: 1452 - RNA, 22 nt, Glycine max
  GMmerge_6350592
gcuugccuugucgaacuaucag

SEQ ID NO: 1453 - RNA, 22 nt, Glycine max
  GMmerge_4303316
acugguuccagagcaauccuga

SEQ ID NO: 1454 - RNA, 21 nt, Glycine max
  GMmerge_4538230
gcuuacaaaaguuguucuuuc

SEQ ID NO: 1455 - RNA, 22 nt, Glycine max
  GMmerge_982405
gcugaccccgucgcaggauuca

SEQ ID NO: 1456 - RNA, 21 nt, Glycine max
  GMmerge_2267787
gcucucuauacuucugucauc

SEQ ID NO: 1457 - RNA, 22 nt, Glycine max
  GMmerge_4123614
accgauguguguucaauguccg

SEQ ID NO: 1458 - RNA, 22 nt, Glycine max
  GMmerge_828670
gcucaaacuccuccuccucauc

SEQ ID NO: 1459 - RNA, 21 nt, Glycine max
  GMmerge_1486381
gcuauuaccaucuuccuucuc

SEQ ID NO: 1460 - RNA, 22 nt, Glycine max
  GMmerge_5499341
acaaguuggaaccuauuacuuc

SEQ ID NO: 1461 - RNA, 22 nt, Glycine max
  GMmerge_2597068
acaaauuaguuacaauaauuca

SEQ ID NO: 1462 - RNA, 19 nt, Glycine max
  GMmerge_2211446
aauugucgaaacugaugca

SEQ ID NO: 1463 - RNA, 22 nt, Glycine max
  GMmerge_7972463
aaggauaagaaggaaagugugg

SEQ ID NO: 1464 - RNA, 22 nt, Glycine max
  GMmerge_4594825
aagaugacuguuuugggauauc

SEQ ID NO: 1465 - RNA, 21 nt, Glycine max
  GMmerge_7570735
aagagacuuacggaucaacuu

SEQ ID NO: 1466 - RNA, 21 nt, Glycine max
  GMmerge_5071053
aagaaccgucguaguaugucu

SEQ ID NO: 1467 - RNA, 21 nt, Glycine max
  GMmerge_3619058
aacauuuccagagcauccuuc

SEQ ID NO: 1468 - RNA, 21 nt, Glycine max
  GMmerge_8534111
gcauuuguaaaaugguggaca

SEQ ID NO: 1469 - RNA, 19 nt, Glycine max
  GMmerge_8656929
gcauucguuggugauuguu

SEQ ID NO: 1470 - RNA, 21 nt, Glycine max
  GMmerge_989328
aaaacaugcauacuuucuuua

SEQ ID NO: 1471 - RNA, 22 nt, Glycine max
  GMmerge_9652779
gcaggggaacaggcagagcaug

SEQ ID NO: 1472 - RNA, 21 nt, Glycine max
  GMmerge_6196226
gcagaauagaagcuccccaug

SEQ ID NO: 1473 - RNA, 19 nt, Glycine max
  GMmerge_10301309
gcacugccucuucccuggc

SEQ ID NO: 1474 - RNA, 21 nt, Glycine max
  GMmerge_3769897
gcacuaaagauuguccaaaag

SEQ ID NO: 1475 - RNA, 21 nt, Glycine max
  GMmerge_4087635
gcacaugauagagauccacug

SEQ ID NO: 1476 - RNA, 22 nt, Glycine max
  GMmerge_3393141
gcaagugacuuacggaucaacu

SEQ ID NO: 1477 - RNA, 22 nt, Glycine max
  GMmerge_8949045
gcaaguccacugacgcugcaua

SEQ ID NO: 1478 - RNA, 21 nt, Glycine max
  GMmerge_9048074
uuguguucucaggucaccccu

SEQ ID NO: 1479 - RNA, 22 nt, Glycine max
  GMmerge_8142479
gcaaccauaguuuguggccugu

SEQ ID NO: 1480 - RNA, 21 nt, Glycine max
  GMmerge_5882429
gauuugauuauuaggaauuuc

SEQ ID NO: 1481 - RNA, 22 nt, Glycine max
  GMmerge_8655224
uuggacaaucuuuagugcaaac

SEQ ID NO: 1482 - RNA, 21 nt, Glycine max
  GMmerge_8889905
gauuucugaccaugaauuccc

SEQ ID NO: 1483 - RNA, 22 nt, Glycine max
  GMmerge_3370881
gauuuagacuuguucaaacuug

SEQ ID NO: 1484 - RNA, 21 nt, Glycine max
  GMmerge_4925333
uugcucugucuguaauuuaau

SEQ ID NO: 1485 - RNA, 21 nt, Glycine max
  GMmerge_494821
uugagaugagaaggaaugugg

SEQ ID NO: 1486 - RNA, 22 nt, Glycine max
  GMmerge_402347
uucuagauuguuguggauuuca

SEQ ID NO: 1487 - RNA, 22 nt, Glycine max
  GMmerge_7783480
gaugauuuaucuugguacuuuu

SEQ ID NO: 1488 - RNA, 21 nt, Glycine max
  GMmerge_2171548
gaugaggaggaggaguuugag

SEQ ID NO: 1489 - RNA, 22 nt, Glycine max
  GMmerge_536807
uuauccugaacccuagcgaagu

SEQ ID NO: 1490 - RNA, 21 nt, Glycine max
  GMmerge_412560
uuagauuaauuguaauuucgg

SEQ ID NO: 1491 - RNA, 21 nt, Glycine max
  GMmerge_5759097
gauccguaagguugauacgga

SEQ ID NO: 1492 - RNA, 22 nt, Glycine max
  GMmerge_1937310
gaguuuuaauaauaucccccaa

SEQ ID NO: 1493 - RNA, 21 nt, Glycine max
  GMmerge_2702411
gagugucagaggaugcaguga

SEQ ID NO: 1494 - RNA, 20 nt, Glycine max
  GMmerge_8003273
gagggcgaaguacagguaaa

SEQ ID NO: 1495 - RNA, 21 nt, Glycine max
  GMmerge_9163634
agaguuccaaagggaucgcau

SEQ ID NO: 1496 - RNA, 22 nt, Glycine max
  GMmerge_3150669
gaggauagcagaauauggaacu

SEQ ID NO: 1497 - RNA, 22 nt, Glycine max
  GMmerge_11062594
ugcucauucucuaucugucacc

SEQ ID NO: 1498 - RNA, 22 nt, Glycine max
  GMmerge_722745
ugcacuaaagauuguccaaaag

SEQ ID NO: 1499 - RNA, 22 nt, Glycine max
  GMmerge_144463
ugauggaggcaauccuguaaug

SEQ ID NO: 1500 - RNA, 21 nt, Glycine max
  GMmerge_1348918
gagagaaagccaugacuuaca

SEQ ID NO: 1501 - RNA, 21 nt, Glycine max
  GMmerge_3585285
ugauaaauguugaagauauac

SEQ ID NO: 1502 - RNA, 21 nt, Glycine max
  GMmerge_4704216
ugaguuuaauuauuucugaaa

SEQ ID NO: 1503 - RNA, 21 nt, Glycine max
  GMmerge_6785890
gagaaucuugaugaugcugca

SEQ ID NO: 1504 - RNA, 22 nt, Glycine max
  GMmerge_4949966
gacuucgaagcgauauggauaa

SEQ ID NO: 1505 - RNA, 22 nt, Glycine max
  GMmerge_3250171
gacgugaggauaugucacaugg

SEQ ID NO: 1506 - RNA, 22 nt, Glycine max
  GMmerge_10100599
gacggucgugaugucagcaccg

SEQ ID NO: 1507 - RNA, 22 nt, Glycine max
  GMmerge_5359490
ugacaauauguuagauaaugau

SEQ ID NO: 1508 - RNA, 20 nt, Glycine max
  GMmerge_1818526
gacgcgugucggacaccgga

SEQ ID NO: 1509 - RNA, 22 nt, Glycine max
  GMmerge_4043242
gacgcguccacguaggaaccgc

SEQ ID NO: 1510 - RNA, 20 nt, Glycine max
  GMmerge_5950367
gacccugcaggauauaauua

SEQ ID NO: 1511 - RNA, 20 nt, Glycine max
  GMmerge_4397409
gacagauuuugguucuucuu

SEQ ID NO: 1512 - RNA, 22 nt, Glycine max
  GMmerge_6519776
ucuuauucugaggccauuucug

SEQ ID NO: 1513 - RNA, 21 nt, Glycine max
  GMmerge_3371590
gacacgugaucgucagcauca

SEQ ID NO: 1514 - RNA, 22 nt, Glycine max
  GMmerge_204252
gaauuccucaaagcagcugauc

SEQ ID NO: 1515 - RNA, 21 nt, Glycine max
  GMmerge_7611766
gaaugagcaccagaaccuuga

SEQ ID NO: 1516 - RNA, 22 nt, Glycine max
  GMmerge_325736
gaaugagauuuguguugcuuaa

SEQ ID NO: 1517 - RNA, 21 nt, Glycine max
  GMmerge_1542711
gaaguugacgaugaggaacua

SEQ ID NO: 1518 - RNA, 21 nt, Glycine max
  GMmerge_1564991
gaagguugcuugucucgccca

SEQ ID NO: 1519 - RNA, 21 nt, Glycine max
  GMmerge_4310335
gaaggaauguggugauaaauu

SEQ ID NO: 1520 - RNA, 21 nt, Glycine max
  GMmerge_4351187
ucgacacugcacucaaucaug

SEQ ID NO: 1521 - RNA, 21 nt, Glycine max
  GMmerge_4254744
ucccaauuccgcccauuccua

SEQ ID NO: 1522 - RNA, 21 nt, Glycine max
  GMmerge_1993522
ucauguuggcauguuaguuga

SEQ ID NO: 1523 - RNA, 20 nt, Glycine max
  GMmerge_4978252
gaagacgaacaacaugaaau

SEQ ID NO: 1524 - RNA, 21 nt, Glycine max
  GMmerge_3306888
ucaugcgaucccuuaggaauu

SEQ ID NO: 1525 - RNA, 21 nt, Glycine max
  GMmerge_4073673
gaagaagagaagagugcuuuu

SEQ ID NO: 1526 - RNA, 21 nt, Glycine max
  GMmerge_10657067
gaagaagaagcuucauccuca

SEQ ID NO: 1527 - RNA, 22 nt, Glycine max
  GMmerge_7798663
gaacugaugaacuaacggcaca

SEQ ID NO: 1528 - RNA, 22 nt, Glycine max
  GMmerge_3512718
gaaauuaacagacucagacaaa

SEQ ID NO: 1529 - RNA, 22 nt, Glycine max
  GMmerge_7146471
gaaaugguuucaagggacgcuu

SEQ ID NO: 1530 - RNA, 21 nt, Glycine max
  GMmerge_48243
gaaaggccguuggcgucccug

SEQ ID NO: 1531 - RNA, 21 nt, Glycine max
  GMmerge_9680929
gaaacucuuaaguuuggccuu

SEQ ID NO: 1532 - RNA, 22 nt, Glycine max
  GMmerge_6286282
gaaacacacuuggcacacguga

SEQ ID NO: 1533 - RNA, 21 nt, Glycine max
  GMmerge_3198847
gaaaacaacacagaguuguuu

SEQ ID NO: 1534 - RNA, 22 nt, Glycine max
  GMmerge_2844482
cuuuuuggaagaauuggaccaa

SEQ ID NO: 1535 - RNA, 21 nt, Glycine max
  GMmerge_593667
uagagauacuuaaaguaagcu

SEQ ID NO: 1536 - RNA, 22 nt, Glycine max
  GMmerge_9300891
cuuuugauaggaauguccguuu

SEQ ID NO: 1537 - RNA, 22 nt, Glycine max
  GMmerge_6834094
cuuuuauuccuucagcuguuga

SEQ ID NO: 1538 - RNA, 22 nt, Glycine max
  GMmerge_3429144
cuuuguugaucugucauuuuga

SEQ ID NO: 1539 - RNA, 22 nt, Glycine max
  GMmerge_8270491
cuuugguuugaaucccagcuua

SEQ ID NO: 1540 - RNA, 20 nt, Glycine max
  GMmerge_9609070
cuuugagauucugagcaaga

SEQ ID NO: 1541 - RNA, 22 nt, Glycine max
  GMmerge_2730671
uacuaaauuugaaucuaccaaa

SEQ ID NO: 1542 - RNA, 21 nt, Glycine max
  GMmerge_1414929
cuuucagcuugggacaaugca

SEQ ID NO: 1543 - RNA, 22 nt, Glycine max
  GMmerge_2517844
cuugucuuggauuuguuuuaug

SEQ ID NO: 1544 - RNA, 20 nt, Glycine max
  GMmerge_6201076
cuuggcugagaccugauggc

SEQ ID NO: 1545 - RNA, 21 nt, Glycine max
  GMmerge_5916425
uaauuauuucugaaagaagga

SEQ ID NO: 1546 - RNA, 21 nt, Glycine max
  GMmerge_4826233
cuugauacgguacuguaggaa

SEQ ID NO: 1547 - RNA, 20 nt, Glycine max
  GMmerge_2614429
uaagggcauauguuaacuga

SEQ ID NO: 1548 - RNA, 22 nt, Glycine max
  GMmerge_8381623
cuucuucugggaauauuugugg

SEQ ID NO: 1549 - RNA, 21 nt, Glycine max
  GMmerge_10941080
uaagcaaagcaucucuugaga

SEQ ID NO: 1550 - RNA, 22 nt, Glycine max
  GMmerge_6515632
cuucugaagaggauuugaugau

SEQ ID NO: 1551 - RNA, 21 nt, Glycine max
  GMmerge_8115785
cuucucuucuucuuccaaugc

SEQ ID NO: 1552 - RNA, 21 nt, Glycine max
  GMmerge_5802807
cuuccuguaacuagcaaugca

SEQ ID NO: 1553 - RNA, 21 nt, Glycine max
  GMmerge_3992568
cuuccagaaaauacuguucaa

SEQ ID NO: 1554 - RNA, 20 nt, Glycine max
  GMmerge_9131184
cuucagcagaacuuguuucu

SEQ ID NO: 1555 - RNA, 22 nt, Glycine max
  GMmerge_9743364
cuucacagcaacaugauguccu

SEQ ID NO: 1556 - RNA, 22 nt, Glycine max
  GMmerge_1203544
cuucaaggacuaauauggaugg

SEQ ID NO: 1557 - RNA, 22 nt, Glycine max
  GMmerge_2456061
cuuauuuuucacauacuuucau

SEQ ID NO: 1558 - RNA, 22 nt, Glycine max
  GMmerge_1194239
cuuauacaacuugugcauagca

SEQ ID NO: 1559 - RNA, 22 nt, Glycine max
  GMmerge_3780695
cuguugaaguagcuggagaacu

SEQ ID NO: 1560 - RNA, 22 nt, Glycine max
  GMmerge_7974379
cugucggccuugccgguagcag

SEQ ID NO: 1561 - RNA, 22 nt, Glycine max
  GMmerge_5517566
cuguauaguagauguuugaaca

SEQ ID NO: 1562 - RNA, 22 nt, Glycine max
  GMmerge_8926108
cuguacaagguuucagauccau

SEQ ID NO: 1563 - RNA, 22 nt, Glycine max
  GMmerge_10222646
gugucggacacugacacggaug

SEQ ID NO: 1564 - RNA, 21 nt, Glycine max
  GMmerge_1354508
cuggauuggccuauuuaauua

SEQ ID NO: 1565 - RNA, 22 nt, Glycine max
  GMmerge_570459
cuggacaauuaaaaggauggug

SEQ ID NO: 1566 - RNA, 22 nt, Glycine max
  GMmerge_3409402
cuggaagcacagcagucugaua

SEQ ID NO: 1567 - RNA, 21 nt, Glycine max
  GMmerge_9868011
cuggaaccaguucuugacuug

SEQ ID NO: 1568 - RNA, 22 nt, Glycine max
  GMmerge_8354752
gucucaucuggcagcauuuuua

SEQ ID NO: 1569 - RNA, 22 nt, Glycine max
  GMmerge_8004730
cugauuuagaaacaaagauguc

SEQ ID NO: 1570 - RNA, 22 nt, Glycine max
  GMmerge_10358303
guacuucaacaacuccgacggc

SEQ ID NO: 1571 - RNA, 21 nt, Glycine max
  GMmerge_8756391
cugacacggacaccggacacg

SEQ ID NO: 1572 - RNA, 21 nt, Glycine max
  GMmerge_2985037
guaaaggaaauaguaaccaau

SEQ ID NO: 1573 - RNA, 22 nt, Glycine max
  GMmerge_630382
cucuuuuuucuacguaaaaagc

SEQ ID NO: 1574 - RNA, 21 nt, Glycine max
  GMmerge_9538658
cucuugaacuugaucauuggg

SEQ ID NO: 1575 - RNA, 22 nt, Glycine max
  GMmerge_609137
cucuuaauucaaccauccucuc

SEQ ID NO: 1576 - RNA, 22 nt, Glycine max
  GMmerge_527439
cucucucuaauaguuucguuuc

SEQ ID NO: 1577 - RNA, 22 nt, Glycine max
  GMmerge_5588005
cucaaauugagcaaauccuugu

SEQ ID NO: 1578 - RNA, 20 nt, Glycine max
  GMmerge_1785942
cuauugaccuuucgauugga

SEQ ID NO: 1579 - RNA, 21 nt, Glycine max
  GMmerge_5722363
gggaaucuugaugaugcugca

SEQ ID NO: 1580 - RNA, 22 nt, Glycine max
  GMmerge_36580
cuaugucuuguccuagaggaau

SEQ ID NO: 1581 - RNA, 22 nt, Glycine max
  GMmerge_11119005
cuauaucuuguccuagaggaau

SEQ ID NO: 1582 - RNA, 22 nt, Glycine max
  GMmerge_7128844
cuauaaaaaaaugcucaucaac

SEQ ID NO: 1583 - RNA, 22 nt, Glycine max
  GMmerge_2778227
cuagugucgagucacaagauga

SEQ ID NO: 1584 - RNA, 21 nt, Glycine max
  GMmerge_10921171
cuaggucacauuccaaucauc

SEQ ID NO: 1585 - RNA, 21 nt, Glycine max
  GMmerge_6398991
cuagcaaguguuaugccaauc

SEQ ID NO: 1586 - RNA, 22 nt, Glycine max
  GMmerge_7918531
ggauaaugauugucacguguca

SEQ ID NO: 1587 - RNA, 22 nt, Glycine max
  GMmerge_4999973
cuagaaucaagagaaccuucuu

SEQ ID NO: 1588 - RNA, 20 nt, Glycine max
  GMmerge_2258577
cuacaaaauaagcuacuuca

SEQ ID NO: 1589 - RNA, 20 nt, Glycine max
  GMmerge_9914121
cuaagucugaucuauuuaau

SEQ ID NO: 1590 - RNA, 22 nt, Glycine max
  GMmerge_10971398
cgacuaugcauggccaauugaa

SEQ ID NO: 1591 - RNA, 19 nt, Glycine max
  GMmerge_6867655
cuaaauuauguaggagaau

SEQ ID NO: 1592 - RNA, 22 nt, Glycine max
  GMmerge_7534904
cuaaaaaaguuacgcuuggagu

SEQ ID NO: 1593 - RNA, 22 nt, Glycine max
  GMmerge_2612985
cguuuuagaaugccuacuuuca

SEQ ID NO: 1594 - RNA, 22 nt, Glycine max
  GMmerge_3238311
cguuugucugauucugagaaga

SEQ ID NO: 1595 - RNA, 22 nt, Glycine max
  GMmerge_9105050
cgugguaucagguccugcuuca

SEQ ID NO: 1596 - RNA, 21 nt, Glycine max
  GMmerge_4603859
cgugaugacgugaggauaugu

SEQ ID NO: 1597 - RNA, 22 nt, Glycine max
  GMmerge_9795701
cgugaucgucagcaucacuuau

SEQ ID NO: 1598 - RNA, 22 nt, Glycine max
  GMmerge_6893747
cgugacugucuuacaauucaau

SEQ ID NO: 1599 - RNA, 21 nt, Glycine max
  GMmerge_1907963
cgugacaugugacagucaaca

SEQ ID NO: 1600 - RNA, 21 nt, Glycine max
  GMmerge_4670143
cgucuuagaaugugacgcggu

SEQ ID NO: 1601 - RNA, 21 nt, Glycine max
  GMmerge_2803706
cgucggugucgugucgguguc

SEQ ID NO: 1602 - RNA, 21 nt, Glycine max
  GMmerge_425947
cguccgcgagcuugagauucu

SEQ ID NO: 1603 - RNA, 22 nt, Glycine max
  GMmerge_593431
cgucccgacuuugacggauaau

SEQ ID NO: 1604 - RNA, 22 nt, Glycine max
  GMmerge_2912338
cgucaucacagacaucauaaug

SEQ ID NO: 1605 - RNA, 22 nt, Glycine max
  GMmerge_2915262
cguaugacucauauggaucaac

SEQ ID NO: 1606 - RNA, 21 nt, Glycine max
  GMmerge_11058191
cguaucuguauugccuugaaa

SEQ ID NO: 1607 - RNA, 22 nt, Glycine max
  GMmerge_211872
cgguucucugaaaaaccgucuu

SEQ ID NO: 1608 - RNA, 22 nt, Glycine max
  GMmerge_3277612
cgggcacauguggcaacauaug

SEQ ID NO: 1609 - RNA, 20 nt, Glycine max
  GMmerge_10406713
gagguguauggagugagaga

SEQ ID NO: 1610 - RNA, 21 nt, Glycine max
  GMmerge_581904
gagggauagguaaaacaacua

SEQ ID NO: 1611 - RNA, 22 nt, Glycine max
  GMmerge_1676420
cggcuugaguugaauauguaag

SEQ ID NO: 1612 - RNA, 21 nt, Glycine max
  GMmerge_40240
cggcuccugacaguggaggga

SEQ ID NO: 1613 - RNA, 22 nt, Glycine max
  GMmerge_6606175
cggcacgacgggacgcgccugc

SEQ ID NO: 1614 - RNA, 22 nt, Glycine max
  GMmerge_4191360
cggauaccggacacgagacgga

SEQ ID NO: 1615 - RNA, 21 nt, Glycine max
  GMmerge_9164891
gacauacuacgacgguucuuu

SEQ ID NO: 1616 - RNA, 22 nt, Glycine max
  GMmerge_8611362
cggacacggacacguggacacc

SEQ ID NO: 1617 - RNA, 21 nt, Glycine max
  GMmerge_6379142
cggacaccggacacgacacga

SEQ ID NO: 1618 - RNA, 20 nt, Glycine max
  GMmerge_5136763
cggacaccagacacggcaag

SEQ ID NO: 1619 - RNA, 22 nt, Glycine max
  GMmerge_2312905
cggaaccaacggaucucaguuc

SEQ ID NO: 1620 - RNA, 22 nt, Glycine max
  GMmerge_9638771
cgcucagaaugagaccuugagc

SEQ ID NO: 1621 - RNA, 20 nt, Glycine max
  GMmerge_5026588
cgcuaucuauccugaguuuc

SEQ ID NO: 1622 - RNA, 21 nt, Glycine max
  GMmerge_3343566
cgcuacccauccugaguuuca

SEQ ID NO: 1623 - RNA, 21 nt, Glycine max
  GMmerge_6019717
cuuuggaaauguuguagcuca

SEQ ID NO: 1624 - RNA, 21 nt, Glycine max
  GMmerge_1163481
cuucuucagcagaacuuguuu

SEQ ID NO: 1625 - RNA, 22 nt, Glycine max
  GMmerge_100427
cuucgaauuucagguaugggug

SEQ ID NO: 1626 - RNA, 22 nt, Glycine max
  GMmerge_10303697
cgauggugguuaugacggugau

SEQ ID NO: 1627 - RNA, 21 nt, Glycine max
  GMmerge_4921933
cgauacagacaccagacacga

SEQ ID NO: 1628 - RNA, 21 nt, Glycine max
  GMmerge_5019988
cucucccucaagggcuucucg

SEQ ID NO: 1629 - RNA, 21 nt, Glycine max
  GMmerge_10145298
cuacaacuugcaaauacugaa

SEQ ID NO: 1630 - RNA, 21 nt, Glycine max
  GMmerge_3620280
cgaccuggccuacauaaagcc

SEQ ID NO: 1631 - RNA, 22 nt, Glycine max
  GMmerge_10834248
cgaccaucguagaaugauaggc

SEQ ID NO: 1632 - RNA, 22 nt, Glycine max
  GMmerge_9783235
cgacauccaaucagaacaugac

SEQ ID NO: 1633 - RNA, 20 nt, Glycine max
  GMmerge_5028736
cguaugaggagccaagcaua

SEQ ID NO: 1634 - RNA, 22 nt, Glycine max
  GMmerge_3515714
cgacaaauuaguuacaauaauu

SEQ ID NO: 1635 - RNA, 21 nt, Glycine max
  GMmerge_3325436
cgaaucuaccaaaaucaauuc

SEQ ID NO: 1636 - RNA, 21 nt, Glycine max
  GMmerge_604232
cgaaucggacuuccucaucga

SEQ ID NO: 1637 - RNA, 22 nt, Glycine max
  GMmerge_10368059
cgggucggguacggguauuguc

SEQ ID NO: 1638 - RNA, 21 nt, Glycine max
  GMmerge_3494516
cgaacggauccuaacuuacga

SEQ ID NO: 1639 - RNA, 22 nt, Glycine max
  GMmerge_5549870
cgaacccgaacccauacccgau

SEQ ID NO: 1640 - RNA, 21 nt, Glycine max
  GMmerge_2789234
cgaacauucguucggugaugu

SEQ ID NO: 1641 - RNA, 22 nt, Glycine max
  GMmerge_11098141
ccuuuugacaguauugaagaag

SEQ ID NO: 1642 - RNA, 22 nt, Glycine max
  GMmerge_9008635
ccuuggucauaauauauaucaa

SEQ ID NO: 1643 - RNA, 20 nt, Glycine max
  GMmerge_8714586
ccuugaucagagaaucaaac

SEQ ID NO: 1644 - RNA, 20 nt, Glycine max
  GMmerge_7539513
ccuugaauuguccacuggca

SEQ ID NO: 1645 - RNA, 22 nt, Glycine max
  GMmerge_5000851
ccuugaagucaugaucucagau

SEQ ID NO: 1646 - RNA, 21 nt, Glycine max
  GMmerge_7109369
ccuucguaacagucaacgucu

SEQ ID NO: 1647 - RNA, 21 nt, Glycine max
  GMmerge_5059834
ccuucccggcgcuggacaagc

SEQ ID NO: 1648 - RNA, 21 nt, Glycine max
  GMmerge_880413
ccugaucaagguugggagaaa

SEQ ID NO: 1649 - RNA, 22 nt, Glycine max
  GMmerge_4169657
ccucuuugguuuaugcuuuugu

SEQ ID NO: 1650 - RNA, 21 nt, Glycine max
  GMmerge_3000549
ccucugaagauggagucauuc

SEQ ID NO: 1651 - RNA, 21 nt, Glycine max
  GMmerge_9291082
ccuuaggaggcauuaccacuu

SEQ ID NO: 1652 - RNA, 21 nt, Glycine max
  GMmerge_501960
ccuaauguuauuacuuaucau

SEQ ID NO: 1653 - RNA, 21 nt, Glycine max
  GMmerge_3024188
ccugcuaauccggagacaucu

SEQ ID NO: 1654 - RNA, 22 nt, Glycine max
  GMmerge_8808047
ccuccuacucauucugaaugcc

SEQ ID NO: 1655 - RNA, 21 nt, Glycine max
  GMmerge_10373672
ccguagaaguuuggugcaagu

SEQ ID NO: 1656 - RNA, 22 nt, Glycine max
  GMmerge_5545044
ccguaaaagacuuacagaucaa

SEQ ID NO: 1657 - RNA, 21 nt, Glycine max
  GMmerge_1503167
ccggugcuaucugugguacug

SEQ ID NO: 1658 - RNA, 21 nt, Glycine max
  GMmerge_4409718
ccgggacuuuaauggcuacaa

SEQ ID NO: 1659 - RNA, 21 nt, Glycine max
  GMmerge_8619719
ccgaagaugauuguuuuggua

SEQ ID NO: 1660 - RNA, 22 nt, Glycine max
  GMmerge_9166796
cccaaaaugcauguggcaauuc

SEQ ID NO: 1661 - RNA, 21 nt, Glycine max
  GMmerge_5534641
ccaggaaguacuguucaaaca

SEQ ID NO: 1662 - RNA, 22 nt, Glycine max
  GMmerge_1467306
ccggaaaagcaaaagcccaugg

SEQ ID NO: 1663 - RNA, 22 nt, Glycine max
  GMmerge_7040556
ccaacggccuuucguaaaccua

SEQ ID NO: 1664 - RNA, 21 nt, Glycine max
  GMmerge_3651153
ccaacaagugagaaaaugaau

SEQ ID NO: 1665 - RNA, 22 nt, Glycine max
  GMmerge_2784933
ccaaaugaccaaaagauacguu

SEQ ID NO: 1666 - RNA, 22 nt, Glycine max
  GMmerge_1743128
ccaaaaacaaauuuuucaaugu

SEQ ID NO: 1667 - RNA, 21 nt, Glycine max
  GMmerge_6881006
ccgacacggacaucggacacg

SEQ ID NO: 1668 - RNA, 22 nt, Glycine max
  GMmerge_9780759
caugcacugccucuucccuggc

SEQ ID NO: 1669 - RNA, 22 nt, Glycine max
  GMmerge_1372884
cccuuaaaaaccgguucauaag

SEQ ID NO: 1670 - RNA, 22 nt, Glycine max
  GMmerge_5045008
cauacuguacaagguuucagau

SEQ ID NO: 1671 - RNA, 22 nt, Glycine max
  GMmerge_8259763
cagcuauauaauauuuuaguua

SEQ ID NO: 1672 - RNA, 22 nt, Glycine max
  GMmerge_10310346
ccccagguggaauuacugcaga

SEQ ID NO: 1673 - RNA, 22 nt, Glycine max
  GMmerge_3895012
cccauuuguagagagaagcgac

SEQ ID NO: 1674 - RNA, 22 nt, Glycine max
  GMmerge_11193479
cagaagaaguuggugaacaaua

SEQ ID NO: 1675 - RNA, 22 nt, Glycine max
  GMmerge_7472577
ccauuuguaaaacauugaaaaa

SEQ ID NO: 1676 - RNA, 22 nt, Glycine max
  GMmerge_6861859
cacuuaauugacgguacagacu

SEQ ID NO: 1677 - RNA, 22 nt, Glycine max
  GMmerge_5024692
ccauucgucugucaacaccccg

SEQ ID NO: 1678 - RNA, 22 nt, Glycine max
  GMmerge_10595095
ccauguagucggaguuaaaacu

SEQ ID NO: 1679 - RNA, 22 nt, Glycine max
  GMmerge_7644378
ccauccuuguggaaagauaggu

SEQ ID NO: 1680 - RNA, 21 nt, Glycine max
  GMmerge_5153080
ccauccugaagacaagaacuu

SEQ ID NO: 1681 - RNA, 21 nt, Glycine max
  GMmerge_2409459
ccauauucuuugaagcaacaa

SEQ ID NO: 1682 - RNA, 21 nt, Glycine max
  GMmerge_9486773
ccauagacaucguagaaaauc

SEQ ID NO: 1683 - RNA, 22 nt, Glycine max
  GMmerge_5132104
ccauacccgucggguacccguu

SEQ ID NO: 1684 - RNA, 22 nt, Glycine max
  GMmerge_829510
ccaggacgaaucgacggcuuuu

SEQ ID NO: 1685 - RNA, 21 nt, Glycine max
  GMmerge_4584007
caauaugaauggaacgugaug

SEQ ID NO: 1686 - RNA, 21 nt, Glycine max
  GMmerge_6111259
ccagagauaugcccuugauac

SEQ ID NO: 1687 - RNA, 22 nt, Glycine max
  GMmerge_5264205
caaguagaagaaacugauguga

SEQ ID NO: 1688 - RNA, 21 nt, Glycine max
  GMmerge_4385647
caagggugauuugccggcaca

SEQ ID NO: 1689 - RNA, 20 nt, Glycine max
  GMmerge_5612724
ccagaauuccucaaagcagc

SEQ ID NO: 1690 - RNA, 19 nt, Glycine max
  GMmerge_4848542
ccagaacugucucgguaaa

SEQ ID NO: 1691 - RNA, 22 nt, Glycine max
  GMmerge_11119329
ccagaacugucaucgcugcuca

SEQ ID NO: 1692 - RNA, 22 nt, Glycine max
  GMmerge_9342681
ccacguggcacuaaaauugacu

SEQ ID NO: 1693 - RNA, 22 nt, Glycine max
  GMmerge_5129041
caagcaucaacauaaucccaau

SEQ ID NO: 1694 - RNA, 21 nt, Glycine max
  GMmerge_9991600
ccaaguccuuuucuuucuuau

SEQ ID NO: 1695 - RNA, 21 nt, Glycine max
  GMmerge_5844969
ccaaguaacuuauggguccag

SEQ ID NO: 1696 - RNA, 21 nt, Glycine max
  GMmerge_10862908
caaauccagauugcaaggaga

SEQ ID NO: 1697 - RNA, 21 nt, Glycine max
  GMmerge_2455055
ccaaggaauucacagaauaca

SEQ ID NO: 1698 - RNA, 21 nt, Glycine max
  GMmerge_10309196
ccaagcuuuaaauaucaauca

SEQ ID NO: 1699 - RNA, 22 nt, Glycine max
  GMmerge_10529727
ccaacgucuuugaaaguacgga

SEQ ID NO: 1700 - RNA, 21 nt, Glycine max
  GMmerge_8314129
ccaacggucauauuucuaacg

SEQ ID NO: 1701 - RNA, 22 nt, Glycine max
  GMmerge_4200238
caaaaaugacaugacaauauac

SEQ ID NO: 1702 - RNA, 22 nt, Glycine max
  GMmerge_5721801
cauuuuuguauagguauucauu

SEQ ID NO: 1703 - RNA, 22 nt, Glycine max
  GMmerge_4258374
cauuugugaauucguguuuaug

SEQ ID NO: 1704 - RNA, 22 nt, Glycine max
  GMmerge_2908859
cauuugggcgaccgcuaccauc

SEQ ID NO: 1705 - RNA, 22 nt, Glycine max
  GMmerge_6747834
auuucaagaccaacacaauuua

SEQ ID NO: 1706 - RNA, 22 nt, Glycine max
  GMmerge_1136431
cauuguaguccuccaaguauug

SEQ ID NO: 1707 - RNA, 21 nt, Glycine max
  GMmerge_3949111
cauuggggccaacagcugaaa

SEQ ID NO: 1708 - RNA, 22 nt, Glycine max
  GMmerge_7046320
cauuggaucacgaacaugcugu

SEQ ID NO: 1709 - RNA, 21 nt, Glycine max
  GMmerge_2297973
cauugaggaccacauaaguug

SEQ ID NO: 1710 - RNA, 22 nt, Glycine max
  GMmerge_3593056
cauucuaagauggucacgugug

SEQ ID NO: 1711 - RNA, 21 nt, Glycine max
  GMmerge_6324566
cauucgucugucaacaccccg

SEQ ID NO: 1712 - RNA, 21 nt, Glycine max
  GMmerge_935567
caugugucauguucugauugg

SEQ ID NO: 1713 - RNA, 21 nt, Glycine max
  GMmerge_8705418
caugugcacaccaucaucaga

SEQ ID NO: 1714 - RNA, 20 nt, Glycine max
  GMmerge_3349308
caugugaucgucaccaucca

SEQ ID NO: 1715 - RNA, 21 nt, Glycine max
  GMmerge_6418822
cauggacagcaucaugugaug

SEQ ID NO: 1716 - RNA, 22 nt, Glycine max
  GMmerge_10228756
caugcuaaguauucagaaaauu

SEQ ID NO: 1717 - RNA, 21 nt, Glycine max
  GMmerge_6661717
caugacauggcaaaacuggaa

SEQ ID NO: 1718 - RNA, 22 nt, Glycine max
  GMmerge_5385644
caugaagauuucaaacaucuau

SEQ ID NO: 1719 - RNA, 21 nt, Glycine max
  GMmerge_8661814
caucuuaaagaaaacaugaac

SEQ ID NO: 1720 - RNA, 21 nt, Glycine max
  GMmerge_9132811
caucugaaagaaguuguucuu

SEQ ID NO: 1721 - RNA, 22 nt, Glycine max
  GMmerge_258566
caucucaagagaugcuuugcuu

SEQ ID NO: 1722 - RNA, 20 nt, Glycine max
  GMmerge_6053230
caucuaauaagaacgugaca

SEQ ID NO: 1723 - RNA, 22 nt, Glycine max
  GMmerge_10305690
caucgguuagagauagugucaa

SEQ ID NO: 1724 - RNA, 21 nt, Glycine max
  GMmerge_4420470
cauccauuaaaaaauaucuaa

SEQ ID NO: 1725 - RNA, 22 nt, Glycine max
  GMmerge_10264338
augccaccauaaccuaugucug

SEQ ID NO: 1726 - RNA, 21 nt, Glycine max
  GMmerge_6580027
cauccaaucagaacaugacac

SEQ ID NO: 1727 - RNA, 22 nt, Glycine max
  GMmerge_6903858
cauccaaucagaacaugacaca

SEQ ID NO: 1728 - RNA, 22 nt, Glycine max
  GMmerge_10776713
caucaucuucacuaaaaucaug

SEQ ID NO: 1729 - RNA, 22 nt, Glycine max
  GMmerge_5268986
caucaccuuuaggaucuggauu

SEQ ID NO: 1730 - RNA, 21 nt, Glycine max
  GMmerge_4675748
caucaccacaaacaagucacc

SEQ ID NO: 1731 - RNA, 22 nt, Glycine max
  GMmerge_9743220
caucaaagcuuaguuuaaguau

SEQ ID NO: 1732 - RNA, 20 nt, Glycine max
  GMmerge_9992889
cauacggcggugaauucguu

SEQ ID NO: 1733 - RNA, 21 nt, Glycine max
  GMmerge_4464755
cauacggcggugaauucguuc

SEQ ID NO: 1734 - RNA, 21 nt, Glycine max
  GMmerge_5919775
aucuugccaaaucguugagaa

SEQ ID NO: 1735 - RNA, 21 nt, Glycine max
  GMmerge_3846820
caguugugggauggucaaugu

SEQ ID NO: 1736 - RNA, 21 nt, Glycine max
  GMmerge_2318776
cagugacuuacaauucucuua

SEQ ID NO: 1737 - RNA, 22 nt, Glycine max
  GMmerge_5775003
cagguuggacucgucagucaaa

SEQ ID NO: 1738 - RNA, 22 nt, Glycine max
  GMmerge_8575040
cagggaauucugauguguaugg

SEQ ID NO: 1739 - RNA, 22 nt, Glycine max
  GMmerge_10528672
caggcuaggcuuuuaaaaaggu

SEQ ID NO: 1740 - RNA, 22 nt, Glycine max
  GMmerge_4221628
caggccuagaucguuuguacag

SEQ ID NO: 1741 - RNA, 21 nt, Glycine max
  GMmerge_10698909
caggccgagucaaaauaaaag

SEQ ID NO: 1742 - RNA, 22 nt, Glycine max
  GMmerge_3239851
caggauugcucuggaaccaguu

SEQ ID NO: 1743 - RNA, 22 nt, Glycine max
  GMmerge_2264555
auaugguguugauguuaauaau

SEQ ID NO: 1744 - RNA, 22 nt, Glycine max
  GMmerge_6049109
auaucucugguaucagagccug

SEQ ID NO: 1745 - RNA, 21 nt, Glycine max
  GMmerge_2148538
cagcuaauuugucugguucac

SEQ ID NO: 1746 - RNA, 22 nt, Glycine max
  GMmerge_1018770
cagcggauguagcagcggauca

SEQ ID NO: 1747 - RNA, 21 nt, Glycine max
  GMmerge_8967427
cagcagcaucaagauucacac

SEQ ID NO: 1748 - RNA, 21 nt, Glycine max
  GMmerge_356116
auacggaucaaguugaugcau

SEQ ID NO: 1749 - RNA, 22 nt, Glycine max
  GMmerge_2795094
cagcaacgucuuugaaaguagg

SEQ ID NO: 1750 - RNA, 21 nt, Glycine max
  GMmerge_8661472
cagauaccgaagaugauuguu

SEQ ID NO: 1751 - RNA, 21 nt, Glycine max
  GMmerge_7933406
cagaguucaaaaugagauguu

SEQ ID NO: 1752 - RNA, 22 nt, Glycine max
  GMmerge_722823
auacaagaauggaaaucugcua

SEQ ID NO: 1753 - RNA, 21 nt, Glycine max
  GMmerge_6336869
cagagguguauggagugagag

SEQ ID NO: 1754 - RNA, 21 nt, Glycine max
  GMmerge_7262054
auaauugcaucucuuugauag

SEQ ID NO: 1755 - RNA, 21 nt, Glycine max
  GMmerge_3853852
auaagguuaugaaucucuuua

SEQ ID NO: 1756 - RNA, 21 nt, Glycine max
  GMmerge_8873614
cagagaggaaaaaguuuguaa

SEQ ID NO: 1757 - RNA, 21 nt, Glycine max
  GMmerge_6218854
cagacaagcugaaacaaaggc

SEQ ID NO: 1758 - RNA, 22 nt, Glycine max
  GMmerge_6769013
cagaagauagccauuuggauua

SEQ ID NO: 1759 - RNA, 22 nt, Glycine max
  GMmerge_5946638
cagaacugaauuaagcucuccu

SEQ ID NO: 1760 - RNA, 21 nt, Glycine max
  GMmerge_10723300
cagaacaugacacgugacaau

SEQ ID NO: 1761 - RNA, 22 nt, Glycine max
  GMmerge_6086907
cagaaauaggaaacaggaaaau

SEQ ID NO: 1762 - RNA, 22 nt, Glycine max
  GMmerge_8622376
cacuguugauugcuaccguaca

SEQ ID NO: 1763 - RNA, 22 nt, Glycine max
  GMmerge_2228093
caccuaguacuaguccucauag

SEQ ID NO: 1764 - RNA, 21 nt, Glycine max
  GMmerge_3839516
caccggacacgacacggauac

SEQ ID NO: 1765 - RNA, 22 nt, Glycine max
  GMmerge_4039591
caccgacacugacacggacacc

SEQ ID NO: 1766 - RNA, 22 nt, Glycine max
  GMmerge_4928426
caccaccgucgucgccaccaac

SEQ ID NO: 1767 - RNA, 22 nt, Glycine max
  GMmerge_3778741
cacauuuugauuggacgaugau

SEQ ID NO: 1768 - RNA, 22 nt, Glycine max
  GMmerge_8962489
cacaucagaguuacgaacaaag

SEQ ID NO: 1769 - RNA, 21 nt, Glycine max
  GMmerge_4337241
cacaguccauucagagaucug

SEQ ID NO: 1770 - RNA, 21 nt, Glycine max
  GMmerge_1982733
caauguuugaacagugagaca

SEQ ID NO: 1771 - RNA, 21 nt, Glycine max
  GMmerge_5543006
caaugucaagaaaagcaauau

SEQ ID NO: 1772 - RNA, 21 nt, Glycine max
  GMmerge_9555227
caaugggacaggcgagaccug

SEQ ID NO: 1773 - RNA, 22 nt, Glycine max
  GMmerge_2439300
caaucuuuuuaaguuucgucuu

SEQ ID NO: 1774 - RNA, 20 nt, Glycine max
  GMmerge_846080
caaucucuucgaugaggaag

SEQ ID NO: 1775 - RNA, 22 nt, Glycine max
  GMmerge_5997102
caauauuguuuaaauaggggac

SEQ ID NO: 1776 - RNA, 21 nt, Glycine max
  GMmerge_2111560
caauaugaguggaauguaaug

SEQ ID NO: 1777 - RNA, 22 nt, Glycine max
  GMmerge_7270111
caauaauuauauccugcagggu

SEQ ID NO: 1778 - RNA, 20 nt, Glycine max
  GMmerge_9008380
caauaaauuggaaugauuca

SEQ ID NO: 1779 - RNA, 21 nt, Glycine max
  GMmerge_5099748
caaguugauccguaagucuuu

SEQ ID NO: 1780 - RNA, 21 nt, Glycine max
  GMmerge_6439778
caaguauagaucuaagauuua

SEQ ID NO: 1781 - RNA, 20 nt, Glycine max
  GMmerge_10593080
caagguugggagaaaugagg

SEQ ID NO: 1782 - RNA, 20 nt, Glycine max
  GMmerge_10525087
caaggucaaaugauacugaa

SEQ ID NO: 1783 - RNA, 21 nt, Glycine max
  GMmerge_7332049
caaggcaaaucaaaauauagg

SEQ ID NO: 1784 - RNA, 22 nt, Glycine max
  GMmerge_8540688
caaggauuugcuugauaaaggc

SEQ ID NO: 1785 - RNA, 22 nt, Glycine max
  GMmerge_1145087
caaggaugcaaaugaagaagag

SEQ ID NO: 1786 - RNA, 21 nt, Glycine max
  GMmerge_294005
caaggagaagaugagucuaaa

SEQ ID NO: 1787 - RNA, 22 nt, Glycine max
  GMmerge_3414358
agcauuacaauggauuagauau

SEQ ID NO: 1788 - RNA, 20 nt, Glycine max
  GMmerge_2633786
caagaacugguuccagagca

SEQ ID NO: 1789 - RNA, 22 nt, Glycine max
  GMmerge_10496907
caacuugauccguaagucuuaa

SEQ ID NO: 1790 - RNA, 21 nt, Glycine max
  GMmerge_3562154
caacuugauccguaagcuuuu

SEQ ID NO: 1791 - RNA, 22 nt, Glycine max
  GMmerge_6559648
caacuuacgaaucaacuugauc

SEQ ID NO: 1792 - RNA, 22 nt, Glycine max
  GMmerge_6856170
caacuguuaugucagcguugcc

SEQ ID NO: 1793 - RNA, 21 nt, Glycine max
  GMmerge_5644562
caacucaaguauuuacgccau

SEQ ID NO: 1794 - RNA, 21 nt, Glycine max
  GMmerge_258765
caacggccuuucguaaaccua

SEQ ID NO: 1795 - RNA, 22 nt, Glycine max
  GMmerge_6069522
caaccacugaauaucuauuggc

SEQ ID NO: 1796 - RNA, 21 nt, Glycine max
  GMmerge_2707577
caacacugucacagacaucgg

SEQ ID NO: 1797 - RNA, 22 nt, Glycine max
  GMmerge_10746305
caacaccuugagugagacucau

SEQ ID NO: 1798 - RNA, 21 nt, Glycine max
  GMmerge_7937738
caacaaccuccauucgucugu

SEQ ID NO: 1799 - RNA, 22 nt, Glycine max
  GMmerge_3906255
caaauuuuggccauugacaaua

SEQ ID NO: 1800 - RNA, 22 nt, Glycine max
  GMmerge_5931216
caaauucagugucuaucaagca

SEQ ID NO: 1801 - RNA, 22 nt, Glycine max
  GMmerge_7011689
caaaugcacugagaagauaugg

SEQ ID NO: 1802 - RNA, 22 nt, Glycine max
  GMmerge_8753421
agacauggaguagaugauguuu

SEQ ID NO: 1803 - RNA, 20 nt, Glycine max
  GMmerge_721752
caaauaacaacuaagaaguc

SEQ ID NO: 1804 - RNA, 22 nt, Glycine max
  GMmerge_117723
caaagauaaggacuauuuugaa

SEQ ID NO: 1805 - RNA, 22 nt, Glycine max
  GMmerge_4359994
agaagauccaugacagugcaaa

SEQ ID NO: 1806 - RNA, 22 nt, Glycine max
  GMmerge_6375136
caaacacaaguagaaguaguug

SEQ ID NO: 1807 - RNA, 21 nt, Glycine max
  GMmerge_8428801
caaaauugaucagaauucuag

SEQ ID NO: 1808 - RNA, 22 nt, Glycine max
  GMmerge_550796
caaaauagguacaaucucaggg

SEQ ID NO: 1809 - RNA, 20 nt, Glycine max
  GMmerge_10616384
caaaaguuuuuggaucagcu

SEQ ID NO: 1810 - RNA, 21 nt, Glycine max
  GMmerge_2548469
agaaccgucguaguaugucua

SEQ ID NO: 1811 - RNA, 21 nt, Glycine max
  GMmerge_387443
caaaagaauucaaacgguuag

SEQ ID NO: 1812 - RNA, 22 nt, Glycine max
  GMmerge_4011315
caaaacgaagaugauuguuuug

SEQ ID NO: 1813 - RNA, 22 nt, Glycine max
  GMmerge_11092753
caaaacagccaccaauacuaaa

SEQ ID NO: 1814 - RNA, 22 nt, Glycine max
  GMmerge_4762734
auuuuaaacuaggaucaacuca

SEQ ID NO: 1815 - RNA, 21 nt, Glycine max
  GMmerge_808644
auuugcuauuagaaugucaua

SEQ ID NO: 1816 - RNA, 22 nt, Glycine max
  GMmerge_5808831
auuugauccgguagguuauacc

SEQ ID NO: 1817 - RNA, 21 nt, Glycine max
  GMmerge_7568322
auuugacccugcaggauauaa

SEQ ID NO: 1818 - RNA, 22 nt, Glycine max
  GMmerge_10126163
acuaccggucuuaugaaagaau

SEQ ID NO: 1819 - RNA, 21 nt, Glycine max
  GMmerge_10144790
acuaacggcguuacuuuaaaa

SEQ ID NO: 1820 - RNA, 22 nt, Glycine max
  GMmerge_1236562
auuucuggagauugguuuagua

SEQ ID NO: 1821 - RNA, 22 nt, Glycine max
  GMmerge_315305
auuucagcauacaaauaucaca

SEQ ID NO: 1822 - RNA, 21 nt, Glycine max
  GMmerge_5964407
auuuaggaguauauguuauaa

SEQ ID NO: 1823 - RNA, 21 nt, Glycine max
  GMmerge_3772224
auuuaggaguauauaaucuaa

SEQ ID NO: 1824 - RNA, 21 nt, Glycine max
  GMmerge_1374952
auugucauccacuagaucuuc

SEQ ID NO: 1825 - RNA, 22 nt, Glycine max
  GMmerge_4731819
auuggugcuggcgggacgugcc

SEQ ID NO: 1826 - RNA, 22 nt, Glycine max
  GMmerge_3385416
auuggucuggcuuuugugggaa

SEQ ID NO: 1827 - RNA, 22 nt, Glycine max
  GMmerge_5634355
auuggucuggcuuuggugggaa

SEQ ID NO: 1828 - RNA, 21 nt, Glycine max
  GMmerge_3139498
auugguccccuagguccucgu

SEQ ID NO: 1829 - RNA, 22 nt, Glycine max
  GMmerge_9558386
auugcugaugauuggaaauuug

SEQ ID NO: 1830 - RNA, 22 nt, Glycine max
  GMmerge_8147901
auugccguucaaacuauuuuau

SEQ ID NO: 1831 - RNA, 21 nt, Glycine max
  GMmerge_6223882
auugauguguaugaugggaau

SEQ ID NO: 1832 - RNA, 21 nt, Glycine max
  GMmerge_4958196
auugaucaaagucccauaacu

SEQ ID NO: 1833 - RNA, 21 nt, Glycine max
  GMmerge_6087057
auugagcaaaucguuguugaa

SEQ ID NO: 1834 - RNA, 21 nt, Glycine max
  GMmerge_7526577
acauacuacgacgguucuuuu

SEQ ID NO: 1835 - RNA, 22 nt, Glycine max
  GMmerge_8670277
auugaaguauuguucaccaacu

SEQ ID NO: 1836 - RNA, 22 nt, Glycine max
  GMmerge_2471590
auucuuggagagauuaauugca

SEQ ID NO: 1837 - RNA, 22 nt, Glycine max
  GMmerge_7616964
auucugucaguaggauaacaau

SEQ ID NO: 1838 - RNA, 21 nt, Glycine max
  GMmerge_1936500
auucgaccuccccucgagcau

SEQ ID NO: 1839 - RNA, 20 nt, Glycine max
  GMmerge_9699978
auucaauuuaugaacauagc

SEQ ID NO: 1840 - RNA, 22 nt, Glycine max
  GMmerge_2064636
auuaguuacaauaccauauucc

SEQ ID NO: 1841 - RNA, 19 nt, Glycine max
  GMmerge_4030661
auuaguggagaaucuugga

SEQ ID NO: 1842 - RNA, 21 nt, Glycine max
  GMmerge_3266736
auuagagggugacuccgauug

SEQ ID NO: 1843 - RNA, 22 nt, Glycine max
  GMmerge_848802
auuacaaaccauuaaaucaagc

SEQ ID NO: 1844 - RNA, 21 nt, Glycine max
  GMmerge_6761944
auuaauuauacaagauauuua

SEQ ID NO: 1845 - RNA, 21 nt, Glycine max
  GMmerge_6774689
aauggcguaugaggagucaug

SEQ ID NO: 1846 - RNA, 21 nt, Glycine max
  GMmerge_3988729
auuaaucuuguuguggauggc

SEQ ID NO: 1847 - RNA, 22 nt, Glycine max
  GMmerge_9821929
auuaaauaaccauggcgguaac

SEQ ID NO: 1848 - RNA, 22 nt, Glycine max
  GMmerge_7186916
auguuguucccucugaagaugg

SEQ ID NO: 1849 - RNA, 22 nt, Glycine max
  GMmerge_10287487
auguugguggugacgauggugg

SEQ ID NO: 1850 - RNA, 21 nt, Glycine max
  GMmerge_2404532
auguuggcauaaauguacgca

SEQ ID NO: 1851 - RNA, 22 nt, Glycine max
  GMmerge_7260081
auguugauccguacgaacacac

SEQ ID NO: 1852 - RNA, 22 nt, Glycine max
  GMmerge_2882036
auguguucucaggucgccccug

SEQ ID NO: 1853 - RNA, 22 nt, Glycine max
  GMmerge_1068327
augugacuccuguuugcacuaa

SEQ ID NO: 1854 - RNA, 21 nt, Glycine max
  GMmerge_5984203
auggugucugguucgagacca

SEQ ID NO: 1855 - RNA, 22 nt, Glycine max
  GMmerge_8344455
augggaagauacaaacauuuua

SEQ ID NO: 1856 - RNA, 22 nt, Glycine max
  GMmerge_9655086
auggcaauacagauauggaaaa

SEQ ID NO: 1857 - RNA, 20 nt, Glycine max
  GMmerge_7528498
augcuuggacuugguaaaca

SEQ ID NO: 1858 - RNA, 22 nt, Glycine max
  GMmerge_7884135
augcauguggcaauucagaaca

SEQ ID NO: 1859 - RNA, 22 nt, Glycine max
  GMmerge_3281193
augcauguggcaaaucagaaca

SEQ ID NO: 1860 - RNA, 22 nt, Glycine max
  GMmerge_3902941
augauuagcauucuacaucggu

SEQ ID NO: 1861 - RNA, 21 nt, Glycine max
  GMmerge_4785830
augaugauugucgcgugucac

SEQ ID NO: 1862 - RNA, 21 nt, Glycine max
  GMmerge_3764116
augaugacugucacgugucau

SEQ ID NO: 1863 - RNA, 21 nt, Glycine max
  GMmerge_6540170
augagguuugauccaagauca

SEQ ID NO: 1864 - RNA, 22 nt, Glycine max
  GMmerge_9282319
augacuggaacauuccagaaau

SEQ ID NO: 1865 - RNA, 21 nt, Glycine max
  GMmerge_5110813
aaccuuguuguggauggcuga

SEQ ID NO: 1866 - RNA, 22 nt, Glycine max
  GMmerge_1544429
aacauaugcccuuacggacacu

SEQ ID NO: 1867 - RNA, 22 nt, Glycine max
  GMmerge_200843
augacauucgggaauagguugu

SEQ ID NO: 1868 - RNA, 22 nt, Glycine max
  GMmerge_7157449
augacagaucaugacagcaagu

SEQ ID NO: 1869 - RNA, 22 nt, Glycine max
  GMmerge_931632
augacaaggcaaaauuggaaaa

SEQ ID NO: 1870 - RNA, 21 nt, Glycine max
  GMmerge_10361480
augaauuaugauuaugauuga

SEQ ID NO: 1871 - RNA, 21 nt, Glycine max
  GMmerge_309546
augaaggagcaggcagacacu

SEQ ID NO: 1872 - RNA, 22 nt, Glycine max
  GMmerge_6492547
augaagcuucucaaggaaguca

SEQ ID NO: 1873 - RNA, 22 nt, Glycine max
  GMmerge_311923
augaaacuugaauucugggaua

SEQ ID NO: 1874 - RNA, 22 nt, Glycine max
  GMmerge_1953927
augaaaaucauucauuaugaua

SEQ ID NO: 1875 - RNA, 21 nt, Glycine max
  GMmerge_5481982
aucuuuugauuuuguagugac

SEQ ID NO: 1876 - RNA, 22 nt, Glycine max
  GMmerge_5349909
aucuguaaguugauccguaagu

SEQ ID NO: 1877 - RNA, 22 nt, Glycine max
  GMmerge_2784191
aucugacacguggcagucaaca

SEQ ID NO: 1878 - RNA, 22 nt, Glycine max
  GMmerge_1745034
aucuauuucagguuggaagaug

SEQ ID NO: 1879 - RNA, 22 nt, Glycine max
  GMmerge_1247766
aaagaauauggacuuauauugc

SEQ ID NO: 1880 - RNA, 22 nt, Glycine max
  GMmerge_4869522
auccucucaugugacuccuguu

SEQ ID NO: 1881 - RNA, 22 nt, Glycine max
  GMmerge_2833935
aaaacaugcauacuuucuuuau

SEQ ID NO: 1882 - RNA, 21 nt, Glycine max
  GMmerge_152889
aaaaauacaagaagaaccaaa

SEQ ID NO: 1883 - RNA, 22 nt, Glycine max
  GMmerge_3646358
aucauuaacuuacuugacauau

SEQ ID NO: 1884 - RNA, 22 nt, Glycine max
  GMmerge_4379449
uuuuuugaguaagcaauugaag

SEQ ID NO: 1885 - RNA, 22 nt, Glycine max
  GMmerge_2308482
aucaucuucguuuugguaaaaa

SEQ ID NO: 1886 - RNA, 21 nt, Glycine max
  GMmerge_2096442
aucaucuagaaucaaaagaac

SEQ ID NO: 1887 - RNA, 21 nt, Glycine max
  GMmerge_10534730
uuuuuacaauggugggacuuc

SEQ ID NO: 1888 - RNA, 20 nt, Glycine max
  GMmerge_2762932
aucagacuuuuggcuguuga

SEQ ID NO: 1889 - RNA, 22 nt, Glycine max
  GMmerge_6009582
aucagaauucuaguguaucagg

SEQ ID NO: 1890 - RNA, 22 nt, Glycine max
  GMmerge_2206638
aucaaguuacaaaucaaguuga

SEQ ID NO: 1891 - RNA, 21 nt, Glycine max
  GMmerge_6783492
aucaaguagagaaaaguauuu

SEQ ID NO: 1892 - RNA, 22 nt, Glycine max
  GMmerge_4910311
aucaacuugauccguaagaggc

SEQ ID NO: 1893 - RNA, 22 nt, Glycine max
  GMmerge_7634097
aucaacauacggaucaacuuga

SEQ ID NO: 1894 - RNA, 21 nt, Glycine max
  GMmerge_5541913
auauuuucgguuggcuauaag

SEQ ID NO: 1895 - RNA, 22 nt, Glycine max
  GMmerge_6060555
uuugugucguugguucaucaau

SEQ ID NO: 1896 - RNA, 22 nt, Glycine max
  GMmerge_9143097
auauuguuugauagcauauucc

SEQ ID NO: 1897 - RNA, 21 nt, Glycine max
  GMmerge_108354
auauugucaagccauuacaug

SEQ ID NO: 1898 - RNA, 22 nt, Glycine max
  GMmerge_5075781
auauucaauugcaaucucuuuu

SEQ ID NO: 1899 - RNA, 22 nt, Glycine max
  GMmerge_4991946
auauuaaucaugagugcuugaa

SEQ ID NO: 1900 - RNA, 22 nt, Glycine max
  GMmerge_6712464
auaugggagagggaggaaauug

SEQ ID NO: 1901 - RNA, 22 nt, Glycine max
  GMmerge_7201439
auaugcauuuuacgacggucuu

SEQ ID NO: 1902 - RNA, 22 nt, Glycine max
  GMmerge_3969124
auaucuaucgucuagaaaugac

SEQ ID NO: 1903 - RNA, 22 nt, Glycine max
  GMmerge_3719682
auaucauucaacuaaaauauca

SEQ ID NO: 1904 - RNA, 22 nt, Glycine max
  GMmerge_9858796
auaucauaagaauaauaaauaa

SEQ ID NO: 1905 - RNA, 22 nt, Glycine max
  GMmerge_6528938
auaucaauuaagggcuugauga

SEQ ID NO: 1906 - RNA, 21 nt, Glycine max
  GMmerge_11004634
uuugaagcuucaauggacaac

SEQ ID NO: 1907 - RNA, 22 nt, Glycine max
  GMmerge_6210487
auauaaacaaauucuuacuauu

SEQ ID NO: 1908 - RNA, 22 nt, Glycine max
  GMmerge_7263548
auaguuugaacggaaauccuau

SEQ ID NO: 1909 - RNA, 22 nt, Glycine max
  GMmerge_8336300
ugcacugccucuucccuggcuu

SEQ ID NO: 1910 - RNA, 21 nt, Glycine max
  GMmerge_1366467
uuucgggcaaguuguuuuugg

SEQ ID NO: 1911 - RNA, 21 nt, Glycine max
  GMmerge_3859634
auagggguaguuaucauucua

SEQ ID NO: 1912 - RNA, 21 nt, Glycine max
  GMmerge_4704515
uuucagaaauaauuaaacuca

SEQ ID NO: 1913 - RNA, 21 nt, Glycine max
  GMmerge_239457
auagccuuugucuuguuuuga

SEQ ID NO: 1914 - RNA, 21 nt, Glycine max
  GMmerge_6874656
auagcaaauucggaacucagu

SEQ ID NO: 1915 - RNA, 22 nt, Glycine max
  GMmerge_9006175
auagaugucguugguuucaaau

SEQ ID NO: 1916 - RNA, 21 nt, Glycine max
  GMmerge_8141545
auagaucgaggcauuaaguug

SEQ ID NO: 1917 - RNA, 21 nt, Glycine max
  GMmerge_4310315
uuuacaaauggaaccagaaua

SEQ ID NO: 1918 - RNA, 22 nt, Glycine max
  GMmerge_8725908
uuuaagcugagauucauaccaa

SEQ ID NO: 1919 - RNA, 21 nt, Glycine max
  GMmerge_8625027
uuuaagacgguuguuagcuaa

SEQ ID NO: 1920 - RNA, 22 nt, Glycine max
  GMmerge_97924
auacuucagcucuuaaugcauc

SEQ ID NO: 1921 - RNA, 22 nt, Glycine max
  GMmerge_1041260
auacguguugcacuguucaaag

SEQ ID NO: 1922 - RNA, 21 nt, Glycine max
  GMmerge_9340789
auaccgagaagggaauauuuu

SEQ ID NO: 1923 - RNA, 21 nt, Glycine max
  GMmerge_11232701
uugguucggacuuaaacaaag

SEQ ID NO: 1924 - RNA, 21 nt, Glycine max
  GMmerge_4970169
uuggcgucccugaguuucaug

SEQ ID NO: 1925 - RNA, 22 nt, Glycine max
  GMmerge_8979316
auaaugaauuguaacagccaau

SEQ ID NO: 1926 - RNA, 21 nt, Glycine max
  GMmerge_9036815
auaaguucaguuaacauaugc

SEQ ID NO: 1927 - RNA, 22 nt, Glycine max
  GMmerge_8884248
auaaguucaggauaauaaggua

SEQ ID NO: 1928 - RNA, 21 nt, Glycine max
  GMmerge_8363344
uuggaaccuauuacuuccaaa

SEQ ID NO: 1929 - RNA, 22 nt, Glycine max
  GMmerge_1298808
auaagacgaucugauguaacau

SEQ ID NO: 1930 - RNA, 22 nt, Glycine max
  GMmerge_10783882
uugauccaguagaauguauuug

SEQ ID NO: 1931 - RNA, 21 nt, Glycine max
  GMmerge_1114984
auaaacgcuucacaagaugug

SEQ ID NO: 1932 - RNA, 21 nt, Glycine max
  GMmerge_7834797
uugagacgagccgaaucaaua

SEQ ID NO: 1933 - RNA, 22 nt, Glycine max
  GMmerge_6498673
aguuuugcuuugucauggauuu

SEQ ID NO: 1934 - RNA, 22 nt, Glycine max
  GMmerge_4068756
aguuuugaccgcaacuuauuug

SEQ ID NO: 1935 - RNA, 20 nt, Glycine max
  GMmerge_6360806
uugaauaguaagaauuuguu

SEQ ID NO: 1936 - RNA, 19 nt, Glycine max
  GMmerge_1698827
aguugccgguaguuuugac

SEQ ID NO: 1937 - RNA, 22 nt, Glycine max
  GMmerge_11225482
aguugauccguaagagacuuac

SEQ ID NO: 1938 - RNA, 21 nt, Glycine max
  GMmerge_7881078
agugucaaagauguggcgaau

SEQ ID NO: 1939 - RNA, 22 nt, Glycine max
  GMmerge_7936724
uucucuugauucuagaugaugu

SEQ ID NO: 1940 - RNA, 22 nt, Glycine max
  GMmerge_9558615
uucucacgucaucacagacauc

SEQ ID NO: 1941 - RNA, 22 nt, Glycine max
  GMmerge_8509768
agugagagcugcuauguugauu

SEQ ID NO: 1942 - RNA, 22 nt, Glycine max
  GMmerge_3329862
uucgcuuggugcaggucgggaa

SEQ ID NO: 1943 - RNA, 22 nt, Glycine max
  GMmerge_10756818
uuccccaaccaaaucuuagaca

SEQ ID NO: 1944 - RNA, 21 nt, Glycine max
  GMmerge_5064000
aguauuagcaaguuguagagu

SEQ ID NO: 1945 - RNA, 21 nt, Glycine max
  GMmerge_2822658
aguagaggggacaauucacau

SEQ ID NO: 1946 - RNA, 22 nt, Glycine max
  GMmerge_9862251
aguacgggugucgugucggugu

SEQ ID NO: 1947 - RNA, 22 nt, Glycine max
  GMmerge_6464427
aguaccgacguugauaguauua

SEQ ID NO: 1948 - RNA, 22 nt, Glycine max
  GMmerge_9883289
agguuaucuugaggcugagcgu

SEQ ID NO: 1949 - RNA, 22 nt, Glycine max
  GMmerge_5030965
uuaugaaucugcaaauacuugg

SEQ ID NO: 1950 - RNA, 21 nt, Glycine max
  GMmerge_158884
uuaguauuuggaugguugagu

SEQ ID NO: 1951 - RNA, 22 nt, Glycine max
  GMmerge_6978939
aggguugcucugaaaccaguuc

SEQ ID NO: 1952 - RNA, 21 nt, Glycine max
  GMmerge_9815206
uuagcaagugauguugacugu

SEQ ID NO: 1953 - RNA, 22 nt, Glycine max
  GMmerge_614726
aggggaguagguuagcaggucc

SEQ ID NO: 1954 - RNA, 22 nt, Glycine max
  GMmerge_4743906
uaucauguaauggcuugacaau

SEQ ID NO: 1955 - RNA, 21 nt, Glycine max
  GMmerge_3823498
agggacuaauuugcaaaagga

SEQ ID NO: 1956 - RNA, 21 nt, Glycine max
  GMmerge_1913863
agggacuaauaugcaauaggg

SEQ ID NO: 1957 - RNA, 21 nt, Glycine max
  GMmerge_8286441
aggcugcuccagaacaaguca

SEQ ID NO: 1958 - RNA, 21 nt, Glycine max
  GMmerge_2124840
uuaaagguagugugguuaaau

SEQ ID NO: 1959 - RNA, 21 nt, Glycine max
  GMmerge_4521945
aggcaaucuggguugaugacc

SEQ ID NO: 1960 - RNA, 21 nt, Glycine max
  GMmerge_10512215
uguguucucaggucaccccuu

SEQ ID NO: 1961 - RNA, 21 nt, Glycine max
  GMmerge_8638318
uguguggucgaagugucucag

SEQ ID NO: 1962 - RNA, 22 nt, Glycine max
  GMmerge_7864824
aggaugacuguuuugguauauc

SEQ ID NO: 1963 - RNA, 22 nt, Glycine max
  GMmerge_7784157
ugugcucucuauacuucuguca

SEQ ID NO: 1964 - RNA, 22 nt, Glycine max
  GMmerge_8864307
aggaucaaaagauggauugcuc

SEQ ID NO: 1965 - RNA, 21 nt, Glycine max
  GMmerge_2494226
aggagaagggacuaccuaaca

SEQ ID NO: 1966 - RNA, 22 nt, Glycine max
  GMmerge_6558995
aggacuuuuuacgaauugauuu

SEQ ID NO: 1967 - RNA, 20 nt, Glycine max
  GMmerge_9348945
aggacgggaacgaaucaauu

SEQ ID NO: 1968 - RNA, 22 nt, Glycine max
  GMmerge_4737227
ugguugaagaacuuuuaguauu

SEQ ID NO: 1969 - RNA, 20 nt, Glycine max
  GMmerge_10249689
aggaccaaaaaugcaauuuu

SEQ ID NO: 1970 - RNA, 22 nt, Glycine max
  GMmerge_438689
aggaaguacuguucaaacaucu

SEQ ID NO: 1971 - RNA, 21 nt, Glycine max
  GMmerge_6707400
aggaagaagaaggaucauccu

SEQ ID NO: 1972 - RNA, 22 nt, Glycine max
  GMmerge_1611698
aggaaacaggacuuaucacaug

SEQ ID NO: 1973 - RNA, 21 nt, Glycine max
  GMmerge_3453715
agcuugcugaauuguuggaau

SEQ ID NO: 1974 - RNA, 22 nt, Glycine max
  GMmerge_5861666
agcuuacuuuaaguaucucuag

SEQ ID NO: 1975 - RNA, 20 nt, Glycine max
  GMmerge_8506589
agcuccugaaccaucacuuu

SEQ ID NO: 1976 - RNA, 21 nt, Glycine max
  GMmerge_3416225
agcucacauuuauuucaaaau

SEQ ID NO: 1977 - RNA, 22 nt, Glycine max
  GMmerge_363996
agcucaagaaagcugugggaga

SEQ ID NO: 1978 - RNA, 21 nt, Glycine max
  GMmerge_10141720
agcuaacgaccgucuuagaaa

SEQ ID NO: 1979 - RNA, 22 nt, Glycine max
  GMmerge_9216795
agcgucggugucgugucggugu

SEQ ID NO: 1980 - RNA, 22 nt, Glycine max
  GMmerge_5284602
uggaugguugaguggguguuua

SEQ ID NO: 1981 - RNA, 21 nt, Glycine max
  GMmerge_1349598
agccacccauaacugaauuaa

SEQ ID NO: 1982 - RNA, 22 nt, Glycine max
  GMmerge_2896144
agcauucccuuuaaugagcauu

SEQ ID NO: 1983 - RNA, 21 nt, Glycine max
  GMmerge_5979321
agcaguucgaaagguugaccu

SEQ ID NO: 1984 - RNA, 22 nt, Glycine max
  GMmerge_2951967
agcagggaauucugauguguau

SEQ ID NO: 1985 - RNA, 21 nt, Glycine max
  GMmerge_926632
agcacaacaacggcuggcagg

SEQ ID NO: 1986 - RNA, 22 nt, Glycine max
  GMmerge_10652865
agcaacuugauccguaacuucc

SEQ ID NO: 1987 - RNA, 21 nt, Glycine max
  GMmerge_5684072
agauuuugguucuucuuguau

SEQ ID NO: 1988 - RNA, 22 nt, Glycine max
  GMmerge_3749932
agauuugcaagacucauauuuc

SEQ ID NO: 1989 - RNA, 21 nt, Glycine max
  GMmerge_10761482
uggaacaaauaguagauauag

SEQ ID NO: 1990 - RNA, 22 nt, Glycine max
  GMmerge_1931522
agauuugaacauugacggucac

SEQ ID NO: 1991 - RNA, 22 nt, Glycine max
  GMmerge_1553611
uggaaauguuguaauccauguu

SEQ ID NO: 1992 - RNA, 21 nt, Glycine max
  GMmerge_4261463
ugcucucucucuaucugucac

SEQ ID NO: 1993 - RNA, 21 nt, Glycine max
  GMmerge_4689111
agaugauccauucuaccagaa

SEQ ID NO: 1994 - RNA, 19 nt, Glycine max
  GMmerge_5751503
agaucauguggcaguuuca

SEQ ID NO: 1995 - RNA, 21 nt, Glycine max
  GMmerge_10994986
agauaugcccuugauacggua

SEQ ID NO: 1996 - RNA, 22 nt, Glycine max
  GMmerge_1867402
agauacugaguucgaaucuacc

SEQ ID NO: 1997 - RNA, 21 nt, Glycine max
  GMmerge_241473
ugaugaugaaggggaugaaga

SEQ ID NO: 1998 - RNA, 22 nt, Glycine max
  GMmerge_6319195
agaggauagcaauauugucucu

SEQ ID NO: 1999 - RNA, 22 nt, Glycine max
  GMmerge_6795132
ugagucuguuaauuucauguua

SEQ ID NO: 2000 - RNA, 22 nt, Glycine max
  GMmerge_3084276
agagauuucucaacuaacaugc

SEQ ID NO: 2001 - RNA, 21 nt, Glycine max
  GMmerge_10864267
ugacugucacaucaugcauua

SEQ ID NO: 2002 - RNA, 22 nt, Glycine max
  GMmerge_8635159
agacaaaggcuauucuugagac

SEQ ID NO: 2003 - RNA, 22 nt, Glycine max
  GMmerge_3114826
agacaaaccuuugaagauuagu

SEQ ID NO: 2004 - RNA, 21 nt, Glycine max
  GMmerge_8155246
agaagucucuggaucagcugc

SEQ ID NO: 2005 - RNA, 22 nt, Glycine max
  GMmerge_8046692
agaagguucuucuggaagaaca

SEQ ID NO: 2006 - RNA, 22 nt, Glycine max
  GMmerge_3238093
agaaauuuccuuggaaaguuga

SEQ ID NO: 2007 - RNA, 22 nt, Glycine max
  GMmerge_4546079
agaaacuccuuccggaagaacg

SEQ ID NO: 2008 - RNA, 21 nt, Glycine max
  GMmerge_8521819
ucuuucauaagaucaguaguu

SEQ ID NO: 2009 - RNA, 21 nt, Glycine max
  GMmerge_2932023
agaaaauguugguggcgugua

SEQ ID NO: 2010 - RNA, 22 nt, Glycine max
  GMmerge_2533680
ucuuggcacuaucucuaaccga

SEQ ID NO: 2011 - RNA, 22 nt, Glycine max
  GMmerge_91776
acuuguuggucauagguucgaa

SEQ ID NO: 2012 - RNA, 21 nt, Glycine max
  GMmerge_4237522
acuuguucuggagcagccuuu

SEQ ID NO: 2013 - RNA, 22 nt, Glycine max
  GMmerge_7457339
acuugcccacauccaauuuuuc

SEQ ID NO: 2014 - RNA, 22 nt, Glycine max
  GMmerge_5212393
acuugauucguaugacucauac

SEQ ID NO: 2015 - RNA, 21 nt, Glycine max
  GMmerge_9464297
acuugaacguuggaaaaacaa

SEQ ID NO: 2016 - RNA, 21 nt, Glycine max
  GMmerge_1153324
acuuccaggaaguacuguuca

SEQ ID NO: 2017 - RNA, 21 nt, Glycine max
  GMmerge_317505
acuuauauugcuuuucuugac

SEQ ID NO: 2018 - RNA, 22 nt, Glycine max
  GMmerge_7417128
acuggagggcacagcgugaggc

SEQ ID NO: 2019 - RNA, 22 nt, Glycine max
  GMmerge_1492417
acugcuacaguacuauucaacu

SEQ ID NO: 2020 - RNA, 22 nt, Glycine max
  GMmerge_7617096
acucugagaaaauuucgugccc

SEQ ID NO: 2021 - RNA, 20 nt, Glycine max
  GMmerge_81102
acucucuuuagauuuugagc

SEQ ID NO: 2022 - RNA, 21 nt, Glycine max
  GMmerge_3599910
acucagaggguaggguggaua

SEQ ID NO: 2023 - RNA, 22 nt, Glycine max
  GMmerge_257700
acgugucacguucuuauugaau

SEQ ID NO: 2024 - RNA, 21 nt, Glycine max
  GMmerge_8300690
acgugacaugugaccguuaac

SEQ ID NO: 2025 - RNA, 21 nt, Glycine max
  GMmerge_8350124
acgugacagucaucauccaau

SEQ ID NO: 2026 - RNA, 21 nt, Glycine max
  GMmerge_6068870
acgugaaugaguuuggccaau

SEQ ID NO: 2027 - RNA, 22 nt, Glycine max
  GMmerge_6094869
acguaguagacaagaugucaca

SEQ ID NO: 2028 - RNA, 22 nt, Glycine max
  GMmerge_9680392
acggacauucuuaucaaaaguu

SEQ ID NO: 2029 - RNA, 22 nt, Glycine max
  GMmerge_9687921
acgauuagcagaagaccuuuaa

SEQ ID NO: 2030 - RNA, 21 nt, Glycine max
  GMmerge_5488599
ucgaauucgauuccuugguca

SEQ ID NO: 2031 - RNA, 22 nt, Glycine max
  GMmerge_10570104
ucgaaucggacuuccucaucga

SEQ ID NO: 2032 - RNA, 22 nt, Glycine max
  GMmerge_5271011
acgacucaagauggaugaauag

SEQ ID NO: 2033 - RNA, 21 nt, Glycine max
  GMmerge_4819144
acgaaguagaggugugcuuca

SEQ ID NO: 2034 - RNA, 22 nt, Glycine max
  GMmerge_4184323
uccgguuucaguucuucgcguu

SEQ ID NO: 2035 - RNA, 22 nt, Glycine max
  GMmerge_3861864
accuucgaauggauacugauac

SEQ ID NO: 2036 - RNA, 20 nt, Glycine max
  GMmerge_8736670
caggggaacaggcagagcau

SEQ ID NO: 2037 - RNA, 22 nt, Glycine max
  GMmerge_8343493
ucccgccuugcaucaacugaau

SEQ ID NO: 2038 - RNA, 22 nt, Glycine max
  GMmerge_10864321
accgaacacgacaaagggcuga

SEQ ID NO: 2039 - RNA, 22 nt, Glycine max
  GMmerge_8304174
ucauuaugauauccgugaugac

SEQ ID NO: 2040 - RNA, 22 nt, Glycine max
  GMmerge_2837117
accaugugacacauucucacgu

SEQ ID NO: 2041 - RNA, 21 nt, Glycine max
  GMmerge_1028422
accauggacagcaucauguga

SEQ ID NO: 2042 - RNA, 22 nt, Glycine max
  GMmerge_8301482
accacuuuucuguaagaauuca

SEQ ID NO: 2043 - RNA, 20 nt, Glycine max
  GMmerge_6668455
acauuugucucugcuugauu

SEQ ID NO: 2044 - RNA, 22 nt, Glycine max
  GMmerge_35955
ucaggauugcucuggaaucugu

SEQ ID NO: 2045 - RNA, 21 nt, Glycine max
  GMmerge_7302556
acauugcuuguugcuucaaag

SEQ ID NO: 2046 - RNA, 22 nt, Glycine max
  GMmerge_456081
acauugaggaccacauaaguug

SEQ ID NO: 2047 - RNA, 21 nt, Glycine max
  GMmerge_7827549
ucagccaugaauguuugaagc

SEQ ID NO: 2048 - RNA, 21 nt, Glycine max
  GMmerge_10458381
acauguugcggauuauuuggu

SEQ ID NO: 2049 - RNA, 20 nt, Glycine max
  GMmerge_1061354
acauggacaguguguuucgc

SEQ ID NO: 2050 - RNA, 21 nt, Glycine max
  GMmerge_7730063
acaugauccguaagcuuuuua

SEQ ID NO: 2051 - RNA, 22 nt, Glycine max
  GMmerge_7497808
acaugaaugacaugcacaaaau

SEQ ID NO: 2052 - RNA, 21 nt, Glycine max
  GMmerge_2813762
acaucaucuagaaucaagaga

SEQ ID NO: 2053 - RNA, 22 nt, Glycine max
  GMmerge_714451
acaucacuuguuaacggucaac

SEQ ID NO: 2054 - RNA, 22 nt, Glycine max
  GMmerge_11101760
ucacgucgcagccaccuauaaa

SEQ ID NO: 2055 - RNA, 21 nt, Glycine max
  GMmerge_1065771
acagaguuggucgaacuauac

SEQ ID NO: 2056 - RNA, 21 nt, Glycine max
  GMmerge_7689372
acagaagauagagagcacaga

SEQ ID NO: 2057 - RNA, 21 nt, Glycine max
  GMmerge_7570338
acacuuugguucggacuugaa

SEQ ID NO: 2058 - RNA, 21 nt, Glycine max
  GMmerge_2204852
acacuugacugaagcauguga

SEQ ID NO: 2059 - RNA, 21 nt, Glycine max
  GMmerge_3651822
acaccggacacgacaagggac

SEQ ID NO: 2060 - RNA, 21 nt, Glycine max
  GMmerge_9332363
acaauuacuuugugaaucuuu

SEQ ID NO: 2061 - RNA, 22 nt, Glycine max
  GMmerge_3998933
uauuagcuauuauucuacaaag

SEQ ID NO: 2062 - RNA, 22 nt, Glycine max
  GMmerge_7414279
uauguagucuauaaucagcaua

SEQ ID NO: 2063 - RNA, 21 nt, Glycine max
  GMmerge_6996074
uaugcuaucaaacaauaucaa

SEQ ID NO: 2064 - RNA, 22 nt, Glycine max
  GMmerge_633585
uaugaaucugcaaauacuuggc

SEQ ID NO: 2065 - RNA, 22 nt, Glycine max
  GMmerge_2104662
uaucuuggaucacagccccauu

SEQ ID NO: 2066 - RNA, 21 nt, Glycine max
  GMmerge_3156841
uaucucuaggauuugaauagu

SEQ ID NO: 2067 - RNA, 22 nt, Glycine max
  GMmerge_10697388
acaacuguauaacacauaugcu

SEQ ID NO: 2068 - RNA, 22 nt, Glycine max
  GMmerge_8898165
acaacagcggaagaaccuucuu

SEQ ID NO: 2069 - RNA, 19 nt, Glycine max
  GMmerge_870467
ucauugagugcagcguuga

SEQ ID NO: 2070 - RNA, 22 nt, Glycine max
  GMmerge_5943959
aauuuguuuucaggcaagguuu

SEQ ID NO: 2071 - RNA, 20 nt, Glycine max
  GMmerge_9778325
aauuugucugagucuguuaa

SEQ ID NO: 2072 - RNA, 22 nt, Glycine max
  GMmerge_2661736
aauuugaucuguaagagacuuc

SEQ ID NO: 2073 - RNA, 22 nt, Glycine max
  GMmerge_1468909
aauugucacauuauccuaaacu

SEQ ID NO: 2074 - RNA, 20 nt, Glycine max
  GMmerge_1436876
aauugcuuuugaauaaugca

SEQ ID NO: 2075 - RNA, 22 nt, Glycine max
  GMmerge_105299
aauucuggaugggauuggaacc

SEQ ID NO: 2076 - RNA, 22 nt, Glycine max
  GMmerge_5916796
aauucaaccauccucucaugug

SEQ ID NO: 2077 - RNA, 19 nt, Glycine max
  GMmerge_10501214
aauuauuguaacuaauuug

SEQ ID NO: 2078 - RNA, 22 nt, Glycine max
  GMmerge_3803895
aauuauccaauucucauuuuca

SEQ ID NO: 2079 - RNA, 22 nt, Glycine max
  GMmerge_9108060
aauuagccaaagaaaaagcuca

SEQ ID NO: 2080 - RNA, 21 nt, Glycine max
  GMmerge_1194160
aauuacuuccauuggcuuugg

SEQ ID NO: 2081 - RNA, 21 nt, Glycine max
  GMmerge_3790875
aauuacauuaauaagagguac

SEQ ID NO: 2082 - RNA, 21 nt, Glycine max
  GMmerge_7924745
aauuaaagagaauucauugaa

SEQ ID NO: 2083 - RNA, 22 nt, Glycine max
  GMmerge_10762968
aauguuuguaacuggguuuugu

SEQ ID NO: 2084 - RNA, 21 nt, Glycine max
  GMmerge_9900123
aaugucuguaucuuccuauuc

SEQ ID NO: 2085 - RNA, 22 nt, Glycine max
  GMmerge_80048
aaugucuguaucuuccuauucc

SEQ ID NO: 2086 - RNA, 22 nt, Glycine max
  GMmerge_1612348
aauggucagaucguggacaagu

SEQ ID NO: 2087 - RNA, 21 nt, Glycine max
  GMmerge_6913969
aaugggcauuuaaagagaaag

SEQ ID NO: 2088 - RNA, 21 nt, Glycine max
  GMmerge_1287830
aaugcuuuaagaauuucaguu

SEQ ID NO: 2089 - RNA, 21 nt, Glycine max
  GMmerge_4149727
aaugcuuggacuugguaaaca

SEQ ID NO: 2090 - RNA, 22 nt, Glycine max
  GMmerge_2646612
aaugauugaagacagaucaacu

SEQ ID NO: 2091 - RNA, 22 nt, Glycine max
  GMmerge_9830255
aaugauccuaaccucaagaaua

SEQ ID NO: 2092 - RNA, 22 nt, Glycine max
  GMmerge_10891250
aaugaaugaacuuuaucauauu

SEQ ID NO: 2093 - RNA, 21 nt, Glycine max
  GMmerge_1928991
aaugaaugaacuuuaucauau

SEQ ID NO: 2094 - RNA, 21 nt, Glycine max
  GMmerge_11163106
aaucggauuuauuaaaccaaa

SEQ ID NO: 2095 - RNA, 22 nt, Glycine max
  GMmerge_8128453
aaucaucgaaaaagcgaaaggg

SEQ ID NO: 2096 - RNA, 21 nt, Glycine max
  GMmerge_7117779
aaucauaaucauaauucaugc

SEQ ID NO: 2097 - RNA, 22 nt, Glycine max
  GMmerge_953858
aaucagaacaugacaugugaua

SEQ ID NO: 2098 - RNA, 21 nt, Glycine max
  GMmerge_5695145
uaauacgggugucgugucggu

SEQ ID NO: 2099 - RNA, 22 nt, Glycine max
  GMmerge_1597734
aauaucuuugcagaauuuaauu

SEQ ID NO: 2100 - RNA, 22 nt, Glycine max
  GMmerge_5204202
uaaguuucgucuuaacuuucua

SEQ ID NO: 2101 - RNA, 22 nt, Glycine max
  GMmerge_6881221
aauacuaacauuauaaaggugc

SEQ ID NO: 2102 - RNA, 22 nt, Glycine max
  GMmerge_6785999
aauacagcuauauaauauuuua

SEQ ID NO: 2103 - RNA, 22 nt, Glycine max
  GMmerge_3576864
aauaaccgucuuagaaugugcg

SEQ ID NO: 2104 - RNA, 22 nt, Glycine max
  GMmerge_4946976
aaguugaugcguaaggcuuuua

SEQ ID NO: 2105 - RNA, 22 nt, Glycine max
  GMmerge_5288057
aaguugaucuguaagccuuuua

SEQ ID NO: 2106 - RNA, 21 nt, Glycine max
  GMmerge_1100115
aaguugauccguaugacucau

SEQ ID NO: 2107 - RNA, 20 nt, Glycine max
  GMmerge_9257213
aaguugauccguaagucuuu

SEQ ID NO: 2108 - RNA, 22 nt, Glycine max
  GMmerge_3066238
aaguugauccauaugacucaua

SEQ ID NO: 2109 - RNA, 20 nt, Glycine max
  GMmerge_2182773
aaguuagcaagugagcaaca

SEQ ID NO: 2110 - RNA, 22 nt, Glycine max
  GMmerge_2553030
uaaauuugaaucuaccaaaauc

SEQ ID NO: 2111 - RNA, 22 nt, Glycine max
  GMmerge_610995
uaaauuuauuguauuauauuuu

SEQ ID NO: 2112 - RNA, 20 nt, Glycine max
  GMmerge_2788505
aagugauuaauguaugugcu

SEQ ID NO: 2113 - RNA, 22 nt, Glycine max
  GMmerge_9796214
aagucuagagguuuuugaaaug

SEQ ID NO: 2114 - RNA, 22 nt, Glycine max
  GMmerge_5188697
aaguauuugcagauucauaagu

SEQ ID NO: 2115 - RNA, 22 nt, Glycine max
  GMmerge_1099939
uaaaauuaagucuggccccauc

SEQ ID NO: 2116 - RNA, 21 nt, Glycine max
  GMmerge_2080782
uaaaaucuugcaauguugguc

SEQ ID NO: 2117 - RNA, 22 nt, Glycine max
  GMmerge_4670853
aagguuuggucuuuuggaucuu

SEQ ID NO: 2118 - RNA, 20 nt, Glycine max
  GMmerge_9896863
aaggucuucugcugcaauuu

SEQ ID NO: 2119 - RNA, 22 nt, Glycine max
  GMmerge_4847210
aagggaaauggcgaaacacaug

SEQ ID NO: 2120 - RNA, 21 nt, Glycine max
  GMmerge_10283929
aaggcuuacggaucaaguuga

SEQ ID NO: 2121 - RNA, 21 nt, Glycine max
  GMmerge_10767793
aaggcauuuugaugaaaucuu

SEQ ID NO: 2122 - RNA, 21 nt, Glycine max
  GMmerge_11136115
aaggauugggucauuauuuag

SEQ ID NO: 2123 - RNA, 21 nt, Glycine max
  GMmerge_8369401
aaggaugaugcucuucaauug

SEQ ID NO: 2124 - RNA, 21 nt, Glycine max
  GMmerge_3153424
gugugaugaccuucgaaugga

SEQ ID NO: 2125 - RNA, 21 nt, Glycine max
  GMmerge_7294753
uucgggcaaguuguuuuuggc

SEQ ID NO: 2126 - RNA, 21 nt, Glycine max
  GMmerge_3710550
aaggagauagagaaggucgga

SEQ ID NO: 2127 - RNA, 22 nt, Glycine max
  GMmerge_5065525
aaggaagaucaacaauauguuu

SEQ ID NO: 2128 - RNA, 22 nt, Glycine max
  GMmerge_10172827
aagcuugagaaguauuuaagau

SEQ ID NO: 2129 - RNA, 22 nt, Glycine max
  GMmerge_5974346
aagcuugaaaaguauuuaagau

SEQ ID NO: 2130 - RNA, 21 nt, Glycine max
  GMmerge_7616098
gucuaucguuggcggaugauu

SEQ ID NO: 2131 - RNA, 22 nt, Glycine max
  GMmerge_1032180
aagccaaucauacaaguugaca

SEQ ID NO: 2132 - RNA, 22 nt, Glycine max
  GMmerge_2665258
aagcaugcauuuguaaaauggu

SEQ ID NO: 2133 - RNA, 21 nt, Glycine max
  GMmerge_3017802
aagcagcaauaaugugacuuc

SEQ ID NO: 2134 - RNA, 22 nt, Glycine max
  GMmerge_2434336
aagcaacacaaauuucauucac

SEQ ID NO: 2135 - RNA, 21 nt, Glycine max
  GMmerge_8430782
aagacugaaauauccuugauc

SEQ ID NO: 2136 - RNA, 22 nt, Glycine max
  GMmerge_9446420
aagaagauucuuccguaguugu

SEQ ID NO: 2137 - RNA, 21 nt, Glycine max
  GMmerge_2548861
aagaaaucgaucgaucgggaa

SEQ ID NO: 2138 - RNA, 22 nt, Glycine max
  GMmerge_8062291
aacuugauccguaagagacuuc

SEQ ID NO: 2139 - RNA, 22 nt, Glycine max
  GMmerge_1901232
aacuugauccggaagcuggugu

SEQ ID NO: 2140 - RNA, 22 nt, Glycine max
  GMmerge_228581
aacugguuccagagcaauccug

SEQ ID NO: 2141 - RNA, 22 nt, Glycine max
  GMmerge_2290560
aacuggugucaagaucuuuuau

SEQ ID NO: 2142 - RNA, 22 nt, Glycine max
  GMmerge_5903466
aacucuuccauuaauugggcau

SEQ ID NO: 2143 - RNA, 22 nt, Glycine max
  GMmerge_1971962
cugggaaaaucuuuggaauugg

SEQ ID NO: 2144 - RNA, 22 nt, Glycine max
  GMmerge_1986178
cugaacccuagcgaaguaaauc

SEQ ID NO: 2145 - RNA, 22 nt, Glycine max
  GMmerge_6927889
aacuagcuggcaagacaucuuu

SEQ ID NO: 2146 - RNA, 21 nt, Glycine max
  GMmerge_6278792
aacgauuuggcaagauuuauu

SEQ ID NO: 2147 - RNA, 21 nt, Glycine max
  GMmerge_4673963
gggauagguaaaacaacuacu

SEQ ID NO: 2148 - RNA, 22 nt, Glycine max
  GMmerge_5849790
aaccucuaugaaugcauauccu

SEQ ID NO: 2149 - RNA, 21 nt, Glycine max
  GMmerge_2681893
aaccucuaugaaugcauaucc

SEQ ID NO: 2150 - RNA, 22 nt, Glycine max
  GMmerge_5073702
aaccaauuuggaaaauuauaca

SEQ ID NO: 2151 - RNA, 22 nt, Glycine max
  GMmerge_5303725
aaccaaacugcuuacuuucuac

SEQ ID NO: 2152 - RNA, 21 nt, Glycine max
  GMmerge_8887163
aacauucauaggucaugguau

SEQ ID NO: 2153 - RNA, 22 nt, Glycine max
  GMmerge_2900423
aacauaguugugaacauuuuag

SEQ ID NO: 2154 - RNA, 22 nt, Glycine max
  GMmerge_2970119
aacagaguuggucgaacuauac

SEQ ID NO: 2155 - RNA, 21 nt, Glycine max
  GMmerge_1739476
aacagagcagcgagcaccucc

SEQ ID NO: 2156 - RNA, 22 nt, Glycine max
  GMmerge_4400912
aacaccgacacagauaccggac

SEQ ID NO: 2157 - RNA, 22 nt, Glycine max
  GMmerge_5565441
aacaagacuuggaggacuacaa

SEQ ID NO: 2158 - RNA, 22 nt, Glycine max
  GMmerge_9260267
ggauaaagggcaguaaggcuga

SEQ ID NO: 2159 - RNA, 22 nt, Glycine max
  GMmerge_8976637
aaauuuucugcaccauuugacc

SEQ ID NO: 2160 - RNA, 21 nt, Glycine max
  GMmerge_8006014
aaauuuaauuucggucacaaa

SEQ ID NO: 2161 - RNA, 22 nt, Glycine max
  GMmerge_4296871
aaauuaagucugaucccauuga

SEQ ID NO: 2162 - RNA, 22 nt, Glycine max
  GMmerge_3751735
aaaugugauacaugaucgucaa

SEQ ID NO: 2163 - RNA, 22 nt, Glycine max
  GMmerge_6796320
gcuucaaaggauaugcauucau

SEQ ID NO: 2164 - RNA, 22 nt, Glycine max
  GMmerge_4512759
gcuuacaaagaguuuuucccua

SEQ ID NO: 2165 - RNA, 22 nt, Glycine max
  GMmerge_10108272
aaauaguuugaacgacaauccu

SEQ ID NO: 2166 - RNA, 22 nt, Glycine max
  GMmerge_5170338
aaauaguaugaacaacacuugu

SEQ ID NO: 2167 - RNA, 22 nt, Glycine max
  GMmerge_5405727
aaauacuaaaaguucuucaacc

SEQ ID NO: 2168 - RNA, 21 nt, Glycine max
  GMmerge_5458869
aaauaaguccaaguuuuuuga

SEQ ID NO: 2169 - RNA, 22 nt, Glycine max
  GMmerge_4760495
aaauaaauuguuaacuguuuug

SEQ ID NO: 2170 - RNA, 21 nt, Glycine max
  GMmerge_8433991
aaauaaacguuggugacaauu

SEQ ID NO: 2171 - RNA, 20 nt, Glycine max
  GMmerge_11208286
aaaguuggaauguacagggu

SEQ ID NO: 2172 - RNA, 22 nt, Glycine max
  GMmerge_10960899
aaaguugaauauuuuaauugug

SEQ ID NO: 2173 - RNA, 22 nt, Glycine max
  GMmerge_2192821
aaaguucuucaaccaagacacu

SEQ ID NO: 2174 - RNA, 22 nt, Glycine max
  GMmerge_4635912
aaaguaccgacguugauaguau

SEQ ID NO: 2175 - RNA, 21 nt, Glycine max
  GMmerge_6013455
aaaggaaguuuuagcaauugu

SEQ ID NO: 2176 - RNA, 22 nt, Glycine max
  GMmerge_3224278
aaagaggcuguuuccggauuca

SEQ ID NO: 2177 - RNA, 22 nt, Glycine max
  GMmerge_4786544
aaagacuaaggaaaaauucaau

SEQ ID NO: 2178 - RNA, 21 nt, Glycine max
  GMmerge_5264099
aaagacggugcugacaucacg

SEQ ID NO: 2179 - RNA, 20 nt, Glycine max
  GMmerge_10783148
aaagaauauggacuuauauu

SEQ ID NO: 2180 - RNA, 22 nt, Glycine max
  GMmerge_5026852
aaagaaguuaacgacaacauau

SEQ ID NO: 2181 - RNA, 21 nt, Glycine max
  GMmerge_6822665
aaacuuuggaaagcuuuugac

SEQ ID NO: 2182 - RNA, 21 nt, Glycine max
  GMmerge_3280954
aaacuuacggaucaacuugau

SEQ ID NO: 2183 - RNA, 21 nt, Glycine max
  GMmerge_4024003
aaacuuacggaucaaauugau

SEQ ID NO: 2184 - RNA, 20 nt, Glycine max
  GMmerge_4652982
aaacuacuucuggaagaacg

SEQ ID NO: 2185 - RNA, 22 nt, Glycine max
  GMmerge_5906765
aaaccuuaaacacccacucaac

SEQ ID NO: 2186 - RNA, 20 nt, Glycine max
  GMmerge_6120585
aaacaugucacgaacgcugc

SEQ ID NO: 2187 - RNA, 21 nt, Glycine max
  GMmerge_10190004
aaacagucaaauaguuccggu

SEQ ID NO: 2188 - RNA, 20 nt, Glycine max
  GMmerge_3168658
gcagcagcaucaagauucac

SEQ ID NO: 2189 - RNA, 21 nt, Glycine max
  GMmerge_11103016
gcacuuugcagaacaaggaac

SEQ ID NO: 2190 - RNA, 22 nt, Glycine max
  GMmerge_1347805
aaaaugagaauuggauaauuuu

SEQ ID NO: 2191 - RNA, 22 nt, Glycine max
  GMmerge_9570534
gcacauagagauugauugucau

SEQ ID NO: 2192 - RNA, 21 nt, Glycine max
  GMmerge_4293831
aaaaggcuuacggaucaacuu

SEQ ID NO: 2193 - RNA, 22 nt, Glycine max
  GMmerge_1783277
gauuugaggaucugguggcauc

SEQ ID NO: 2194 - RNA, 22 nt, Glycine max
  GMmerge_8452614
aaaagcuuacggaucauguuga

SEQ ID NO: 2195 - RNA, 21 nt, Glycine max
  GMmerge_6062929
aaaacggaugcgcgaacgcgg

SEQ ID NO: 2196 - RNA, 22 nt, Glycine max
  GMmerge_9249816
aaaaccgaaaauagcaaacagu

SEQ ID NO: 2197 - RNA, 22 nt, Glycine max
  GMmerge_3322571
gaugaggaggaggaguuugagc

SEQ ID NO: 2198 - RNA, 22 nt, Glycine max
  GMmerge_2678717
aaaacaaauuuuugcacgaugg

SEQ ID NO: 2199 - RNA, 21 nt, Glycine max
  GMmerge_9211832
aaaaaucaaacaaacauggau

SEQ ID NO: 2200 - RNA, 22 nt, Glycine max
  GMmerge_9498089
aaaaacugagaggagagaaaag

SEQ ID NO: 2201 - RNA, 22 nt, Glycine max
  GMmerge_5158994
gagugaaucugagaacacaagg

SEQ ID NO: 2202 - RNA, 22 nt, Glycine max
  GMmerge_9928755
gagcagggaauucugaugugua

SEQ ID NO: 2203 - RNA, 22 nt, Glycine max
  GMmerge_4193187
gacauuuaauggauuggacuuu

SEQ ID NO: 2204 - RNA, 20 nt, Glycine max
  GMmerge_8388827
gacagaagagagugagcaca

SEQ ID NO: 2205 - RNA, 21 nt, Glycine max
  GMmerge_9294994
gaaggaagaaacaaguucugc

SEQ ID NO: 2206 - RNA, 21 nt, Glycine max
  GMmerge_9511733
gaaauuauagauuguguuggu

SEQ ID NO: 2207 - RNA, 22 nt, Glycine max
  GMmerge_7405003
gaaagcuuagaugucgaagacg

SEQ ID NO: 2208 - RNA, 22 nt, Glycine max
  GMmerge_9855976
gaaaagugguaaugccuccuaa

SEQ ID NO: 2209 - RNA, 21 nt, Glycine max
  GMmerge_9801916
cuuagcuuucauaggaggccu

SEQ ID NO: 2210 - RNA, 22 nt, Glycine max
  GMmerge_8451512
cuggugacagaggcuaugcucg

SEQ ID NO: 2211 - RNA, 20 nt, Glycine max
  GMmerge_8631144
cuggcaucaaaauaguaaau

SEQ ID NO: 2212 - RNA, 22 nt, Glycine max
  GMmerge_8720753
cuggcagcauuuuuagcaggau

SEQ ID NO: 2213 - RNA, 21 nt, Glycine max
  GMmerge_9431532
cugagagcagaagguacaagu

SEQ ID NO: 2214 - RNA, 22 nt, Glycine max
  GMmerge_2902338
cugaaucaagcauuacaaugga

SEQ ID NO: 2215 - RNA, 21 nt, Glycine max
  GMmerge_11044376
cuaaauaauuuguaguuauuc

SEQ ID NO: 2216 - RNA, 21 nt, Glycine max
  GMmerge_236716
cuaaaaguucuucaaccaaga

SEQ ID NO: 2217 - RNA, 22 nt, Glycine max
  GMmerge_8143676
cggcuugaguugaauacguaag

SEQ ID NO: 2218 - RNA, 22 nt, Glycine max
  GMmerge_7195522
cgauuaauuaguuuuaguaauc

SEQ ID NO: 2219 - RNA, 22 nt, Glycine max
  GMmerge_5469485
cgagaucaauggaaggcuuuac

SEQ ID NO: 2220 - RNA, 22 nt, Glycine max
  GMmerge_2842698
cgaauugauuuugguagacuca

SEQ ID NO: 2221 - RNA, 21 nt, Glycine max
  GMmerge_10757370
ccuuuuagaaacuucauaucu

SEQ ID NO: 2222 - RNA, 22 nt, Glycine max
  GMmerge_38486
ccucaagaauacauauguagcu

SEQ ID NO: 2223 - RNA, 21 nt, Glycine max
  GMmerge_8087270
ccuaguugguuaucggauaau

SEQ ID NO: 2224 - RNA, 21 nt, Glycine max
  GMmerge_7980897
ccgcuucaaacauucauggcu

SEQ ID NO: 2225 - RNA, 22 nt, Glycine max
  GMmerge_10708643
ccgauagaguguugcgacaauu

SEQ ID NO: 2226 - RNA, 22 nt, Glycine max
  GMmerge_3819800
cccgccuugcaucaacugaauc

SEQ ID NO: 2227 - RNA, 21 nt, Glycine max
  GMmerge_2251827
cccaugucuugaagggccuga

SEQ ID NO: 2228 - RNA, 22 nt, Glycine max
  GMmerge_7083035
ccauuggaggaaccaauuugga

SEQ ID NO: 2229 - RNA, 22 nt, Glycine max
  GMmerge_9240150
ccauuaauggaucggugguagu

SEQ ID NO: 2230 - RNA, 22 nt, Glycine max
  GMmerge_109246
ccagaugcagucucaguuucag

SEQ ID NO: 2231 - RNA, 22 nt, Glycine max
  GMmerge_3888027
ccaauggcaaaaaaucucuuga

SEQ ID NO: 2232 - RNA, 22 nt, Glycine max
  GMmerge_3748753
ccaacagggauuccaacaauuc

SEQ ID NO: 2233 - RNA, 22 nt, Glycine max
  GMmerge_4032489
cauuggcuuuggaaguaauagg

SEQ ID NO: 2234 - RNA, 21 nt, Glycine max
  GMmerge_6501875
caugacuugauagaggacaug

SEQ ID NO: 2235 - RNA, 21 nt, Glycine max
  GMmerge_10357682
caucggauagauuugaaggau

SEQ ID NO: 2236 - RNA, 21 nt, Glycine max
  GMmerge_4715885
caucggacacgacacggauac

SEQ ID NO: 2237 - RNA, 22 nt, Glycine max
  GMmerge_985743
caucaguuucgacaauuuugaa

SEQ ID NO: 2238 - RNA, 22 nt, Glycine max
  GMmerge_7159594
cauaaguugaggauagcagaau

SEQ ID NO: 2239 - RNA, 22 nt, Glycine max
  GMmerge_10194660
caguugaauggacuagcugaga

SEQ ID NO: 2240 - RNA, 22 nt, Glycine max
  GMmerge_2238426
aaacaaguuggaaccuauuacu

SEQ ID NO: 2241 - RNA, 21 nt, Glycine max
  GMmerge_5967042
caguagaccaaauuguucaca

SEQ ID NO: 2242 - RNA, 22 nt, Glycine max
  GMmerge_2889557
cacauuugggaaaacuggagua

SEQ ID NO: 2243 - RNA, 22 nt, Glycine max
  GMmerge_1743529
cacauucuaagacgguuauuaa

SEQ ID NO: 2244 - RNA, 22 nt, Glycine max
  GMmerge_5553662
cacauuaguaaauauuguagau

SEQ ID NO: 2245 - RNA, 21 nt, Glycine max
  GMmerge_5849839
caaguuucaaucggauuuauu

SEQ ID NO: 2246 - RNA, 22 nt, Glycine max
  GMmerge_1841444
caaguauuugcagauucauaag

SEQ ID NO: 2247 - RNA, 22 nt, Glycine max
  GMmerge_2184819
caaggcgacgaccaaggcuuuc

SEQ ID NO: 2248 - RNA, 21 nt, Glycine max
  GMmerge_5893551
caagcaucaauauaaucccaa

SEQ ID NO: 2249 - RNA, 21 nt, Glycine max
  GMmerge_10285826
caacuugauccguaagucuuu

SEQ ID NO: 2250 - RNA, 22 nt, Glycine max
  GMmerge_5634576
caaccuccauucgucugucaac

SEQ ID NO: 2251 - RNA, 21 nt, Glycine max
  GMmerge_10168162
caaaugaagauacagaugaug

SEQ ID NO: 2252 - RNA, 22 nt, Glycine max
  GMmerge_1107253
caaacaaaaaagauuugcuuaa

SEQ ID NO: 2253 - RNA, 21 nt, Glycine max
  GMmerge_1028379
caaaagaccaaaccuuaaaca

SEQ ID NO: 2254 - RNA, 21 nt, Glycine max
  GMmerge_7090380
auuucaaaugaagucugcauu

SEQ ID NO: 2255 - RNA, 22 nt, Glycine max
  GMmerge_4769210
auuggaauccugcacaauuaaa

SEQ ID NO: 2256 - RNA, 20 nt, Glycine max
  GMmerge_2944177
auugaagaauuuaauggcau

SEQ ID NO: 2257 - RNA, 22 nt, Glycine max
  GMmerge_165836
auucguguuuaugagaaagaug

SEQ ID NO: 2258 - RNA, 21 nt, Glycine max
  GMmerge_7944918
auggaaaagcauauugcagag

SEQ ID NO: 2259 - RNA, 21 nt, Glycine max
  GMmerge_7908452
augcaucaaagcuuacuuuaa

SEQ ID NO: 2260 - RNA, 21 nt, Glycine max
  GMmerge_7503814
auccuugggauguagauuacc

SEQ ID NO: 2261 - RNA, 22 nt, Glycine max
  GMmerge_5076265
agcuuugcacugucauggauau

SEQ ID NO: 2262 - RNA, 22 nt, Glycine max
  GMmerge_490034
aucacagacaucauaaugaaug

SEQ ID NO: 2263 - RNA, 22 nt, Glycine max
  GMmerge_6242916
auauucauauuucucauaaaca

SEQ ID NO: 2264 - RNA, 21 nt, Glycine max
  GMmerge_7155970
auauggaucaacuugaucugu

SEQ ID NO: 2265 - RNA, 22 nt, Glycine max
  GMmerge_4802946
auagguacaaaacggcguuuac

SEQ ID NO: 2266 - RNA, 21 nt, Glycine max
  GMmerge_8642470
auacuuucaccggcuaagauu

SEQ ID NO: 2267 - RNA, 22 nt, Glycine max
  GMmerge_9391047
aguaucguagacguugaucauc

SEQ ID NO: 2268 - RNA, 21 nt, Glycine max
  GMmerge_2260533
ucgccgcaucguugacgcuga

SEQ ID NO: 2269 - RNA, 22 nt, Glycine max
  GMmerge_1614027
aggcuucaaagacguuguugac

SEQ ID NO: 2270 - RNA, 21 nt, Glycine max
  GMmerge_7653589
aggaagaaacaaguucugcug

SEQ ID NO: 2271 - RNA, 21 nt, Glycine max
  GMmerge_3592136
agcaacaaggaguuucaauga

SEQ ID NO: 2272 - RNA, 22 nt, Glycine max
  GMmerge_1681534
agcaaaucaaacagaguuggag

SEQ ID NO: 2273 - RNA, 22 nt, Glycine max
  GMmerge_1918808
agauggaggucgaaaacacaua

SEQ ID NO: 2274 - RNA, 21 nt, Glycine max
  GMmerge_7618285
agaggcccuuggggaggagua

SEQ ID NO: 2275 - RNA, 21 nt, Glycine max
  GMmerge_9509267
agagagaagacuuaacauugc

SEQ ID NO: 2276 - RNA, 21 nt, Glycine max
  GMmerge_1748657
agaagguucucuugauucuag

SEQ ID NO: 2277 - RNA, 22 nt, Glycine max
  GMmerge_7479943
agaagaguaucugaauuugugc

SEQ ID NO: 2278 - RNA, 22 nt, Glycine max
  GMmerge_5231882
acuucuuucaaguuuuaauaaa

SEQ ID NO: 2279 - RNA, 22 nt, Glycine max
  GMmerge_5453197
acugauacaucugugaaggaua

SEQ ID NO: 2280 - RNA, 22 nt, Glycine max
  GMmerge_974590
acucucccucaagggcuucucg

SEQ ID NO: 2281 - RNA, 21 nt, Glycine max
  GMmerge_4887031
acgugacaugugacagucaac

SEQ ID NO: 2282 - RNA, 21 nt, Glycine max
  GMmerge_11200411
accguguuuccuugguuaacg

SEQ ID NO: 2283 - RNA, 22 nt, Glycine max
  GMmerge_4872439
acauaagaaaucaauugaccau

SEQ ID NO: 2284 - RNA, 22 nt, Glycine max
  GMmerge_3285531
acacaugguggucaaugucuca

SEQ ID NO: 2285 - RNA, 21 nt, Glycine max
  GMmerge_2203743
acaagaugaugucucugcucc

SEQ ID NO: 2286 - RNA, 22 nt, Glycine max
  GMmerge_10806929
acaacuagagauaagcaccugc

SEQ ID NO: 2287 - RNA, 22 nt, Glycine max
  GMmerge_6833860
aauguuggucaauguuuuggga

SEQ ID NO: 2288 - RNA, 22 nt, Glycine max
  GMmerge_7064831
aaugugcguaguuuaauuuaua

SEQ ID NO: 2289 - RNA, 19 nt, Glycine max
  GMmerge_4382372
aaugggcugauugggaagc

SEQ ID NO: 2290 - RNA, 20 nt, Glycine max
  GMmerge_10987433
aaugcuuuaagaauuucagu

SEQ ID NO: 2291 - RNA, 22 nt, Glycine max
  GMmerge_9409555
aauauggaagaggugcauuggc

SEQ ID NO: 2292 - RNA, 21 nt, Glycine max
  GMmerge_5933984
aauaugauauugggguguugg

SEQ ID NO: 2293 - RNA, 22 nt, Glycine max
  GMmerge_4003516
aauacuaucaacgucgguacuu

SEQ ID NO: 2294 - RNA, 20 nt, Glycine max
  GMmerge_7399506
aaguuaguuaugggacuuug

SEQ ID NO: 2295 - RNA, 21 nt, Glycine max
  GMmerge_5680512
aagucuuuuacggaucaaguu

SEQ ID NO: 2296 - RNA, 22 nt, Glycine max
  GMmerge_2034794
aaguaccgacguugauaguauu

SEQ ID NO: 2297 - RNA, 22 nt, Glycine max
  GMmerge_2869486
aaguaaauaugucacaaaauuu

SEQ ID NO: 2298 - RNA, 22 nt, Glycine max
  GMmerge_9496279
aaggcauuuugaugaaaucuuu

SEQ ID NO: 2299 - RNA, 22 nt, Glycine max
  GMmerge_11157736
aagacugaaaagacaaaccaau

SEQ ID NO: 2300 - RNA, 21 nt, Glycine max
  GMmerge_5641629
aagacucugacuuagaagaag

SEQ ID NO: 2301 - RNA, 22 nt, Glycine max
  GMmerge_2038965
aagaccaacacaauuuacaauu

SEQ ID NO: 2302 - RNA, 22 nt, Glycine max
  GMmerge_5925469
aacuuaagcuauggccaauuaa

SEQ ID NO: 2303 - RNA, 22 nt, Glycine max
  GMmerge_8701591
aacgugaaauaguauugacaua

SEQ ID NO: 2304 - RNA, 21 nt, Glycine max
  GMmerge_3418556
aacacauauuaaggacacaug

SEQ ID NO: 2305 - RNA, 21 nt, Glycine max
  GMmerge_10154868
aacaagugaaacucugguucc

SEQ ID NO: 2306 - RNA, 22 nt, Glycine max
  GMmerge_4647303
aacaaacucaagcaaugauuaa

SEQ ID NO: 2307 - RNA, 20 nt, Glycine max
  GMmerge_7613660
aacaaacaugagcuacaaca

SEQ ID NO: 2308 - RNA, 22 nt, Glycine max
  GMmerge_2417355
aaaauuggaugugggcaaguug

SEQ ID NO: 2309 - RNA, 21 nt, Glycine max
  GMmerge_8964682
aaaaucugucaucaaacaaua

SEQ ID NO: 2310 - RNA, 21 nt, Glycine max
  GMmerge_928156
uugguacggcucaucuuaauu

SEQ ID NO: 2311 - RNA, 22 nt, Glycine max
  GMmerge_2915520
aaaagcauaaaccaaagagggu

SEQ ID NO: 2312 - RNA, 22 nt, Glycine max
  GMmerge_8526235
uucacuuguucuggauuagcuu

SEQ ID NO: 2313 - RNA, 19 nt, Glycine max
  GMmerge_1199106
uuuuuugucuaggauuuuc

SEQ ID NO: 2314 - RNA, 22 nt, Glycine max
  GMmerge_9082127
ugcacugccucuucccuggcuc

SEQ ID NO: 2315 - RNA, 21 nt, Glycine max
  GMmerge_10881272
uuuuuccaaacaaguuggaac

SEQ ID NO: 2316 - RNA, 22 nt, Glycine max
  GMmerge_240017
uuuuuaagacggugcuuucaga

SEQ ID NO: 2317 - RNA, 22 nt, Glycine max
  GMmerge_135872
uuuuguuauuguuguugggagu

SEQ ID NO: 2318 - RNA, 21 nt, Glycine max
  GMmerge_10388299
uuuugugguucauguuuucuu

SEQ ID NO: 2319 - RNA, 21 nt, Glycine max
  GMmerge_2134597
uuuugucaugcaugaccuucu

SEQ ID NO: 2320 - RNA, 22 nt, Glycine max
  GMmerge_9771200
uuuugagacgaggugcucugaa

SEQ ID NO: 2321 - RNA, 22 nt, Glycine max
  GMmerge_1532469
uuuuaugaauugauuuugguag

SEQ ID NO: 2322 - RNA, 19 nt, Glycine max
  GMmerge_5802315
uuuuagucagauuucgggg

SEQ ID NO: 2323 - RNA, 21 nt, Glycine max
  GMmerge_3045068
uuuuagcguuagaccauggau

SEQ ID NO: 2324 - RNA, 21 nt, Glycine max
  GMmerge_7639314
uuuuaccgcuggaucaucugc

SEQ ID NO: 2325 - RNA, 22 nt, Glycine max
  GMmerge_1676219
cuucuucuucagcagaacuugu

SEQ ID NO: 2326 - RNA, 21 nt, Glycine max
  GMmerge_8443417
uuugucauuggacgaagaugu

SEQ ID NO: 2327 - RNA, 22 nt, Glycine max
  GMmerge_7131166
uuuguagaccuaucuuuccaca

SEQ ID NO: 2328 - RNA, 21 nt, Glycine max
  GMmerge_5448160
uuuguaagcacuucuuucaag

SEQ ID NO: 2329 - RNA, 21 nt, Glycine max
  GMmerge_7740704
uuuggauuugauauacuucua

SEQ ID NO: 2330 - RNA, 21 nt, Glycine max
  GMmerge_10549870
uuugcagauggaacaugaauu

SEQ ID NO: 2331 - RNA, 20 nt, Glycine max
  GMmerge_178560
uuugaaaugaaauccugacu

SEQ ID NO: 2332 - RNA, 22 nt, Glycine max
  GMmerge_4551386
uuugaaaguaggcauucaaaga

SEQ ID NO: 2333 - RNA, 22 nt, Glycine max
  GMmerge_2423782
uuucuguacauucaaagacguu

SEQ ID NO: 2334 - RNA, 21 nt, Glycine max
  GMmerge_7294170
uuucuaauugucgcuaaucuu

SEQ ID NO: 2335 - RNA, 21 nt, Glycine max
  GMmerge_4653844
uuuccagagcauccuucuuuc

SEQ ID NO: 2336 - RNA, 21 nt, Glycine max
  GMmerge_4964381
uuucaacagugugccaugaau

SEQ ID NO: 2337 - RNA, 21 nt, Glycine max
  GMmerge_4860582
ugagagcauggguaacuucua

SEQ ID NO: 2338 - RNA, 22 nt, Glycine max
  GMmerge_10101615
uuuaugagaaagaugacuauga

SEQ ID NO: 2339 - RNA, 21 nt, Glycine max
  GMmerge_5565494
uuuauaagaaugaugaaugua

SEQ ID NO: 2340 - RNA, 22 nt, Glycine max
  GMmerge_9851424
uuuagugucacguuggauaguu

SEQ ID NO: 2341 - RNA, 21 nt, Glycine max
  GMmerge_5634632
uuuacuguaacgauauugcca

SEQ ID NO: 2342 - RNA, 20 nt, Glycine max
  GMmerge_1705627
uuuaauggauggguauuguu

SEQ ID NO: 2343 - RNA, 22 nt, Glycine max
  GMmerge_6368704
uuuaagggggacuucacauuuc

SEQ ID NO: 2344 - RNA, 22 nt, Glycine max
  GMmerge_10611637
uuguuucagauuggauggugau

SEQ ID NO: 2345 - RNA, 20 nt, Glycine max
  GMmerge_10838867
uuguguacaaguagccauca

SEQ ID NO: 2346 - RNA, 21 nt, Glycine max
  GMmerge_7234636
uugugauucaugaucaugguu

SEQ ID NO: 2347 - RNA, 22 nt, Glycine max
  GMmerge_7402648
uugugacagucaacguuuaaau

SEQ ID NO: 2348 - RNA, 22 nt, Glycine max
  GMmerge_1624249
uuguauuagcuauuauucuaca

SEQ ID NO: 2349 - RNA, 22 nt, Glycine max
  GMmerge_523863
uuguaguccuccaaguauuguu

SEQ ID NO: 2350 - RNA, 21 nt, Glycine max
  GMmerge_972900
uuguaaacgaggcuuaugauu

SEQ ID NO: 2351 - RNA, 21 nt, Glycine max
  GMmerge_4708822
uuggugcuggcgggacgugcc

SEQ ID NO: 2352 - RNA, 21 nt, Glycine max
  GMmerge_8350181
uugguccguguaagaagcagg

SEQ ID NO: 2353 - RNA, 22 nt, Glycine max
  GMmerge_9762261
uuggucacaauauauaucaagg

SEQ ID NO: 2354 - RNA, 21 nt, Glycine max
  GMmerge_1306378
uuggauuauggaguggguguu

SEQ ID NO: 2355 - RNA, 21 nt, Glycine max
  GMmerge_3428520
uuggaggcauguugagaaaaa

SEQ ID NO: 2356 - RNA, 22 nt, Glycine max
  GMmerge_4989462
uuggagccaaagucgugcauug

SEQ ID NO: 2357 - RNA, 20 nt, Glycine max
  GMmerge_10235656
uugcuuaacagauuaaauuc

SEQ ID NO: 2358 - RNA, 22 nt, Glycine max
  GMmerge_7907107
uugcgcccaaucuguucgagua

SEQ ID NO: 2359 - RNA, 21 nt, Glycine max
  GMmerge_1751100
uugccuugucgaacuaucagc

SEQ ID NO: 2360 - RNA, 21 nt, Glycine max
  GMmerge_4969627
uugcccuuagccucugcgaga

SEQ ID NO: 2361 - RNA, 21 nt, Glycine max
  GMmerge_2816572
uugccacgaagcucggugcca

SEQ ID NO: 2362 - RNA, 21 nt, Glycine max
  GMmerge_1787726
uugcaucgccuugaauuugua

SEQ ID NO: 2363 - RNA, 22 nt, Glycine max
  GMmerge_7684379
uugcacuaaagauuguccaaaa

SEQ ID NO: 2364 - RNA, 21 nt, Glycine max
  GMmerge_6968992
uugauuuugguagauucgaac

SEQ ID NO: 2365 - RNA, 21 nt, Glycine max
  GMmerge_366575
uugauuuugguagacucaaau

SEQ ID NO: 2366 - RNA, 21 nt, Glycine max
  GMmerge_8843652
uugaucuguaugcuuaauauc

SEQ ID NO: 2367 - RNA, 21 nt, Glycine max
  GMmerge_7224489
uugauaguucauguuuucuuc

SEQ ID NO: 2368 - RNA, 21 nt, Glycine max
  GMmerge_10039730
uugauagacuauaggccagac

SEQ ID NO: 2369 - RNA, 22 nt, Glycine max
  GMmerge_3495515
uugaggcgauucauuucgaauc

SEQ ID NO: 2370 - RNA, 22 nt, Glycine max
  GMmerge_3776098
uguuucugaaucagaagucuca

SEQ ID NO: 2371 - RNA, 22 nt, Glycine max
  GMmerge_9422805
ugaaggaaguucuacaaauguu

SEQ ID NO: 2372 - RNA, 22 nt, Glycine max
  GMmerge_6332195
uugaaggaugacgcaugggagg

SEQ ID NO: 2373 - RNA, 20 nt, Glycine max
  GMmerge_2778628
uugaacuguuuaauagauac

SEQ ID NO: 2374 - RNA, 21 nt, Glycine max
  GMmerge_10392863
uugaaaauucucaaaucuugu

SEQ ID NO: 2375 - RNA, 20 nt, Glycine max
  GMmerge_34173
uucuucguucauuuggauug

SEQ ID NO: 2376 - RNA, 22 nt, Glycine max
  GMmerge_6451203
uucuuccggaagacgcuuuuuc

SEQ ID NO: 2377 - RNA, 22 nt, Glycine max
  GMmerge_5730439
uucugagcaacuguauggcagu

SEQ ID NO: 2378 - RNA, 21 nt, Glycine max
  GMmerge_9595607
uucuccuacauaauuuagaca

SEQ ID NO: 2379 - RNA, 22 nt, Glycine max
  GMmerge_11115012
uucguugacaaaagcgguaaca

SEQ ID NO: 2380 - RNA, 22 nt, Glycine max
  GMmerge_5334362
uucgcucaaacuccuccuccuc

SEQ ID NO: 2381 - RNA, 21 nt, Glycine max
  GMmerge_10184226
uuccuuaauccauuagaauaa

SEQ ID NO: 2382 - RNA, 21 nt, Glycine max
  GMmerge_7169601
uuccgaauuaaaccuuuauca

SEQ ID NO: 2383 - RNA, 22 nt, Glycine max
  GMmerge_7340823
uucccgaugccuccuaaggugu

SEQ ID NO: 2384 - RNA, 21 nt, Glycine max
  GMmerge_8767133
uucccaauuccgcccauuccu

SEQ ID NO: 2385 - RNA, 22 nt, Glycine max
  GMmerge_7093608
uuccauauucugcuauccucaa

SEQ ID NO: 2386 - RNA, 22 nt, Glycine max
  GMmerge_4206921
uucaccuacguaauuuagacaa

SEQ ID NO: 2387 - RNA, 21 nt, Glycine max
  GMmerge_5577256
uucaagaccaauacaauuuac

SEQ ID NO: 2388 - RNA, 22 nt, Glycine max
  GMmerge_2193525
uucaacaaugacauuugucuaa

SEQ ID NO: 2389 - RNA, 22 nt, Glycine max
  GMmerge_2357967
auauuuuauuuugaucuguaua

SEQ ID NO: 2390 - RNA, 21 nt, Glycine max
  GMmerge_4567349
uuauugaaugaugauugucac

SEQ ID NO: 2391 - RNA, 21 nt, Glycine max
  GMmerge_10269438
uuauucucguggauuucuuuu

SEQ ID NO: 2392 - RNA, 21 nt, Glycine max
  GMmerge_8284479
uuauuccuucagcuguugaga

SEQ ID NO: 2393 - RNA, 21 nt, Glycine max
  GMmerge_2793091
uuaugucaagaucgucacuac

SEQ ID NO: 2394 - RNA, 21 nt, Glycine max
  GMmerge_1839321
uuauggagaaagauacgcauu

SEQ ID NO: 2395 - RNA, 22 nt, Glycine max
  GMmerge_6739636
uuauaggauugccuccaucaaa

SEQ ID NO: 2396 - RNA, 22 nt, Glycine max
  GMmerge_10877720
uuauaaauaaagcagauguggu

SEQ ID NO: 2397 - RNA, 22 nt, Glycine max
  GMmerge_522530
uuagugccacguuggauaguuc

SEQ ID NO: 2398 - RNA, 22 nt, Glycine max
  GMmerge_7630408
uuaggagugggaauaggccaag

SEQ ID NO: 2399 - RNA, 22 nt, Glycine max
  GMmerge_9271645
aaaugaagucugcauuuccucu

SEQ ID NO: 2400 - RNA, 21 nt, Glycine max
  GMmerge_2513246
uuuccuaguugguuaucggau

SEQ ID NO: 2401 - RNA, 21 nt, Glycine max
  GMmerge_4960859
uuacuucacuaggguucagga

SEQ ID NO: 2402 - RNA, 21 nt, Glycine max
  GMmerge_9385543
uuacgugauccguaugaguca

SEQ ID NO: 2403 - RNA, 22 nt, Glycine max
  GMmerge_1327379
uuacggaucaacuuacggauca

SEQ ID NO: 2404 - RNA, 22 nt, Glycine max
  GMmerge_8870922
uuaccccaaaauuauccaauuc

SEQ ID NO: 2405 - RNA, 22 nt, Glycine max
  GMmerge_10468502
uuacauguuuauguuugcauag

SEQ ID NO: 2406 - RNA, 21 nt, Glycine max
  GMmerge_9349864
uguuucagauuggauggugau

SEQ ID NO: 2407 - RNA, 22 nt, Glycine max
  GMmerge_10117895
uuacagucgcauauucuccuca

SEQ ID NO: 2408 - RNA, 21 nt, Glycine max
  GMmerge_1524669
uuacaauuguggaaaacaagg

SEQ ID NO: 2409 - RNA, 21 nt, Glycine max
  GMmerge_5803741
uuacaaauggaaccagaauac

SEQ ID NO: 2410 - RNA, 21 nt, Glycine max
  GMmerge_1765323
uuacaaaauaauuaaguacaa

SEQ ID NO: 2411 - RNA, 22 nt, Glycine max
  GMmerge_2192031
uuaauucccaaaaggucucugc

SEQ ID NO: 2412 - RNA, 22 nt, Glycine max
  GMmerge_7385627
uuaagcugaaauguucauuaca

SEQ ID NO: 2413 - RNA, 20 nt, Glycine max
  GMmerge_2481702
uuaagauugucgucguuaca

SEQ ID NO: 2414 - RNA, 21 nt, Glycine max
  GMmerge_5550519
uccuccuucgguaucauuaac

SEQ ID NO: 2415 - RNA, 22 nt, Glycine max
  GMmerge_2982867
uuaaagacgguguuuuggaacc

SEQ ID NO: 2416 - RNA, 22 nt, Glycine max
  GMmerge_6043009
uuaaacauacggaucaacuuga

SEQ ID NO: 2417 - RNA, 22 nt, Glycine max
  GMmerge_11159503
uuaaaauugcuugccaucuugc

SEQ ID NO: 2418 - RNA, 22 nt, Glycine max
  GMmerge_905509
uaaagaauauugauugagugac

SEQ ID NO: 2419 - RNA, 22 nt, Glycine max
  GMmerge_2121151
gugugaugaccuucgaauggau

SEQ ID NO: 2420 - RNA, 21 nt, Glycine max
  GMmerge_1610221
uuaaaaaccuugccugaaaac

SEQ ID NO: 2421 - RNA, 22 nt, Glycine max
  GMmerge_8824914
uguugacugucauauaucacau

SEQ ID NO: 2422 - RNA, 22 nt, Glycine max
  GMmerge_5206923
uguugaaccgcaagaauuuucc

SEQ ID NO: 2423 - RNA, 22 nt, Glycine max
  GMmerge_7536340
uguucauccggaagaagguucu

SEQ ID NO: 2424 - RNA, 21 nt, Glycine max
  GMmerge_2528148
uguuaggaaauaaaaugguuc

SEQ ID NO: 2425 - RNA, 19 nt, Glycine max
  GMmerge_6749124
uguggaauaggaagauaca

SEQ ID NO: 2426 - RNA, 21 nt, Glycine max
  GMmerge_838074
ugugcguugauaaauguugaa

SEQ ID NO: 2427 - RNA, 22 nt, Glycine max
  GMmerge_5102929
ugugaggcacccuuucauuuag

SEQ ID NO: 2428 - RNA, 22 nt, Glycine max
  GMmerge_2502284
ugugacgacgauggaggucaug

SEQ ID NO: 2429 - RNA, 21 nt, Glycine max
  GMmerge_5359979
cuaaugaugaccaagaagaug

SEQ ID NO: 2430 - RNA, 22 nt, Glycine max
  GMmerge_7074370
ugucugcgcauagggaggaaau

SEQ ID NO: 2431 - RNA, 21 nt, Glycine max
  GMmerge_1323378
ugucguguccgguguccgugu

SEQ ID NO: 2432 - RNA, 22 nt, Glycine max
  GMmerge_4003406
ugucggugucggugucguguca

SEQ ID NO: 2433 - RNA, 20 nt, Glycine max
  GMmerge_5230866
ugucggugucggugucagug

SEQ ID NO: 2434 - RNA, 20 nt, Glycine max
  GMmerge_980264
ugucgguaucgugucggugu

SEQ ID NO: 2435 - RNA, 21 nt, Glycine max
  GMmerge_3706298
ugucggauaccggacacggca

SEQ ID NO: 2436 - RNA, 21 nt, Glycine max
  GMmerge_10050705
ugucggacaccggauacggca

SEQ ID NO: 2437 - RNA, 21 nt, Glycine max
  GMmerge_3840920
ugucggacaccggacacgaca

SEQ ID NO: 2438 - RNA, 21 nt, Glycine max
  GMmerge_3881530
ugucaacguuuggaugaugac

SEQ ID NO: 2439 - RNA, 21 nt, Glycine max
  GMmerge_9576929
uguauucugugaauuccuugg

SEQ ID NO: 2440 - RNA, 22 nt, Glycine max
  GMmerge_4735322
caauauguucuggcaucaaaau

SEQ ID NO: 2441 - RNA, 22 nt, Glycine max
  GMmerge_11227081
uguaccucuguugcauauuagu

SEQ ID NO: 2442 - RNA, 21 nt, Glycine max
  GMmerge_1697094
ugguuguggcaaagaugaagc

SEQ ID NO: 2443 - RNA, 20 nt, Glycine max
  GMmerge_1082561
ugguggaucaugcaucucgc

SEQ ID NO: 2444 - RNA, 21 nt, Glycine max
  GMmerge_9184483
ugguggaauucaaugcggaga

SEQ ID NO: 2445 - RNA, 22 nt, Glycine max
  GMmerge_6745759
ugguagauucgaacucaguauc

SEQ ID NO: 2446 - RNA, 21 nt, Glycine max
  GMmerge_8757303
ugguagauucaaauucaguau

SEQ ID NO: 2447 - RNA, 22 nt, Glycine max
  GMmerge_9169069
ugguagauucaaauucaguauc

SEQ ID NO: 2448 - RNA, 21 nt, Glycine max
  GMmerge_11014851
agcauggguaacuucuauuuu

SEQ ID NO: 2449 - RNA, 21 nt, Glycine max
  GMmerge_4391976
uggguauggggggauugggaa

SEQ ID NO: 2450 - RNA, 21 nt, Glycine max
  GMmerge_9441724
uggguauaagacuugcuagcu

SEQ ID NO: 2451 - RNA, 21 nt, Glycine max
  GMmerge_442693
uggguacaacuuaggacuaca

SEQ ID NO: 2452 - RNA, 20 nt, Glycine max
  GMmerge_10340683
uggcuguuaauggaugauaa

SEQ ID NO: 2453 - RNA, 22 nt, Glycine max
  GMmerge_628168
uggcgagacaugcuaagcaagc

SEQ ID NO: 2454 - RNA, 22 nt, Glycine max
  GMmerge_6098267
uggcagagaccuuuugagaauu

SEQ ID NO: 2455 - RNA, 22 nt, Glycine max
  GMmerge_42169
aaccuaccggaucaaauggaac

SEQ ID NO: 2456 - RNA, 21 nt, Glycine max
  GMmerge_9383813
aaagagauacgggaaaaagau

SEQ ID NO: 2457 - RNA, 21 nt, Glycine max
  GMmerge_3029233
uggaugaugauugucacgugu

SEQ ID NO: 2458 - RNA, 21 nt, Glycine max
  GMmerge_8490868
uggaugaugacugucacgugu

SEQ ID NO: 2459 - RNA, 19 nt, Glycine max
  GMmerge_1635263
uggagcagccuuugaagua

SEQ ID NO: 2460 - RNA, 21 nt, Glycine max
  GMmerge_10208501
ugauccaauacauguggaggu

SEQ ID NO: 2461 - RNA, 21 nt, Glycine max
  GMmerge_7623630
uggaaucccuguuggacuucu

SEQ ID NO: 2462 - RNA, 21 nt, Glycine max
  GMmerge_10114039
uggaaggccacaguuaacugc

SEQ ID NO: 2463 - RNA, 21 nt, Glycine max
  GMmerge_10867147
ugcuugacauuugugcguuga

SEQ ID NO: 2464 - RNA, 22 nt, Glycine max
  GMmerge_9905948
ugcuuccagaaaauacuguuca

SEQ ID NO: 2465 - RNA, 22 nt, Glycine max
  GMmerge_3353600
ugcucuaaauacgcauuagaug

SEQ ID NO: 2466 - RNA, 22 nt, Glycine max
  GMmerge_2747448
ugcucacuucucuuucugucaa

SEQ ID NO: 2467 - RNA, 22 nt, Glycine max
  GMmerge_4226873
ugcgggcuuaugcgggcggacc

SEQ ID NO: 2468 - RNA, 21 nt, Glycine max
  GMmerge_1573548
ucaacgaugacgauuuaaagu

SEQ ID NO: 2469 - RNA, 21 nt, Glycine max
  GMmerge_10890499
ugccggcaaguuucucuuggc

SEQ ID NO: 2470 - RNA, 22 nt, Glycine max
  GMmerge_431266
uagcuccuccuucgguaucauu

SEQ ID NO: 2471 - RNA, 21 nt, Glycine max
  GMmerge_9392967
ugccaacucugccaacgguag

SEQ ID NO: 2472 - RNA, 22 nt, Glycine max
  GMmerge_4449424
ugccaaaucguugagaagguca

SEQ ID NO: 2473 - RNA, 21 nt, Glycine max
  GMmerge_6285372
ugcauuuguaaaaugguggac

SEQ ID NO: 2474 - RNA, 21 nt, Glycine max
  GMmerge_7391301
ugcaugugguuacgugagcau

SEQ ID NO: 2475 - RNA, 21 nt, Glycine max
  GMmerge_10193726
ugcaucuguaucacucaauga

SEQ ID NO: 2476 - RNA, 22 nt, Glycine max
  GMmerge_10424568
ugcagggucaaaaggugcagaa

SEQ ID NO: 2477 - RNA, 22 nt, Glycine max
  GMmerge_5981318
ugcaacaagcggugacugaucc

SEQ ID NO: 2478 - RNA, 22 nt, Glycine max
  GMmerge_2269539
ugauuuuuaagacuuacggauu

SEQ ID NO: 2479 - RNA, 21 nt, Glycine max
  GMmerge_2267280
ugauuuagaaacaaagauguc

SEQ ID NO: 2480 - RNA, 22 nt, Glycine max
  GMmerge_9500121
ugauugucacgugucauguucu

SEQ ID NO: 2481 - RNA, 20 nt, Glycine max
  GMmerge_8744592
ugauucuagaugauguugac

SEQ ID NO: 2482 - RNA, 21 nt, Glycine max
  GMmerge_3752510
gggucguccugagaucacaug

SEQ ID NO: 2483 - RNA, 21 nt, Glycine max
  GMmerge_6356875
ugauuaagcugaaauguucau

SEQ ID NO: 2484 - RNA, 22 nt, Glycine max
  GMmerge_3034017
ugauggugauguauuauggaug

SEQ ID NO: 2485 - RNA, 20 nt, Glycine max
  GMmerge_2875208
ugauggggaaguaggaauau

SEQ ID NO: 2486 - RNA, 21 nt, Glycine max
  GMmerge_1913229
ugauggggaaguaggaauagu

SEQ ID NO: 2487 - RNA, 21 nt, Glycine max
  GMmerge_7315844
ugauggauacuugcuugcuga

SEQ ID NO: 2488 - RNA, 22 nt, Glycine max
  GMmerge_1789534
ugaugcaucaguuucgacaauu

SEQ ID NO: 2489 - RNA, 21 nt, Glycine max
  GMmerge_9315398
ugauccugagggauuucugga

SEQ ID NO: 2490 - RNA, 22 nt, Glycine max
  GMmerge_5857798
ugauaguuguguguaugaagua

SEQ ID NO: 2491 - RNA, 21 nt, Glycine max
  GMmerge_5356716
ugauagcagauuuccauucuu

SEQ ID NO: 2492 - RNA, 20 nt, Glycine max
  GMmerge_8863049
ugauacaucagacauagguu

SEQ ID NO: 2493 - RNA, 22 nt, Glycine max
  GMmerge_10406604
ugaguggguguucaauguuuga

SEQ ID NO: 2494 - RNA, 21 nt, Glycine max
  GMmerge_848336
ugagugauuaugaaauguuga

SEQ ID NO: 2495 - RNA, 22 nt, Glycine max
  GMmerge_325777
ugaguaaucagaggcugcaguc

SEQ ID NO: 2496 - RNA, 22 nt, Glycine max
  GMmerge_11247675
cuuccuguaacuagcaaugcau

SEQ ID NO: 2497 - RNA, 21 nt, Glycine max
  GMmerge_4592175
ugagcuacaacauuuccaaag

SEQ ID NO: 2498 - RNA, 21 nt, Glycine max
  GMmerge_4666811
ugagccugcaucuuuggcacc

SEQ ID NO: 2499 - RNA, 21 nt, Glycine max
  GMmerge_9367342
ugagauggacgaagacgaaaa

SEQ ID NO: 2500 - RNA, 22 nt, Glycine max
  GMmerge_9688215
ugagacgaggugcucugaaaga

SEQ ID NO: 2501 - RNA, 21 nt, Glycine max
  GMmerge_11081946
ugacugucaaguaucguuguu

SEQ ID NO: 2502 - RNA, 21 nt, Glycine max
  GMmerge_9584977
augaaguaaaggaaauaguaa

SEQ ID NO: 2503 - RNA, 22 nt, Glycine max
  GMmerge_3622659
ugaccuuugaaugaauacugau

SEQ ID NO: 2504 - RNA, 21 nt, Glycine max
  GMmerge_3408127
ugaccgguuuauucucaugga

SEQ ID NO: 2505 - RNA, 20 nt, Glycine max
  GMmerge_1872039
ugacccagaagaaguugaug

SEQ ID NO: 2506 - RNA, 22 nt, Glycine max
  GMmerge_1902447
ugaauauauucuauacauaaau

SEQ ID NO: 2507 - RNA, 22 nt, Glycine max
  GMmerge_1898947
agacuuuaaggagauuggcaug

SEQ ID NO: 2508 - RNA, 21 nt, Glycine max
  GMmerge_8466387
ugaaggcguuuucauuccauu

SEQ ID NO: 2509 - RNA, 22 nt, Glycine max
  GMmerge_5178028
ugaacaaguugacucugguagu

SEQ ID NO: 2510 - RNA, 22 nt, Glycine max
  GMmerge_11130381
ugaaaguggacauucaaagacg

SEQ ID NO: 2511 - RNA, 21 nt, Glycine max
  GMmerge_1694591
ugaaaguaccgacguugauag

SEQ ID NO: 2512 - RNA, 21 nt, Glycine max
  GMmerge_4577632
aaguugugaugagaaucaaug

SEQ ID NO: 2513 - RNA, 22 nt, Glycine max
  GMmerge_10577176
ugaaaauaucuuugcagaauuu

SEQ ID NO: 2514 - RNA, 22 nt, Glycine max
  GMmerge_4825564
ugaaaauaggauuuaggagaau

SEQ ID NO: 2515 - RNA, 20 nt, Glycine max
  GMmerge_7367612
ucuuuuguuuggaauaggau

SEQ ID NO: 2516 - RNA, 21 nt, Glycine max
  GMmerge_2329088
ucuuguggauacaacgaacaa

SEQ ID NO: 2517 - RNA, 22 nt, Glycine max
  GMmerge_6795171
ucuugguugaagaacuuuuagu

SEQ ID NO: 2518 - RNA, 21 nt, Glycine max
  GMmerge_2975434
ucuuaacaaguucuaggauca

SEQ ID NO: 2519 - RNA, 20 nt, Glycine max
  GMmerge_5329256
ucugguggaugaaucaugac

SEQ ID NO: 2520 - RNA, 22 nt, Glycine max
  GMmerge_242742
ucuggagugugugcgaagcuuc

SEQ ID NO: 2521 - RNA, 22 nt, Glycine max
  GMmerge_1048896
uucuucuuccaaugcaucaaag

SEQ ID NO: 2522 - RNA, 22 nt, Glycine max
  GMmerge_1442629
ucugcuauccucaacuuaugaa

SEQ ID NO: 2523 - RNA, 19 nt, Glycine max
  GMmerge_2547131
ucugccggaauacgugauu

SEQ ID NO: 2524 - RNA, 22 nt, Glycine max
  GMmerge_8049629
ucugcaaucaacgucuugaugg

SEQ ID NO: 2525 - RNA, 21 nt, Glycine max
  GMmerge_10505992
ucugauuggguggagcuaugg

SEQ ID NO: 2526 - RNA, 22 nt, Glycine max
  GMmerge_32523
uucacuaggguucaggacaaua

SEQ ID NO: 2527 - RNA, 21 nt, Glycine max
  GMmerge_5521860
ucugaccaugaauucccaaac

SEQ ID NO: 2528 - RNA, 21 nt, Glycine max
  GMmerge_8162196
uguggcggaggugacggagua

SEQ ID NO: 2529 - RNA, 21 nt, Glycine max
  GMmerge_3100706
ucucugcuuuaauuuaucacc

SEQ ID NO: 2530 - RNA, 22 nt, Glycine max
  GMmerge_7268374
ucucuaccugacuaccuuaccc

SEQ ID NO: 2531 - RNA, 22 nt, Glycine max
  GMmerge_6783860
ucuccuagcugcuggauacuga

SEQ ID NO: 2532 - RNA, 22 nt, Glycine max
  GMmerge_218824
ucuccuacauaauuuagacaac

SEQ ID NO: 2533 - RNA, 21 nt, Glycine max
  GMmerge_9678784
ucucccaaaccggcaaccgcc

SEQ ID NO: 2534 - RNA, 21 nt, Glycine max
  GMmerge_7654278
ugauuguugaaagaaggaucu

SEQ ID NO: 2535 - RNA, 21 nt, Glycine max
  GMmerge_2658340
ugaugaaguaaaggaaauagu

SEQ ID NO: 2536 - RNA, 21 nt, Glycine max
  GMmerge_9076960
ucuaagacggugcugacauca

SEQ ID NO: 2537 - RNA, 21 nt, Glycine max
  GMmerge_8377268
ucuaagauuugguugggaaau

SEQ ID NO: 2538 - RNA, 19 nt, Glycine max
  GMmerge_6969506
ucgugucggugucgguguc

SEQ ID NO: 2539 - RNA, 22 nt, Glycine max
  GMmerge_2652871
ucgauaaaccucugcauccagc

SEQ ID NO: 2540 - RNA, 20 nt, Glycine max
  GMmerge_10806397
ucggacaccagacacggcaa

SEQ ID NO: 2541 - RNA, 21 nt, Glycine max
  GMmerge_3461641
ucgaugaggaaguccgauucg

SEQ ID NO: 2542 - RNA, 22 nt, Glycine max
  GMmerge_1220011
ucgaugaggaaguccgauucga

SEQ ID NO: 2543 - RNA, 21 nt, Glycine max
  GMmerge_8174132
ucgacgcugcacucaaucaug

SEQ ID NO: 2544 - RNA, 22 nt, Glycine max
  GMmerge_6822623
ucgacaauuuugaaugccugug

SEQ ID NO: 2545 - RNA, 20 nt, Glycine max
  GMmerge_2951510
uccuggcaguagagucauca

SEQ ID NO: 2546 - RNA, 22 nt, Glycine max
  GMmerge_10670695
uccuggacccauaaguuacuug

SEQ ID NO: 2547 - RNA, 22 nt, Glycine max
  GMmerge_4104684
uccugaaccugauguugguccu

SEQ ID NO: 2548 - RNA, 22 nt, Glycine max
  GMmerge_8804573
uccucuaggacaagauauaggg

SEQ ID NO: 2549 - RNA, 22 nt, Glycine max
  GMmerge_8425883
ggcugggaacaggcagggcacg

SEQ ID NO: 2550 - RNA, 21 nt, Glycine max
  GMmerge_9950942
gcucauucucuaucugucacc

SEQ ID NO: 2551 - RNA, 22 nt, Glycine max
  GMmerge_5539843
ucccugugauugcaucugagac

SEQ ID NO: 2552 - RNA, 21 nt, Glycine max
  GMmerge_667582
uccagaucauaucgccgguuc

SEQ ID NO: 2553 - RNA, 21 nt, Glycine max
  GMmerge_1687777
uccaauuucucuuaaugauau

SEQ ID NO: 2554 - RNA, 21 nt, Glycine max
  GMmerge_10045986
uccaauaggaaauucgguaau

SEQ ID NO: 2555 - RNA, 21 nt, Glycine max
  GMmerge_1940820
uccaagauuaagucuaucguu

SEQ ID NO: 2556 - RNA, 21 nt, Glycine max
  GMmerge_635558
uccaacaauucaacaagcucu

SEQ ID NO: 2557 - RNA, 21 nt, Glycine max
  GMmerge_4332963
uccaaagcugauccagaacaa

SEQ ID NO: 2558 - RNA, 22 nt, Glycine max
  GMmerge_4881452
ucauuugguuccauagaaauau

SEQ ID NO: 2559 - RNA, 21 nt, Glycine max
  GMmerge_11002274
ucauuuagaauugauggcaaa

SEQ ID NO: 2560 - RNA, 21 nt, Glycine max
  GMmerge_7916871
ucauuguuugauuguuaggau

SEQ ID NO: 2561 - RNA, 21 nt, Glycine max
  GMmerge_7612734
gaaggaagaugguaauagcuc

SEQ ID NO: 2562 - RNA, 22 nt, Glycine max
  GMmerge_2132462
cuuugaugcauuggaagaagaa

SEQ ID NO: 2563 - RNA, 22 nt, Glycine max
  GMmerge_9223039
cuucuuugagauucugagcaag

SEQ ID NO: 2564 - RNA, 22 nt, Glycine max
  GMmerge_2135810
cugucgaucaaccggacucacc

SEQ ID NO: 2565 - RNA, 22 nt, Glycine max
  GMmerge_9617916
ucaggccugcuaguagauaaau

SEQ ID NO: 2566 - RNA, 21 nt, Glycine max
  GMmerge_2609918
ucagccauccacaacaagguu

SEQ ID NO: 2567 - RNA, 21 nt, Glycine max
  GMmerge_1172811
cggcaaguuucucuuggcuac

SEQ ID NO: 2568 - RNA, 21 nt, Glycine max
  GMmerge_9539906
ucacuuagaauugauggcaaa

SEQ ID NO: 2569 - RNA, 22 nt, Glycine max
  GMmerge_3385197
ucacgugucauguuaugauugg

SEQ ID NO: 2570 - RNA, 22 nt, Glycine max
  GMmerge_2450142
ucaccauuuugcacaaauaaau

SEQ ID NO: 2571 - RNA, 20 nt, Glycine max
  GMmerge_2199081
ucacauggucgaucccaucu

SEQ ID NO: 2572 - RNA, 21 nt, Glycine max
  GMmerge_4147076
ucacaucuuaaagaaaacaug

SEQ ID NO: 2573 - RNA, 22 nt, Glycine max
  GMmerge_9790215
ucacagacaucauaaugaauga

SEQ ID NO: 2574 - RNA, 21 nt, Glycine max
  GMmerge_8500141
ucaauggaagacaauugauua

SEQ ID NO: 2575 - RNA, 22 nt, Glycine max
  GMmerge_5092822
ucaaguugauccguagaagacu

SEQ ID NO: 2576 - RNA, 22 nt, Glycine max
  GMmerge_2922766
caucguugacgcugacuguacg

SEQ ID NO: 2577 - RNA, 20 nt, Glycine max
  GMmerge_6957135
ucaagaucuaguagaaaugg

SEQ ID NO: 2578 - RNA, 22 nt, Glycine max
  GMmerge_4358322
ucaagauagacgcaacaaauau

SEQ ID NO: 2579 - RNA, 22 nt, Glycine max
  GMmerge_4429109
cagacauuuaauggauuggacu

SEQ ID NO: 2580 - RNA, 19 nt, Glycine max
  GMmerge_5594147
ucaagaaaagcaauauaag

SEQ ID NO: 2581 - RNA, 21 nt, Glycine max
  GMmerge_9791000
ucaacuugauccguaagcuuu

SEQ ID NO: 2582 - RNA, 22 nt, Glycine max
  GMmerge_4979733
ucaacuugauccguaagccuuu

SEQ ID NO: 2583 - RNA, 21 nt, Glycine max
  GMmerge_1150639
ucaacgauuuggcaaaauaug

SEQ ID NO: 2584 - RNA, 22 nt, Glycine max
  GMmerge_6647035
ucaacagugugccaugaauauc

SEQ ID NO: 2585 - RNA, 21 nt, Glycine max
  GMmerge_7287344
ucaacagcugaaggaauaaaa

SEQ ID NO: 2586 - RNA, 21 nt, Glycine max
  GMmerge_547928
ucaaauugggcaugccaagcu

SEQ ID NO: 2587 - RNA, 22 nt, Glycine max
  GMmerge_577894
ucaaauugauccguaaguugau

SEQ ID NO: 2588 - RNA, 22 nt, Glycine max
  GMmerge_8667524
caaccaguaaagaaauggaaua

SEQ ID NO: 2589 - RNA, 21 nt, Glycine max
  GMmerge_2552519
ucaaaugauauggacuuaaau

SEQ ID NO: 2590 - RNA, 21 nt, Glycine max
  GMmerge_1246088
ucaaauacucuuaauucaacc

SEQ ID NO: 2591 - RNA, 20 nt, Glycine max
  GMmerge_7438793
ucaaacuccuccuccucauc

SEQ ID NO: 2592 - RNA, 22 nt, Glycine max
  GMmerge_5192521
ucaaaaccaacacaaucuauaa

SEQ ID NO: 2593 - RNA, 21 nt, Glycine max
  GMmerge_5298812
uauuuuuccaguuuugcuuug

SEQ ID NO: 2594 - RNA, 21 nt, Glycine max
  GMmerge_633080
uauuucccaaagauuaugagu

SEQ ID NO: 2595 - RNA, 21 nt, Glycine max
  GMmerge_9207958
uauuucagucgaugcauuucc

SEQ ID NO: 2596 - RNA, 21 nt, Glycine max
  GMmerge_3276199
uauuggugcgguucaaucaga

SEQ ID NO: 2597 - RNA, 21 nt, Glycine max
  GMmerge_10859328
uauugauugaugcauuaggca

SEQ ID NO: 2598 - RNA, 22 nt, Glycine max
  GMmerge_2937727
aucaucagauucugaggcaaug

SEQ ID NO: 2599 - RNA, 21 nt, Glycine max
  GMmerge_6996260
auauggaugaagguuuggaga

SEQ ID NO: 2600 - RNA, 20 nt, Glycine max
  GMmerge_4011633
uauuacaaaaucaacaaaga

SEQ ID NO: 2601 - RNA, 22 nt, Glycine max
  GMmerge_10392865
uauguugucacauauucucgaa

SEQ ID NO: 2602 - RNA, 22 nt, Glycine max
  GMmerge_10946512
uauguucugaaacaugcuuagg

SEQ ID NO: 2603 - RNA, 22 nt, Glycine max
  GMmerge_4841886
uaugggcuuaaugagcggaaac

SEQ ID NO: 2604 - RNA, 22 nt, Glycine max
  GMmerge_5561315
uauggacauacggauugucaau

SEQ ID NO: 2605 - RNA, 21 nt, Glycine max
  GMmerge_4579376
uaugcauugauagugcuuugc

SEQ ID NO: 2606 - RNA, 20 nt, Glycine max
  GMmerge_1213264
uaugcaugaggccuuccauu

SEQ ID NO: 2607 - RNA, 22 nt, Glycine max
  GMmerge_1623031
uaugcagccacgacauuauggc

SEQ ID NO: 2608 - RNA, 22 nt, Glycine max
  GMmerge_9276
agguauugcuucggauacauuc

SEQ ID NO: 2609 - RNA, 22 nt, Glycine max
  GMmerge_881441
uauccccaucuucucuauccaa

SEQ ID NO: 2610 - RNA, 21 nt, Glycine max
  GMmerge_8918373
uaucaucacuuacaauuccuu

SEQ ID NO: 2611 - RNA, 22 nt, Glycine max
  GMmerge_6921405
agccgagugacgcgccagcgcu

SEQ ID NO: 2612 - RNA, 22 nt, Glycine max
  GMmerge_10363055
uauauugcuaacauacuccuaa

SEQ ID NO: 2613 - RNA, 21 nt, Glycine max
  GMmerge_1413129
uauaucuguuggacaacuuca

SEQ ID NO: 2614 - RNA, 22 nt, Glycine max
  GMmerge_8397088
uauagccaaaauuauuugaccg

SEQ ID NO: 2615 - RNA, 22 nt, Glycine max
  GMmerge_712696
uaguuuugaccaggacuuuaau

SEQ ID NO: 2616 - RNA, 22 nt, Glycine max
  GMmerge_7156121
uaguagcagcaaggauuuuggu

SEQ ID NO: 2617 - RNA, 22 nt, Glycine max
  GMmerge_8800253
uaguacgagugucgugucggug

SEQ ID NO: 2618 - RNA, 22 nt, Glycine max
  GMmerge_5307780
uaggcaauuaguauacagauuc

SEQ ID NO: 2619 - RNA, 20 nt, Glycine max
  GMmerge_6610212
uaggaauaugguauuguaac

SEQ ID NO: 2620 - RNA, 22 nt, Glycine max
  GMmerge_7178820
uagcaaacucuauugaucuuuc

SEQ ID NO: 2621 - RNA, 22 nt, Glycine max
  GMmerge_9515168
uagauucgaacucaguaucuau

SEQ ID NO: 2622 - RNA, 22 nt, Glycine max
  GMmerge_8075831
uagauguugacugucauauauc

SEQ ID NO: 2623 - RNA, 21 nt, Glycine max
  GMmerge_1516917
uagauguccccaccaacauac

SEQ ID NO: 2624 - RNA, 21 nt, Glycine max
  GMmerge_1832919
aagcaaugucaagaaaagcaa

SEQ ID NO: 2625 - RNA, 21 nt, Glycine max
  GMmerge_6502923
uagaugaucguggaaaugaca

SEQ ID NO: 2626 - RNA, 22 nt, Glycine max
  GMmerge_1268023
uagagauagugucaaaauagaa

SEQ ID NO: 2627 - RNA, 21 nt, Glycine max
  GMmerge_5432880
uacuuccauuggcuuuggaag

SEQ ID NO: 2628 - RNA, 21 nt, Glycine max
  GMmerge_3864707
uacuccguuugugcaucuaug

SEQ ID NO: 2629 - RNA, 21 nt, Glycine max
  GMmerge_9301967
uuuuaauugugcaggauucca

SEQ ID NO: 2630 - RNA, 22 nt, Glycine max
  GMmerge_3226401
uaccucaacaacgucuuugaaa

SEQ ID NO: 2631 - RNA, 21 nt, Glycine max
  GMmerge_6356207
uaccuauuccaccaauuccau

SEQ ID NO: 2632 - RNA, 22 nt, Glycine max
  GMmerge_10194099
uacccgacggguacggggaugg

SEQ ID NO: 2633 - RNA, 21 nt, Glycine max
  GMmerge_6380115
uaccaugaggucaaaagaaca

SEQ ID NO: 2634 - RNA, 21 nt, Glycine max
  GMmerge_7907184
uugauauuguuugauagcaua

SEQ ID NO: 2635 - RNA, 22 nt, Glycine max
  GMmerge_3686729
uucuccuacauaauuuagacaa

SEQ ID NO: 2636 - RNA, 21 nt, Glycine max
  GMmerge_2765741
uacaacauuuccaaagcaucc

SEQ ID NO: 2637 - RNA, 21 nt, Glycine max
  GMmerge_10350553
uacaacauaggcuccaacgaa

SEQ ID NO: 2638 - RNA, 21 nt, Glycine max
  GMmerge_1250300
uaauuuuuaagacuuacggau

SEQ ID NO: 2639 - RNA, 21 nt, Glycine max
  GMmerge_6601463
uaauuguuucgggaauaccau

SEQ ID NO: 2640 - RNA, 22 nt, Glycine max
  GMmerge_7397724
uaauguccaaaagcgguagcca

SEQ ID NO: 2641 - RNA, 21 nt, Glycine max
  GMmerge_3927296
uaaugcauaccaaucaacuga

SEQ ID NO: 2642 - RNA, 20 nt, Glycine max
  GMmerge_2819043
uaaugaagccacauaaguau

SEQ ID NO: 2643 - RNA, 21 nt, Glycine max
  GMmerge_6137442
uaauauuuuaguuaaauggua

SEQ ID NO: 2644 - RNA, 22 nt, Glycine max
  GMmerge_5549511
uaauagacaaaaaggaaucacu

SEQ ID NO: 2645 - RNA, 22 nt, Glycine max
  GMmerge_7756776
uaauaaucuaaguagcauaacc

SEQ ID NO: 2646 - RNA, 22 nt, Glycine max
  GMmerge_6900544
uaagugaaguuguccaacagau

SEQ ID NO: 2647 - RNA, 21 nt, Glycine max
  GMmerge_1710570
uaaggaugaugcucuucaauu

SEQ ID NO: 2648 - RNA, 21 nt, Glycine max
  GMmerge_3135523
uggaacucaaacgacgucaua

SEQ ID NO: 2649 - RNA, 21 nt, Glycine max
  GMmerge_7084977
ugcuuggacuaagguguuuug

SEQ ID NO: 2650 - RNA, 20 nt, Glycine max
  GMmerge_7299688
uaagcaauugaagagcauca

SEQ ID NO: 2651 - RNA, 19 nt, Glycine max
  GMmerge_9681087
uaagauucugagcaagacu

SEQ ID NO: 2652 - RNA, 20 nt, Glycine max
  GMmerge_9451173
uaagagugagacgucagcuu

SEQ ID NO: 2653 - RNA, 21 nt, Glycine max
  GMmerge_239127
uaacuaucuucguaccaaucu

SEQ ID NO: 2654 - RNA, 21 nt, Glycine max
  GMmerge_10935144
uaaccaaaagucggauacgga

SEQ ID NO: 2655 - RNA, 22 nt, Glycine max
  GMmerge_3619002
uaacaacaugauuaacaggagg

SEQ ID NO: 2656 - RNA, 21 nt, Glycine max
  GMmerge_5703486
uaacaaacagucaaauaguuc

SEQ ID NO: 2657 - RNA, 21 nt, Glycine max
  GMmerge_9412456
uaaaucacacguccaauuaca

SEQ ID NO: 2658 - RNA, 21 nt, Glycine max
  GMmerge_5443611
uaaauauguaugcauuucuau

SEQ ID NO: 2659 - RNA, 22 nt, Glycine max
  GMmerge_4099642
uaaagauuguccaaaaggaaua

SEQ ID NO: 2660 - RNA, 21 nt, Glycine max
  GMmerge_9402791
uaaagaacgaagauguuuaag

SEQ ID NO: 2661 - RNA, 21 nt, Glycine max
  GMmerge_1576802
uaaacuuaugaguuuaauuau

SEQ ID NO: 2662 - RNA, 22 nt, Glycine max
  GMmerge_5909126
uccuccuucgguaucauuaacu

SEQ ID NO: 2663 - RNA, 21 nt, Glycine max
  GMmerge_4391200
uaaaauauuagaccgcuguac

SEQ ID NO: 2664 - RNA, 21 nt, Glycine max
  GMmerge_2491087
uaaaagguuggugggauaauu

SEQ ID NO: 2665 - RNA, 21 nt, Glycine max
  GMmerge_6464369
uaaaaggcuuacggaucaagu

SEQ ID NO: 2666 - RNA, 21 nt, Glycine max
  GMmerge_6566964
uaaaagacuuacggaucaacu

SEQ ID NO: 2667 - RNA, 22 nt, Glycine max
  GMmerge_4826562
uaaaagacuuacagaucaacuu

SEQ ID NO: 2668 - RNA, 22 nt, Glycine max
  GMmerge_8942951
uaaaacauccuuugaaaccagu

SEQ ID NO: 2669 - RNA, 22 nt, Glycine max
  GMmerge_8694776
uaaaaaagccugagccuaaccu

SEQ ID NO: 2670 - RNA, 22 nt, Glycine max
  GMmerge_3000998
uauuucucauaaacacggaucc

SEQ ID NO: 2671 - RNA, 22 nt, Glycine max
  GMmerge_4938557
guuuccaugaaucaucuccaac

SEQ ID NO: 2672 - RNA, 21 nt, Glycine max
  GMmerge_10952677
guuguuuuaccuauuccacca

SEQ ID NO: 2673 - RNA, 21 nt, Glycine max
  GMmerge_6626799
uagcagauuuccauucuugua

SEQ ID NO: 2674 - RNA, 21 nt, Glycine max
  GMmerge_5041323
guuggaaccuauuacuuccaa

SEQ ID NO: 2675 - RNA, 20 nt, Glycine max
  GMmerge_8306785
guugcuucaaaggauaugca

SEQ ID NO: 2676 - RNA, 22 nt, Glycine max
  GMmerge_3093624
guugaguggguguuuaagguuu

SEQ ID NO: 2677 - RNA, 21 nt, Glycine max
  GMmerge_2102082
guucucgccagcagcaauggc

SEQ ID NO: 2678 - RNA, 21 nt, Glycine max
  GMmerge_5316656
uaaagaaaguaugcauguuuu

SEQ ID NO: 2679 - RNA, 22 nt, Glycine max
  GMmerge_18091
guuacaauaccauauuccuaca

SEQ ID NO: 2680 - RNA, 21 nt, Glycine max
  GMmerge_10071985
guguuggacaccagacacgga

SEQ ID NO: 2681 - RNA, 22 nt, Glycine max
  GMmerge_5193325
gugugacugucacaugucaaug

SEQ ID NO: 2682 - RNA, 22 nt, Glycine max
  GMmerge_3306073
gugcugacaucacgaccgucuu

SEQ ID NO: 2683 - RNA, 22 nt, Glycine max
  GMmerge_6389756
ggcagauuuuauuguagaucac

SEQ ID NO: 2684 - RNA, 21 nt, Glycine max
  GMmerge_4539020
gugauacaugaucgucaaagc

SEQ ID NO: 2685 - RNA, 21 nt, Glycine max
  GMmerge_2255389
gguaaucuuggacuuggguug

SEQ ID NO: 2686 - RNA, 21 nt, Glycine max
  GMmerge_4025407
agaucauguggcugcuucacc

SEQ ID NO: 2687 - RNA, 21 nt, Glycine max
  GMmerge_10502755
ggccguuggcgucccugaguu

SEQ ID NO: 2688 - RNA, 21 nt, Glycine max
  GMmerge_1481960
ggcaccccgugagcaggucuc

SEQ ID NO: 2689 - RNA, 22 nt, Glycine max
  GMmerge_2068422
ggauaaaauauugaacgucgga

SEQ ID NO: 2690 - RNA, 21 nt, Glycine max
  GMmerge_8262365
ggagcggcuucaaaaacaguu

SEQ ID NO: 2691 - RNA, 19 nt, Glycine max
  GMmerge_4149703
ggacuggaguguccguacu

SEQ ID NO: 2692 - RNA, 21 nt, Glycine max
  GMmerge_9198582
ggacgcgugucggacaccgga

SEQ ID NO: 2693 - RNA, 20 nt, Glycine max
  GMmerge_4043973
ggaagaaguuucuugcgcug

SEQ ID NO: 2694 - RNA, 21 nt, Glycine max
  GMmerge_8491393
ggaagaaagaaggcacucuca

SEQ ID NO: 2695 - RNA, 19 nt, Glycine max
  GMmerge_10182478
gcuauccauccugaguuuc

SEQ ID NO: 2696 - RNA, 21 nt, Glycine max
  GMmerge_4598488
gcguggaacgugauagucaac

SEQ ID NO: 2697 - RNA, 21 nt, Glycine max
  GMmerge_4233634
gcggaagcugucauucccugg

SEQ ID NO: 2698 - RNA, 22 nt, Glycine max
  GMmerge_6577661
gcauuuuacgacggucuuucaa

SEQ ID NO: 2699 - RNA, 21 nt, Glycine max
  GMmerge_10017926
aaauucuugucacgacucgca

SEQ ID NO: 2700 - RNA, 22 nt, Glycine max
  GMmerge_5762513
aaaugaauucgacagacacaau

SEQ ID NO: 2701 - RNA, 20 nt, Glycine max
  GMmerge_8021394
gauucguaaaucguacggau

SEQ ID NO: 2702 - RNA, 19 nt, Glycine max
  GMmerge_3115988
gauguugugucggugucgg

SEQ ID NO: 2703 - RNA, 22 nt, Glycine max
  GMmerge_4204921
gaugccgaaggcagggcuagug

SEQ ID NO: 2704 - RNA, 22 nt, Glycine max
  GMmerge_5967004
gaucaaguugauccguaagccu

SEQ ID NO: 2705 - RNA, 21 nt, Glycine max
  GMmerge_4158650
uuuugauaggaauguccguuu

SEQ ID NO: 2706 - RNA, 21 nt, Glycine max
  GMmerge_1730771
gagucauggacgaagacgugu

SEQ ID NO: 2707 - RNA, 21 nt, Glycine max
  GMmerge_10171676
gagucauacggaucaacuuga

SEQ ID NO: 2708 - RNA, 22 nt, Glycine max
  GMmerge_4223604
gagcggggaauucugaugugua

SEQ ID NO: 2709 - RNA, 21 nt, Glycine max
  GMmerge_11157275
uuuaauuuuuagagacgugug

SEQ ID NO: 2710 - RNA, 21 nt, Glycine max
  GMmerge_10939182
gaccucuuuaucaucgucugc

SEQ ID NO: 2711 - RNA, 22 nt, Glycine max
  GMmerge_3982792
gacaucuuuguuucugauucag

SEQ ID NO: 2712 - RNA, 22 nt, Glycine max
  GMmerge_5433194
gacacggacgcgugucggacac

SEQ ID NO: 2713 - RNA, 21 nt, Glycine max
  GMmerge_3385523
gacaaucuuuagugcaaacag

SEQ ID NO: 2714 - RNA, 21 nt, Glycine max
  GMmerge_10626944
gaaugauaaggagaagcugca

SEQ ID NO: 2715 - RNA, 20 nt, Glycine max
  GMmerge_3989027
gaaucuugaugaugcugcau

SEQ ID NO: 2716 - RNA, 19 nt, Glycine max
  GMmerge_4022673
gaagacauguuacuccgca

SEQ ID NO: 2717 - RNA, 20 nt, Glycine max
  GMmerge_10323837
gaacucuagaguaguguaga

SEQ ID NO: 2718 - RNA, 22 nt, Glycine max
  GMmerge_52681
gaacgcgugucggacaccggac

SEQ ID NO: 2719 - RNA, 21 nt, Glycine max
  GMmerge_3733086
uugaccguuaaccucagacgu

SEQ ID NO: 2720 - RNA, 22 nt, Glycine max
  GMmerge_2034264
gaaaguaccgacguugauagua

SEQ ID NO: 2721 - RNA, 20 nt, Glycine max
  GMmerge_9874748
cuuuuaaagccuggucugac

SEQ ID NO: 2722 - RNA, 21 nt, Glycine max
  GMmerge_733484
cuuucuacaucgguuaugacg

SEQ ID NO: 2723 - RNA, 21 nt, Glycine max
  GMmerge_8540607
uugaguaucaucucaucaacc

SEQ ID NO: 2724 - RNA, 21 nt, Glycine max
  GMmerge_6586715
cuugaugaugcugcaucagca

SEQ ID NO: 2725 - RNA, 21 nt, Glycine max
  GMmerge_10158550
cuugaaccgccagugacaaug

SEQ ID NO: 2726 - RNA, 22 nt, Glycine max
  GMmerge_9824665
cuugaaccgccagugacaaugg

SEQ ID NO: 2727 - RNA, 21 nt, Glycine max
  GMmerge_7586915
uuccauaauuguuugauguug

SEQ ID NO: 2728 - RNA, 20 nt, Glycine max
  GMmerge_7061259
cuguuucuacagugucguua

SEQ ID NO: 2729 - RNA, 22 nt, Glycine max
  GMmerge_9787149
cuguugggcaacuucacuuaau

SEQ ID NO: 2730 - RNA, 20 nt, Glycine max
  GMmerge_10557426
cuggacggggucaauggaug

SEQ ID NO: 2731 - RNA, 22 nt, Glycine max
  GMmerge_4612322
cugcucuuggaccggccucccc

SEQ ID NO: 2732 - RNA, 22 nt, Glycine max
  GMmerge_3154721
cugcagcacuuucagcccacca

SEQ ID NO: 2733 - RNA, 21 nt, Glycine max
  GMmerge_6960566
cugaucaucaagucgaauugu

SEQ ID NO: 2734 - RNA, 21 nt, Glycine max
  GMmerge_1526153
cugacacugacacggacgcgu

SEQ ID NO: 2735 - RNA, 21 nt, Glycine max
  GMmerge_1336663
cugaacccuagcgaaguaaau

SEQ ID NO: 2736 - RNA, 21 nt, Glycine max
  GMmerge_9484133
cugaacacgacaaaagacugg

SEQ ID NO: 2737 - RNA, 22 nt, Glycine max
  GMmerge_4342439
uaaaauugucgaaacugaugca

SEQ ID NO: 2738 - RNA, 20 nt, Glycine max
  GMmerge_8160947
cucgggccagacggagauug

SEQ ID NO: 2739 - RNA, 22 nt, Glycine max
  GMmerge_3963329
cuccccuacuugccuuuuagga

SEQ ID NO: 2740 - RNA, 21 nt, Glycine max
  GMmerge_9373010
cucacuuguuggcauauauga

SEQ ID NO: 2741 - RNA, 21 nt, Glycine max
  GMmerge_3772708
cucaaccaacgaugacaccgg

SEQ ID NO: 2742 - RNA, 21 nt, Glycine max
  GMmerge_8186480
cuauggagggucugguuuuuu

SEQ ID NO: 2743 - RNA, 22 nt, Glycine max
  GMmerge_3083851
cuauggagggucugguuuuuuc

SEQ ID NO: 2744 - RNA, 21 nt, Glycine max
  GMmerge_4415813
cuaucuguccguuugauccua

SEQ ID NO: 2745 - RNA, 21 nt, Glycine max
  GMmerge_9916536
cuaguaaucgccggucagcca

SEQ ID NO: 2746 - RNA, 19 nt, Glycine max
  GMmerge_5863168
cuagagauacuuaaacuaa

SEQ ID NO: 2747 - RNA, 22 nt, Glycine max
  GMmerge_5507369
cuaaggcaaggucugauugagc

SEQ ID NO: 2748 - RNA, 22 nt, Glycine max
  GMmerge_1897165
cuaacugaacauucuuagagca

SEQ ID NO: 2749 - RNA, 22 nt, Glycine max
  GMmerge_3050024
cguuucaacucgcauuccuacc

SEQ ID NO: 2750 - RNA, 22 nt, Glycine max
  GMmerge_10996026
cguuggugucaguuuguaaaac

SEQ ID NO: 2751 - RNA, 21 nt, Glycine max
  GMmerge_4945436
cguugacuguuccaaaggaac

SEQ ID NO: 2752 - RNA, 22 nt, Glycine max
  GMmerge_850039
cgugucggacaccggacacggc

SEQ ID NO: 2753 - RNA, 20 nt, Glycine max
  GMmerge_8270625
cguaguacgggugucguguc

SEQ ID NO: 2754 - RNA, 19 nt, Glycine max
  GMmerge_5182733
cguagauccccacaacagu

SEQ ID NO: 2755 - RNA, 22 nt, Glycine max
  GMmerge_8609466
cggguucggguuugggaucggg

SEQ ID NO: 2756 - RNA, 19 nt, Glycine max
  GMmerge_10706704
cgggugucgugucgguguc

SEQ ID NO: 2757 - RNA, 21 nt, Glycine max
  GMmerge_1159562
cgggugucgugucgaugucga

SEQ ID NO: 2758 - RNA, 21 nt, Glycine max
  GMmerge_3087672
uguaaacucgacucguagaau

SEQ ID NO: 2759 - RNA, 21 nt, Glycine max
  GMmerge_11104138
uggcggcauccauggaggaac

SEQ ID NO: 2760 - RNA, 21 nt, Glycine max
  GMmerge_5040801
cggauacggacacguggacac

SEQ ID NO: 2761 - RNA, 20 nt, Glycine max
  GMmerge_10774542
uggauagaaacauucuugac

SEQ ID NO: 2762 - RNA, 20 nt, Glycine max
  GMmerge_9320914
cggacacgacacggauacgg

SEQ ID NO: 2763 - RNA, 22 nt, Glycine max
  GMmerge_10606918
cggacacgacacggacacgaac

SEQ ID NO: 2764 - RNA, 20 nt, Glycine max
  GMmerge_6880726
cggacaccggacacggcaaa

SEQ ID NO: 2765 - RNA, 21 nt, Glycine max
  GMmerge_10199153
cggaaauggagauguuggaua

SEQ ID NO: 2766 - RNA, 20 nt, Glycine max
  GMmerge_357950
cgcuuggacgcgccuggggc

SEQ ID NO: 2767 - RNA, 22 nt, Glycine max
  GMmerge_1942274
cgcaaguagauuuuuaagacuu

SEQ ID NO: 2768 - RNA, 20 nt, Glycine max
  GMmerge_289838
ugccuggcucccuguaugcc

SEQ ID NO: 2769 - RNA, 21 nt, Glycine max
  GMmerge_5071244
ugcagcgcuaguggacuugcu

SEQ ID NO: 2770 - RNA, 21 nt, Glycine max
  GMmerge_2650810
ugauuuaugagcaugcuccua

SEQ ID NO: 2771 - RNA, 21 nt, Glycine max
  GMmerge_4026605
cgaccugaccuacauaaaguc

SEQ ID NO: 2772 - RNA, 21 nt, Glycine max
  GMmerge_7141097
cgacaccgacacggacaccgg

SEQ ID NO: 2773 - RNA, 21 nt, Glycine max
  GMmerge_10560018
cgaaucaaguugauccguaag

SEQ ID NO: 2774 - RNA, 21 nt, Glycine max
  GMmerge_6032426
ugaucuuuaagacuaacggau

SEQ ID NO: 2775 - RNA, 21 nt, Glycine max
  GMmerge_11131706
cgaacccuggugcagcgguaa

SEQ ID NO: 2776 - RNA, 21 nt, Glycine max
  GMmerge_10699204
ccuguccaucggaaacggagc

SEQ ID NO: 2777 - RNA, 19 nt, Glycine max
  GMmerge_5890991
ccucgacgauuguggcggc

SEQ ID NO: 2778 - RNA, 22 nt, Glycine max
  GMmerge_1217409
ccucagaaacuucuggaagacg

SEQ ID NO: 2779 - RNA, 19 nt, Glycine max
  GMmerge_2646131
ccuacuuccccaucaggcu

SEQ ID NO: 2780 - RNA, 22 nt, Glycine max
  GMmerge_6907358
ccuaauaaccgauguagaaugu

SEQ ID NO: 2781 - RNA, 21 nt, Glycine max
  GMmerge_5921501
ccguauaagaaugcaggacgg

SEQ ID NO: 2782 - RNA, 22 nt, Glycine max
  GMmerge_98237
ccggaagucucuuacagaucaa

SEQ ID NO: 2783 - RNA, 21 nt, Glycine max
  GMmerge_6081797
ccgacaccgacacggacaccg

SEQ ID NO: 2784 - RNA, 22 nt, Glycine max
  GMmerge_569255
ugaagcccauaagccaagacgc

SEQ ID NO: 2785 - RNA, 22 nt, Glycine max
  GMmerge_679449
cccuuaaaaaucgguucauaag

SEQ ID NO: 2786 - RNA, 21 nt, Glycine max
  GMmerge_409308
cccuaaaagaugaaaauacaa

SEQ ID NO: 2787 - RNA, 19 nt, Glycine max
  GMmerge_5567851
ccccauggacgucaggaua

SEQ ID NO: 2788 - RNA, 22 nt, Glycine max
  GMmerge_2796242
cccacggaaacuguauacaaua

SEQ ID NO: 2789 - RNA, 22 nt, Glycine max
  GMmerge_5668590
cccaccauuguuguccauuaaa

SEQ ID NO: 2790 - RNA, 19 nt, Glycine max
  GMmerge_1232893
ccaaaagguaacggaggcg

SEQ ID NO: 2791 - RNA, 21 nt, Glycine max
  GMmerge_831586
ucuggauaagaaaucaggaau

SEQ ID NO: 2792 - RNA, 22 nt, Glycine max
  GMmerge_8999953
cauuugguuggauuuuugaaaa

SEQ ID NO: 2793 - RNA, 21 nt, Glycine max
  GMmerge_3945130
ucugaugcaggaccaugugac

SEQ ID NO: 2794 - RNA, 22 nt, Glycine max
  GMmerge_6365485
cauuaagcacuaaauugccaau

SEQ ID NO: 2795 - RNA, 21 nt, Glycine max
  GMmerge_490383
caugugccccccuuccccauc

SEQ ID NO: 2796 - RNA, 20 nt, Glycine max
  GMmerge_2091615
caugucgaacaucggacaca

SEQ ID NO: 2797 - RNA, 21 nt, Glycine max
  GMmerge_10667564
caugcaauucaaagaggcaua

SEQ ID NO: 2798 - RNA, 20 nt, Glycine max
  GMmerge_4612104
cauccaccuuugaagauccc

SEQ ID NO: 2799 - RNA, 22 nt, Glycine max
  GMmerge_10059450
cauaugugucacauucuucaua

SEQ ID NO: 2800 - RNA, 20 nt, Glycine max
  GMmerge_8477593
cauaucaauuaagggcuuga

SEQ ID NO: 2801 - RNA, 21 nt, Glycine max
  GMmerge_8903880
cauaggacucucaagagaugg

SEQ ID NO: 2802 - RNA, 22 nt, Glycine max
  GMmerge_10418715
cauaaccacccauucauaagug

SEQ ID NO: 2803 - RNA, 21 nt, Glycine max
  GMmerge_8107485
cauaacauaaggacgacgaau

SEQ ID NO: 2804 - RNA, 22 nt, Glycine max
  GMmerge_8207924
caguuguccuaauaaccgaugu

SEQ ID NO: 2805 - RNA, 21 nt, Glycine max
  GMmerge_8876126
caggugcagcaccaucaagau

SEQ ID NO: 2806 - RNA, 22 nt, Glycine max
  GMmerge_10800448
caggucgaagcagccaauaaga

SEQ ID NO: 2807 - RNA, 22 nt, Glycine max
  GMmerge_530462
caggaugucacaugaccuuugu

SEQ ID NO: 2808 - RNA, 21 nt, Glycine max
  GMmerge_1381960
cagcugaauccucuuaugauc

SEQ ID NO: 2809 - RNA, 21 nt, Glycine max
  GMmerge_1999770
cagcauagaauucgguagaau

SEQ ID NO: 2810 - RNA, 21 nt, Glycine max
  GMmerge_6200414
cagcaccaucaagauucacau

SEQ ID NO: 2811 - RNA, 21 nt, Glycine max
  GMmerge_8592292
cacgucucuaaaaauuaaaug

SEQ ID NO: 2812 - RNA, 22 nt, Glycine max
  GMmerge_9773750
cacguaucaugccacgucaucc

SEQ ID NO: 2813 - RNA, 19 nt, Glycine max
  GMmerge_4695557
cacgguugucugacagacc

SEQ ID NO: 2814 - RNA, 21 nt, Glycine max
  GMmerge_8362892
ucccgggaacacaagauugca

SEQ ID NO: 2815 - RNA, 21 nt, Glycine max
  GMmerge_2336174
caauuuugcuuugaaugggua

SEQ ID NO: 2816 - RNA, 20 nt, Glycine max
  GMmerge_510913
caauuggauccuauaacuua

SEQ ID NO: 2817 - RNA, 21 nt, Glycine max
  GMmerge_7680280
caaugcuuauccuuuucuugu

SEQ ID NO: 2818 - RNA, 21 nt, Glycine max
  GMmerge_1145265
caaucuuuagugcaaacagga

SEQ ID NO: 2819 - RNA, 21 nt, Glycine max
  GMmerge_6657296
caaguuuuggaagacaacacc

SEQ ID NO: 2820 - RNA, 22 nt, Glycine max
  GMmerge_4400557
ucauccaaagcagauccagaac

SEQ ID NO: 2821 - RNA, 21 nt, Glycine max
  GMmerge_10659280
caaguaggggugggaauaggu

SEQ ID NO: 2822 - RNA, 21 nt, Glycine max
  GMmerge_2905093
caagauuuuacuguaucuaua

SEQ ID NO: 2823 - RNA, 22 nt, Glycine max
  GMmerge_4446165
caacuugauccguaagacuucu

SEQ ID NO: 2824 - RNA, 19 nt, Glycine max
  GMmerge_860767
caacaugcuugaggacucc

SEQ ID NO: 2825 - RNA, 20 nt, Glycine max
  GMmerge_4641420
caacacuaagcaucguuuua

SEQ ID NO: 2826 - RNA, 22 nt, Glycine max
  GMmerge_7844574
caaauuaguuaggaucucuuuc

SEQ ID NO: 2827 - RNA, 22 nt, Glycine max
  GMmerge_5245038
caaacugaaaagcuuaccucua

SEQ ID NO: 2828 - RNA, 22 nt, Glycine max
  GMmerge_4468265
uauugucucugcuuuaauuuau

SEQ ID NO: 2829 - RNA, 21 nt, Glycine max
  GMmerge_9657738
auuugacucagacucauuuga

SEQ ID NO: 2830 - RNA, 20 nt, Glycine max
  GMmerge_5574695
auuucuggaagaaguugaug

SEQ ID NO: 2831 - RNA, 21 nt, Glycine max
  GMmerge_3711452
auuuaagaucugcuggaauuc

SEQ ID NO: 2832 - RNA, 21 nt, Glycine max
  GMmerge_2721193
auugcacacaauaucuuugcc

SEQ ID NO: 2833 - RNA, 22 nt, Glycine max
  GMmerge_4179454
auugaggaccacauaaguuggg

SEQ ID NO: 2834 - RNA, 22 nt, Glycine max
  GMmerge_7757745
auugacuguuggcaguuggcac

SEQ ID NO: 2835 - RNA, 22 nt, Glycine max
  GMmerge_742075
auucccaugguuucucaggauu

SEQ ID NO: 2836 - RNA, 22 nt, Glycine max
  GMmerge_7021589
auucauuaugauauccgugaug

SEQ ID NO: 2837 - RNA, 21 nt, Glycine max
  GMmerge_565015
auucaguuggaguugguuaca

SEQ ID NO: 2838 - RNA, 21 nt, Glycine max
  GMmerge_8003366
uaguacgggugucgugucggu

SEQ ID NO: 2839 - RNA, 22 nt, Glycine max
  GMmerge_9923964
auggacaccggacacgacacgg

SEQ ID NO: 2840 - RNA, 21 nt, Glycine max
  GMmerge_1715011
augccaaacugccaaaacuuu

SEQ ID NO: 2841 - RNA, 22 nt, Glycine max
  GMmerge_10421732
augcauacacauuaacaucggu

SEQ ID NO: 2842 - RNA, 21 nt, Glycine max
  GMmerge_7702223
augcagggcgcgaccuucggc

SEQ ID NO: 2843 - RNA, 21 nt, Glycine max
  GMmerge_1974901
augauguaagcaaaauugauc

SEQ ID NO: 2844 - RNA, 20 nt, Glycine max
  GMmerge_4948034
augaugguuuauagauucag

SEQ ID NO: 2845 - RNA, 21 nt, Glycine max
  GMmerge_2816646
uacagguuacagagauuugga

SEQ ID NO: 2846 - RNA, 22 nt, Glycine max
  GMmerge_990879
augacguggcacuaaaauugac

SEQ ID NO: 2847 - RNA, 20 nt, Glycine max
  GMmerge_7199355
augacgugagaacaugguaa

SEQ ID NO: 2848 - RNA, 21 nt, Glycine max
  GMmerge_333480
aucuugaaacauacucucguu

SEQ ID NO: 2849 - RNA, 21 nt, Glycine max
  GMmerge_419559
aucuccaccuauucaaaauuu

SEQ ID NO: 2850 - RNA, 21 nt, Glycine max
  GMmerge_4072254
auccagaacaaguaaaacucu

SEQ ID NO: 2851 - RNA, 22 nt, Glycine max
  GMmerge_3547098
auccaaaugaaugaagaacuuc

SEQ ID NO: 2852 - RNA, 19 nt, Glycine max
  GMmerge_7563254
aucauguggcaguuucacc

SEQ ID NO: 2853 - RNA, 22 nt, Glycine max
  GMmerge_10284201
aucaucaagaggaauuuguaag

SEQ ID NO: 2854 - RNA, 21 nt, Glycine max
  GMmerge_5413446
aucagguuuuugucaacuugg

SEQ ID NO: 2855 - RNA, 21 nt, Glycine max
  GMmerge_5637070
aucagcuccgacgagcaccga

SEQ ID NO: 2856 - RNA, 20 nt, Glycine max
  GMmerge_820829
aucacacugauauguuugca

SEQ ID NO: 2857 - RNA, 22 nt, Glycine max
  GMmerge_7737105
aucaaguugauccguauuguuc

SEQ ID NO: 2858 - RNA, 21 nt, Glycine max
  GMmerge_278298
aucaacuugauccggaagucu

SEQ ID NO: 2859 - RNA, 22 nt, Glycine max
  GMmerge_1951450
auauugucaugucauuuuugua

SEQ ID NO: 2860 - RNA, 21 nt, Glycine max
  GMmerge_2018346
auaugucaaaaugcucgaaau

SEQ ID NO: 2861 - RNA, 21 nt, Glycine max
  GMmerge_3298281
auaugauggguaguucuacua

SEQ ID NO: 2862 - RNA, 22 nt, Glycine max
  GMmerge_5175503
auaucccuuggaagaaaguuau

SEQ ID NO: 2863 - RNA, 21 nt, Glycine max
  GMmerge_10356575
auauagacucucauauauguu

SEQ ID NO: 2864 - RNA, 22 nt, Glycine max
  GMmerge_4863234
auagaaauaucccuguaaguaa

SEQ ID NO: 2865 - RNA, 21 nt, Glycine max
  GMmerge_587886
gugauuccuugcuauuauaga

SEQ ID NO: 2866 - RNA, 21 nt, Glycine max
  GMmerge_856898
gucacgaucuuauuggaugau

SEQ ID NO: 2867 - RNA, 21 nt, Glycine max
  GMmerge_9451569
auacaauaauaaacggggcau

SEQ ID NO: 2868 - RNA, 21 nt, Glycine max
  GMmerge_4085788
auaagucacccauaucaggua

SEQ ID NO: 2869 - RNA, 21 nt, Glycine max
  GMmerge_9305284
aguggcguagauccccacaac

SEQ ID NO: 2870 - RNA, 21 nt, Glycine max
  GMmerge_1887307
aguggaccgagcuaaacuagc

SEQ ID NO: 2871 - RNA, 21 nt, Glycine max
  GMmerge_1090020
agugauacagggucuuccaca

SEQ ID NO: 2872 - RNA, 19 nt, Glycine max
  GMmerge_4160930
agucgcaacuggcagcauu

SEQ ID NO: 2873 - RNA, 22 nt, Glycine max
  GMmerge_2670208
agucccgggaacacaagauugc

SEQ ID NO: 2874 - RNA, 21 nt, Glycine max
  GMmerge_9346822
aguagaugguacauggcuuua

SEQ ID NO: 2875 - RNA, 21 nt, Glycine max
  GMmerge_6746559
aguaacuuuacugcucuugac

SEQ ID NO: 2876 - RNA, 21 nt, Glycine max
  GMmerge_4761595
ggacuacaaccuaggacgcau

SEQ ID NO: 2877 - RNA, 21 nt, Glycine max
  GMmerge_1249249
aggcuuacagaucaacuugau

SEQ ID NO: 2878 - RNA, 21 nt, Glycine max
  GMmerge_2004268
aggcauuuugaugaaaucuuu

SEQ ID NO: 2879 - RNA, 22 nt, Glycine max
  GMmerge_417564
aggauccagacuggcucuucca

SEQ ID NO: 2880 - RNA, 21 nt, Glycine max
  GMmerge_9110368
aggaggaaagacuagaauggu

SEQ ID NO: 2881 - RNA, 20 nt, Glycine max
  GMmerge_10790956
aggacuuuagaagagguugg

SEQ ID NO: 2882 - RNA, 19 nt, Glycine max
  GMmerge_10556209
aggaagaaacaaguucugc

SEQ ID NO: 2883 - RNA, 22 nt, Glycine max
  GMmerge_2413686
gaugaugaugaagacagaugaa

SEQ ID NO: 2884 - RNA, 19 nt, Glycine max
  GMmerge_177145
agcuuuauuaggcuugagc

SEQ ID NO: 2885 - RNA, 19 nt, Glycine max
  GMmerge_1836670
agcgaaagcacagggcucu

SEQ ID NO: 2886 - RNA, 21 nt, Glycine max
  GMmerge_2011305
agcaucauaucuccugcauag

SEQ ID NO: 2887 - RNA, 21 nt, Glycine max
  GMmerge_6522998
gagcaaauccuuguuggacug

SEQ ID NO: 2888 - RNA, 21 nt, Glycine max
  GMmerge_6392038
agaguuuuacuuguucuggau

SEQ ID NO: 2889 - RNA, 22 nt, Glycine max
  GMmerge_2826832
gaccaacuagaggagucaauca

SEQ ID NO: 2890 - RNA, 21 nt, Glycine max
  GMmerge_3247837
agacgauuaguaguaaauaac

SEQ ID NO: 2891 - RNA, 19 nt, Glycine max
  GMmerge_3284094
agacaagugugaugaccuc

SEQ ID NO: 2892 - RNA, 22 nt, Glycine max
  GMmerge_6677906
agaaguguucuuccggaagacg

SEQ ID NO: 2893 - RNA, 21 nt, Glycine max
  GMmerge_7637527
agaagguaaacuacguggacu

SEQ ID NO: 2894 - RNA, 19 nt, Glycine max
  GMmerge_10161397
agaaggaagauggaugaaa

SEQ ID NO: 2895 - RNA, 22 nt, Glycine max
  GMmerge_2685847
agaagaaucugucugauuuaag

SEQ ID NO: 2896 - RNA, 20 nt, Glycine max
  GMmerge_10432381
agaacaugacacgugacagu

SEQ ID NO: 2897 - RNA, 22 nt, Glycine max
  GMmerge_2569985
acuugauccguaagagacuucc

SEQ ID NO: 2898 - RNA, 22 nt, Glycine max
  GMmerge_2270790
cucccucagcugaagaaguacu

SEQ ID NO: 2899 - RNA, 22 nt, Glycine max
  GMmerge_1989132
cucacaguauucugaagucguc

SEQ ID NO: 2900 - RNA, 21 nt, Glycine max
  GMmerge_5776471
acuguauggcaguccuuguuu

SEQ ID NO: 2901 - RNA, 21 nt, Glycine max
  GMmerge_9494767
acucuaaguaaacucgguaga

SEQ ID NO: 2902 - RNA, 21 nt, Glycine max
  GMmerge_2885873
acucauacggaucaacuugau

SEQ ID NO: 2903 - RNA, 21 nt, Glycine max
  GMmerge_3274889
acuaucaacgucgguacuuuc

SEQ ID NO: 2904 - RNA, 21 nt, Glycine max
  GMmerge_5399013
acgugacacgugaucgucauc

SEQ ID NO: 2905 - RNA, 21 nt, Glycine max
  GMmerge_10888667
acgugacacgugaucgucagc

SEQ ID NO: 2906 - RNA, 20 nt, Glycine max
  GMmerge_3477907
acgggucgcucucaccuagg

SEQ ID NO: 2907 - RNA, 20 nt, Glycine max
  GMmerge_1650995
acggcagggacuaacguggc

SEQ ID NO: 2908 - RNA, 21 nt, Glycine max
  GMmerge_7280407
acgacgcacauuaugaagaac

SEQ ID NO: 2909 - RNA, 19 nt, Glycine max
  GMmerge_2710539
acgacacggacacggacac

SEQ ID NO: 2910 - RNA, 22 nt, Glycine max
  GMmerge_7172290
acgaauuccaacagaucuuaaa

SEQ ID NO: 2911 - RNA, 22 nt, Glycine max
  GMmerge_7406702
accucaugagugauugaaucua

SEQ ID NO: 2912 - RNA, 19 nt, Glycine max
  GMmerge_9437089
accuauagagucaggcacc

SEQ ID NO: 2913 - RNA, 19 nt, Glycine max
  GMmerge_11224360
accggaacuuaucguggcc

SEQ ID NO: 2914 - RNA, 22 nt, Glycine max
  GMmerge_1242378
acauccacgugucaugccacgu

SEQ ID NO: 2915 - RNA, 20 nt, Glycine max
  GMmerge_5373009
ccugggauuggcuuugggcu

SEQ ID NO: 2916 - RNA, 20 nt, Glycine max
  GMmerge_10045139
acaccggacacgacacggau

SEQ ID NO: 2917 - RNA, 22 nt, Glycine max
  GMmerge_10438602
acaauccucaccuuacaaccca

SEQ ID NO: 2918 - RNA, 22 nt, Glycine max
  GMmerge_3513080
ccaugugacacauucucacguc

SEQ ID NO: 2919 - RNA, 21 nt, Glycine max
  GMmerge_346565
aauuuaaacauugacugucac

SEQ ID NO: 2920 - RNA, 22 nt, Glycine max
  GMmerge_5838014
aauuaaagguagugugguuaaa

SEQ ID NO: 2921 - RNA, 22 nt, Glycine max
  GMmerge_11133776
cauccaaaaacucuacagccug

SEQ ID NO: 2922 - RNA, 20 nt, Glycine max
  GMmerge_6307797
aaucuuuugcccgguacuau

SEQ ID NO: 2923 - RNA, 21 nt, Glycine max
  GMmerge_3627219
aaucuuacggaucaacuugau

SEQ ID NO: 2924 - RNA, 21 nt, Glycine max
  GMmerge_5053380
caguccauucagagaucuggg

SEQ ID NO: 2925 - RNA, 21 nt, Glycine max
  GMmerge_11140132
aaucagaaugguagaucaaca

SEQ ID NO: 2926 - RNA, 21 nt, Glycine max
  GMmerge_234687
aaucagaacaugacacaugac

SEQ ID NO: 2927 - RNA, 22 nt, Glycine max
  GMmerge_5001428
aaucaacuugauccguaagucu

SEQ ID NO: 2928 - RNA, 21 nt, Glycine max
  GMmerge_6082889
aauagaugguaaaucucuaaa

SEQ ID NO: 2929 - RNA, 20 nt, Glycine max
  GMmerge_5304458
aauaauuauugucuuuuaau

SEQ ID NO: 2930 - RNA, 21 nt, Glycine max
  GMmerge_7230508
aauaagaacgugacaugugac

SEQ ID NO: 2931 - RNA, 22 nt, Glycine max
  GMmerge_4716184
aaguugauccguaugcgcuuaa

SEQ ID NO: 2932 - RNA, 22 nt, Glycine max
  GMmerge_837961
aaguccacugacgcugcauaau

SEQ ID NO: 2933 - RNA, 22 nt, Glycine max
  GMmerge_4045339
aagguucuuccgguagaauaaa

SEQ ID NO: 2934 - RNA, 21 nt, Glycine max
  GMmerge_8765029
aagggcauauguuaacugaac

SEQ ID NO: 2935 - RNA, 22 nt, Glycine max
  GMmerge_10454343
caacauaauggaacuugaaugu

SEQ ID NO: 2936 - RNA, 22 nt, Glycine max
  GMmerge_5137528
aagcuucaaagacggugcugac

SEQ ID NO: 2937 - RNA, 22 nt, Glycine max
  GMmerge_3009898
aagcguguuggguuaugggcuu

SEQ ID NO: 2938 - RNA, 22 nt, Glycine max
  GMmerge_5604054
aagcgugauuuuccgucgguga

SEQ ID NO: 2939 - RNA, 22 nt, Glycine max
  GMmerge_10183488
aagcauggacgcgacucaucac

SEQ ID NO: 2940 - RNA, 22 nt, Glycine max
  GMmerge_2805807
aagagucauacggaucaacuug

SEQ ID NO: 2941 - RNA, 21 nt, Glycine max
  GMmerge_9968558
aagagacuuccggaucaacuu

SEQ ID NO: 2942 - RNA, 22 nt, Glycine max
  GMmerge_4693030
aagagacuuccggaucaacuug

SEQ ID NO: 2943 - RNA, 21 nt, Glycine max
  GMmerge_5277395
aagagacuuccgaaucaacuu

SEQ ID NO: 2944 - RNA, 22 nt, Glycine max
  GMmerge_5566745
aagagacuuacggaucaacuug

SEQ ID NO: 2945 - RNA, 20 nt, Glycine max
  GMmerge_645860
aagaccaagacgggcuagcu

SEQ ID NO: 2946 - RNA, 21 nt, Glycine max
  GMmerge_6590488
aacuugaucuguacgauuuac

SEQ ID NO: 2947 - RNA, 21 nt, Glycine max
  GMmerge_10285538
augcaaugccauugauuauaa

SEQ ID NO: 2948 - RNA, 20 nt, Glycine max
  GMmerge_713908
aacagcgggagaaccuucuu

SEQ ID NO: 2949 - RNA, 22 nt, Glycine max
  GMmerge_2882367
aacaccgacacggacaucggac

SEQ ID NO: 2950 - RNA, 22 nt, Glycine max
  GMmerge_9085316
aacacccacucaaccauccaaa

SEQ ID NO: 2951 - RNA, 22 nt, Glycine max
  GMmerge_383057
aaaugcauauucauggacaaga

SEQ ID NO: 2952 - RNA, 19 nt, Glycine max
  GMmerge_8962879
aaaugcaguagacuauaau

SEQ ID NO: 2953 - RNA, 21 nt, Glycine max
  GMmerge_2157488
aaauaggauguucuaaaguau

SEQ ID NO: 2954 - RNA, 21 nt, Glycine max
  GMmerge_6614406
aucagauucuaaggcaauguc

SEQ ID NO: 2955 - RNA, 21 nt, Glycine max
  GMmerge_6608793
aaaggcuuacagaucaacuug

SEQ ID NO: 2956 - RNA, 20 nt, Glycine max
  GMmerge_3179203
aaagcaguaguaaacaauau

SEQ ID NO: 2957 - RNA, 21 nt, Glycine max
  GMmerge_8325374
aaagacuuacggaucaaguug

SEQ ID NO: 2958 - RNA, 22 nt, Glycine max
  GMmerge_9428902
aaacucaaacccgucggguauc

SEQ ID NO: 2959 - RNA, 22 nt, Glycine max
  GMmerge_2077029
aaacgggagacaacaaugauau

SEQ ID NO: 2960 - RNA, 21 nt, Glycine max
  GMmerge_9078900
aaaccguuaaaucaagcauua

SEQ ID NO: 2961 - RNA, 22 nt, Glycine max
  GMmerge_1645459
aaaccgauguuaaguuaaacgc

SEQ ID NO: 2962 - RNA, 22 nt, Glycine max
  GMmerge_9570613
aaacaguucaacaaggauuugc

SEQ ID NO: 2963 - RNA, 20 nt, Glycine max
  GMmerge_962893
auaacaacuaagaaguccuu

SEQ ID NO: 2964 - RNA, 20 nt, Glycine max
  GMmerge_6172732
aaaacggaugcgcgaacgcg

SEQ ID NO: 2965 - RNA, 21 nt, Glycine max
  GMmerge_8025525
aguauccaccuuaccaucuga

SEQ ID NO: 2966 - RNA, 21 nt, Glycine max
  GMmerge_741959
aggugcaggugcaucugcagg

SEQ ID NO: 2967 - RNA, 21 nt, Glycine max
  GMmerge_3942006
agcgacgacaaugacaacaac

SEQ ID NO: 2968 - RNA, 21 nt, Glycine max
  GMmerge_9333920
agcaaauccuuguuggacugu

SEQ ID NO: 2969 - RNA, 21 nt, Glycine max
  GMmerge_5618571
acggaacuuacaaagauuguu

SEQ ID NO: 2970 - RNA, 21 nt, Glycine max
  GMmerge_6309706
accgacacggacaccggacac

SEQ ID NO: 2971 - RNA, 21 nt, Glycine max
  GMmerge_5607387
acaccgacacggacaucggac

SEQ ID NO: 2972 - RNA, 21 nt, Glycine max
  GMmerge_5937323
acaagauugcaaagcuccgaa

SEQ ID NO: 2973 - RNA, 22 nt, Glycine max
  GMmerge_6947156
aaggcuuacggauuaaguugau

SEQ ID NO: 2974 - RNA, 22 nt, Glycine max
  GMmerge_7049584
aagaaaucaauagaaaauggac

SEQ ID NO: 2975 - RNA, 22 nt, Glycine max
  GMmerge_5662518
aacuugauccguaagacuuuua

SEQ ID NO: 2976 - RNA, 21 nt, Glycine max
  GMmerge_7753621
aaagaaagucuuacaagcuga

SEQ ID NO: 2977 - RNA, 22 nt, Glycine max
  GMmerge_2314744
aaaaugacaugacaauauacau

SEQ ID NO: 2978 - RNA, 21 nt, Glycine max
  GMmerge_324437
uuuuaggaguaugcuagcaau

SEQ ID NO: 2979 - RNA, 19 nt, Glycine max
  GMmerge_7133668
uuugauuccugauuuuuua

SEQ ID NO: 2980 - RNA, 22 nt, Glycine max
  GMmerge_2778953
uuugaaugccuacuuucaaaga

SEQ ID NO: 2981 - RNA, 20 nt, Glycine max
  GMmerge_5974551
uuucauagcaaauucggaac

SEQ ID NO: 2982 - RNA, 21 nt, Glycine max
  GMmerge_4674854
uuuagugccacguggauaguc

SEQ ID NO: 2983 - RNA, 22 nt, Glycine max
  GMmerge_7659277
uuuacaacacauuuugcacauc

SEQ ID NO: 2984 - RNA, 22 nt, Glycine max
  GMmerge_1021885
uuuaaacaaucuuuugcccggu

SEQ ID NO: 2985 - RNA, 21 nt, Glycine max
  GMmerge_3618462
uugggaauucauggucagaaa

SEQ ID NO: 2986 - RNA, 20 nt, Glycine max
  GMmerge_10355424
uuggauugaagggagcucua

SEQ ID NO: 2987 - RNA, 21 nt, Glycine max
  GMmerge_4880541
uugcugaugauuggaaauuug

SEQ ID NO: 2988 - RNA, 21 nt, Glycine max
  GMmerge_4222274
uugcucagaaucucaaagaag

SEQ ID NO: 2989 - RNA, 21 nt, Glycine max
  GMmerge_8726523
uugcagauggaaccugaauuu

SEQ ID NO: 2990 - RNA, 21 nt, Glycine max
  GMmerge_8063595
ugguccugcauuagagcguca

SEQ ID NO: 2991 - RNA, 22 nt, Glycine max
  GMmerge_9244506
uucuaccggaagaaccuucuuc

SEQ ID NO: 2992 - RNA, 22 nt, Glycine max
  GMmerge_5260006
uucuaaggccuauauauuaguu

SEQ ID NO: 2993 - RNA, 22 nt, Glycine max
  GMmerge_8479836
uuccuuuuggacaaucuuuagu

SEQ ID NO: 2994 - RNA, 22 nt, Glycine max
  GMmerge_9365639
uuccagagcagauugaucuucc

SEQ ID NO: 2995 - RNA, 20 nt, Glycine max
  GMmerge_4783834
uuaucauacugcauucuuac

SEQ ID NO: 2996 - RNA, 21 nt, Glycine max
  GMmerge_680059
uuauauuugaaugcuugaauu

SEQ ID NO: 2997 - RNA, 22 nt, Glycine max
  GMmerge_9151740
uuaaggaugaaccuucuucuuc

SEQ ID NO: 2998 - RNA, 21 nt, Glycine max
  GMmerge_10375787
uuaaaaaugaauccauuaaag

SEQ ID NO: 2999 - RNA, 22 nt, Glycine max
  GMmerge_4370199
ugucuccccgcuucuacuugcu

SEQ ID NO: 3000 - RNA, 21 nt, Glycine max
  GMmerge_5118542
uguauccggaggacuaugaag

SEQ ID NO: 3001 - RNA, 22 nt, Glycine max
  GMmerge_9539670
uguaaaucugucaauguugauc

SEQ ID NO: 3002 - RNA, 22 nt, Glycine max
  GMmerge_755366
uggggaacucagugguuuggga

SEQ ID NO: 3003 - RNA, 22 nt, Glycine max
  GMmerge_11111452
uggccaagaucaugucauugca

SEQ ID NO: 3004 - RNA, 21 nt, Glycine max
  GMmerge_3644919
uggagagauuaauugcacuug

SEQ ID NO: 3005 - RNA, 21 nt, Glycine max
  GMmerge_11020222
uggacguugauuguuaacaag

SEQ ID NO: 3006 - RNA, 19 nt, Glycine max
  GMmerge_1167084
ugcagaucuguuuuagaau

SEQ ID NO: 3007 - RNA, 21 nt, Glycine max
  GMmerge_1168086
ugauuuguaucaaccuuacgg

SEQ ID NO: 3008 - RNA, 22 nt, Glycine max
  GMmerge_4978917
ugaguuaucacauauacuauga

SEQ ID NO: 3009 - RNA, 19 nt, Glycine max
  GMmerge_3482326
ugacuaucacgugucaugu

SEQ ID NO: 3010 - RNA, 22 nt, Glycine max
  GMmerge_367316
ugaaucugaguuuuucguuggu

SEQ ID NO: 3011 - RNA, 22 nt, Glycine max
  GMmerge_1075571
ucuugggcugauuuacaaucaa

SEQ ID NO: 3012 - RNA, 22 nt, Glycine max
  GMmerge_9515567
ucugugucguuaauuaagugau

SEQ ID NO: 3013 - RNA, 22 nt, Glycine max
  GMmerge_9098251
ucucuauucaaggagucucgag

SEQ ID NO: 3014 - RNA, 21 nt, Glycine max
  GMmerge_9760626
uugaccauuaagcaaugacgu

SEQ ID NO: 3015 - RNA, 22 nt, Glycine max
  GMmerge_9447880
uccugagaagucaugggaaugg

SEQ ID NO: 3016 - RNA, 22 nt, Glycine max
  GMmerge_8129884
uccgauuucagaaugaagagga

SEQ ID NO: 3017 - RNA, 21 nt, Glycine max
  GMmerge_4704463
uccccuacuugccuuuuagga

SEQ ID NO: 3018 - RNA, 21 nt, Glycine max
  GMmerge_6942008
ucccacaucggcugccucaau

SEQ ID NO: 3019 - RNA, 19 nt, Glycine max
  GMmerge_4363727
uccauggccuagggaagug

SEQ ID NO: 3020 - RNA, 22 nt, Glycine max
  GMmerge_4883152
ucauugcuggaaguuguuugcu

SEQ ID NO: 3021 - RNA, 22 nt, Glycine max
  GMmerge_5263523
ucagucgaauacacaaggcuug

SEQ ID NO: 3022 - RNA, 20 nt, Glycine max
  GMmerge_2796299
ucaggaaauuaaugcacaug

SEQ ID NO: 3023 - RNA, 21 nt, Glycine max
  GMmerge_1214410
ucagacggacauucuuaucaa

SEQ ID NO: 3024 - RNA, 22 nt, Glycine max
  GMmerge_3864283
ucagaacaugacacaugacaau

SEQ ID NO: 3025 - RNA, 22 nt, Glycine max
  GMmerge_9442313
uaugugaaacuuucgucguggc

SEQ ID NO: 3026 - RNA, 21 nt, Glycine max
  GMmerge_3552656
uaugaagcacggacacuccaa

SEQ ID NO: 3027 - RNA, 21 nt, Glycine max
  GMmerge_38622
uagcugcuuguagaucuaaag

SEQ ID NO: 3028 - RNA, 22 nt, Glycine max
  GMmerge_2368708
uacggaugcguguuggacacca

SEQ ID NO: 3029 - RNA, 21 nt, Glycine max
  GMmerge_8475942
uacggacacagacacgugaac

SEQ ID NO: 3030 - RNA, 21 nt, Glycine max
  GMmerge_1210596
uacgaguugacucuugaguaa

SEQ ID NO: 3031 - RNA, 22 nt, Glycine max
  GMmerge_10898813
uacgaaucaacuugaucuguaa

SEQ ID NO: 3032 - RNA, 21 nt, Glycine max
  GMmerge_5841354
uacaaguagaugguacauggc

SEQ ID NO: 3033 - RNA, 21 nt, Glycine max
  GMmerge_6679300
uaaaugaguugauaaguuaua

SEQ ID NO: 3034 - RNA, 21 nt, Glycine max
  GMmerge_5061748
uaaaaggcuuacgaaucaagu

SEQ ID NO: 3035 - RNA, 21 nt, Glycine max
  GMmerge_6640462
uauguaggucaggucguaggc

SEQ ID NO: 3036 - RNA, 21 nt, Glycine max
  GMmerge_163688
guuccuacguggacgcgucuc

SEQ ID NO: 3037 - RNA, 21 nt, Glycine max
  GMmerge_3681182
uagacucucauauauguuaau

SEQ ID NO: 3038 - RNA, 22 nt, Glycine max
  GMmerge_588452
guggaaucagcgguauagacuu

SEQ ID NO: 3039 - RNA, 22 nt, Glycine max
  GMmerge_2192942
guccaagcaucaacauaauccc

SEQ ID NO: 3040 - RNA, 22 nt, Glycine max
  GMmerge_406677
gucagacaccggacacggcaag

SEQ ID NO: 3041 - RNA, 21 nt, Glycine max
  GMmerge_2498421
guauuuucaucuuuuagggac

SEQ ID NO: 3042 - RNA, 20 nt, Glycine max
  GMmerge_548662
guaaucuuggacuuggguug

SEQ ID NO: 3043 - RNA, 20 nt, Glycine max
  GMmerge_7515417
ggugucgugucggugucgga

SEQ ID NO: 3044 - RNA, 22 nt, Glycine max
  GMmerge_6823818
ggguauccccgaccccguucca

SEQ ID NO: 3045 - RNA, 22 nt, Glycine max
  GMmerge_6942869
cagcaaguccacugacgcugca

SEQ ID NO: 3046 - RNA, 21 nt, Glycine max
  GMmerge_3726585
ggacgcgugucggacaccgaa

SEQ ID NO: 3047 - RNA, 20 nt, Glycine max
  GMmerge_735056
ggaauguuggcuggcucgag

SEQ ID NO: 3048 - RNA, 21 nt, Glycine max
  GMmerge_9639668
gauguugacaaaagggaacag

SEQ ID NO: 3049 - RNA, 21 nt, Glycine max
  GMmerge_5496057
uuuaucauacugcauucuuac

SEQ ID NO: 3050 - RNA, 21 nt, Glycine max
  GMmerge_97384
gaucaaacagacagauaggaa

SEQ ID NO: 3051 - RNA, 21 nt, Glycine max
  GMmerge_4357783
gaucaaaacuacuugucuugu

SEQ ID NO: 3052 - RNA, 21 nt, Glycine max
  GMmerge_3365317
gauaugcugagacauugacaa

SEQ ID NO: 3053 - RNA, 20 nt, Glycine max
  GMmerge_8180790
gaggcauuugucugagagga

SEQ ID NO: 3054 - RNA, 20 nt, Glycine max
  GMmerge_1617403
gagauguauggagugagaga

SEQ ID NO: 3055 - RNA, 22 nt, Glycine max
  GMmerge_10278713
uggaaauuugauuagacccaug

SEQ ID NO: 3056 - RNA, 22 nt, Glycine max
  GMmerge_9901515
gacauuuuauggauuggacuuu

SEQ ID NO: 3057 - RNA, 22 nt, Glycine max
  GMmerge_11126207
ugacagaucaugacagcaaguc

SEQ ID NO: 3058 - RNA, 21 nt, Glycine max
  GMmerge_8542790
gaaucagaaagacgcucuuca

SEQ ID NO: 3059 - RNA, 20 nt, Glycine max
  GMmerge_1814956
cuuaauacaauuguggaugg

SEQ ID NO: 3060 - RNA, 22 nt, Glycine max
  GMmerge_4400562
gguuuacgaaaggccguuggcg

SEQ ID NO: 3061 - RNA, 21 nt, Glycine max
  GMmerge_540898
cugagccuagccuacgaugaa

SEQ ID NO: 3062 - RNA, 21 nt, Glycine max
  GMmerge_8923050
cucagggacgccaacggccuu

SEQ ID NO: 3063 - RNA, 19 nt, Glycine max
  GMmerge_9909062
cuauccauccugaguuuca

SEQ ID NO: 3064 - RNA, 21 nt, Glycine max
  GMmerge_6814458
cuaacuuaauuuucuucuuuc

SEQ ID NO: 3065 - RNA, 20 nt, Glycine max
  GMmerge_1500635
cuaacggcguuacuuuaaaa

SEQ ID NO: 3066 - RNA, 21 nt, Glycine max
  GMmerge_8510368
cuaaagacaaucuugaucuug

SEQ ID NO: 3067 - RNA, 22 nt, Glycine max
  GMmerge_10326607
cuaaaaguucuucaaccaagac

SEQ ID NO: 3068 - RNA, 20 nt, Glycine max
  GMmerge_2967863
cguugacauguggcauugac

SEQ ID NO: 3069 - RNA, 20 nt, Glycine max
  GMmerge_8543396
cgcuauccauccugaguuuc

SEQ ID NO: 3070 - RNA, 22 nt, Glycine max
  GMmerge_3960474
cggugucaucauugguugagga

SEQ ID NO: 3071 - RNA, 21 nt, Glycine max
  GMmerge_2242357
cggcguugucggucuucuucu

SEQ ID NO: 3072 - RNA, 22 nt, Glycine max
  GMmerge_8538467
cggacaucggacacgauacgga

SEQ ID NO: 3073 - RNA, 20 nt, Glycine max
  GMmerge_802765
cggacacggacaccggacac

SEQ ID NO: 3074 - RNA, 21 nt, Glycine max
  GMmerge_9076307
cgauuacugaaacuuuguaau

SEQ ID NO: 3075 - RNA, 21 nt, Glycine max
  GMmerge_5513359
cgauacggacaccggacacga

SEQ ID NO: 3076 - RNA, 22 nt, Glycine max
  GMmerge_2936203
cgagugucauaucggugucgga

SEQ ID NO: 3077 - RNA, 21 nt, Glycine max
  GMmerge_10368140
ccuuacucaauucuuucagcu

SEQ ID NO: 3078 - RNA, 20 nt, Glycine max
  GMmerge_10912503
ccgccuugcaucaacugaau

SEQ ID NO: 3079 - RNA, 21 nt, Glycine max
  GMmerge_6377175
ccgauacggacacggacaccu

SEQ ID NO: 3080 - RNA, 21 nt, Glycine max
  GMmerge_4225343
ccaaggcgccucgggaacggc

SEQ ID NO: 3081 - RNA, 21 nt, Glycine max
  GMmerge_9455147
cauugugccucuaagaucguc

SEQ ID NO: 3082 - RNA, 20 nt, Glycine max
  GMmerge_10099144
caucagauucuaaggcaaug

SEQ ID NO: 3083 - RNA, 22 nt, Glycine max
  GMmerge_11182875
cauagggaaucgggaagauaug

SEQ ID NO: 3084 - RNA, 22 nt, Glycine max
  GMmerge_3635825
cacuucuacucgaugugggacu

SEQ ID NO: 3085 - RNA, 22 nt, Glycine max
  GMmerge_5639892
caauguacauacuucuaccagg

SEQ ID NO: 3086 - RNA, 22 nt, Glycine max
  GMmerge_2632133
caaugacaaauuuugaauaggg

SEQ ID NO: 3087 - RNA, 21 nt, Glycine max
  GMmerge_2815384
caaucuuuuuaaguuucgucu

SEQ ID NO: 3088 - RNA, 21 nt, Glycine max
  GMmerge_9010809
caaguugauccguaagacuuu

SEQ ID NO: 3089 - RNA, 22 nt, Glycine max
  GMmerge_10988975
caaguagaagaaacugaugugg

SEQ ID NO: 3090 - RNA, 20 nt, Glycine max
  GMmerge_5734381
caaggauuuuggcuacaaua

SEQ ID NO: 3091 - RNA, 20 nt, Glycine max
  GMmerge_4257569
caacaucugagguuaacggu

SEQ ID NO: 3092 - RNA, 21 nt, Glycine max
  GMmerge_8092009
caacaccgacacggacaccgg

SEQ ID NO: 3093 - RNA, 20 nt, Glycine max
  GMmerge_5181818
auucuacaucguuuguggcc

SEQ ID NO: 3094 - RNA, 19 nt, Glycine max
  GMmerge_5826713
auuaagguaaaagaaaaac

SEQ ID NO: 3095 - RNA, 22 nt, Glycine max
  GMmerge_8289179
augugucaguuuuauuaggucu

SEQ ID NO: 3096 - RNA, 21 nt, Glycine max
  GMmerge_5837118
gcgaguuggacacguggcggc

SEQ ID NO: 3097 - RNA, 22 nt, Glycine max
  GMmerge_3301724
aucuuuauauggauuugucaag

SEQ ID NO: 3098 - RNA, 22 nt, Glycine max
  GMmerge_7468010
aucaggcuucggggguuggaga

SEQ ID NO: 3099 - RNA, 21 nt, Glycine max
  GMmerge_9653727
auauugcuaacauacuccuaa

SEQ ID NO: 3100 - RNA, 21 nt, Glycine max
  GMmerge_4841344
auagauaauagacuacaagag

SEQ ID NO: 3101 - RNA, 19 nt, Glycine max
  GMmerge_5860217
auaccacucuggaagagcu

SEQ ID NO: 3102 - RNA, 21 nt, Glycine max
  GMmerge_8453340
auaauucaugaacguuuugau

SEQ ID NO: 3103 - RNA, 22 nt, Glycine max
  GMmerge_742868
aguuggagaacuucuuugagau

SEQ ID NO: 3104 - RNA, 21 nt, Glycine max
  GMmerge_4105482
aguuccucugaacacuucaca

SEQ ID NO: 3105 - RNA, 22 nt, Glycine max
  GMmerge_4182301
aguaaguaagcuguuagguuag

SEQ ID NO: 3106 - RNA, 22 nt, Glycine max
  GMmerge_910032
agguuuacggaucaaguugauu

SEQ ID NO: 3107 - RNA, 19 nt, Glycine max
  GMmerge_5755661
agguguacuguuuaaccaa

SEQ ID NO: 3108 - RNA, 21 nt, Glycine max
  GMmerge_2584318
aggcuuacagaucaaguugau

SEQ ID NO: 3109 - RNA, 21 nt, Glycine max
  GMmerge_9051637
aggaguuucccucagcccauu

SEQ ID NO: 3110 - RNA, 22 nt, Glycine max
  GMmerge_190584
agcuuugcacugucauggaucu

SEQ ID NO: 3111 - RNA, 21 nt, Glycine max
  GMmerge_10373299
uucugcaucagcguugacacu

SEQ ID NO: 3112 - RNA, 21 nt, Glycine max
  GMmerge_4415912
agauuugaggaucugguggca

SEQ ID NO: 3113 - RNA, 22 nt, Glycine max
  GMmerge_7144581
agagcaagagaggaucacugag

SEQ ID NO: 3114 - RNA, 21 nt, Glycine max
  GMmerge_2546666
agagacuucuguguuuuugaa

SEQ ID NO: 3115 - RNA, 22 nt, Glycine max
  GMmerge_346850
agagacuuccggaucaacuuga

SEQ ID NO: 3116 - RNA, 21 nt, Glycine max
  GMmerge_9250871
agagacuuacggaucaacuug

SEQ ID NO: 3117 - RNA, 21 nt, Glycine max
  GMmerge_4080525
acuugauccguaagucuuuua

SEQ ID NO: 3118 - RNA, 22 nt, Glycine max
  GMmerge_4581320
acucguagucgaagggcugggc

SEQ ID NO: 3119 - RNA, 21 nt, Glycine max
  GMmerge_3245986
acucaagagucaacucguaga

SEQ ID NO: 3120 - RNA, 22 nt, Glycine max
  GMmerge_4137122
acuaucaacgucgguacuuuca

SEQ ID NO: 3121 - RNA, 22 nt, Glycine max
  GMmerge_3527696
acguagacacgcgcgucgcggc

SEQ ID NO: 3122 - RNA, 21 nt, Glycine max
  GMmerge_9614502
accggacacgacaagagacug

SEQ ID NO: 3123 - RNA, 22 nt, Glycine max
  GMmerge_8228611
acauccaaucagaacaugacac

SEQ ID NO: 3124 - RNA, 22 nt, Glycine max
  GMmerge_8187183
acauauguccuuacggaccaua

SEQ ID NO: 3125 - RNA, 19 nt, Glycine max
  GMmerge_2747246
acaguauucugaagucguc

SEQ ID NO: 3126 - RNA, 19 nt, Glycine max
  GMmerge_743624
acaagguagccguacugga

SEQ ID NO: 3127 - RNA, 21 nt, Glycine max
  GMmerge_7750682
acaaccuccauucgucuguca

SEQ ID NO: 3128 - RNA, 22 nt, Glycine max
  GMmerge_932977
aaugugcguaguuuuauuuaua

SEQ ID NO: 3129 - RNA, 19 nt, Glycine max
  GMmerge_3341169
aauggggcgggucggguac

SEQ ID NO: 3130 - RNA, 21 nt, Glycine max
  GMmerge_7474999
aaugagguccauagaagcauc

SEQ ID NO: 3131 - RNA, 21 nt, Glycine max
  GMmerge_9193300
cagcgcuaguggacuugcugu

SEQ ID NO: 3132 - RNA, 21 nt, Glycine max
  GMmerge_6967904
aaguaccgacguugauaguau

SEQ ID NO: 3133 - RNA, 21 nt, Glycine max
  GMmerge_3015717
aagcuuuuuacggaucaacuu

SEQ ID NO: 3134 - RNA, 22 nt, Glycine max
  GMmerge_9400204
aacuuguuggcauauaaguacg

SEQ ID NO: 3135 - RNA, 22 nt, Glycine max
  GMmerge_8102037
aacgugacacgugaucgucagc

SEQ ID NO: 3136 - RNA, 21 nt, Glycine max
  GMmerge_8985193
aacaugauucguacgauuuac

SEQ ID NO: 3137 - RNA, 22 nt, Glycine max
  GMmerge_2852000
aacaaucuuuugcccgguacua

SEQ ID NO: 3138 - RNA, 21 nt, Glycine max
  GMmerge_1545816
aaauuaaagguaguaugguua

SEQ ID NO: 3139 - RNA, 22 nt, Glycine max
  GMmerge_11034447
aaaggccguuggcgucccugag

SEQ ID NO: 3140 - RNA, 20 nt, Glycine max
  GMmerge_2828796
aaaggauaggacacaguuag

SEQ ID NO: 3141 - RNA, 20 nt, Glycine max
  GMmerge_7111760
aaacuaccggcaacuaccag

SEQ ID NO: 3142 - RNA, 22 nt, Glycine max
  GMmerge_4783888
aaaacacagaaguuuuuggauc

SEQ ID NO: 3143 - RNA, 21 nt, Glycine max
  GMmerge_932082
uuuuucugaugucaucacuua

SEQ ID NO: 3144 - RNA, 22 nt, Glycine max
  GMmerge_5126083
uuuuuauugaauuccaucaaau

SEQ ID NO: 3145 - RNA, 22 nt, Glycine max
  GMmerge_10413816
uuuuuaaauuguuguaaaagac

SEQ ID NO: 3146 - RNA, 22 nt, Glycine max
  GMmerge_7476521
uuuuaacuuguuaacucguuga

SEQ ID NO: 3147 - RNA, 21 nt, Glycine max
  GMmerge_10424277
uuugucggcaacauggucaua

SEQ ID NO: 3148 - RNA, 20 nt, Glycine max
  GMmerge_6883426
uuuguagaauauauuuaaau

SEQ ID NO: 3149 - RNA, 21 nt, Glycine max
  GMmerge_5004119
uuuggcccauuagaagauaau

SEQ ID NO: 3150 - RNA, 21 nt, Glycine max
  GMmerge_6178954
uuugcuuugcaaaggagggua

SEQ ID NO: 3151 - RNA, 21 nt, Glycine max
  GMmerge_7218459
uuugcauucuuugggucgaca

SEQ ID NO: 3152 - RNA, 21 nt, Glycine max
  GMmerge_6135190
uuucugaaagugaguguaaag

SEQ ID NO: 3153 - RNA, 22 nt, Glycine max
  GMmerge_5617454
uuuccauaucuguauugccaug

SEQ ID NO: 3154 - RNA, 21 nt, Glycine max
  GMmerge_8493212
uaucaauuugucugagucugu

SEQ ID NO: 3155 - RNA, 21 nt, Glycine max
  GMmerge_8128260
uuuagagaaugaucgucguug

SEQ ID NO: 3156 - RNA, 20 nt, Glycine max
  GMmerge_198579
uuuaccggaacuguuacaaa

SEQ ID NO: 3157 - RNA, 22 nt, Glycine max
  GMmerge_1890124
uaauuaugcagcgcuaguggac

SEQ ID NO: 3158 - RNA, 22 nt, Glycine max
  GMmerge_9527054
uuguguaguuaagaaugaguca

SEQ ID NO: 3159 - RNA, 22 nt, Glycine max
  GMmerge_8339713
gugucggacaccggacacggca

SEQ ID NO: 3160 - RNA, 21 nt, Glycine max
  GMmerge_8517218
uugucaaacaugaaaccggaa

SEQ ID NO: 3161 - RNA, 21 nt, Glycine max
  GMmerge_3997564
uugguagacucaaauucagug

SEQ ID NO: 3162 - RNA, 20 nt, Glycine max
  GMmerge_2928655
uugcucugucuguaauuuaa

SEQ ID NO: 3163 - RNA, 22 nt, Glycine max
  GMmerge_10329051
uugcaugauaggcugaagaaaa

SEQ ID NO: 3164 - RNA, 22 nt, Glycine max
  GMmerge_2515060
uugcaaugagagcaagcuggag

SEQ ID NO: 3165 - RNA, 22 nt, Glycine max
  GMmerge_3145180
uugauuauuuuuggaaauuuga

SEQ ID NO: 3166 - RNA, 21 nt, Glycine max
  GMmerge_9599878
uugaaagauuucgcuuugguu

SEQ ID NO: 3167 - RNA, 22 nt, Glycine max
  GMmerge_2857679
uucuuccuuuuuugaggaugaa

SEQ ID NO: 3168 - RNA, 19 nt, Glycine max
  GMmerge_3383642
uucuuccaaugcaucaaag

SEQ ID NO: 3169 - RNA, 21 nt, Glycine max
  GMmerge_4229918
cggacgcgugucggacaccag

SEQ ID NO: 3170 - RNA, 21 nt, Glycine max
  GMmerge_3966699
uucuaaccuugugccaggacc

SEQ ID NO: 3171 - RNA, 19 nt, Glycine max
  GMmerge_829940
uucgugcccauuaugguca

SEQ ID NO: 3172 - RNA, 21 nt, Glycine max
  GMmerge_3024481
uucgugauuccugagaauugu

SEQ ID NO: 3173 - RNA, 22 nt, Glycine max
  GMmerge_1292039
uuccacagcuuucuugaacuuc

SEQ ID NO: 3174 - RNA, 22 nt, Glycine max
  GMmerge_11025299
uucacacgugaccgucuuagaa

SEQ ID NO: 3175 - RNA, 21 nt, Glycine max
  GMmerge_8458778
uuauuuugauggcaauguaau

SEQ ID NO: 3176 - RNA, 22 nt, Glycine max
  GMmerge_9146160
uuauagguaugguauuccugaa

SEQ ID NO: 3177 - RNA, 21 nt, Glycine max
  GMmerge_7205566
uuauaauuuccguacaaccaa

SEQ ID NO: 3178 - RNA, 21 nt, Glycine max
  GMmerge_7411441
uuagcauagacauagguaauu

SEQ ID NO: 3179 - RNA, 20 nt, Glycine max
  GMmerge_1939892
uuagcaaugaaguauugggc

SEQ ID NO: 3180 - RNA, 21 nt, Glycine max
  GMmerge_7959206
agacuuacgaaucaacuugau

SEQ ID NO: 3181 - RNA, 22 nt, Glycine max
  GMmerge_10959094
uuacaacagcggaagaacuuuc

SEQ ID NO: 3182 - RNA, 22 nt, Glycine max
  GMmerge_5758304
uuaauugggcauuguaguccuc

SEQ ID NO: 3183 - RNA, 21 nt, Glycine max
  GMmerge_1306980
uuaagauuagagauacaugaa

SEQ ID NO: 3184 - RNA, 22 nt, Glycine max
  GMmerge_6891079
uuaagacuuacggaucaacuug

SEQ ID NO: 3185 - RNA, 21 nt, Glycine max
  GMmerge_9149026
uuaaaauuguggacaugaaau

SEQ ID NO: 3186 - RNA, 21 nt, Glycine max
  GMmerge_1087741
uguuaacggucaacauccaau

SEQ ID NO: 3187 - RNA, 22 nt, Glycine max
  GMmerge_7692945
ugucucaugacucuauucggcu

SEQ ID NO: 3188 - RNA, 21 nt, Glycine max
  GMmerge_5834559
ugucgugucggugucgguguc

SEQ ID NO: 3189 - RNA, 22 nt, Glycine max
  GMmerge_5057155
ugucgaacaccggacacgacaa

SEQ ID NO: 3190 - RNA, 21 nt, Glycine max
  GMmerge_7857936
ugucccgagucgugaugauga

SEQ ID NO: 3191 - RNA, 19 nt, Glycine max
  GMmerge_1475401
ugucaugucggugucggac

SEQ ID NO: 3192 - RNA, 21 nt, Glycine max
  GMmerge_8291071
ugucacauggucgaucccauc

SEQ ID NO: 3193 - RNA, 20 nt, Glycine max
  GMmerge_10114358
ugucaagaguaagcagucgg

SEQ ID NO: 3194 - RNA, 22 nt, Glycine max
  GMmerge_5535906
uugcucguucauuuucgucuuc

SEQ ID NO: 3195 - RNA, 20 nt, Glycine max
  GMmerge_8563034
ugguuacagacaguuuuggu

SEQ ID NO: 3196 - RNA, 21 nt, Glycine max
  GMmerge_8270475
uggccaagaucaugucauugc

SEQ ID NO: 3197 - RNA, 21 nt, Glycine max
  GMmerge_9234470
uggcacauuuauucucauguu

SEQ ID NO: 3198 - RNA, 21 nt, Glycine max
  GMmerge_3928150
uggaacaaacucauucaaaau

SEQ ID NO: 3199 - RNA, 21 nt, Glycine max
  GMmerge_9082276
gcagguuggugaagaugagcu

SEQ ID NO: 3200 - RNA, 21 nt, Glycine max
  GMmerge_6231283
uggacaggcugguagaccaaa

SEQ ID NO: 3201 - RNA, 21 nt, Glycine max
  GMmerge_9376272
uggaaguacagguuuguacug

SEQ ID NO: 3202 - RNA, 22 nt, Glycine max
  GMmerge_4983368
ugcucguccaaagaguccugua

SEQ ID NO: 3203 - RNA, 19 nt, Glycine max
  GMmerge_3736272
ugcuaaaaaugcugccaga

SEQ ID NO: 3204 - RNA, 22 nt, Glycine max
  GMmerge_2342202
ugcagcgcuaguggacuugcug

SEQ ID NO: 3205 - RNA, 21 nt, Glycine max
  GMmerge_9604147
ugauuuuuaagacuuauggau

SEQ ID NO: 3206 - RNA, 22 nt, Glycine max
  GMmerge_2503034
ugauguuagugucgugucggac

SEQ ID NO: 3207 - RNA, 22 nt, Glycine max
  GMmerge_4094218
ugauguacugucagaucaugau

SEQ ID NO: 3208 - RNA, 21 nt, Glycine max
  GMmerge_7535981
ugaucuguagaaaccuuacgg

SEQ ID NO: 3209 - RNA, 21 nt, Glycine max
  GMmerge_2585354
ugaucucugcaaucaacgucu

SEQ ID NO: 3210 - RNA, 22 nt, Glycine max
  GMmerge_4699715
ugaucacaacuuuagcugaauc

SEQ ID NO: 3211 - RNA, 19 nt, Glycine max
  GMmerge_2833089
ugauaugggcauagaagcu

SEQ ID NO: 3212 - RNA, 22 nt, Glycine max
  GMmerge_2416641
ugagugaagaccuuaccauuug

SEQ ID NO: 3213 - RNA, 21 nt, Glycine max
  GMmerge_574342
ugagccuaaccuacgauaaau

SEQ ID NO: 3214 - RNA, 21 nt, Glycine max
  GMmerge_7058757
ugagaacauagaagaauacau

SEQ ID NO: 3215 - RNA, 21 nt, Glycine max
  GMmerge_11147168
ugacugucacgugucauguuu

SEQ ID NO: 3216 - RNA, 22 nt, Glycine max
  GMmerge_415384
ugacuaugaucgcuuuauagau

SEQ ID NO: 3217 - RNA, 22 nt, Glycine max
  GMmerge_9640946
ugaccuucucaacgauuuggca

SEQ ID NO: 3218 - RNA, 22 nt, Glycine max
  GMmerge_4802477
ugaauguucggaagaaaccauu

SEQ ID NO: 3219 - RNA, 22 nt, Glycine max
  GMmerge_1821496
ugaaauacgucuccucaaccaa

SEQ ID NO: 3220 - RNA, 21 nt, Glycine max
  GMmerge_3729845
ucuuccuuuacauggcaauca

SEQ ID NO: 3221 - RNA, 22 nt, Glycine max
  GMmerge_11054109
ucuuccggaagagggcgucuuc

SEQ ID NO: 3222 - RNA, 21 nt, Glycine max
  GMmerge_5886746
ucuuagcauucuugucuggcu

SEQ ID NO: 3223 - RNA, 21 nt, Glycine max
  GMmerge_2785546
ucuguuuuaugaggucucugu

SEQ ID NO: 3224 - RNA, 22 nt, Glycine max
  GMmerge_6056533
ucuagaaagacugucguacaau

SEQ ID NO: 3225 - RNA, 21 nt, Glycine max
  GMmerge_7716446
ucuaagaucaucauugucgaa

SEQ ID NO: 3226 - RNA, 21 nt, Glycine max
  GMmerge_6665608
ucggacacgauacggacacag

SEQ ID NO: 3227 - RNA, 21 nt, Glycine max
  GMmerge_1216584
ucggacacgacacggauacgg

SEQ ID NO: 3228 - RNA, 21 nt, Glycine max
  GMmerge_5157012
ucgcaauacaagucaaccaua

SEQ ID NO: 3229 - RNA, 20 nt, Glycine max
  GMmerge_8776131
ucgagugcaaaggcagaagg

SEQ ID NO: 3230 - RNA, 20 nt, Glycine max
  GMmerge_8302655
ucgaacaccggacacgacaa

SEQ ID NO: 3231 - RNA, 21 nt, Glycine max
  GMmerge_6539056
uccugaacccuagcgaaguaa

SEQ ID NO: 3232 - RNA, 22 nt, Glycine max
  GMmerge_1568960
uccggaaguggugaaggccaau

SEQ ID NO: 3233 - RNA, 22 nt, Glycine max
  GMmerge_9694417
uccaugaaucaucuccaaugcu

SEQ ID NO: 3234 - RNA, 21 nt, Glycine max
  GMmerge_10539032
uccaguggaaguacauaauga

SEQ ID NO: 3235 - RNA, 20 nt, Glycine max
  GMmerge_7495666
uccagaauuccucaaagcag

SEQ ID NO: 3236 - RNA, 22 nt, Glycine max
  GMmerge_9843219
acuccucaaguuggucucugau

SEQ ID NO: 3237 - RNA, 22 nt, Glycine max
  GMmerge_6624115
acgugaggauaugucacauggu

SEQ ID NO: 3238 - RNA, 20 nt, Glycine max
  GMmerge_7815994
ucauguucugauuggauguc

SEQ ID NO: 3239 - RNA, 20 nt, Glycine max
  GMmerge_6869941
ucaugcgaucccuuaggaac

SEQ ID NO: 3240 - RNA, 20 nt, Glycine max
  GMmerge_5073367
ucaugagggcauuguauaaa

SEQ ID NO: 3241 - RNA, 22 nt, Glycine max
  GMmerge_5647936
ucauccaauaagaacgugacac

SEQ ID NO: 3242 - RNA, 20 nt, Glycine max
  GMmerge_7049856
ucauaucggugucggacacu

SEQ ID NO: 3243 - RNA, 21 nt, Glycine max
  GMmerge_8475289
ucauaggaauggaugucuaua

SEQ ID NO: 3244 - RNA, 21 nt, Glycine max
  GMmerge_8436649
ucaguucaggucaggcuuuau

SEQ ID NO: 3245 - RNA, 22 nt, Glycine max
  GMmerge_56797
ucagacggacauucuuaucaaa

SEQ ID NO: 3246 - RNA, 22 nt, Glycine max
  GMmerge_9291501
ucagaacaugacacgugacaau

SEQ ID NO: 3247 - RNA, 22 nt, Glycine max
  GMmerge_3238060
ucaccaauuccuuugucagguc

SEQ ID NO: 3248 - RNA, 21 nt, Glycine max
  GMmerge_3965173
ucacaauuggacguugacugu

SEQ ID NO: 3249 - RNA, 19 nt, Glycine max
  GMmerge_4966312
ucaaugguagaaacauaag

SEQ ID NO: 3250 - RNA, 19 nt, Glycine max
  GMmerge_5009077
ucaaccgauguagaauggg

SEQ ID NO: 3251 - RNA, 22 nt, Glycine max
  GMmerge_8572602
uauuucaagaccaauacaauuu

SEQ ID NO: 3252 - RNA, 21 nt, Glycine max
  GMmerge_584351
uauugggagucgaaccacaag

SEQ ID NO: 3253 - RNA, 21 nt, Glycine max
  GMmerge_7485746
uauugcuuuucuugacauugc

SEQ ID NO: 3254 - RNA, 21 nt, Glycine max
  GMmerge_4503912
uaugacucauacggauuaugu

SEQ ID NO: 3255 - RNA, 21 nt, Glycine max
  GMmerge_483027
uaugaagucugauggguggau

SEQ ID NO: 3256 - RNA, 21 nt, Glycine max
  GMmerge_3956320
uaucgugucggugucgguguc

SEQ ID NO: 3257 - RNA, 21 nt, Glycine max
  GMmerge_10617686
uauagauggcacuagaaugau

SEQ ID NO: 3258 - RNA, 22 nt, Glycine max
  GMmerge_3626705
uauaagauggacccaaaaugcu

SEQ ID NO: 3259 - RNA, 21 nt, Glycine max
  GMmerge_6498972
uaggugucaugaugcauguaa

SEQ ID NO: 3260 - RNA, 22 nt, Glycine max
  GMmerge_4684688
uaggaucuucuuuaucaaugga

SEQ ID NO: 3261 - RNA, 20 nt, Glycine max
  GMmerge_1492401
uaggaucaaacggacagaua

SEQ ID NO: 3262 - RNA, 22 nt, Glycine max
  GMmerge_5786224
uacuuuguugaucugucauuuu

SEQ ID NO: 3263 - RNA, 19 nt, Glycine max
  GMmerge_3562540
uacuuggcaguuucccaug

SEQ ID NO: 3264 - RNA, 21 nt, Glycine max
  GMmerge_7918366
uacuguuuaaccaaaauauca

SEQ ID NO: 3265 - RNA, 19 nt, Glycine max
  GMmerge_4837281
uacggaccauauuccuacu

SEQ ID NO: 3266 - RNA, 21 nt, Glycine max
  GMmerge_2952581
uacaagccuauuuaaaagucu

SEQ ID NO: 3267 - RNA, 21 nt, Glycine max
  GMmerge_10293290
uacaaagcgaucauauucaua

SEQ ID NO: 3268 - RNA, 22 nt, Glycine max
  GMmerge_5054149
uaauuuuuaagacuuacggauc

SEQ ID NO: 3269 - RNA, 21 nt, Glycine max
  GMmerge_10224982
uaauuaguuuuaguaaucaug

SEQ ID NO: 3270 - RNA, 22 nt, Glycine max
  GMmerge_944186
uaauacauuguacauuauuauu

SEQ ID NO: 3271 - RNA, 21 nt, Glycine max
  GMmerge_10971861
uaauaaaaagaggaaaaaaua

SEQ ID NO: 3272 - RNA, 21 nt, Glycine max
  GMmerge_998995
uaaggguaucaacaacgucau

SEQ ID NO: 3273 - RNA, 22 nt, Glycine max
  GMmerge_262284
uaagagacuuucggaucaacuu

SEQ ID NO: 3274 - RNA, 21 nt, Glycine max
  GMmerge_3558887
uaacuggaaauucuuaaagca

SEQ ID NO: 3275 - RNA, 21 nt, Glycine max
  GMmerge_5187545
uaacauugauuuagacuuguu

SEQ ID NO: 3276 - RNA, 20 nt, Glycine max
  GMmerge_5425968
uaacaagcuaagaacauuuu

SEQ ID NO: 3277 - RNA, 22 nt, Glycine max
  GMmerge_1005247
uaaaaagggguucauaaggggg

SEQ ID NO: 3278 - RNA, 21 nt, Glycine max
  GMmerge_11166795
guuuguaaaucaugacuuucu

SEQ ID NO: 3279 - RNA, 20 nt, Glycine max
  GMmerge_4408665
guugagagucagaccacagg

SEQ ID NO: 3280 - RNA, 21 nt, Glycine max
  GMmerge_218883
guggccggcggcacaagaguu

SEQ ID NO: 3281 - RNA, 21 nt, Glycine max
  GMmerge_2790903
gugaauuggguguugagaggu

SEQ ID NO: 3282 - RNA, 22 nt, Glycine max
  GMmerge_532303
gucuaagauuugguugggaaau

SEQ ID NO: 3283 - RNA, 22 nt, Glycine max
  GMmerge_8779042
gucaauguagacuuauacgggc

SEQ ID NO: 3284 - RNA, 22 nt, Glycine max
  GMmerge_6653776
guauauugucaugucauuuuug

SEQ ID NO: 3285 - RNA, 21 nt, Glycine max
  GMmerge_10393503
gguuuacgaaaggccguuggc

SEQ ID NO: 3286 - RNA, 20 nt, Glycine max
  GMmerge_2394665
gcagcaccaucaagauucac

SEQ ID NO: 3287 - RNA, 21 nt, Glycine max
  GMmerge_1759313
gacgcgugucggacaccggac

SEQ ID NO: 3288 - RNA, 22 nt, Glycine max
  GMmerge_4398175
ggagaacgucggagaaggagga

SEQ ID NO: 3289 - RNA, 21 nt, Glycine max
  GMmerge_1719406
ggaacacaagauugcaaagcu

SEQ ID NO: 3290 - RNA, 21 nt, Glycine max
  GMmerge_1029174
gcugauccagagacuucugug

SEQ ID NO: 3291 - RNA, 22 nt, Glycine max
  GMmerge_7634295
gccugugcuucucuuggaucgg

SEQ ID NO: 3292 - RNA, 21 nt, Glycine max
  GMmerge_596360
gccuggcucccuguaugccau

SEQ ID NO: 3293 - RNA, 19 nt, Glycine max
  GMmerge_2207767
gccgaaggcagggcuagug

SEQ ID NO: 3294 - RNA, 22 nt, Glycine max
  GMmerge_3226499
gcccauaagccaagacgcucug

SEQ ID NO: 3295 - RNA, 21 nt, Glycine max
  GMmerge_3977982
gcaauuacuuccauuggcuuu

SEQ ID NO: 3296 - RNA, 22 nt, Glycine max
  GMmerge_6098197
gaugauuguuuugguaucuguu

SEQ ID NO: 3297 - RNA, 21 nt, Glycine max
  GMmerge_10764821
gaugaugaaagcauguauuaa

SEQ ID NO: 3298 - RNA, 20 nt, Glycine max
  GMmerge_8392908
gaaugguagaucaacaaagu

SEQ ID NO: 3299 - RNA, 19 nt, Glycine max
  GMmerge_3485153
gaauaucgaucuauggcua

SEQ ID NO: 3300 - RNA, 21 nt, Glycine max
  GMmerge_11209817
gaaaaugaguugaccagaucc

SEQ ID NO: 3301 - RNA, 21 nt, Glycine max
  GMmerge_5745794
cuuguuuuggaugacguuugg

SEQ ID NO: 3302 - RNA, 21 nt, Glycine max
  GMmerge_3279334
cuucaauucaguacaaaccug

SEQ ID NO: 3303 - RNA, 22 nt, Glycine max
  GMmerge_8459107
cuuaugcaaagauaggagcuau

SEQ ID NO: 3304 - RNA, 22 nt, Glycine max
  GMmerge_2971359
cuuauaagucugauaggucggc

SEQ ID NO: 3305 - RNA, 19 nt, Glycine max
  GMmerge_8129439
cuguucuauaggcucguac

SEQ ID NO: 3306 - RNA, 19 nt, Glycine max
  GMmerge_9409445
cugucauggaucuuuucau

SEQ ID NO: 3307 - RNA, 20 nt, Glycine max
  GMmerge_10462266
cuggccaugcccgaagucgu

SEQ ID NO: 3308 - RNA, 21 nt, Glycine max
  GMmerge_7549840
cuggcauucuaagacggguuu

SEQ ID NO: 3309 - RNA, 22 nt, Glycine max
  GMmerge_10885473
cucauuccauacaucgucugac

SEQ ID NO: 3310 - RNA, 19 nt, Glycine max
  GMmerge_8471602
cuacuaaggcaaggucuga

SEQ ID NO: 3311 - RNA, 20 nt, Glycine max
  GMmerge_5125783
cuacaugacauagagggaca

SEQ ID NO: 3312 - RNA, 21 nt, Glycine max
  GMmerge_6460271
cguguuggacaccagacacgg

SEQ ID NO: 3313 - RNA, 21 nt, Glycine max
  GMmerge_184420
cgugccuguagaugaaggcuu

SEQ ID NO: 3314 - RNA, 21 nt, Glycine max
  GMmerge_3938724
cguaagacuuuuacggaucaa

SEQ ID NO: 3315 - RNA, 21 nt, Glycine max
  GMmerge_119747
cgguagcuaucaacagugugc

SEQ ID NO: 3316 - RNA, 21 nt, Glycine max
  GMmerge_7820883
cgggugucgugucggugucgg

SEQ ID NO: 3317 - RNA, 19 nt, Glycine max
  GMmerge_1557410
cggacacgacaaagaacua

SEQ ID NO: 3318 - RNA, 22 nt, Glycine max
  GMmerge_5959167
cgaguugacucuugaguaaauu

SEQ ID NO: 3319 - RNA, 22 nt, Glycine max
  GMmerge_9816402
cgaguugacucuugaguaaacu

SEQ ID NO: 3320 - RNA, 21 nt, Glycine max
  GMmerge_3111724
cgagugucgugucggugucgg

SEQ ID NO: 3321 - RNA, 22 nt, Glycine max
  GMmerge_8564038
cgaccaugugacacauucucac

SEQ ID NO: 3322 - RNA, 21 nt, Glycine max
  GMmerge_5736969
cgacauggacaccggacacga

SEQ ID NO: 3323 - RNA, 22 nt, Glycine max
  GMmerge_10082980
cgacaccgauacggacaccgga

SEQ ID NO: 3324 - RNA, 21 nt, Glycine max
  GMmerge_3946337
cgacacacauucuaagacggu

SEQ ID NO: 3325 - RNA, 19 nt, Glycine max
  GMmerge_6808369
cgacaacaauaacgauggu

SEQ ID NO: 3326 - RNA, 19 nt, Glycine max
  GMmerge_6197038
cgacaaacucaggcaauga

SEQ ID NO: 3327 - RNA, 19 nt, Glycine max
  GMmerge_10529439
cgaaggcagggcuagugac

SEQ ID NO: 3328 - RNA, 22 nt, Glycine max
  GMmerge_6002686
cgaaaucucgacggcacguucc

SEQ ID NO: 3329 - RNA, 21 nt, Glycine max
  GMmerge_4106155
cgaaaagagaggagagucuuu

SEQ ID NO: 3330 - RNA, 21 nt, Glycine max
  GMmerge_4386657
ccgauaccgauacggacacgg

SEQ ID NO: 3331 - RNA, 21 nt, Glycine max
  GMmerge_9378451
ccgacacggacaucggacaca

SEQ ID NO: 3332 - RNA, 21 nt, Glycine max
  GMmerge_3842233
ccgacacggacaccggacacg

SEQ ID NO: 3333 - RNA, 19 nt, Glycine max
  GMmerge_8904395
ccauccugaagacaagaac

SEQ ID NO: 3334 - RNA, 22 nt, Glycine max
  GMmerge_8534379
ccaguucuugacuuguucugga

SEQ ID NO: 3335 - RNA, 22 nt, Glycine max
  GMmerge_6442249
ccacugacgcugcauaauuaaa

SEQ ID NO: 3336 - RNA, 19 nt, Glycine max
  GMmerge_7272336
ccaaaauucagguuccauc

SEQ ID NO: 3337 - RNA, 22 nt, Glycine max
  GMmerge_10094890
cauuccuguaacuaccaccccu

SEQ ID NO: 3338 - RNA, 21 nt, Glycine max
  GMmerge_4671630
cauucaccguuggaucguugu

SEQ ID NO: 3339 - RNA, 21 nt, Glycine max
  GMmerge_6072284
caugugccccucuuccccauc

SEQ ID NO: 3340 - RNA, 22 nt, Glycine max
  GMmerge_10989730
caugugacacauucucacguca

SEQ ID NO: 3341 - RNA, 21 nt, Glycine max
  GMmerge_6294303
caggauauccugacguccaug

SEQ ID NO: 3342 - RNA, 21 nt, Glycine max
  GMmerge_556149
cagcggaccggccaguucguc

SEQ ID NO: 3343 - RNA, 22 nt, Glycine max
  GMmerge_10472755
cagcgcuaguggacuugcuguc

SEQ ID NO: 3344 - RNA, 21 nt, Glycine max
  GMmerge_8530769
cagcaaugcuucaacguuacc

SEQ ID NO: 3345 - RNA, 21 nt, Glycine max
  GMmerge_7563385
cacgugacagucaacaucacu

SEQ ID NO: 3346 - RNA, 22 nt, Glycine max
  GMmerge_4492772
caauugguuggaugaucuaugc

SEQ ID NO: 3347 - RNA, 21 nt, Glycine max
  GMmerge_9363308
caauggugggacuucuuugga

SEQ ID NO: 3348 - RNA, 22 nt, Glycine max
  GMmerge_3016684
caaugcccaauugauggaagag

SEQ ID NO: 3349 - RNA, 21 nt, Glycine max
  GMmerge_10943711
caaguccacugacgcugcaua

SEQ ID NO: 3350 - RNA, 21 nt, Glycine max
  GMmerge_9006580
caacuugaucuguaagacuuu

SEQ ID NO: 3351 - RNA, 21 nt, Glycine max
  GMmerge_3831345
caacuugauccguaugacuca

SEQ ID NO: 3352 - RNA, 22 nt, Glycine max
  GMmerge_1106636
caacuugauccguaaaagacuu

SEQ ID NO: 3353 - RNA, 21 nt, Glycine max
  GMmerge_5331308
caacaaggaauuucaaucaua

SEQ ID NO: 3354 - RNA, 21 nt, Glycine max
  GMmerge_2769670
caaacagucaaauaguuccgg

SEQ ID NO: 3355 - RNA, 22 nt, Glycine max
  GMmerge_8369223
caaaauuuggcuccacaaauuu

SEQ ID NO: 3356 - RNA, 22 nt, Glycine max
  GMmerge_1199837
auuuuaaaagcuuuuuuugagu

SEQ ID NO: 3357 - RNA, 21 nt, Glycine max
  GMmerge_9719726
auuguguuggucuugaaauau

SEQ ID NO: 3358 - RNA, 22 nt, Glycine max
  GMmerge_6949098
auuguauuguuuuucaaauuga

SEQ ID NO: 3359 - RNA, 22 nt, Glycine max
  GMmerge_4324989
auuguaguccuccaaguauugu

SEQ ID NO: 3360 - RNA, 20 nt, Glycine max
  GMmerge_4445947
augugccccucuuccccauc

SEQ ID NO: 3361 - RNA, 22 nt, Glycine max
  GMmerge_1290900
augucuccccgcuucuacuugc

SEQ ID NO: 3362 - RNA, 21 nt, Glycine max
  GMmerge_8953453
augcucuggaaauguuguaau

SEQ ID NO: 3363 - RNA, 21 nt, Glycine max
  GMmerge_4767605
augaaguacggacacuccagu

SEQ ID NO: 3364 - RNA, 21 nt, Glycine max
  GMmerge_10490718
aucuuucaggaacgcauuugu

SEQ ID NO: 3365 - RNA, 20 nt, Glycine max
  GMmerge_9634786
aucauuguuuguaaauuuga

SEQ ID NO: 3366 - RNA, 22 nt, Glycine max
  GMmerge_4429204
aucauuaucgugaucguuguca

SEQ ID NO: 3367 - RNA, 21 nt, Glycine max
  GMmerge_5245298
aucagaaugguagaucaacaa

SEQ ID NO: 3368 - RNA, 22 nt, Glycine max
  GMmerge_148108
aucaaguugauccggaagucuc

SEQ ID NO: 3369 - RNA, 21 nt, Glycine max
  GMmerge_6408416
aucaaagaacuguugaucauc

SEQ ID NO: 3370 - RNA, 21 nt, Glycine max
  GMmerge_6132512
auauuucaugugaucuucugu

SEQ ID NO: 3371 - RNA, 22 nt, Glycine max
  GMmerge_2332295
auaugucaaaaugcucgaaauu

SEQ ID NO: 3372 - RNA, 20 nt, Glycine max
  GMmerge_9861561
auagaacuagcuuauacaga

SEQ ID NO: 3373 - RNA, 22 nt, Glycine max
  GMmerge_2793595
auacugcauucuuacuuccuau

SEQ ID NO: 3374 - RNA, 22 nt, Glycine max
  GMmerge_2979436
auacgggugucgugucgguguc

SEQ ID NO: 3375 - RNA, 21 nt, Glycine max
  GMmerge_5090550
auaaguuacggagauuugaau

SEQ ID NO: 3376 - RNA, 20 nt, Glycine max
  GMmerge_7546928
auaagguugagacauuugag

SEQ ID NO: 3377 - RNA, 21 nt, Glycine max
  GMmerge_1920252
cacgugcuccccuucuccaac

SEQ ID NO: 3378 - RNA, 21 nt, Glycine max
  GMmerge_9757907
aguuggaaccuauuacuucca

SEQ ID NO: 3379 - RNA, 22 nt, Glycine max
  GMmerge_9784552
agugguaacaaucguuuggaau

SEQ ID NO: 3380 - RNA, 21 nt, Glycine max
  GMmerge_3115289
agugaucaaaauugagagucu

SEQ ID NO: 3381 - RNA, 22 nt, Glycine max
  GMmerge_2350829
aguccugggaacacaagauugc

SEQ ID NO: 3382 - RNA, 22 nt, Glycine max
  GMmerge_5592770
auguaccuaccuauccuaugag

SEQ ID NO: 3383 - RNA, 21 nt, Glycine max
  GMmerge_8519320
aguacggaugucgugucggug

SEQ ID NO: 3384 - RNA, 20 nt, Glycine max
  GMmerge_11200112
aguaauagguuccaacuugu

SEQ ID NO: 3385 - RNA, 21 nt, Glycine max
  GMmerge_585340
agcgcauacggaucaacuuga

SEQ ID NO: 3386 - RNA, 22 nt, Glycine max
  GMmerge_10801526
agauguuuggaaucaaucuuga

SEQ ID NO: 3387 - RNA, 21 nt, Glycine max
  GMmerge_1858767
agaugggucaccgguguuugc

SEQ ID NO: 3388 - RNA, 20 nt, Glycine max
  GMmerge_3654963
agacuuacgaaucaaguuga

SEQ ID NO: 3389 - RNA, 21 nt, Glycine max
  GMmerge_3844692
acucacuguuuuuuuuggaua

SEQ ID NO: 3390 - RNA, 21 nt, Glycine max
  GMmerge_2880713
acguugacuguuccaaaggaa

SEQ ID NO: 3391 - RNA, 21 nt, Glycine max
  GMmerge_8915447
acgugacaugugacaaucaac

SEQ ID NO: 3392 - RNA, 21 nt, Glycine max
  GMmerge_4043685
acgcacacaucugauacgucc

SEQ ID NO: 3393 - RNA, 20 nt, Glycine max
  GMmerge_9768493
acgacagagacuaacgugac

SEQ ID NO: 3394 - RNA, 22 nt, Glycine max
  GMmerge_8417261
accugaauuuugggacaaaaau

SEQ ID NO: 3395 - RNA, 22 nt, Glycine max
  GMmerge_11061683
accuccaugugcugaagguugc

SEQ ID NO: 3396 - RNA, 21 nt, Glycine max
  GMmerge_2602756
accuaggacgcauagauagua

SEQ ID NO: 3397 - RNA, 22 nt, Glycine max
  GMmerge_788861
accggacacgacacggacacgg

SEQ ID NO: 3398 - RNA, 21 nt, Glycine max
  GMmerge_2739684
accgacacugacacggacacc

SEQ ID NO: 3399 - RNA, 22 nt, Glycine max
  GMmerge_9011839
acccuaagguucaugagaaccu

SEQ ID NO: 3400 - RNA, 21 nt, Glycine max
  GMmerge_1370573
accacaaaaccaaggaaaucu

SEQ ID NO: 3401 - RNA, 20 nt, Glycine max
  GMmerge_8711262
accaauuuugcagggauuua

SEQ ID NO: 3402 - RNA, 22 nt, Glycine max
  GMmerge_9819940
accaaucccuucguccauaugg

SEQ ID NO: 3403 - RNA, 21 nt, Glycine max
  GMmerge_620610
acauuuccagagcauccuucu

SEQ ID NO: 3404 - RNA, 22 nt, Glycine max
  GMmerge_4723540
uuugaaaguaggcauucuaaga

SEQ ID NO: 3405 - RNA, 22 nt, Glycine max
  GMmerge_1542885
acacuuuccuuccaauccuugu

SEQ ID NO: 3406 - RNA, 20 nt, Glycine max
  GMmerge_2356472
acacgugacggucaacauuc

SEQ ID NO: 3407 - RNA, 21 nt, Glycine max
  GMmerge_6359951
acacgacacggacacggacac

SEQ ID NO: 3408 - RNA, 21 nt, Glycine max
  GMmerge_6636369
acacaaccgauguagaauggc

SEQ ID NO: 3409 - RNA, 21 nt, Glycine max
  GMmerge_9405494
uuggaaguaauagguuccaac

SEQ ID NO: 3410 - RNA, 22 nt, Glycine max
  GMmerge_709963
aauuugauccguaagagacuuu

SEQ ID NO: 3411 - RNA, 19 nt, Glycine max
  GMmerge_6647409
aauugucaaaacugaugca

SEQ ID NO: 3412 - RNA, 22 nt, Glycine max
  GMmerge_6861922
aauuggccuucguaacuuccgg

SEQ ID NO: 3413 - RNA, 21 nt, Glycine max
  GMmerge_9106780
aauuagcuaaugguuagcuaa

SEQ ID NO: 3414 - RNA, 21 nt, Glycine max
  GMmerge_4653786
aaugugcguaguuuaauuuau

SEQ ID NO: 3415 - RNA, 22 nt, Glycine max
  GMmerge_8873794
aaugaagauaucagcccaacaa

SEQ ID NO: 3416 - RNA, 20 nt, Glycine max
  GMmerge_3956268
aaucugagaccgguaguugc

SEQ ID NO: 3417 - RNA, 21 nt, Glycine max
  GMmerge_6067245
aaucaaucgaagguaugugca

SEQ ID NO: 3418 - RNA, 20 nt, Glycine max
  GMmerge_5397157
aaucaaagcaggaacugugu

SEQ ID NO: 3419 - RNA, 22 nt, Glycine max
  GMmerge_3372496
aauauauuacuugucacgcggg

SEQ ID NO: 3420 - RNA, 22 nt, Glycine max
  GMmerge_95397
aauagguauaaccuacuggauc

SEQ ID NO: 3421 - RNA, 22 nt, Glycine max
  GMmerge_727876
aauaggaagauacagacauuuu

SEQ ID NO: 3422 - RNA, 22 nt, Glycine max
  GMmerge_8201903
aaguugauccauaaaagacuua

SEQ ID NO: 3423 - RNA, 22 nt, Glycine max
  GMmerge_8976463
aagugauguugacugucacgug

SEQ ID NO: 3424 - RNA, 20 nt, Glycine max
  GMmerge_8635635
aaggaaaaagacuuauaauu

SEQ ID NO: 3425 - RNA, 20 nt, Glycine max
  GMmerge_6734800
aagcacgacguagaaagcac

SEQ ID NO: 3426 - RNA, 21 nt, Glycine max
  GMmerge_11154560
aagaugcucuucuaagucguu

SEQ ID NO: 3427 - RNA, 22 nt, Glycine max
  GMmerge_241510
aagacuuacgaaucaacuugau

SEQ ID NO: 3428 - RNA, 21 nt, Glycine max
  GMmerge_3559703
aacuugauucguaaggcuucu

SEQ ID NO: 3429 - RNA, 22 nt, Glycine max
  GMmerge_4239062
aacuucuuugagauucugagca

SEQ ID NO: 3430 - RNA, 22 nt, Glycine max
  GMmerge_521273
aacguaguacgggugucguguc

SEQ ID NO: 3431 - RNA, 21 nt, Glycine max
  GMmerge_5604031
aacaaauuggagacaacauug

SEQ ID NO: 3432 - RNA, 22 nt, Glycine max
  GMmerge_1655825
aaauuuucagccauucacaaca

SEQ ID NO: 3433 - RNA, 21 nt, Glycine max
  GMmerge_4519698
aaaggcuugaccugaaugugc

SEQ ID NO: 3434 - RNA, 22 nt, Glycine max
  GMmerge_8841833
aaagacuuacggaucaacuuga

SEQ ID NO: 3435 - RNA, 21 nt, Glycine max
  GMmerge_9874447
aaagaccaagacgggcuagcu

SEQ ID NO: 3436 - RNA, 21 nt, Glycine max
  GMmerge_9916826
ucgacaaacucaggcaaugau

SEQ ID NO: 3437 - RNA, 22 nt, Glycine max
  GMmerge_2518011
aaaauccugagaagucauggga

SEQ ID NO: 3438 - RNA, 19 nt, Glycine max
  GMmerge_10426449
ucauuagucucggaugauu

SEQ ID NO: 3439 - RNA, 21 nt, Glycine max
  GMmerge_788025
uuuuuuuugucgaauucauuu

SEQ ID NO: 3440 - RNA, 21 nt, Glycine max
  GMmerge_4607510
uauuggccugguucacucaga

SEQ ID NO: 3441 - RNA, 21 nt, Glycine max
  GMmerge_8086547
uuuuguuuguggcuguuggcc

SEQ ID NO: 3442 - RNA, 22 nt, Glycine max
  GMmerge_4832928
uuuugguagauucaaauuuagu

SEQ ID NO: 3443 - RNA, 21 nt, Glycine max
  GMmerge_5908981
uuuuggcugugcggaaauuau

SEQ ID NO: 3444 - RNA, 21 nt, Glycine max
  GMmerge_7869008
uuuucuauucaugauaucgga

SEQ ID NO: 3445 - RNA, 22 nt, Glycine max
  GMmerge_11056569
uuuuacaaaucaacuugauccg

SEQ ID NO: 3446 - RNA, 21 nt, Glycine max
  GMmerge_2355515
uuuuaacuuguuaacucguug

SEQ ID NO: 3447 - RNA, 22 nt, Glycine max
  GMmerge_9755679
uaaguuuauuauuucaucuggu

SEQ ID NO: 3448 - RNA, 22 nt, Glycine max
  GMmerge_3871417
uuugucgaacaucaacaucauc

SEQ ID NO: 3449 - RNA, 21 nt, Glycine max
  GMmerge_9241228
uuuggugacauuuccuccaca

SEQ ID NO: 3450 - RNA, 22 nt, Glycine max
  GMmerge_943363
uuugggagaagggcgcggucua

SEQ ID NO: 3451 - RNA, 22 nt, Glycine max
  GMmerge_9106394
uuuggagccaagguuggacauc

SEQ ID NO: 3452 - RNA, 20 nt, Glycine max
  GMmerge_5778740
uuugagcgaaaagagauacg

SEQ ID NO: 3453 - RNA, 22 nt, Glycine max
  GMmerge_5554860
uuugaacacccacucaacaauu

SEQ ID NO: 3454 - RNA, 19 nt, Glycine max
  GMmerge_6517557
uuuccuaagucauugucca

SEQ ID NO: 3455 - RNA, 22 nt, Glycine max
  GMmerge_3036494
uuuccuaaaaaacuucaacggc

SEQ ID NO: 3456 - RNA, 21 nt, Glycine max
  GMmerge_665670
uuucaucaaauauacugcauu

SEQ ID NO: 3457 - RNA, 22 nt, Glycine max
  GMmerge_9411246
uuuaccaucgagucaacgaguu

SEQ ID NO: 3458 - RNA, 21 nt, Glycine max
  GMmerge_6628518
uuuaacuguuuugcagaugga

SEQ ID NO: 3459 - RNA, 22 nt, Glycine max
  GMmerge_10129328
uugugucguugguucaucaauu

SEQ ID NO: 3460 - RNA, 21 nt, Glycine max
  GMmerge_7996009
uuguaccuugauauauauugu

SEQ ID NO: 3461 - RNA, 20 nt, Glycine max
  GMmerge_4223012
gaacacaagauugcaaagcu

SEQ ID NO: 3462 - RNA, 22 nt, Glycine max
  GMmerge_9635589
uugccgaagcccacgauggcga

SEQ ID NO: 3463 - RNA, 21 nt, Glycine max
  GMmerge_10582526
uugccaaugccaaaacuugug

SEQ ID NO: 3464 - RNA, 22 nt, Glycine max
  GMmerge_10563693
uugcagguacuuagggacggau

SEQ ID NO: 3465 - RNA, 21 nt, Glycine max
  GMmerge_2919497
cguaaaagacuugcggaucaa

SEQ ID NO: 3466 - RNA, 21 nt, Glycine max
  GMmerge_783795
uugaggcaaucuggguugaug

SEQ ID NO: 3467 - RNA, 22 nt, Glycine max
  GMmerge_2788978
uugacugucacguuucacauuc

SEQ ID NO: 3468 - RNA, 21 nt, Glycine max
  GMmerge_3298851
uugacgaucucagaggugcga

SEQ ID NO: 3469 - RNA, 20 nt, Glycine max
  GMmerge_3452808
uugaauuguuggaaucccug

SEQ ID NO: 3470 - RNA, 20 nt, Glycine max
  GMmerge_9360960
uugaaugauaacggucacau

SEQ ID NO: 3471 - RNA, 22 nt, Glycine max
  GMmerge_7580833
uugaagaacuuuuaguauuugg

SEQ ID NO: 3472 - RNA, 22 nt, Glycine max
  GMmerge_1158291
uucuuccggaagaagaauuugu

SEQ ID NO: 3473 - RNA, 20 nt, Glycine max
  GMmerge_9863044
ccaaccucuucuaaaguccu

SEQ ID NO: 3474 - RNA, 22 nt, Glycine max
  GMmerge_10220593
uucuccauucccaugguuucuc

SEQ ID NO: 3475 - RNA, 21 nt, Glycine max
  GMmerge_417249
uucuacagugucgguaauguu

SEQ ID NO: 3476 - RNA, 21 nt, Glycine max
  GMmerge_9075285
uucgcuaagguaccuucaauu

SEQ ID NO: 3477 - RNA, 21 nt, Glycine max
  GMmerge_2788754
uucgagcauuuugacauauua

SEQ ID NO: 3478 - RNA, 21 nt, Glycine max
  GMmerge_4372038
uuccguacuuagcucuuugga

SEQ ID NO: 3479 - RNA, 22 nt, Glycine max
  GMmerge_2116161
uuccggaaguuaagaaggccaa

SEQ ID NO: 3480 - RNA, 21 nt, Glycine max
  GMmerge_3668073
uucaucgucauguccaucaca

SEQ ID NO: 3481 - RNA, 22 nt, Glycine max
  GMmerge_3417095
uucacugaaaauagaaaauggu

SEQ ID NO: 3482 - RNA, 22 nt, Glycine max
  GMmerge_983729
uuaugcaauaauaugacuuuug

SEQ ID NO: 3483 - RNA, 21 nt, Glycine max
  GMmerge_10771752
uuauauacaacgggaaguuuu

SEQ ID NO: 3484 - RNA, 21 nt, Glycine max
  GMmerge_5864900
uuagugccacguuggauaguu

SEQ ID NO: 3485 - RNA, 22 nt, Glycine max
  GMmerge_6628063
uuacuguuucuacagugucguu

SEQ ID NO: 3486 - RNA, 21 nt, Glycine max
  GMmerge_4776164
uuacuguuagauuauugggau

SEQ ID NO: 3487 - RNA, 22 nt, Glycine max
  GMmerge_4727730
uuacuccaagaguaacucuuuu

SEQ ID NO: 3488 - RNA, 22 nt, Glycine max
  GMmerge_7439161
uuacgcagcuucucguuuguuc

SEQ ID NO: 3489 - RNA, 22 nt, Glycine max
  GMmerge_8959794
uuaccaucgucacaaccaccac

SEQ ID NO: 3490 - RNA, 21 nt, Glycine max
  GMmerge_6391062
agcaaguccacugacgcugca

SEQ ID NO: 3491 - RNA, 20 nt, Glycine max
  GMmerge_896361
uuaagugagcucguuagaca

SEQ ID NO: 3492 - RNA, 21 nt, Glycine max
  GMmerge_6084526
uuaacgguagagaccuauuga

SEQ ID NO: 3493 - RNA, 20 nt, Glycine max
  GMmerge_946442
uuaaaguaagcuuugaugca

SEQ ID NO: 3494 - RNA, 21 nt, Glycine max
  GMmerge_5769641
uuaaagauuucaucgggaugc

SEQ ID NO: 3495 - RNA, 22 nt, Glycine max
  GMmerge_3783702
uuaaaacaauuacuuuguuaau

SEQ ID NO: 3496 - RNA, 22 nt, Glycine max
  GMmerge_4956484
uguugcgaaaacacauccucau

SEQ ID NO: 3497 - RNA, 22 nt, Glycine max
  GMmerge_185649
uguucaaacacauacuguuuaa

SEQ ID NO: 3498 - RNA, 22 nt, Glycine max
  GMmerge_6802310
ugugguucguaaguccagauuu

SEQ ID NO: 3499 - RNA, 22 nt, Glycine max
  GMmerge_5385564
ugugcguaguuuaauuuauauu

SEQ ID NO: 3500 - RNA, 19 nt, Glycine max
  GMmerge_1052283
ugucgugucggugucggac

SEQ ID NO: 3501 - RNA, 21 nt, Glycine max
  GMmerge_4156765
ugucgugucggugucggacac

SEQ ID NO: 3502 - RNA, 20 nt, Glycine max
  GMmerge_10692528
ugucgguaccucuuauuaau

SEQ ID NO: 3503 - RNA, 20 nt, Glycine max
  GMmerge_7969342
ugucggauaccggacacggc

SEQ ID NO: 3504 - RNA, 19 nt, Glycine max
  GMmerge_3369359
ugucggacacuaacacgga

SEQ ID NO: 3505 - RNA, 22 nt, Glycine max
  GMmerge_8581997
ugucggacaccggauacggcaa

SEQ ID NO: 3506 - RNA, 20 nt, Glycine max
  GMmerge_581570
uguccgaugucgguacuuca

SEQ ID NO: 3507 - RNA, 20 nt, Glycine max
  GMmerge_7083053
ugucauaucggugucggaca

SEQ ID NO: 3508 - RNA, 22 nt, Glycine max
  GMmerge_5588043
uguauucuaagacggucgugau

SEQ ID NO: 3509 - RNA, 21 nt, Glycine max
  GMmerge_2686940
uguauaagucaugguuuucuc

SEQ ID NO: 3510 - RNA, 22 nt, Glycine max
  GMmerge_5376156
uguaaaaggcuuacggaucaag

SEQ ID NO: 3511 - RNA, 22 nt, Glycine max
  GMmerge_9205773
ugguucaaagguugguuuuguu

SEQ ID NO: 3512 - RNA, 20 nt, Glycine max
  GMmerge_6307663
uggugaccggcucagacgag

SEQ ID NO: 3513 - RNA, 21 nt, Glycine max
  GMmerge_597940
uggucauugaguucauuuuuc

SEQ ID NO: 3514 - RNA, 22 nt, Glycine max
  GMmerge_7223076
ugguagugguugcagcgauggu

SEQ ID NO: 3515 - RNA, 22 nt, Glycine max
  GMmerge_10940448
ugguaaugaagcuacauaugua

SEQ ID NO: 3516 - RNA, 22 nt, Glycine max
  GMmerge_1775909
ugggaaaaucuuuggaauugga

SEQ ID NO: 3517 - RNA, 22 nt, Glycine max
  GMmerge_3561535
uggcgacgaggugacaccuggc

SEQ ID NO: 3518 - RNA, 22 nt, Glycine max
  GMmerge_7736666
uggccuucguaacuuccggaag

SEQ ID NO: 3519 - RNA, 22 nt, Glycine max
  GMmerge_7172840
uggcaauacagauauggaaaaa

SEQ ID NO: 3520 - RNA, 22 nt, Glycine max
  GMmerge_1341375
uggauuuuuccauuuucguugg

SEQ ID NO: 3521 - RNA, 21 nt, Glycine max
  GMmerge_4475840
uggaugugauuuaauuuagaa

SEQ ID NO: 3522 - RNA, 22 nt, Glycine max
  GMmerge_4348942
uggaugaucuaugcuaugacau

SEQ ID NO: 3523 - RNA, 19 nt, Glycine max
  GMmerge_9595115
uggacacaauuugacucau

SEQ ID NO: 3524 - RNA, 22 nt, Glycine max
  GMmerge_3460536
uggaaccaaucaaagaaaagga

SEQ ID NO: 3525 - RNA, 21 nt, Glycine max
  GMmerge_10413321
ugcucuggucguccaauggua

SEQ ID NO: 3526 - RNA, 22 nt, Glycine max
  GMmerge_4227728
uucugaaacacuugauagcaau

SEQ ID NO: 3527 - RNA, 21 nt, Glycine max
  GMmerge_6950737
uucuccucguuuuggaugacg

SEQ ID NO: 3528 - RNA, 21 nt, Glycine max
  GMmerge_8341786
ugauuuuuaagacuuacagau

SEQ ID NO: 3529 - RNA, 21 nt, Glycine max
  GMmerge_7141685
ugauucaugaucaugguuuga

SEQ ID NO: 3530 - RNA, 21 nt, Glycine max
  GMmerge_3292763
ugauguugacugucacguguc

SEQ ID NO: 3531 - RNA, 21 nt, Glycine max
  GMmerge_9342905
ugaugucagcaccgucuuuga

SEQ ID NO: 3532 - RNA, 22 nt, Glycine max
  GMmerge_7172814
ugauggcacugaugacugguca

SEQ ID NO: 3533 - RNA, 21 nt, Glycine max
  GMmerge_1045247
ugaugacugucacgugucaug

SEQ ID NO: 3534 - RNA, 22 nt, Glycine max
  GMmerge_3802084
ugauccauaaaagacuuaggau

SEQ ID NO: 3535 - RNA, 22 nt, Glycine max
  GMmerge_2624002
uguugaugcuuggauuaaggug

SEQ ID NO: 3536 - RNA, 22 nt, Glycine max
  GMmerge_1508816
ugucgaacaccgaacacggcaa

SEQ ID NO: 3537 - RNA, 19 nt, Glycine max
  GMmerge_10631741
ugaggacuccuuauauagc

SEQ ID NO: 3538 - RNA, 21 nt, Glycine max
  GMmerge_6070884
ugagcaucggcaugagacaag

SEQ ID NO: 3539 - RNA, 21 nt, Glycine max
  GMmerge_8426779
ugacugucaucgcccaaucag

SEQ ID NO: 3540 - RNA, 22 nt, Glycine max
  GMmerge_5497170
ugacugucacgugucauguucu

SEQ ID NO: 3541 - RNA, 22 nt, Glycine max
  GMmerge_1061569
ugacugucacgugucacguucu

SEQ ID NO: 3542 - RNA, 20 nt, Glycine max
  GMmerge_5153086
ugacugucacacguuauauu

SEQ ID NO: 3543 - RNA, 22 nt, Glycine max
  GMmerge_1229593
ugcuuggauuaagguguuuugg

SEQ ID NO: 3544 - RNA, 22 nt, Glycine max
  GMmerge_10826754
ugaccguuagcaagugauguug

SEQ ID NO: 3545 - RNA, 21 nt, Glycine max
  GMmerge_9031499
ugacauuuuaaacuaggauca

SEQ ID NO: 3546 - RNA, 21 nt, Glycine max
  GMmerge_11053540
ugacauagaauauaucaaggg

SEQ ID NO: 3547 - RNA, 21 nt, Glycine max
  GMmerge_4208836
ugaugauuguguacuuauacu

SEQ ID NO: 3548 - RNA, 21 nt, Glycine max
  GMmerge_6236009
ugaaugcuugaagcggguauu

SEQ ID NO: 3549 - RNA, 22 nt, Glycine max
  GMmerge_8186069
ugaauacuuauacaaaaaugac

SEQ ID NO: 3550 - RNA, 22 nt, Glycine max
  GMmerge_10426634
ugaacugcgaaagaaccuucuu

SEQ ID NO: 3551 - RNA, 22 nt, Glycine max
  GMmerge_9186469
ucuggauaagaaaucaggaauc

SEQ ID NO: 3552 - RNA, 19 nt, Glycine max
  GMmerge_1711043
ucuuuugggucuuugaaau

SEQ ID NO: 3553 - RNA, 21 nt, Glycine max
  GMmerge_10632050
ucuaaauuauguaggagaauu

SEQ ID NO: 3554 - RNA, 21 nt, Glycine max
  GMmerge_7241313
ucuuaaaacuaagacugaugg

SEQ ID NO: 3555 - RNA, 22 nt, Glycine max
  GMmerge_5624041
ucuuaaaaaguucugucagaca

SEQ ID NO: 3556 - RNA, 21 nt, Glycine max
  GMmerge_6754851
ucugugacaaagugugaugac

SEQ ID NO: 3557 - RNA, 22 nt, Glycine max
  GMmerge_9902283
ucgcuugcaaacauaucagugu

SEQ ID NO: 3558 - RNA, 19 nt, Glycine max
  GMmerge_10438920
ucugauucagaaacaaaga

SEQ ID NO: 3559 - RNA, 22 nt, Glycine max
  GMmerge_10731950
ucugacaaagcuuucaaagacg

SEQ ID NO: 3560 - RNA, 22 nt, Glycine max
  GMmerge_2019359
ucucuagaucagcugcuuugag

SEQ ID NO: 3561 - RNA, 21 nt, Glycine max
  GMmerge_9949429
ucaaguuuucuugaccuugca

SEQ ID NO: 3562 - RNA, 22 nt, Glycine max
  GMmerge_1969871
ucuauuuaagggaacauguuug

SEQ ID NO: 3563 - RNA, 22 nt, Glycine max
  GMmerge_4265884
uauuuuuagcucaacccguugc

SEQ ID NO: 3564 - RNA, 21 nt, Glycine max
  GMmerge_492588
ucuacuaugacacucuaucuu

SEQ ID NO: 3565 - RNA, 21 nt, Glycine max
  GMmerge_7575583
ucuaagaggacaucaguuuca

SEQ ID NO: 3566 - RNA, 21 nt, Glycine max
  GMmerge_9816620
uaugaaggucuaagauuucuu

SEQ ID NO: 3567 - RNA, 21 nt, Glycine max
  GMmerge_3919955
uaucguucgguaaucauugaa

SEQ ID NO: 3568 - RNA, 22 nt, Glycine max
  GMmerge_9655462
uagugucgugucggacaccgga

SEQ ID NO: 3569 - RNA, 22 nt, Glycine max
  GMmerge_2090809
ucgcuaagguaccuucaauuuu

SEQ ID NO: 3570 - RNA, 21 nt, Glycine max
  GMmerge_9795021
uaacguugaagcauugcugcu

SEQ ID NO: 3571 - RNA, 22 nt, Glycine max
  GMmerge_5797435
ucgaagcguauuaaagagcaag

SEQ ID NO: 3572 - RNA, 20 nt, Glycine max
  GMmerge_4522457
uccuucuaagcaguagggac

SEQ ID NO: 3573 - RNA, 21 nt, Glycine max
  GMmerge_922819
uaaaaucaugcaauguugguc

SEQ ID NO: 3574 - RNA, 22 nt, Glycine max
  GMmerge_5207981
uccuuacuguaaccaaaugaag

SEQ ID NO: 3575 - RNA, 21 nt, Glycine max
  GMmerge_9988681
uccugugaugaucaugaugga

SEQ ID NO: 3576 - RNA, 19 nt, Glycine max
  GMmerge_6672987
uccuaguguagccguggac

SEQ ID NO: 3577 - RNA, 21 nt, Glycine max
  GMmerge_5192733
gugucggacaccggacacggc

SEQ ID NO: 3578 - RNA, 21 nt, Glycine max
  GMmerge_10681390
guauuuaagaucuguuggaau

SEQ ID NO: 3579 - RNA, 21 nt, Glycine max
  GMmerge_9500740
uccccuuagggagauuccuga

SEQ ID NO: 3580 - RNA, 21 nt, Glycine max
  GMmerge_704236
uccaugacauggcaaaacugg

SEQ ID NO: 3581 - RNA, 21 nt, Glycine max
  GMmerge_9642957
uccaucacagcaagauguuuc

SEQ ID NO: 3582 - RNA, 22 nt, Glycine max
  GMmerge_9380012
uccauaaguucaguuaacauau

SEQ ID NO: 3583 - RNA, 21 nt, Glycine max
  GMmerge_8478895
ggugcagguuggugaagauga

SEQ ID NO: 3584 - RNA, 22 nt, Glycine max
  GMmerge_4704300
ucauuauaacacuugcggaauc

SEQ ID NO: 3585 - RNA, 21 nt, Glycine max
  GMmerge_4285601
ucauggaggucgccgucgucg

SEQ ID NO: 3586 - RNA, 22 nt, Glycine max
  GMmerge_9270408
ucaugcggugaccgugucaaau

SEQ ID NO: 3587 - RNA, 21 nt, Glycine max
  GMmerge_4410463
ucaugcacuucacuauccaug

SEQ ID NO: 3588 - RNA, 22 nt, Glycine max
  GMmerge_10952155
ucauaguaggccauggaaaauu

SEQ ID NO: 3589 - RNA, 21 nt, Glycine max
  GMmerge_143510
ucagagaagacuaaaagaaaa

SEQ ID NO: 3590 - RNA, 21 nt, Glycine max
  GMmerge_866988
ucagaccacaagaaggugaac

SEQ ID NO: 3591 - RNA, 22 nt, Glycine max
  GMmerge_7088798
ucacuguucccgcagauacuuc

SEQ ID NO: 3592 - RNA, 21 nt, Glycine max
  GMmerge_3050958
gcaaaagauuguuuaaacgug

SEQ ID NO: 3593 - RNA, 19 nt, Glycine max
  GMmerge_1302604
ucaauaaagcugugggaag

SEQ ID NO: 3594 - RNA, 21 nt, Glycine max
  GMmerge_7881586
ucaaguugauccggaagucuc

SEQ ID NO: 3595 - RNA, 21 nt, Glycine max
  GMmerge_146764
ucaaguggguuguuugaggau

SEQ ID NO: 3596 - RNA, 22 nt, Glycine max
  GMmerge_10252876
ucaagaucgucaccacaaccau

SEQ ID NO: 3597 - RNA, 22 nt, Glycine max
  GMmerge_1639140
ucaagaaccgauauagaaugau

SEQ ID NO: 3598 - RNA, 21 nt, Glycine max
  GMmerge_4252365
ucaacuugauccgugaaagac

SEQ ID NO: 3599 - RNA, 22 nt, Glycine max
  GMmerge_7035129
ucaacuugauccguaagacuuu

SEQ ID NO: 3600 - RNA, 21 nt, Glycine max
  GMmerge_3655241
ucaacuugauccguaaaaguc

SEQ ID NO: 3601 - RNA, 21 nt, Glycine max
  GMmerge_475515
ucaacauacagaugaacuuaa

SEQ ID NO: 3602 - RNA, 21 nt, Glycine max
  GMmerge_2815653
ucaaauauacugcauucuuac

SEQ ID NO: 3603 - RNA, 21 nt, Glycine max
  GMmerge_5612719
gagggaagaaaacucaggcuu

SEQ ID NO: 3604 - RNA, 22 nt, Glycine max
  GMmerge_5087278
uauuuuaguuagacauauuagc

SEQ ID NO: 3605 - RNA, 21 nt, Glycine max
  GMmerge_2280037
uauuugcauggccuacugauc

SEQ ID NO: 3606 - RNA, 22 nt, Glycine max
  GMmerge_7342340
uaugcagcgcuaguggacuugc

SEQ ID NO: 3607 - RNA, 21 nt, Glycine max
  GMmerge_10143436
uaugaaguuguccaacagaua

SEQ ID NO: 3608 - RNA, 22 nt, Glycine max
  GMmerge_4672969
uauccugaacccuagcgaagua

SEQ ID NO: 3609 - RNA, 21 nt, Glycine max
  GMmerge_9319092
uauccaacuugcgacgaaaaa

SEQ ID NO: 3610 - RNA, 22 nt, Glycine max
  GMmerge_8709257
uauaucaagguacaaucauucc

SEQ ID NO: 3611 - RNA, 21 nt, Glycine max
  GMmerge_593428
uauauaggucagaucauaggu

SEQ ID NO: 3612 - RNA, 21 nt, Glycine max
  GMmerge_5243923
cucuuauguucguugucacug

SEQ ID NO: 3613 - RNA, 21 nt, Glycine max
  GMmerge_7814495
uagugccacguuggauaguuc

SEQ ID NO: 3614 - RNA, 21 nt, Glycine max
  GMmerge_2826338
uaguacggguguugugucggu

SEQ ID NO: 3615 - RNA, 22 nt, Glycine max
  GMmerge_5352408
cgguguccauaucagugucggu

SEQ ID NO: 3616 - RNA, 21 nt, Glycine max
  GMmerge_1533443
uagcggaaaauggcggauguc

SEQ ID NO: 3617 - RNA, 21 nt, Glycine max
  GMmerge_5622543
uagaagcaaagauauuuugau

SEQ ID NO: 3618 - RNA, 22 nt, Glycine max
  GMmerge_11099217
ccguaugacucauagggaucaa

SEQ ID NO: 3619 - RNA, 21 nt, Glycine max
  GMmerge_2338269
uacggaucaacuuaaauggcu

SEQ ID NO: 3620 - RNA, 21 nt, Glycine max
  GMmerge_871771
uaccacgugucauguucugau

SEQ ID NO: 3621 - RNA, 21 nt, Glycine max
  GMmerge_9192769
uacaucacuaguagacaauaa

SEQ ID NO: 3622 - RNA, 21 nt, Glycine max
  GMmerge_9913947
uacauauguauucuugaggcu

SEQ ID NO: 3623 - RNA, 21 nt, Glycine max
  GMmerge_3939779
uacagaauucugguaaucgau

SEQ ID NO: 3624 - RNA, 22 nt, Glycine max
  GMmerge_8106102
uacaaaauguagaacaaccaag

SEQ ID NO: 3625 - RNA, 22 nt, Glycine max
  GMmerge_7361696
uaauuggucaaacuaaucuuga

SEQ ID NO: 3626 - RNA, 21 nt, Glycine max
  GMmerge_6083278
uaauuauucccuuaagguaau

SEQ ID NO: 3627 - RNA, 22 nt, Glycine max
  GMmerge_10915064
cugagaagucaugggaauggag

SEQ ID NO: 3628 - RNA, 21 nt, Glycine max
  GMmerge_2681329
caggggacgcucugugggccg

SEQ ID NO: 3629 - RNA, 20 nt, Glycine max
  GMmerge_8411301
uaauaaucuccuuggacaau

SEQ ID NO: 3630 - RNA, 21 nt, Glycine max
  GMmerge_1675545
uaauaacaaauaaucgucuuu

SEQ ID NO: 3631 - RNA, 22 nt, Glycine max
  GMmerge_3990728
uaaguugauccguaagucuuuu

SEQ ID NO: 3632 - RNA, 22 nt, Glycine max
  GMmerge_5660381
uaagaaugugacaugugacagu

SEQ ID NO: 3633 - RNA, 21 nt, Glycine max
  GMmerge_8855165
uaacggucaacguccaauugu

SEQ ID NO: 3634 - RNA, 22 nt, Glycine max
  GMmerge_8906698
uaacgcuguuagugaggucaau

SEQ ID NO: 3635 - RNA, 22 nt, Glycine max
  GMmerge_10678656
caaaaguuuuggcagguuggca

SEQ ID NO: 3636 - RNA, 22 nt, Glycine max
  GMmerge_3928128
uaacauuguccauaaaaaauau

SEQ ID NO: 3637 - RNA, 22 nt, Glycine max
  GMmerge_4352249
uaaauauuuuauugaugacgua

SEQ ID NO: 3638 - RNA, 21 nt, Glycine max
  GMmerge_10597841
uaaagauuucaucgggaugcc

SEQ ID NO: 3639 - RNA, 21 nt, Glycine max
  GMmerge_11153766
uaaaagacuuacggaucaagu

SEQ ID NO: 3640 - RNA, 22 nt, Glycine max
  GMmerge_8509144
uaaaaaccgguucauaaggggg

SEQ ID NO: 3641 - RNA, 21 nt, Glycine max
  GMmerge_6408342
guuugcacuaaagauugucca

SEQ ID NO: 3642 - RNA, 21 nt, Glycine max
  GMmerge_6606817
guugugucggugucggacacu

SEQ ID NO: 3643 - RNA, 21 nt, Glycine max
  GMmerge_7270923
guugaaacucagggcauagac

SEQ ID NO: 3644 - RNA, 22 nt, Glycine max
  GMmerge_1539790
guuaacuguuuugcagauggaa

SEQ ID NO: 3645 - RNA, 21 nt, Glycine max
  GMmerge_2255481
gugucgguaucgugucggugu

SEQ ID NO: 3646 - RNA, 21 nt, Glycine max
  GMmerge_2330954
gugucggacucugacacggac

SEQ ID NO: 3647 - RNA, 22 nt, Glycine max
  GMmerge_9608800
gugucggacaccggauacggca

SEQ ID NO: 3648 - RNA, 22 nt, Glycine max
  GMmerge_3360383
aucaucggcacauaggucaugg

SEQ ID NO: 3649 - RNA, 20 nt, Glycine max
  GMmerge_263583
gucgugucggugucggauac

SEQ ID NO: 3650 - RNA, 21 nt, Glycine max
  GMmerge_7476215
gucgugucggugucggacacu

SEQ ID NO: 3651 - RNA, 20 nt, Glycine max
  GMmerge_1426011
gucggacaccggacacggca

SEQ ID NO: 3652 - RNA, 21 nt, Glycine max
  GMmerge_2243392
aguugauucguaaggcuucua

SEQ ID NO: 3653 - RNA, 21 nt, Glycine max
  GMmerge_2112882
guaucgugucggugucggugu

SEQ ID NO: 3654 - RNA, 21 nt, Glycine max
  GMmerge_4500816
guaguacggguguugugucgg

SEQ ID NO: 3655 - RNA, 22 nt, Glycine max
  GMmerge_9932735
caacaacggcuggcaggaauau

SEQ ID NO: 3656 - RNA, 21 nt, Glycine max
  GMmerge_3527092
ccaaaacaaucaucuucggua

SEQ ID NO: 3657 - RNA, 21 nt, Glycine max
  GMmerge_7823555
augccuauuuuaaaaugaaaa

SEQ ID NO: 3658 - RNA, 22 nt, Glycine max
  GMmerge_3606972
auagcaaaauuggaaaaauauu

SEQ ID NO: 3659 - RNA, 22 nt, Glycine max
  GMmerge_9934435
caacauaucggcaaugaugaug

SEQ ID NO: 3660 - RNA, 22 nt, Glycine max
  GMmerge_2903302
ugcggagagacuaccauuacuc

SEQ ID NO: 3661 - RNA, 22 nt, Glycine max
  GMmerge_7824565
agggaucuucuucgucuucuuc

SEQ ID NO: 3662 - RNA, 22 nt, Glycine max
  GMmerge_2904681
auauacauuuugaccguuggga

SEQ ID NO: 3663 - RNA, 21 nt, Glycine max
  GMmerge_8529511
uuuauauuguuugaugacaga

SEQ ID NO: 3664 - RNA, 22 nt, Glycine max
  GMmerge_5015878
gggaaaaucuuuggaauuggac

SEQ ID NO: 3665 - RNA, 21 nt, Glycine max
  GMmerge_7125499
auugcaugacuugacugagga

SEQ ID NO: 3666 - RNA, 21 nt, Glycine max
  GMmerge_5721563
agacaucaccacaaacaaguc

SEQ ID NO: 3667 - RNA, 22 nt, Glycine max
  GMmerge_4230387
cauggcugaaauaaucaaacuu

SEQ ID NO: 3668 - RNA, 22 nt, Glycine max
  GMmerge_7128481
caaaggauugcauucaaauaaa

SEQ ID NO: 3669 - RNA, 21 nt, Glycine max
  GMmerge_9942194
aagcacgaagaucucucugaa

SEQ ID NO: 3670 - RNA, 20 nt, Glycine max
  GMmerge_1505850
ugggugagagaaacgcguau

SEQ ID NO: 3671 - RNA, 22 nt, Glycine max
  GMmerge_7131429
aagaaguucuccaacuacuuca

SEQ ID NO: 3672 - RNA, 21 nt, Glycine max
  GMmerge_8537249
ccaaagaugacaguggagacg

SEQ ID NO: 3673 - RNA, 21 nt, Glycine max
  GMmerge_5022852
gcgugcgaggagccaugcaug

SEQ ID NO: 3674 - RNA, 22 nt, Glycine max
  GMmerge_9152514
aauuauuguaacuaauuugucg

SEQ ID NO: 3675 - RNA, 22 nt, Glycine max
  GMmerge_6431195
aacaggaguuacaugagaggau

SEQ ID NO: 3676 - RNA, 21 nt, Glycine max
  GMmerge_7134251
uauuuugccaaaucauugaga

SEQ ID NO: 3677 - RNA, 21 nt, Glycine max
  GMmerge_8539953
ucugcaaaccaacugaacagc

SEQ ID NO: 3678 - RNA, 22 nt, Glycine max
  GMmerge_6433545
acgaggacuccuuuaaauagac

SEQ ID NO: 3679 - RNA, 22 nt, Glycine max
  GMmerge_8541359
ugaagcugccagcaugaucuga

SEQ ID NO: 3680 - RNA, 20 nt, Glycine max
  GMmerge_9950061
ucgcuuggugcaggucggga

SEQ ID NO: 3681 - RNA, 21 nt, Glycine max
  GMmerge_4326254
ucgcuuggugcaggucgggaa

SEQ ID NO: 3682 - RNA, 22 nt, Glycine max
  GMmerge_2920206
ccuguuugcacuaaagauuguc

SEQ ID NO: 3683 - RNA, 21 nt, Glycine max
  GMmerge_5733098
ucugauucagaaacaaagaug

SEQ ID NO: 3684 - RNA, 21 nt, Glycine max
  GMmerge_3624771
uugauucucaucacaacaugg

SEQ ID NO: 3685 - RNA, 21 nt, Glycine max
  GMmerge_106396
ugaaacucagggacgccaacg

SEQ ID NO: 3686 - RNA, 21 nt, Glycine max
  GMmerge_7842128
cgaacgaucccugugacgccu

SEQ ID NO: 3687 - RNA, 22 nt, Glycine max
  GMmerge_9153184
auuucaagaccaauacaauuua

SEQ ID NO: 3688 - RNA, 22 nt, Glycine max
  GMmerge_9251489
uuaugauauccgugaugacgug

SEQ ID NO: 3689 - RNA, 22 nt, Glycine max
  GMmerge_2923285
agaacaagacuuggaggacuac

SEQ ID NO: 3690 - RNA, 22 nt, Glycine max
  GMmerge_6440082
caaccgccaaacaaacaucggc

SEQ ID NO: 3691 - RNA, 22 nt, Glycine max
  GMmerge_9955640
uuaagacgguuuuucuaagaac

SEQ ID NO: 3692 - RNA, 19 nt, Glycine max
  GMmerge_2924166
gugucgugucggugucgga

SEQ ID NO: 3693 - RNA, 22 nt, Glycine max
  GMmerge_4331744
acaaggcaaaacuggaaaagua

SEQ ID NO: 3694 - RNA, 22 nt, Glycine max
  GMmerge_1518502
aguguggaaguggucugucaua

SEQ ID NO: 3695 - RNA, 22 nt, Glycine max
  GMmerge_9254630
guuuuuccguaucuguauugcc

SEQ ID NO: 3696 - RNA, 22 nt, Glycine max
  GMmerge_816257
auuggccaaaaagaccugggca

SEQ ID NO: 3697 - RNA, 21 nt, Glycine max
  GMmerge_7848557
cauucugagauugacaaggua

SEQ ID NO: 3698 - RNA, 22 nt, Glycine max
  GMmerge_5740005
uuucgagcauuuugacauauua

SEQ ID NO: 3699 - RNA, 22 nt, Glycine max
  GMmerge_10664159
uccaaagaagucccaccauugc

SEQ ID NO: 3700 - RNA, 21 nt, Glycine max
  GMmerge_5744629
acgacaagcacgcgagcaccc

SEQ ID NO: 3701 - RNA, 21 nt, Glycine max
  GMmerge_117705
ugacuuguucuggagcagccu

SEQ ID NO: 3702 - RNA, 21 nt, Glycine max
  GMmerge_5745752
agaaugcggagcgaacuaguc

SEQ ID NO: 3703 - RNA, 21 nt, Glycine max
  GMmerge_1529706
auacaagaagaaccaaaaucu

SEQ ID NO: 3704 - RNA, 22 nt, Glycine max
  GMmerge_7154854
ucaaagauccaaaagaccaaac

SEQ ID NO: 3705 - RNA, 21 nt, Glycine max
  GMmerge_826280
caaagacaagcugaaacuaac

SEQ ID NO: 3706 - RNA, 21 nt, Glycine max
  GMmerge_5047082
ucuugauuuuagacgauguug

SEQ ID NO: 3707 - RNA, 22 nt, Glycine max
  GMmerge_8561909
augacagauuuugguucuucuu

SEQ ID NO: 3708 - RNA, 21 nt, Glycine max
  GMmerge_7156520
uaccuugaucugaagcuugcu

SEQ ID NO: 3709 - RNA, 21 nt, Glycine max
  GMmerge_4345786
uugauuguugaaagaaggauc

SEQ ID NO: 3710 - RNA, 21 nt, Glycine max
  GMmerge_7045381
uggcuaaauggaagggugccu

SEQ ID NO: 3711 - RNA, 21 nt, Glycine max
  GMmerge_2940481
aaaagaacauaugagcugaaa

SEQ ID NO: 3712 - RNA, 20 nt, Glycine max
  GMmerge_126084
uccucaucgaagagauugug

SEQ ID NO: 3713 - RNA, 21 nt, Glycine max
  GMmerge_1534716
uccuucguaacagucaacguc

SEQ ID NO: 3714 - RNA, 22 nt, Glycine max
  GMmerge_831446
uauccgugaugacgugaggaua

SEQ ID NO: 3715 - RNA, 22 nt, Glycine max
  GMmerge_7863384
acgacaagcacgcgagcacccu

SEQ ID NO: 3716 - RNA, 21 nt, Glycine max
  GMmerge_7863525
uacgggucgcucucaccuagg

SEQ ID NO: 3717 - RNA, 22 nt, Glycine max
  GMmerge_7863849
ccaaaucguugagaaggucaug

SEQ ID NO: 3718 - RNA, 21 nt, Glycine max
  GMmerge_1419814
uuguuguuuuaccuauuccac

SEQ ID NO: 3719 - RNA, 22 nt, Glycine max
  GMmerge_2239834
acauaauggaacuugaauguag

SEQ ID NO: 3720 - RNA, 22 nt, Glycine max
  GMmerge_5053053
aaucagaacaugacacgugaca

SEQ ID NO: 3721 - RNA, 22 nt, Glycine max
  GMmerge_5756113
uagacucaauuuuuacuguuuc

SEQ ID NO: 3722 - RNA, 21 nt, Glycine max
  GMmerge_9975823
ggaggacagucauacaucaau

SEQ ID NO: 3723 - RNA, 21 nt, Glycine max
  GMmerge_4351628
uagagcugaaggaauuggaau

SEQ ID NO: 3724 - RNA, 22 nt, Glycine max
  GMmerge_9273589
caugaucgucauauucuccaca

SEQ ID NO: 3725 - RNA, 22 nt, Glycine max
  GMmerge_4352540
ugucuaagauuugguugggaaa

SEQ ID NO: 3726 - RNA, 22 nt, Glycine max
  GMmerge_7163806
uaggaggugucuuauuuguuga

SEQ ID NO: 3727 - RNA, 20 nt, Glycine max
  GMmerge_2945610
uuuguuucugaaaugguugg

SEQ ID NO: 3728 - RNA, 22 nt, Glycine max
  GMmerge_3650168
ucaucacagacaucauaaugaa

SEQ ID NO: 3729 - RNA, 21 nt, Glycine max
  GMmerge_6462806
aacagucaaauagucccgguc

SEQ ID NO: 3730 - RNA, 22 nt, Glycine max
  GMmerge_10681335
auacgugauuccuugcuauuau

SEQ ID NO: 3731 - RNA, 21 nt, Glycine max
  GMmerge_2244022
cagccaagaaugacuugccgg

SEQ ID NO: 3732 - RNA, 22 nt, Glycine max
  GMmerge_1541787
auauugccaugagaauauccau

SEQ ID NO: 3733 - RNA, 22 nt, Glycine max
  GMmerge_840557
uggaacacauuguaggaggagu

SEQ ID NO: 3734 - RNA, 22 nt, Glycine max
  GMmerge_9983207
agaugauuguuuugguaucugu

SEQ ID NO: 3735 - RNA, 22 nt, Glycine max
  GMmerge_2248761
ccaggaaguacuguucaaacau

SEQ ID NO: 3736 - RNA, 22 nt, Glycine max
  GMmerge_10686287
uaguacgggugucgugucggug

SEQ ID NO: 3737 - RNA, 22 nt, Glycine max
  GMmerge_9280679
aguccaagcaucaauauaaucc

SEQ ID NO: 3738 - RNA, 21 nt, Glycine max
  GMmerge_5062302
ucaaagaauauggacuuauau

SEQ ID NO: 3739 - RNA, 21 nt, Glycine max
  GMmerge_3657692
cgguucaauaaagcuguggga

SEQ ID NO: 3740 - RNA, 21 nt, Glycine max
  GMmerge_1547229
cauguuuucuucaaaauguaa

SEQ ID NO: 3741 - RNA, 21 nt, Glycine max
  GMmerge_5766579
ugagaugagaaggaagauggu

SEQ ID NO: 3742 - RNA, 22 nt, Glycine max
  GMmerge_2954674
uucugauucagaagucgcaacu

SEQ ID NO: 3743 - RNA, 22 nt, Glycine max
  GMmerge_5767347
ccauuuuacaaaggcgugucuc

SEQ ID NO: 3744 - RNA, 22 nt, Glycine max
  GMmerge_5064821
uuuucauggcaauaugguuaca

SEQ ID NO: 3745 - RNA, 22 nt, Glycine max
  GMmerge_8579737
ugaacaagacaccucuaaugaa

SEQ ID NO: 3746 - RNA, 21 nt, Glycine max
  GMmerge_2252806
cuaugaagcacggacacucca

SEQ ID NO: 3747 - RNA, 22 nt, Glycine max
  GMmerge_5768665
acgaacgaucccugugacgccu

SEQ ID NO: 3748 - RNA, 21 nt, Glycine max
  GMmerge_1550566
aagauauucccagaaacgguc

SEQ ID NO: 3749 - RNA, 22 nt, Glycine max
  GMmerge_7047224
gagaagauccaugacagugcaa

SEQ ID NO: 3750 - RNA, 22 nt, Glycine max
  GMmerge_2958747
gugaggauaugucacauggucg

SEQ ID NO: 3751 - RNA, 22 nt, Glycine max
  GMmerge_144380
aaauugcugaucuguauggaca

SEQ ID NO: 3752 - RNA, 21 nt, Glycine max
  GMmerge_4367007
uaagacaaguaguuuugacca

SEQ ID NO: 3753 - RNA, 21 nt, Glycine max
  GMmerge_3665354
ggaauguuguuuggcucgagg

SEQ ID NO: 3754 - RNA, 20 nt, Glycine max
  GMmerge_5773500
uucccaauuccgcccauucc

SEQ ID NO: 3755 - RNA, 21 nt, Glycine max
  GMmerge_7883565
guagaggacauguucauuuac

SEQ ID NO: 3756 - RNA, 22 nt, Glycine max
  GMmerge_8586817
uugauggaguuuaauaaaaaau

SEQ ID NO: 3757 - RNA, 21 nt, Glycine max
  GMmerge_5073041
acaccuuuagaucuacaagca

SEQ ID NO: 3758 - RNA, 21 nt, Glycine max
  GMmerge_7885101
ucuugucuucaggauaguggu

SEQ ID NO: 3759 - RNA, 21 nt, Glycine max
  GMmerge_5073848
aauccauucagaucuguuucg

SEQ ID NO: 3760 - RNA, 21 nt, Glycine max
  GMmerge_7885717
ucauuuucucacuuguuggca

SEQ ID NO: 3761 - RNA, 22 nt, Glycine max
  GMmerge_6480976
cuucucccuucaccgauccugu

SEQ ID NO: 3762 - RNA, 20 nt, Glycine max
  GMmerge_7183109
uuccacagcuuucuugaacu

SEQ ID NO: 3763 - RNA, 21 nt, Glycine max
  GMmerge_9860632
auaugauccguaugcguuaua

SEQ ID NO: 3764 - RNA, 22 nt, Glycine max
  GMmerge_5076069
ccacaaugucguggcugcauaa

SEQ ID NO: 3765 - RNA, 22 nt, Glycine max
  GMmerge_3671014
gucacacgguugucugacagac

SEQ ID NO: 3766 - RNA, 22 nt, Glycine max
  GMmerge_8591542
ucaaauauacugcauucuuacu

SEQ ID NO: 3767 - RNA, 22 nt, Glycine max
  GMmerge_8592022
cauccucucaugugacuccugu

SEQ ID NO: 3768 - RNA, 22 nt, Glycine max
  GMmerge_5780322
uggagauguuugaaauguuggu

SEQ ID NO: 3769 - RNA, 20 nt, Glycine max
  GMmerge_5077565
uggagcagccuuugaaguau

SEQ ID NO: 3770 - RNA, 22 nt, Glycine max
  GMmerge_8592509
uaaaggguaguaaggcuaaggu

SEQ ID NO: 3771 - RNA, 22 nt, Glycine max
  GMmerge_10001286
uaaccuuuaagauuuggauucu

SEQ ID NO: 3772 - RNA, 21 nt, Glycine max
  GMmerge_1564592
aaucaaucggagauaugugca

SEQ ID NO: 3773 - RNA, 21 nt, Glycine max
  GMmerge_7892890
uggacugaagggagcuccuuc

SEQ ID NO: 3774 - RNA, 22 nt, Glycine max
  GMmerge_3533823
acggacgcgugucggacaccga

SEQ ID NO: 3775 - RNA, 21 nt, Glycine max
  GMmerge_861373
cacggacgcgugucggacacc

SEQ ID NO: 3776 - RNA, 22 nt, Glycine max
  GMmerge_159807
caaaagucucaucuggcagcau

SEQ ID NO: 3777 - RNA, 20 nt, Glycine max
  GMmerge_3678961
ccuggcucagaaggaacgcu

SEQ ID NO: 3778 - RNA, 21 nt, Glycine max
  GMmerge_4381563
uuggacuaagguguuuuggca

SEQ ID NO: 3779 - RNA, 21 nt, Glycine max
  GMmerge_2975031
gugucgugucggugucggaca

SEQ ID NO: 3780 - RNA, 22 nt, Glycine max
  GMmerge_3681618
uacaaagauuguucaagacaga

SEQ ID NO: 3781 - RNA, 22 nt, Glycine max
  GMmerge_5790172
caaagguggaagacuugagaau

SEQ ID NO: 3782 - RNA, 22 nt, Glycine max
  GMmerge_164147
cauuaaagggaaugcuaauaga

SEQ ID NO: 3783 - RNA, 21 nt, Glycine max
  GMmerge_5088872
aaaggccguuggcgucccuga

SEQ ID NO: 3784 - RNA, 21 nt, Glycine max
  GMmerge_166035
uucauguuuucuuuaagaugu

SEQ ID NO: 3785 - RNA, 22 nt, Glycine max
  GMmerge_10012073
aagguagugugguuaaauuaag

SEQ ID NO: 3786 - RNA, 22 nt, Glycine max
  GMmerge_4388629
aacaaucaucuucguuuuggua

SEQ ID NO: 3787 - RNA, 22 nt, Glycine max
  GMmerge_3687835
aaucaacuugaucuguaagaag

SEQ ID NO: 3788 - RNA, 22 nt, Glycine max
  GMmerge_1577302
ugacauccacuggcuucguaaa

SEQ ID NO: 3789 - RNA, 22 nt, Glycine max
  GMmerge_2281694
uuccaaagggaucgcauugauc

SEQ ID NO: 3790 - RNA, 21 nt, Glycine max
  GMmerge_10721712
uuccacagcuuucuugaacuu

SEQ ID NO: 3791 - RNA, 21 nt, Glycine max
  GMmerge_6503976
ucauaggaggaaucaacuggc

SEQ ID NO: 3792 - RNA, 22 nt, Glycine max
  GMmerge_4395423
ucucauuccauacaucgucuga

SEQ ID NO: 3793 - RNA, 21 nt, Glycine max
  GMmerge_9318041
ccaagcauuggaucacgaaca

SEQ ID NO: 3794 - RNA, 22 nt, Glycine max
  GMmerge_4396947
acaucuucaucgucguguccau

SEQ ID NO: 3795 - RNA, 21 nt, Glycine max
  GMmerge_4397000
aaggaagaugguaauagcuca

SEQ ID NO: 3796 - RNA, 22 nt, Glycine max
  GMmerge_4397095
aagaaguccaacagggauucca

SEQ ID NO: 3797 - RNA, 22 nt, Glycine max
  GMmerge_2288997
ugccugaguuugucgaccucua

SEQ ID NO: 3798 - RNA, 21 nt, Glycine max
  GMmerge_5101440
acacugacacgauaccgacgc

SEQ ID NO: 3799 - RNA, 21 nt, Glycine max
  GMmerge_5102090
uggucaaaggagauuuguugg

SEQ ID NO: 3800 - RNA, 22 nt, Glycine max
  GMmerge_9322876
auucugaaacagaucugcaaaa

SEQ ID NO: 3801 - RNA, 22 nt, Glycine max
  GMmerge_6510800
agaauguggcacauaugcaugg

SEQ ID NO: 3802 - RNA, 22 nt, Glycine max
  GMmerge_4401948
caucugaaucauuagaggauga

SEQ ID NO: 3803 - RNA, 22 nt, Glycine max
  GMmerge_5808753
uugucgcagcacucuaucgggu

SEQ ID NO: 3804 - RNA, 22 nt, Glycine max
  GMmerge_5107333
ugguauuguaacuaauauauag

SEQ ID NO: 3805 - RNA, 22 nt, Glycine max
  GMmerge_7919624
aaccugcugauccagagacauc

SEQ ID NO: 3806 - RNA, 21 nt, Glycine max
  GMmerge_8624704
aagaagguucucuugauucua

SEQ ID NO: 3807 - RNA, 22 nt, Glycine max
  GMmerge_6516769
cggacgcgugucgaacaccgga

SEQ ID NO: 3808 - RNA, 21 nt, Glycine max
  GMmerge_7753786
cgaccguguuuccuugguuaa

SEQ ID NO: 3809 - RNA, 22 nt, Glycine max
  GMmerge_8457190
uuggagaaggaaagaucauuga

SEQ ID NO: 3810 - RNA, 22 nt, Glycine max
  GMmerge_2299705
auacuaucaacgucgguacuuu

SEQ ID NO: 3811 - RNA, 22 nt, Glycine max
  GMmerge_1596430
ugcuaaguggauuguuauuaag

SEQ ID NO: 3812 - RNA, 22 nt, Glycine max
  GMmerge_3709128
gaugaauuugauuguagauggc

SEQ ID NO: 3813 - RNA, 21 nt, Glycine max
  GMmerge_7223964
uugccgauuccacccauuccu

SEQ ID NO: 3814 - RNA, 22 nt, Glycine max
  GMmerge_8632003
ugucaagaucuaguagaaaugg

SEQ ID NO: 3815 - RNA, 22 nt, Glycine max
  GMmerge_7226944
cgaagaugauuguuuugguauc

SEQ ID NO: 3816 - RNA, 21 nt, Glycine max
  GMmerge_898668
aaggcgugucucugcaacggu

SEQ ID NO: 3817 - RNA, 21 nt, Glycine max
  GMmerge_5822423
ugagggcaaagauauuagaga

SEQ ID NO: 3818 - RNA, 21 nt, Glycine max
  GMmerge_3011729
aucaugcuaucccuuuggauu

SEQ ID NO: 3819 - RNA, 22 nt, Glycine max
  GMmerge_3012669
cagggucaaaaggugcagaaaa

SEQ ID NO: 3820 - RNA, 19 nt, Glycine max
  GMmerge_4420274
uuccacagcuuucuugaac

SEQ ID NO: 3821 - RNA, 21 nt, Glycine max
  GMmerge_2310477
cgcuaucuauccugaguuuca

SEQ ID NO: 3822 - RNA, 22 nt, Glycine max
  GMmerge_8638627
aggauugcucuggaaccaguuc

SEQ ID NO: 3823 - RNA, 22 nt, Glycine max
  GMmerge_10045055
uggaugaucuaugcuaugacgu

SEQ ID NO: 3824 - RNA, 22 nt, Glycine max
  GMmerge_4421686
ugcaucaccuuuaggaucugga

SEQ ID NO: 3825 - RNA, 22 nt, Glycine max
  GMmerge_3538091
auaguuugaacggcaauccuau

SEQ ID NO: 3826 - RNA, 21 nt, Glycine max
  GMmerge_4943681
uuagauuuagaucuuuggggu

SEQ ID NO: 3827 - RNA, 22 nt, Glycine max
  GMmerge_6532849
uucccaauuccgcccauuccua

SEQ ID NO: 3828 - RNA, 22 nt, Glycine max
  GMmerge_7235374
uggcagcauuuuuagcaggauc

SEQ ID NO: 3829 - RNA, 19 nt, Glycine max
  GMmerge_2314045
aagcucaggagggauagcg

SEQ ID NO: 3830 - RNA, 22 nt, Glycine max
  GMmerge_203760
aacaaccuccauucgucuguca

SEQ ID NO: 3831 - RNA, 21 nt, Glycine max
  GMmerge_7236795
ucaguaagccaugcaaauacu

SEQ ID NO: 3832 - RNA, 22 nt, Glycine max
  GMmerge_5129146
cagaauaagggacccagacaaa

SEQ ID NO: 3833 - RNA, 22 nt, Glycine max
  GMmerge_3724227
uuuugguucaaaaacacagaag

SEQ ID NO: 3834 - RNA, 22 nt, Glycine max
  GMmerge_10754359
uauuguaguaguauagauuauc

SEQ ID NO: 3835 - RNA, 22 nt, Glycine max
  GMmerge_7941855
ucuuccucuauugucgguauuu

SEQ ID NO: 3836 - RNA, 21 nt, Glycine max
  GMmerge_910444
uuaaaguaagcuuugaugcau

SEQ ID NO: 3837 - RNA, 21 nt, Glycine max
  GMmerge_207665
ugcagaucuguuuuagaauca

SEQ ID NO: 3838 - RNA, 22 nt, Glycine max
  GMmerge_7243008
uaccggucuuaugaaagaauuu

SEQ ID NO: 3839 - RNA, 22 nt, Glycine max
  GMmerge_10758431
uauuuaagaucuguuggaauuu

SEQ ID NO: 3840 - RNA, 21 nt, Glycine max
  GMmerge_9353395
acaucacggaauaugagcaac

SEQ ID NO: 3841 - RNA, 21 nt, Glycine max
  GMmerge_8650209
ucaagcugauccggaagucuc

SEQ ID NO: 3842 - RNA, 21 nt, Glycine max
  GMmerge_8459662
ugcuagcaagggaauugauag

SEQ ID NO: 3843 - RNA, 22 nt, Glycine max
  GMmerge_4434851
caaugguuguuggaucuucauc

SEQ ID NO: 3844 - RNA, 22 nt, Glycine max
  GMmerge_7246705
auauggacgaagagauagguaa

SEQ ID NO: 3845 - RNA, 21 nt, Glycine max
  GMmerge_8653085
ucgaguugucgaugaucuugu

SEQ ID NO: 3846 - RNA, 20 nt, Glycine max
  GMmerge_1621224
cggaccaggcuucauucccc

SEQ ID NO: 3847 - RNA, 21 nt, Glycine max
  GMmerge_3733589
ucaagaaaagcaauauaaguc

SEQ ID NO: 3848 - RNA, 21 nt, Glycine max
  GMmerge_3734060
agacauggaguagaugauguu

SEQ ID NO: 3849 - RNA, 20 nt, Glycine max
  GMmerge_8654801
gaucauguggcaguuucacc

SEQ ID NO: 3850 - RNA, 21 nt, Glycine max
  GMmerge_3734208
accggacacggcaaaagacug

SEQ ID NO: 3851 - RNA, 22 nt, Glycine max
  GMmerge_3030016
aaagaucaccugugguauugca

SEQ ID NO: 3852 - RNA, 21 nt, Glycine max
  GMmerge_3539622
ucggacaccggacacgacaag

SEQ ID NO: 3853 - RNA, 21 nt, Glycine max
  GMmerge_9360155
caagucaagaacugguuccag

SEQ ID NO: 3854 - RNA, 21 nt, Glycine max
  GMmerge_3736739
uucuugacuuguucuggagca

SEQ ID NO: 3855 - RNA, 22 nt, Glycine max
  GMmerge_10766852
uuguuuauauuguuugaugaca

SEQ ID NO: 3856 - RNA, 21 nt, Glycine max
  GMmerge_7957118
aggaguuugagcgaaaagaga

SEQ ID NO: 3857 - RNA, 21 nt, Glycine max
  GMmerge_5849021
ucauugaguguagcauugaug

SEQ ID NO: 3858 - RNA, 22 nt, Glycine max
  GMmerge_7255795
cuuggacuaagguguuuuggca

SEQ ID NO: 3859 - RNA, 21 nt, Glycine max
  GMmerge_10771475
uuacaacacauuuugcacauc

SEQ ID NO: 3860 - RNA, 22 nt, Glycine max
  GMmerge_1631521
ucccgucagugucaaagaugug

SEQ ID NO: 3861 - RNA, 19 nt, Glycine max
  GMmerge_7757434
ucuggagcagccuuugaag

SEQ ID NO: 3862 - RNA, 21 nt, Glycine max
  GMmerge_3745205
ucaugcgaucccuuaggaacu

SEQ ID NO: 3863 - RNA, 20 nt, Glycine max
  GMmerge_5853890
cggacaccggacacggcaag

SEQ ID NO: 3864 - RNA, 22 nt, Glycine max
  GMmerge_227562
ugugcagauggucaugaagauu

SEQ ID NO: 3865 - RNA, 22 nt, Glycine max
  GMmerge_10775970
uuguagaaaaccaguauauaug

SEQ ID NO: 3866 - RNA, 22 nt, Glycine max
  GMmerge_931769
cuguugaaguaguuggagaacu

SEQ ID NO: 3867 - RNA, 21 nt, Glycine max
  GMmerge_933904
uaaauuguuaacuguuuugca

SEQ ID NO: 3868 - RNA, 22 nt, Glycine max
  GMmerge_726591
ccucggaggcuugagccagguu

SEQ ID NO: 3869 - RNA, 21 nt, Glycine max
  GMmerge_7265781
uauaggggaagaauuucauuu

SEQ ID NO: 3870 - RNA, 21 nt, Glycine max
  GMmerge_10078946
uuucaaucggauuuauuaaac

SEQ ID NO: 3871 - RNA, 21 nt, Glycine max
  GMmerge_3753098
cgugucguguccgguguccau

SEQ ID NO: 3872 - RNA, 22 nt, Glycine max
  GMmerge_7268874
aagcaguagggacuuccuucca

SEQ ID NO: 3873 - RNA, 22 nt, Glycine max
  GMmerge_6353847
aauggaaggccucaugcauaug

SEQ ID NO: 3874 - RNA, 21 nt, Glycine max
  GMmerge_5863629
aggaaaugccauaguugacaa

SEQ ID NO: 3875 - RNA, 22 nt, Glycine max
  GMmerge_237638
cuacaucgguuauuaggacaac

SEQ ID NO: 3876 - RNA, 21 nt, Glycine max
  GMmerge_2837790
uccaaagggaucgcauugauc

SEQ ID NO: 3877 - RNA, 22 nt, Glycine max
  GMmerge_10789723
uaauuuuaguuuguagguuaau

SEQ ID NO: 3878 - RNA, 22 nt, Glycine max
  GMmerge_7274307
ugaucuuguuuguggugauguc

SEQ ID NO: 3879 - RNA, 22 nt, Glycine max
  GMmerge_10087100
ucgaaccacaagaaggcgaaau

SEQ ID NO: 3880 - RNA, 21 nt, Glycine max
  GMmerge_7274917
auaguaagaauuuguuuauau

SEQ ID NO: 3881 - RNA, 22 nt, Glycine max
  GMmerge_946036
aaaaggaaguuuuagcaauugu

SEQ ID NO: 3882 - RNA, 22 nt, Glycine max
  GMmerge_10088319
uaaaagacuuacggaucaacuu

SEQ ID NO: 3883 - RNA, 22 nt, Glycine max
  GMmerge_5166642
guuggucgaacuauacugccua

SEQ ID NO: 3884 - RNA, 22 nt, Glycine max
  GMmerge_3761915
aucaagguacaaucauuccaau

SEQ ID NO: 3885 - RNA, 21 nt, Glycine max
  GMmerge_7979364
uauacauuuugaccguuggga

SEQ ID NO: 3886 - RNA, 21 nt, Glycine max
  GMmerge_5871556
ugacuaugaucgcuuuguaga

SEQ ID NO: 3887 - RNA, 22 nt, Glycine max
  GMmerge_5871768
uacucuuuaacuaacagaauuc

SEQ ID NO: 3888 - RNA, 21 nt, Glycine max
  GMmerge_7981584
uacucuguucucuuuagauga

SEQ ID NO: 3889 - RNA, 22 nt, Glycine max
  GMmerge_6577042
gucaucagguacaggggaucau

SEQ ID NO: 3890 - RNA, 21 nt, Glycine max
  GMmerge_2359841
uacgaugaauuugauuguaga

SEQ ID NO: 3891 - RNA, 22 nt, Glycine max
  GMmerge_6579051
ucuauucaugauaucggagaaa

SEQ ID NO: 3892 - RNA, 22 nt, Glycine max
  GMmerge_5172571
uuaccuugaucugaagcuugcu

SEQ ID NO: 3893 - RNA, 21 nt, Glycine max
  GMmerge_1656293
aaaacuguugcggguaucuuu

SEQ ID NO: 3894 - RNA, 22 nt, Glycine max
  GMmerge_7984397
caggaguuacaugagaggaugg

SEQ ID NO: 3895 - RNA, 21 nt, Glycine max
  GMmerge_3063514
ugcugauccagagacaucuuu

SEQ ID NO: 3896 - RNA, 21 nt, Glycine max
  GMmerge_4948484
gggauagguaaaacaaugacu

SEQ ID NO: 3897 - RNA, 22 nt, Glycine max
  GMmerge_2136095
uccaaagggaucgcauugaucc

SEQ ID NO: 3898 - RNA, 21 nt, Glycine max
  GMmerge_10096323
cauuuuacaaaggcgugucuc

SEQ ID NO: 3899 - RNA, 21 nt, Glycine max
  GMmerge_252185
auacaacacaauccaaacaua

SEQ ID NO: 3900 - RNA, 22 nt, Glycine max
  GMmerge_5878964
uaccaaaacgaagaugauuguu

SEQ ID NO: 3901 - RNA, 22 nt, Glycine max
  GMmerge_252961
aucuggacuuggggaucacauu

SEQ ID NO: 3902 - RNA, 22 nt, Glycine max
  GMmerge_9167599
uagcaaaaugcagacaauuaua

SEQ ID NO: 3903 - RNA, 21 nt, Glycine max
  GMmerge_5178996
ucaaacaaacauggauuacaa

SEQ ID NO: 3904 - RNA, 21 nt, Glycine max
  GMmerge_1663600
gcucaagaaagcugugggaga

SEQ ID NO: 3905 - RNA, 21 nt, Glycine max
  GMmerge_10103208
ucaguagaucuuggcauucuu

SEQ ID NO: 3906 - RNA, 22 nt, Glycine max
  GMmerge_6356057
accggacacggcaagggacugg

SEQ ID NO: 3907 - RNA, 21 nt, Glycine max
  GMmerge_3073144
ugccuggcucccuguaugcca

SEQ ID NO: 3908 - RNA, 22 nt, Glycine max
  GMmerge_4480487
aggaaugcgaguugaaacgguc

SEQ ID NO: 3909 - RNA, 22 nt, Glycine max
  GMmerge_8698108
auaguuccggucaaaacuacug

SEQ ID NO: 3910 - RNA, 20 nt, Glycine max
  GMmerge_8698152
ggaaugggcugauugggaag

SEQ ID NO: 3911 - RNA, 22 nt, Glycine max
  GMmerge_9403031
aagaugacuguuuugguauauc

SEQ ID NO: 3912 - RNA, 21 nt, Glycine max
  GMmerge_6594522
aaaugcaguagacuguaauug

SEQ ID NO: 3913 - RNA, 22 nt, Glycine max
  GMmerge_1671572
agaugauuagagccucaaccuu

SEQ ID NO: 3914 - RNA, 22 nt, Glycine max
  GMmerge_265309
auuccuacaguaccguaucaag

SEQ ID NO: 3915 - RNA, 21 nt, Glycine max
  GMmerge_3080234
uuccuuuggaggauucauugu

SEQ ID NO: 3916 - RNA, 21 nt, Glycine max
  GMmerge_8001674
auuuucucacuuguuggcaua

SEQ ID NO: 3917 - RNA, 22 nt, Glycine max
  GMmerge_9411147
uuuccaguuuugccuugucaug

SEQ ID NO: 3918 - RNA, 21 nt, Glycine max
  GMmerge_7301741
auauaaguccauauucuuuga

SEQ ID NO: 3919 - RNA, 21 nt, Glycine max
  GMmerge_269751
ugaaaacaauuggaagucuau

SEQ ID NO: 3920 - RNA, 22 nt, Glycine max
  GMmerge_730422
ucgcuuggugcaggucgggaac

SEQ ID NO: 3921 - RNA, 22 nt, Glycine max
  GMmerge_6357214
aagaaaccgaagcggcggcaga

SEQ ID NO: 3922 - RNA, 22 nt, Glycine max
  GMmerge_9413931
uuguaucuauuagaaugaauuc

SEQ ID NO: 3923 - RNA, 22 nt, Glycine max
  GMmerge_2840819
uauucuaucuuggcacuaucuc

SEQ ID NO: 3924 - RNA, 22 nt, Glycine max
  GMmerge_3086577
aagaaggaagaaacaaguucug

SEQ ID NO: 3925 - RNA, 21 nt, Glycine max
  GMmerge_10821424
uuccacagcuuucuugaacug

SEQ ID NO: 3926 - RNA, 21 nt, Glycine max
  GMmerge_3792048
ugacugucacgugucauguuc

SEQ ID NO: 3927 - RNA, 21 nt, Glycine max
  GMmerge_9415972
caggggaacaggcagagcaug

SEQ ID NO: 3928 - RNA, 21 nt, Glycine max
  GMmerge_7762078
gugucggacaccggauacggc

SEQ ID NO: 3929 - RNA, 21 nt, Glycine max
  GMmerge_9169606
cggacacggacacguggacac

SEQ ID NO: 3930 - RNA, 22 nt, Glycine max
  GMmerge_8714221
uccugaacccuagcgaaguaaa

SEQ ID NO: 3931 - RNA, 21 nt, Glycine max
  GMmerge_26900
ggcguaugaggagccaagcau

SEQ ID NO: 3932 - RNA, 21 nt, Glycine max
  GMmerge_3794713
aagcccauggucuugugcggc

SEQ ID NO: 3933 - RNA, 20 nt, Glycine max
  GMmerge_2388513
aagcugccagcaugaucuua

SEQ ID NO: 3934 - RNA, 22 nt, Glycine max
  GMmerge_4500269
ccaugcauuaaugguuuugcau

SEQ ID NO: 3935 - RNA, 22 nt, Glycine max
  GMmerge_3797983
uugggauuacguugaugcuugg

SEQ ID NO: 3936 - RNA, 21 nt, Glycine max
  GMmerge_3798032
ugacaaggucguagcacaagg

SEQ ID NO: 3937 - RNA, 21 nt, Glycine max
  GMmerge_7060610
uuuggcauacagggagucaag

SEQ ID NO: 3938 - RNA, 21 nt, Glycine max
  GMmerge_10829528
gggaagacauggguauggggg

SEQ ID NO: 3939 - RNA, 22 nt, Glycine max
  GMmerge_731615
gcagaucuuagcauucuugucu

SEQ ID NO: 3940 - RNA, 22 nt, Glycine max
  GMmerge_5207050
uaaugaucuuggaagaccggcu

SEQ ID NO: 3941 - RNA, 21 nt, Glycine max
  GMmerge_988328
ugagcuacuaauacuuuggca

SEQ ID NO: 3942 - RNA, 21 nt, Glycine max
  GMmerge_10130767
agauccccacaacaguuaugc

SEQ ID NO: 3943 - RNA, 22 nt, Glycine max
  GMmerge_5912230
acacgugacaguuaucauccaa

SEQ ID NO: 3944 - RNA, 22 nt, Glycine max
  GMmerge_1693162
auggugcuaaugaaaggauguu

SEQ ID NO: 3945 - RNA, 21 nt, Glycine max
  GMmerge_990952
aauacaagaagaaccaaaauc

SEQ ID NO: 3946 - RNA, 21 nt, Glycine max
  GMmerge_287713
cuuguuuguggugaugucuag

SEQ ID NO: 3947 - RNA, 22 nt, Glycine max
  GMmerge_1695468
uaauacuaucaacgucgguacu

SEQ ID NO: 3948 - RNA, 22 nt, Glycine max
  GMmerge_3102847
auacaagucaaccauauggccu

SEQ ID NO: 3949 - RNA, 21 nt, Glycine max
  GMmerge_3807758
ccauuggcuuuggaaguaaua

SEQ ID NO: 3950 - RNA, 20 nt, Glycine max
  GMmerge_995174
auacaagaagaaccaaaauc

SEQ ID NO: 3951 - RNA, 21 nt, Glycine max
  GMmerge_7329101
ucagcagaucuuagcauucuu

SEQ ID NO: 3952 - RNA, 21 nt, Glycine max
  GMmerge_1705221
uguaaaagacuuacggaucaa

SEQ ID NO: 3953 - RNA, 21 nt, Glycine max
  GMmerge_10143647
uucagguuuuugagacgaggu

SEQ ID NO: 3954 - RNA, 21 nt, Glycine max
  GMmerge_3112504
uaagaguccagaagaaguugg

SEQ ID NO: 3955 - RNA, 20 nt, Glycine max
  GMmerge_7331031
uugcuucaaagaauauggac

SEQ ID NO: 3956 - RNA, 22 nt, Glycine max
  GMmerge_3113488
uaguccaagcaucaauauaauc

SEQ ID NO: 3957 - RNA, 21 nt, Glycine max
  GMmerge_5224233
auaugcaugaggccuuccauu

SEQ ID NO: 3958 - RNA, 21 nt, Glycine max
  GMmerge_4522227
ucauugaaacuccuuguugcu

SEQ ID NO: 3959 - RNA, 21 nt, Glycine max
  GMmerge_1005871
auuuaagaucuguuggaauuc

SEQ ID NO: 3960 - RNA, 22 nt, Glycine max
  GMmerge_8741536
acuuuuucugugauugacuccu

SEQ ID NO: 3961 - RNA, 22 nt, Glycine max
  GMmerge_5227125
aggacugcaaagggucggccgu

SEQ ID NO: 3962 - RNA, 22 nt, Glycine max
  GMmerge_3118158
aaauuauguaggagaauuuguc

SEQ ID NO: 3963 - RNA, 22 nt, Glycine max
  GMmerge_7336654
gccauggaauguauuacaagcc

SEQ ID NO: 3964 - RNA, 22 nt, Glycine max
  GMmerge_3823186
ccaagcaucaauauaaucccaa

SEQ ID NO: 3965 - RNA, 21 nt, Glycine max
  GMmerge_3119742
aagggaggagggucugcauac

SEQ ID NO: 3966 - RNA, 21 nt, Glycine max
  GMmerge_3120481
ucaagaaaagcacucuucucu

SEQ ID NO: 3967 - RNA, 22 nt, Glycine max
  GMmerge_7341696
auacuaaaaguucuucaaccaa

SEQ ID NO: 3968 - RNA, 22 nt, Glycine max
  GMmerge_10859692
uccccuacuugccuuuuaggag

SEQ ID NO: 3969 - RNA, 21 nt, Glycine max
  GMmerge_5938360
uacuaucaacgucgguacuuu

SEQ ID NO: 3970 - RNA, 21 nt, Glycine max
  GMmerge_5939200
aucaaguugauccggaagucu

SEQ ID NO: 3971 - RNA, 21 nt, Glycine max
  GMmerge_3833250
uaaguuagcaagugagcaaca

SEQ ID NO: 3972 - RNA, 22 nt, Glycine max
  GMmerge_7766281
auagaucgaggcauuaaguuga

SEQ ID NO: 3973 - RNA, 22 nt, Glycine max
  GMmerge_10868096
aagaccgguauaaaacugaugc

SEQ ID NO: 3974 - RNA, 21 nt, Glycine max
  GMmerge_2432479
uuguugcuucaaagaauaugg

SEQ ID NO: 3975 - RNA, 21 nt, Glycine max
  GMmerge_9464222
uguagagcauagaucgaggca

SEQ ID NO: 3976 - RNA, 21 nt, Glycine max
  GMmerge_8058661
ucagaccacaggaaggugaac

SEQ ID NO: 3977 - RNA, 22 nt, Glycine max
  GMmerge_4546190
uuagugucacguuggauagucc

SEQ ID NO: 3978 - RNA, 22 nt, Glycine max
  GMmerge_8442201
uaccaaaacaaucaucuucggu

SEQ ID NO: 3979 - RNA, 22 nt, Glycine max
  GMmerge_6656120
guccaagcaucaauauaauccc

SEQ ID NO: 3980 - RNA, 21 nt, Glycine max
  GMmerge_326612
ucacuaacggcguuacuuuaa

SEQ ID NO: 3981 - RNA, 22 nt, Glycine max
  GMmerge_1439757
uccaaagggaucgcauugaucu

SEQ ID NO: 3982 - RNA, 22 nt, Glycine max
  GMmerge_328601
uauuuugaugccagaacauauu

SEQ ID NO: 3983 - RNA, 22 nt, Glycine max
  GMmerge_10580870
caguugaugaucucgugucuua

SEQ ID NO: 3984 - RNA, 22 nt, Glycine max
  GMmerge_736359
uuaacagcacuaagaugugauu

SEQ ID NO: 3985 - RNA, 19 nt, Glycine max
  GMmerge_1736485
ucuugauucuagaugaugu

SEQ ID NO: 3986 - RNA, 22 nt, Glycine max
  GMmerge_331876
aagacuuacggaucaacuugau

SEQ ID NO: 3987 - RNA, 21 nt, Glycine max
  GMmerge_3146931
ucaggugaagacgaguaacac

SEQ ID NO: 3988 - RNA, 22 nt, Glycine max
  GMmerge_5257691
ugaugcuuggacuaagguguuu

SEQ ID NO: 3989 - RNA, 21 nt, Glycine max
  GMmerge_3150141
ugacggcacugaaguagaggc

SEQ ID NO: 3990 - RNA, 22 nt, Glycine max
  GMmerge_1040141
caugacaaaaagaucguggaua

SEQ ID NO: 3991 - RNA, 21 nt, Glycine max
  GMmerge_3855870
cagaagaaguuggugaacaau

SEQ ID NO: 3992 - RNA, 20 nt, Glycine max
  GMmerge_8439184
gagcuccuugaaguccaauu

SEQ ID NO: 3993 - RNA, 22 nt, Glycine max
  GMmerge_8777633
uaagggcauauguuaacugaac

SEQ ID NO: 3994 - RNA, 22 nt, Glycine max
  GMmerge_8074673
agaauacuuuguugaucuguca

SEQ ID NO: 3995 - RNA, 22 nt, Glycine max
  GMmerge_4561597
aacggagcuauuagagagaggg

SEQ ID NO: 3996 - RNA, 21 nt, Glycine max
  GMmerge_10186997
acaaguggguuuguugacuga

SEQ ID NO: 3997 - RNA, 21 nt, Glycine max
  GMmerge_5969018
agaauuuguuuauauuguuug

SEQ ID NO: 3998 - RNA, 22 nt, Glycine max
  GMmerge_1749902
caucacagacaucauaaugaau

SEQ ID NO: 3999 - RNA, 22 nt, Glycine max
  GMmerge_10891672
uugaccacaacaacgcuggagg

SEQ ID NO: 4000 - RNA, 22 nt, Glycine max
  GMmerge_9487129
ccucucaugugacuccuguuug

SEQ ID NO: 4001 - RNA, 22 nt, Glycine max
  GMmerge_4565729
acaauucaaauacuaaaaguuc

SEQ ID NO: 4002 - RNA, 22 nt, Glycine max
  GMmerge_345249
aagaugauuguuuugguaucug

SEQ ID NO: 4003 - RNA, 21 nt, Glycine max
  GMmerge_3863462
uaaacucuaaguaaacucggu

SEQ ID NO: 4004 - RNA, 22 nt, Glycine max
  GMmerge_10190479
uuugucuaagauuugguugggg

SEQ ID NO: 4005 - RNA, 22 nt, Glycine max
  GMmerge_5972273
aauuccagcagaucuuaaauac

SEQ ID NO: 4006 - RNA, 22 nt, Glycine max
  GMmerge_8082238
acggacacgugucggacaccgg

SEQ ID NO: 4007 - RNA, 22 nt, Glycine max
  GMmerge_9177236
gaaugccuguggaauaggaaga

SEQ ID NO: 4008 - RNA, 21 nt, Glycine max
  GMmerge_3866164
aaaacucgggguuuugacagg

SEQ ID NO: 4009 - RNA, 22 nt, Glycine max
  GMmerge_9490666
uuccuucaggauguagcaugaa

SEQ ID NO: 4010 - RNA, 21 nt, Glycine max
  GMmerge_3161982
ucggaccaggcuucauucccc

SEQ ID NO: 4011 - RNA, 22 nt, Glycine max
  GMmerge_5974526
uagaauuuucuagaacguucug

SEQ ID NO: 4012 - RNA, 21 nt, Glycine max
  GMmerge_1052029
cuuuguagcagcugaugggaa

SEQ ID NO: 4013 - RNA, 22 nt, Glycine max
  GMmerge_5661490
caaaggcugcuccagaacaagu

SEQ ID NO: 4014 - RNA, 21 nt, Glycine max
  GMmerge_8788453
cucugacuuagaagaagacuc

SEQ ID NO: 4015 - RNA, 21 nt, Glycine max
  GMmerge_350044
aggcugauaguucaacaaggc

SEQ ID NO: 4016 - RNA, 22 nt, Glycine max
  GMmerge_9494612
aagauuugaggaucugguggca

SEQ ID NO: 4017 - RNA, 21 nt, Glycine max
  GMmerge_8087908
guugacaucacgaacgucuua

SEQ ID NO: 4018 - RNA, 20 nt, Glycine max
  GMmerge_6683583
guagcaucaucaagauucac

SEQ ID NO: 4019 - RNA, 21 nt, Glycine max
  GMmerge_4575230
cacgugcucuccuuuuccagc

SEQ ID NO: 4020 - RNA, 22 nt, Glycine max
  GMmerge_7770111
ugucggacaccggacacggcaa

SEQ ID NO: 4021 - RNA, 22 nt, Glycine max
  GMmerge_4577401
ccuaaaaggcaaguaggggagu

SEQ ID NO: 4022 - RNA, 21 nt, Glycine max
  GMmerge_3874774
ggaauguugucuggcucgagg

SEQ ID NO: 4023 - RNA, 22 nt, Glycine max
  GMmerge_10201949
agcucauagaauagauagguac

SEQ ID NO: 4024 - RNA, 22 nt, Glycine max
  GMmerge_5280672
cgugcauggauacugagauuca

SEQ ID NO: 4025 - RNA, 21 nt, Glycine max
  GMmerge_8093187
uuuguaaaaugguggacucaa

SEQ ID NO: 4026 - RNA, 22 nt, Glycine max
  GMmerge_5987130
uguggggaccgucggccuugcc

SEQ ID NO: 4027 - RNA, 21 nt, Glycine max
  GMmerge_5987918
agaugauuguuuugguaucug

SEQ ID NO: 4028 - RNA, 21 nt, Glycine max
  GMmerge_8097910
caacuaaaaagcucaagggac

SEQ ID NO: 4029 - RNA, 22 nt, Glycine max
  GMmerge_7069111
aggaaguaagaaugcaguauga

SEQ ID NO: 4030 - RNA, 22 nt, Glycine max
  GMmerge_4583418
caaagauauucccagaaacggu

SEQ ID NO: 4031 - RNA, 21 nt, Glycine max
  GMmerge_1443281
uuuuguaagcacuucuuucaa

SEQ ID NO: 4032 - RNA, 22 nt, Glycine max
  GMmerge_2849973
uuuuaggaguaugcuagcaaua

SEQ ID NO: 4033 - RNA, 22 nt, Glycine max
  GMmerge_7395848
cuaaaaggcaaguaggggagua

SEQ ID NO: 4034 - RNA, 22 nt, Glycine max
  GMmerge_1771664
uuagagaauauuauaaucaugu

SEQ ID NO: 4035 - RNA, 21 nt, Glycine max
  GMmerge_8805466
caugacaaggcaaaacuggaa

SEQ ID NO: 4036 - RNA, 21 nt, Glycine max
  GMmerge_8103560
ggaggcagcgguucaucgauc

SEQ ID NO: 4037 - RNA, 21 nt, Glycine max
  GMmerge_1072211
uauacaagaauuucucuuaua

SEQ ID NO: 4038 - RNA, 21 nt, Glycine max
  GMmerge_7401779
cgacacggacaccggacacga

SEQ ID NO: 4039 - RNA, 20 nt, Glycine max
  GMmerge_10216354
agagauguauggagugagag

SEQ ID NO: 4040 - RNA, 21 nt, Glycine max
  GMmerge_5997905
acagauuuugguucuucuugu

SEQ ID NO: 4041 - RNA, 21 nt, Glycine max
  GMmerge_372422
uaguccuaggucgcacuuaaa

SEQ ID NO: 4042 - RNA, 21 nt, Glycine max
  GMmerge_10922127
cccauaccacuguuuuuccuc

SEQ ID NO: 4043 - RNA, 21 nt, Glycine max
  GMmerge_3893495
aguaggaaugcgaguugaaac

SEQ ID NO: 4044 - RNA, 22 nt, Glycine max
  GMmerge_10552402
agacaaguaguuuugaccagga

SEQ ID NO: 4045 - RNA, 20 nt, Glycine max
  GMmerge_5303278
gaucauguggcugcuucacc

SEQ ID NO: 4046 - RNA, 21 nt, Glycine max
  GMmerge_7412804
ucaaguugauuuguaaggcuu

SEQ ID NO: 4047 - RNA, 22 nt, Glycine max
  GMmerge_3899287
aggcgugucucugcaacggugg

SEQ ID NO: 4048 - RNA, 21 nt, Glycine max
  GMmerge_8820805
auauaaacaaauucuuacuau

SEQ ID NO: 4049 - RNA, 22 nt, Glycine max
  GMmerge_6712443
ucccuaugauugcaucugagac

SEQ ID NO: 4050 - RNA, 22 nt, Glycine max
  GMmerge_7415448
uuaucaacuuaggcauaaauuc

SEQ ID NO: 4051 - RNA, 21 nt, Glycine max
  GMmerge_383904
ugucggacaccggacacggca

SEQ ID NO: 4052 - RNA, 22 nt, Glycine max
  GMmerge_8119140
auugaugugguaguuuaaugga

SEQ ID NO: 4053 - RNA, 19 nt, Glycine max
  GMmerge_3198273
aacguauaguugauccuga

SEQ ID NO: 4054 - RNA, 22 nt, Glycine max
  GMmerge_9526634
auaagagguaccgacaaauuag

SEQ ID NO: 4055 - RNA, 21 nt, Glycine max
  GMmerge_10229998
agccaagggugauuugccggc

SEQ ID NO: 4056 - RNA, 21 nt, Glycine max
  GMmerge_7417752
auauugcuuuucuugacauug

SEQ ID NO: 4057 - RNA, 22 nt, Glycine max
  GMmerge_2497655
aaauacugguguugucuaacau

SEQ ID NO: 4058 - RNA, 21 nt, Glycine max
  GMmerge_1090736
uccaugacaaggcaaaacugg

SEQ ID NO: 4059 - RNA, 22 nt, Glycine max
  GMmerge_9529513
ucgaccaugugacacauucuca

SEQ ID NO: 4060 - RNA, 21 nt, Glycine max
  GMmerge_7419989
ucaagaacugguuccagagca

SEQ ID NO: 4061 - RNA, 22 nt, Glycine max
  GMmerge_4608915
agcgaaagaagguucucuugau

SEQ ID NO: 4062 - RNA, 22 nt, Glycine max
  GMmerge_8125002
cucccaucagacgccacgugaa

SEQ ID NO: 4063 - RNA, 22 nt, Glycine max
  GMmerge_8828718
ccucaaagcagcugauccagag

SEQ ID NO: 4064 - RNA, 22 nt, Glycine max
  GMmerge_7037115
ucuaucaagcacuucaaggauc

SEQ ID NO: 4065 - RNA, 19 nt, Glycine max
  GMmerge_1096240
uguugcggguaucuuugcc

SEQ ID NO: 4066 - RNA, 22 nt, Glycine max
  GMmerge_8831871
cugcuaauccggagacaucuuu

SEQ ID NO: 4067 - RNA, 21 nt, Glycine max
  GMmerge_6722957
ucaaaacaaguuggaaccuau

SEQ ID NO: 4068 - RNA, 22 nt, Glycine max
  GMmerge_1800828
agaggucaaauuuugaaucggu

SEQ ID NO: 4069 - RNA, 20 nt, Glycine max
  GMmerge_1099222
ucggacaccggacacggcaa

SEQ ID NO: 4070 - RNA, 22 nt, Glycine max
  GMmerge_9538118
uuucaauuggccaugcauaguc

SEQ ID NO: 4071 - RNA, 22 nt, Glycine max
  GMmerge_9538541
gaggaucuaaaagaggaccaga

SEQ ID NO: 4072 - RNA, 21 nt, Glycine max
  GMmerge_4617588
guucaauaaagcugugggaag

SEQ ID NO: 4073 - RNA, 22 nt, Glycine max
  GMmerge_2507886
acuauuguugaugacuggaagu

SEQ ID NO: 4074 - RNA, 21 nt, Glycine max
  GMmerge_4617771
cuauguuguaguccuaggucg

SEQ ID NO: 4075 - RNA, 21 nt, Glycine max
  GMmerge_4618071
accggacacggcaagggacug

SEQ ID NO: 4076 - RNA, 21 nt, Glycine max
  GMmerge_6727774
uuauacaaugcccucaugaga

SEQ ID NO: 4077 - RNA, 22 nt, Glycine max
  GMmerge_9885499
aaaugaaagggugccucacaac

SEQ ID NO: 4078 - RNA, 22 nt, Glycine max
  GMmerge_402170
gacggaacuuacaaagauuguu

SEQ ID NO: 4079 - RNA, 20 nt, Glycine max
  GMmerge_6029768
uucugauucagaaacaaaga

SEQ ID NO: 4080 - RNA, 22 nt, Glycine max
  GMmerge_5326333
uaagugauuuuauggaccauuc

SEQ ID NO: 4081 - RNA, 21 nt, Glycine max
  GMmerge_4625384
agaggucaaauuuugaaucgg

SEQ ID NO: 4082 - RNA, 22 nt, Glycine max
  GMmerge_3218835
ccuugacggcguccuucuccca

SEQ ID NO: 4083 - RNA, 21 nt, Glycine max
  GMmerge_7437130
aaaggcuuacagaucaaguug

SEQ ID NO: 4084 - RNA, 21 nt, Glycine max
  GMmerge_3925442
gaugauuguuuugguaucugu

SEQ ID NO: 4085 - RNA, 22 nt, Glycine max
  GMmerge_407433
uacuucacuaggguucaggaca

SEQ ID NO: 4086 - RNA, 22 nt, Glycine max
  GMmerge_3925938
ugacaaaguuaggguugcaaua

SEQ ID NO: 4087 - RNA, 22 nt, Glycine max
  GMmerge_1111392
ccgacacggacaccggacacga

SEQ ID NO: 4088 - RNA, 22 nt, Glycine max
  GMmerge_8851007
auggguuuauaugggagaggga

SEQ ID NO: 4089 - RNA, 22 nt, Glycine max
  GMmerge_3930957
cuuuagugucacguuggauagu

SEQ ID NO: 4090 - RNA, 21 nt, Glycine max
  GMmerge_9554404
agaagaagagaagagugcuuu

SEQ ID NO: 4091 - RNA, 22 nt, Glycine max
  GMmerge_5336041
agaaggaagaaacaaguucugc

SEQ ID NO: 4092 - RNA, 21 nt, Glycine max
  GMmerge_3228149
uugaugaucauugggacaaua

SEQ ID NO: 4093 - RNA, 21 nt, Glycine max
  GMmerge_7448415
aucaugcgaucccuuaggaac

SEQ ID NO: 4094 - RNA, 22 nt, Glycine max
  GMmerge_2526791
aauuuguuuugaggcaagguuu

SEQ ID NO: 4095 - RNA, 22 nt, Glycine max
  GMmerge_1120111
caaucggauuuauuaaaccaaa

SEQ ID NO: 4096 - RNA, 22 nt, Glycine max
  GMmerge_1825279
uguuaaaagacugcauagaauu

SEQ ID NO: 4097 - RNA, 21 nt, Glycine max
  GMmerge_420288
agcuugcuaagaaugcugcca

SEQ ID NO: 4098 - RNA, 21 nt, Glycine max
  GMmerge_7776573
gaugacagauuuugguucuuc

SEQ ID NO: 4099 - RNA, 21 nt, Glycine max
  GMmerge_6047093
ugcaagaugucgauacaugaa

SEQ ID NO: 4100 - RNA, 22 nt, Glycine max
  GMmerge_420926
agauauuucaugugaucuucug

SEQ ID NO: 4101 - RNA, 21 nt, Glycine max
  GMmerge_5343736
cagaaucucaaagaaguucuc

SEQ ID NO: 4102 - RNA, 22 nt, Glycine max
  GMmerge_6047618
cuucacuaggguucaggacaau

SEQ ID NO: 4103 - RNA, 21 nt, Glycine max
  GMmerge_2533004
uuggggaauaaggcacaauaa

SEQ ID NO: 4104 - RNA, 21 nt, Glycine max
  GMmerge_3941168
uaauucgcuuggugcaggucg

SEQ ID NO: 4105 - RNA, 22 nt, Glycine max
  GMmerge_10971102
cagggacgccaacggccuuucg

SEQ ID NO: 4106 - RNA, 22 nt, Glycine max
  GMmerge_8863177
ucugauuuaaggcaaauucagu

SEQ ID NO: 4107 - RNA, 22 nt, Glycine max
  GMmerge_4646819
uuaagaucuguuggaauucgug

SEQ ID NO: 4108 - RNA, 21 nt, Glycine max
  GMmerge_6053567
cuugcugucaugaucgucaua

SEQ ID NO: 4109 - RNA, 22 nt, Glycine max
  GMmerge_8443123
acuguuaaaaaagagguuuuag

SEQ ID NO: 4110 - RNA, 22 nt, Glycine max
  GMmerge_7460220
aauuugggaaauuauagauugu

SEQ ID NO: 4111 - RNA, 22 nt, Glycine max
  GMmerge_5351174
cgggaacacaagauugcaaagc

SEQ ID NO: 4112 - RNA, 22 nt, Glycine max
  GMmerge_4648680
caacgaugcauaauaacucaau

SEQ ID NO: 4113 - RNA, 21 nt, Glycine max
  GMmerge_5352052
agagguuugcaugaauaauua

SEQ ID NO: 4114 - RNA, 22 nt, Glycine max
  GMmerge_3947297
ucuucccuacaccucccauacc

SEQ ID NO: 4115 - RNA, 22 nt, Glycine max
  GMmerge_4650615
ugaacugaugaacuaacggcac

SEQ ID NO: 4116 - RNA, 22 nt, Glycine max
  GMmerge_1135105
caugagaggaugguugaaguaa

SEQ ID NO: 4117 - RNA, 21 nt, Glycine max
  GMmerge_2544915
uuuugucagacccgcagagac

SEQ ID NO: 4118 - RNA, 22 nt, Glycine max
  GMmerge_3952968
uugaccaaggaauuuuagaaga

SEQ ID NO: 4119 - RNA, 22 nt, Glycine max
  GMmerge_10280213
auauuucaugugaucuucugug

SEQ ID NO: 4120 - RNA, 21 nt, Glycine max
  GMmerge_4655792
ugaagcugccagcaugaucug

SEQ ID NO: 4121 - RNA, 20 nt, Glycine max
  GMmerge_1139062
cccgccuugcaucaacugaa

SEQ ID NO: 4122 - RNA, 21 nt, Glycine max
  GMmerge_5358949
ugcacucgagguugacauggc

SEQ ID NO: 4123 - RNA, 19 nt, Glycine max
  GMmerge_437784
uugggucaacuguucuagg

SEQ ID NO: 4124 - RNA, 22 nt, Glycine max
  GMmerge_6768029
uucugaaacagaucugcaaaaa

SEQ ID NO: 4125 - RNA, 22 nt, Glycine max
  GMmerge_10283249
uuccuucugugaacaauuuggu

SEQ ID NO: 4126 - RNA, 20 nt, Glycine max
  GMmerge_3252198
acgaccuuacuugaacagga

SEQ ID NO: 4127 - RNA, 20 nt, Glycine max
  GMmerge_2549583
ggaauguugucuggcucgag

SEQ ID NO: 4128 - RNA, 22 nt, Glycine max
  GMmerge_9581468
cgacacggacaccggacacgac

SEQ ID NO: 4129 - RNA, 22 nt, Glycine max
  GMmerge_5670666
cgcaacuggcagcauucuuggc

SEQ ID NO: 4130 - RNA, 21 nt, Glycine max
  GMmerge_5364167
cuucaaaggauaugcauucau

SEQ ID NO: 4131 - RNA, 21 nt, Glycine max
  GMmerge_6771740
cagaaaccugaaaauggcuaa

SEQ ID NO: 4132 - RNA, 22 nt, Glycine max
  GMmerge_10989703
aacuaauuaaucgucgucuaac

SEQ ID NO: 4133 - RNA, 22 nt, Glycine max
  GMmerge_10287206
auacgggucgcucucaccuagg

SEQ ID NO: 4134 - RNA, 21 nt, Glycine max
  GMmerge_10287439
uuuuguaggauccggaugguu

SEQ ID NO: 4135 - RNA, 22 nt, Glycine max
  GMmerge_3256711
aaccaggcucugauaccauggu

SEQ ID NO: 4136 - RNA, 21 nt, Glycine max
  GMmerge_7475363
ggaugcagcgguucaucgauc

SEQ ID NO: 4137 - RNA, 22 nt, Glycine max
  GMmerge_9585164
gagaugguagagguacauugca

SEQ ID NO: 4138 - RNA, 22 nt, Glycine max
  GMmerge_10288765
uaauauacugguggcuauagga

SEQ ID NO: 4139 - RNA, 20 nt, Glycine max
  GMmerge_10991620
aggugggcauacugucaacu

SEQ ID NO: 4140 - RNA, 21 nt, Glycine max
  GMmerge_1852127
acugcuauucccauuucuaaa

SEQ ID NO: 4141 - RNA, 21 nt, Glycine max
  GMmerge_8181779
gcguaugaggagccaagcaua

SEQ ID NO: 4142 - RNA, 22 nt, Glycine max
  GMmerge_4668251
uaauucuggacaauacuaccua

SEQ ID NO: 4143 - RNA, 22 nt, Glycine max
  GMmerge_8183442
caauggugggauuucuuugguc

SEQ ID NO: 4144 - RNA, 21 nt, Glycine max
  GMmerge_4668644
uguugcggguaucuuugccuc

SEQ ID NO: 4145 - RNA, 21 nt, Glycine max
  GMmerge_748381
cccgccuugcaucaacugaau

SEQ ID NO: 4146 - RNA, 21 nt, Glycine max
  GMmerge_10293903
cggacgcgugucgaacaccgg

SEQ ID NO: 4147 - RNA, 21 nt, Glycine max
  GMmerge_9591735
aagaaccggcgauauaaucug

SEQ ID NO: 4148 - RNA, 21 nt, Glycine max
  GMmerge_450984
auaugaugacuuaagacaaau

SEQ ID NO: 4149 - RNA, 21 nt, Glycine max
  GMmerge_9593110
uuguuugaggaugccaccaua

SEQ ID NO: 4150 - RNA, 21 nt, Glycine max
  GMmerge_6781483
caaggguaugaugugcaaucu

SEQ ID NO: 4151 - RNA, 21 nt, Glycine max
  GMmerge_8890669
ccuggauggggucaauggaug

SEQ ID NO: 4152 - RNA, 22 nt, Glycine max
  GMmerge_10297159
aggaguuacaugagaggauggu

SEQ ID NO: 4153 - RNA, 22 nt, Glycine max
  GMmerge_748956
ugaagaagaagaaaucaugguc

SEQ ID NO: 4154 - RNA, 22 nt, Glycine max
  GMmerge_2564257
ugacaaggcaaaacuggaaaag

SEQ ID NO: 4155 - RNA, 21 nt, Glycine max
  GMmerge_6784057
ugacacgugaucgucagcauc

SEQ ID NO: 4156 - RNA, 21 nt, Glycine max
  GMmerge_8189817
uaugggauaaaugugagcuca

SEQ ID NO: 4157 - RNA, 22 nt, Glycine max
  GMmerge_3268330
uggcuauaggacagguaguauu

SEQ ID NO: 4158 - RNA, 22 nt, Glycine max
  GMmerge_10299614
uuauuuguagauaauauaaaua

SEQ ID NO: 4159 - RNA, 22 nt, Glycine max
  GMmerge_3268527
ccugaacacaagggagaggaau

SEQ ID NO: 4160 - RNA, 22 nt, Glycine max
  GMmerge_9597606
uaaccuacuggaucaaauggaa

SEQ ID NO: 4161 - RNA, 21 nt, Glycine max
  GMmerge_5379373
agagagucacgguuuaggcug

SEQ ID NO: 4162 - RNA, 22 nt, Glycine max
  GMmerge_11004466
ucagcucgauugguccauugac

SEQ ID NO: 4163 - RNA, 21 nt, Glycine max
  GMmerge_1864777
aaacagaucuaaauggauucc

SEQ ID NO: 4164 - RNA, 22 nt, Glycine max
  GMmerge_2567905
auacuuaaacuaagcuuugaug

SEQ ID NO: 4165 - RNA, 21 nt, Glycine max
  GMmerge_7490741
uugagaagauccaacgguuaa

SEQ ID NO: 4166 - RNA, 22 nt, Glycine max
  GMmerge_9600952
caaucagaacaugacacgugac

SEQ ID NO: 4167 - RNA, 22 nt, Glycine max
  GMmerge_8194823
cuaccagaggaucauagaaacu

SEQ ID NO: 4168 - RNA, 20 nt, Glycine max
  GMmerge_6086861
ccuagaauagcugcaguaga

SEQ ID NO: 4169 - RNA, 22 nt, Glycine max
  GMmerge_3979963
gcucggucgggcuguuagaugc

SEQ ID NO: 4170 - RNA, 22 nt, Glycine max
  GMmerge_9603886
uauuguccagcauuaauuacac

SEQ ID NO: 4171 - RNA, 22 nt, Glycine max
  GMmerge_8903171
ucuuccggaaguuacugaggcc

SEQ ID NO: 4172 - RNA, 21 nt, Glycine max
  GMmerge_7496175
uagaaagggaaauagcaguug

SEQ ID NO: 4173 - RNA, 22 nt, Glycine max
  GMmerge_9606322
ggagugaaucugagaacacaag

SEQ ID NO: 4174 - RNA, 22 nt, Glycine max
  GMmerge_6090901
auuauagauuguguugguuuug

SEQ ID NO: 4175 - RNA, 22 nt, Glycine max
  GMmerge_9606636
ggccccaucgaugcugauguau

SEQ ID NO: 4176 - RNA, 21 nt, Glycine max
  GMmerge_10310421
aguauacuggcacacuguuga

SEQ ID NO: 4177 - RNA, 22 nt, Glycine max
  GMmerge_3984115
ugucagacaccggacacggcaa

SEQ ID NO: 4178 - RNA, 21 nt, Glycine max
  GMmerge_10553230
auacgaucaauauuuggaugg

SEQ ID NO: 4179 - RNA, 20 nt, Glycine max
  GMmerge_10595131
agcucaggagggauagcgcc

SEQ ID NO: 4180 - RNA, 21 nt, Glycine max
  GMmerge_3283397
ugggaagaccggcuagaaauu

SEQ ID NO: 4181 - RNA, 21 nt, Glycine max
  GMmerge_6096005
uuaaguaucucuaggauuuga

SEQ ID NO: 4182 - RNA, 21 nt, Glycine max
  GMmerge_1877136
uuauaagacaaguaguuuuga

SEQ ID NO: 4183 - RNA, 21 nt, Glycine max
  GMmerge_3988284
auguagaauacuaucacuugg

SEQ ID NO: 4184 - RNA, 21 nt, Glycine max
  GMmerge_3284020
auuggcuuuggaaguaauagg

SEQ ID NO: 4185 - RNA, 21 nt, Glycine max
  GMmerge_1174038
gcggcauccauggaggaacag

SEQ ID NO: 4186 - RNA, 22 nt, Glycine max
  GMmerge_5394131
uuaaagauuucaucgggaugcc

SEQ ID NO: 4187 - RNA, 22 nt, Glycine max
  GMmerge_6097448
ugaccuucgaauggauacugau

SEQ ID NO: 4188 - RNA, 21 nt, Glycine max
  GMmerge_3285749
ccacagcuuucuugaacugca

SEQ ID NO: 4189 - RNA, 21 nt, Glycine max
  GMmerge_472332
ucucauuccauacaucgucug

SEQ ID NO: 4190 - RNA, 22 nt, Glycine max
  GMmerge_6098597
caacaauucaacaagcucuaua

SEQ ID NO: 4191 - RNA, 22 nt, Glycine max
  GMmerge_10317413
cauuccauacaucgucugacga

SEQ ID NO: 4192 - RNA, 22 nt, Glycine max
  GMmerge_6099747
uccauaucuguauugccaugaa

SEQ ID NO: 4193 - RNA, 22 nt, Glycine max
  GMmerge_2158430
gaggaugguugaaguaagagua

SEQ ID NO: 4194 - RNA, 22 nt, Glycine max
  GMmerge_1881349
aagaccaaacgagaagcugcau

SEQ ID NO: 4195 - RNA, 22 nt, Glycine max
  GMmerge_11021368
cugggaacaggcagggcacgaa

SEQ ID NO: 4196 - RNA, 22 nt, Glycine max
  GMmerge_6101534
uucauuuuuaaaauagacauug

SEQ ID NO: 4197 - RNA, 22 nt, Glycine max
  GMmerge_1179129
cugagaucaugacuucaaggcc

SEQ ID NO: 4198 - RNA, 22 nt, Glycine max
  GMmerge_8211240
caaaacauuggaauccugcaca

SEQ ID NO: 4199 - RNA, 21 nt, Glycine max
  GMmerge_8915990
uacggacgucggugucagugu

SEQ ID NO: 4200 - RNA, 21 nt, Glycine max
  GMmerge_4697201
ugaaguguuugggggaacuuu

SEQ ID NO: 4201 - RNA, 21 nt, Glycine max
  GMmerge_9618992
ucgcaaguuggauauuaugaa

SEQ ID NO: 4202 - RNA, 22 nt, Glycine max
  GMmerge_8486205
gauuguuuugguauuuguuuag

SEQ ID NO: 4203 - RNA, 22 nt, Glycine max
  GMmerge_6104509
uuuacuucacuaggguucagga

SEQ ID NO: 4204 - RNA, 21 nt, Glycine max
  GMmerge_8214349
agccaagaaugacuugccgga

SEQ ID NO: 4205 - RNA, 21 nt, Glycine max
  GMmerge_6105733
uccaaagcagauccagaacaa

SEQ ID NO: 4206 - RNA, 22 nt, Glycine max
  GMmerge_1182952
aacgacacuguagaaacaguaa

SEQ ID NO: 4207 - RNA, 22 nt, Glycine max
  GMmerge_5675132
ucuucaacagagcuuauuucuu

SEQ ID NO: 4208 - RNA, 21 nt, Glycine max
  GMmerge_11030377
aagcucgagcaauuacuucca

SEQ ID NO: 4209 - RNA, 22 nt, Glycine max
  GMmerge_6813423
ucaacgucugagguuaacgguc

SEQ ID NO: 4210 - RNA, 22 nt, Glycine max
  GMmerge_6813684
auaugcaccaagcuuggaacau

SEQ ID NO: 4211 - RNA, 22 nt, Glycine max
  GMmerge_1891499
uucauuaugauauccgugauga

SEQ ID NO: 4212 - RNA, 21 nt, Glycine max
  GMmerge_8487100
gcauguuaguugagaaaucuc

SEQ ID NO: 4213 - RNA, 20 nt, Glycine max
  GMmerge_4707598
ugcacugccucuucccuggc

SEQ ID NO: 4214 - RNA, 22 nt, Glycine max
  GMmerge_4006031
gaacaagacuuggaggacuaca

SEQ ID NO: 4215 - RNA, 21 nt, Glycine max
  GMmerge_11035840
uuucaggaacguauaguugau

SEQ ID NO: 4216 - RNA, 21 nt, Glycine max
  GMmerge_1896092
auauuagacugcuguacuucc

SEQ ID NO: 4217 - RNA, 22 nt, Glycine max
  GMmerge_11036646
uucauuuuuaaaauaggcauug

SEQ ID NO: 4218 - RNA, 19 nt, Glycine max
  GMmerge_10335008
gucgugucggugucggaca

SEQ ID NO: 4219 - RNA, 22 nt, Glycine max
  GMmerge_11037713
uggaggcagcgguucaucgauc

SEQ ID NO: 4220 - RNA, 22 nt, Glycine max
  GMmerge_6117234
caacaccgucuuugaagccugg

SEQ ID NO: 4221 - RNA, 22 nt, Glycine max
  GMmerge_492313
uggauaagaaaucaggaaucaa

SEQ ID NO: 4222 - RNA, 22 nt, Glycine max
  GMmerge_493913
ucucaaaacccagcggcucauc

SEQ ID NO: 4223 - RNA, 22 nt, Glycine max
  GMmerge_10339322
ucugaaaaucaucaugaacguu

SEQ ID NO: 4224 - RNA, 22 nt, Glycine max
  GMmerge_1902229
ucauugaacagacagggaaaau

SEQ ID NO: 4225 - RNA, 22 nt, Glycine max
  GMmerge_8934398
ugaaauucugaaggggcauuau

SEQ ID NO: 4226 - RNA, 22 nt, Glycine max
  GMmerge_6121822
uuccaguuuugccuugucaugg

SEQ ID NO: 4227 - RNA, 22 nt, Glycine max
  GMmerge_3310281
cugagacagaaacuaggacugc

SEQ ID NO: 4228 - RNA, 22 nt, Glycine max
  GMmerge_4014897
aggaagaaacaaguucugcuga

SEQ ID NO: 4229 - RNA, 20 nt, Glycine max
  GMmerge_7529007
ugagcaguagggacuuccuu

SEQ ID NO: 4230 - RNA, 21 nt, Glycine max
  GMmerge_4717872
caaucaucuucgguaucuguu

SEQ ID NO: 4231 - RNA, 22 nt, Glycine max
  GMmerge_8937153
uuuggacaaucuuuagugcaaa

SEQ ID NO: 4232 - RNA, 22 nt, Glycine max
  GMmerge_4718293
gaaauuauagauuguguugguu

SEQ ID NO: 4233 - RNA, 21 nt, Glycine max
  GMmerge_2609545
agaggaaaugcagacuucauu

SEQ ID NO: 4234 - RNA, 21 nt, Glycine max
  GMmerge_8235316
uuuaaaucuucaucguugacg

SEQ ID NO: 4235 - RNA, 19 nt, Glycine max
  GMmerge_7785051
agcucaggagggauagcgc

SEQ ID NO: 4236 - RNA, 22 nt, Glycine max
  GMmerge_4020195
uuuagauccuccuccucgucgg

SEQ ID NO: 4237 - RNA, 21 nt, Glycine max
  GMmerge_4020806
caaacauauuuugccaaauca

SEQ ID NO: 4238 - RNA, 22 nt, Glycine max
  GMmerge_4021519
guaagaauucacggguaaggua

SEQ ID NO: 4239 - RNA, 22 nt, Glycine max
  GMmerge_6833236
uucuuguaggaugggguauaau

SEQ ID NO: 4240 - RNA, 22 nt, Glycine max
  GMmerge_4022416
auacuguucaaacacauacugu

SEQ ID NO: 4241 - RNA, 21 nt, Glycine max
  GMmerge_7535818
auacgggugucgugucggugu

SEQ ID NO: 4242 - RNA, 21 nt, Glycine max
  GMmerge_6130760
agguuucugaagagaggugcu

SEQ ID NO: 4243 - RNA, 21 nt, Glycine max
  GMmerge_9193127
acuucacuaggguucaggaca

SEQ ID NO: 4244 - RNA, 21 nt, Glycine max
  GMmerge_11053087
ggaaugggcugauugggaagc

SEQ ID NO: 4245 - RNA, 21 nt, Glycine max
  GMmerge_3321699
aacgucugagguuaacgguca

SEQ ID NO: 4246 - RNA, 22 nt, Glycine max
  GMmerge_4727907
aucacgaauuccaacagaucuu

SEQ ID NO: 4247 - RNA, 22 nt, Glycine max
  GMmerge_7540826
gauuguuuugguaucuguuuag

SEQ ID NO: 4248 - RNA, 22 nt, Glycine max
  GMmerge_9651327
uuacuaaaacuaauuaaucguc

SEQ ID NO: 4249 - RNA, 20 nt, Glycine max
  GMmerge_10354721
acaccggacacgacacggac

SEQ ID NO: 4250 - RNA, 21 nt, Glycine max
  GMmerge_2864973
ggcagagguguauggagugag

SEQ ID NO: 4251 - RNA, 22 nt, Glycine max
  GMmerge_510937
cauuggaauccugcacaauuaa

SEQ ID NO: 4252 - RNA, 21 nt, Glycine max
  GMmerge_8246901
uuucgcuaagguaccuucaau

SEQ ID NO: 4253 - RNA, 21 nt, Glycine max
  GMmerge_10357671
guagaaaacugguagagauga

SEQ ID NO: 4254 - RNA, 22 nt, Glycine max
  GMmerge_1216333
uacuaaaaguucuucaaccaag

SEQ ID NO: 4255 - RNA, 22 nt, Glycine max
  GMmerge_4733372
uaagaacgugacauaugacaau

SEQ ID NO: 4256 - RNA, 22 nt, Glycine max
  GMmerge_5436832
cagagguuugcaugaauaauua

SEQ ID NO: 4257 - RNA, 22 nt, Glycine max
  GMmerge_8952690
auucugugaauuccuuggacaa

SEQ ID NO: 4258 - RNA, 21 nt, Glycine max
  GMmerge_3328489
aaaacugacaugagauggaca

SEQ ID NO: 4259 - RNA, 21 nt, Glycine max
  GMmerge_9897151
caaugguuguuggaucuucau

SEQ ID NO: 4260 - RNA, 21 nt, Glycine max
  GMmerge_3331995
aaagccaugacuuacacacgc

SEQ ID NO: 4261 - RNA, 22 nt, Glycine max
  GMmerge_11066517
augguacuguagcaguaagacc

SEQ ID NO: 4262 - RNA, 21 nt, Glycine max
  GMmerge_1224108
cagagguuugcaugaauaauu

SEQ ID NO: 4263 - RNA, 21 nt, Glycine max
  GMmerge_5678964
ugccgauuccacccauuccua

SEQ ID NO: 4264 - RNA, 22 nt, Glycine max
  GMmerge_8490656
uucagagguuugcaugaauaau

SEQ ID NO: 4265 - RNA, 22 nt, Glycine max
  GMmerge_3337920
augugacacauucucacgucau

SEQ ID NO: 4266 - RNA, 22 nt, Glycine max
  GMmerge_8963489
aacagcugaaggaauaaaagau

SEQ ID NO: 4267 - RNA, 22 nt, Glycine max
  GMmerge_6382685
ugaaauucucuucuuaucgucu

SEQ ID NO: 4268 - RNA, 22 nt, Glycine max
  GMmerge_8964390
uuaauuuuuaagacuuacggau

SEQ ID NO: 4269 - RNA, 22 nt, Glycine max
  GMmerge_8964513
cucggaccaggcuucauucccc

SEQ ID NO: 4270 - RNA, 20 nt, Glycine max
  GMmerge_1229339
cgcuuggugcaggucgggaa

SEQ ID NO: 4271 - RNA, 21 nt, Glycine max
  GMmerge_2638174
ggugauuguaacaagcagcgu

SEQ ID NO: 4272 - RNA, 22 nt, Glycine max
  GMmerge_529252
ccggaauuucucagagcagcug

SEQ ID NO: 4273 - RNA, 22 nt, Glycine max
  GMmerge_4047225
caaucuuuagugcaaacaggag

SEQ ID NO: 4274 - RNA, 22 nt, Glycine max
  GMmerge_11076601
cagauaccaaaacaaucaucuu

SEQ ID NO: 4275 - RNA, 22 nt, Glycine max
  GMmerge_4048413
uaccgacguugauaguauuauc

SEQ ID NO: 4276 - RNA, 22 nt, Glycine max
  GMmerge_10601352
ccaaaacgaagaugauuguuuu

SEQ ID NO: 4277 - RNA, 21 nt, Glycine max
  GMmerge_9672380
uaaucugcauccugagguuua

SEQ ID NO: 4278 - RNA, 22 nt, Glycine max
  GMmerge_7562943
uuuggaaacaagguuggacauc

SEQ ID NO: 4279 - RNA, 20 nt, Glycine max
  GMmerge_4752848
uucaauaaagcugugggaag

SEQ ID NO: 4280 - RNA, 21 nt, Glycine max
  GMmerge_1940397
aagcucaggagggauagcgcc

SEQ ID NO: 4281 - RNA, 22 nt, Glycine max
  GMmerge_9195900
caaguaggaacaugaauggaga

SEQ ID NO: 4282 - RNA, 22 nt, Glycine max
  GMmerge_7566842
cacuugacugaagcaugugaaa

SEQ ID NO: 4283 - RNA, 21 nt, Glycine max
  GMmerge_1942820
uucaaagaauauggacuuaua

SEQ ID NO: 4284 - RNA, 21 nt, Glycine max
  GMmerge_5459530
ucauugagugcagcguugaug

SEQ ID NO: 4285 - RNA, 21 nt, Glycine max
  GMmerge_4274741
uucaagguuugaagagugaaa

SEQ ID NO: 4286 - RNA, 21 nt, Glycine max
  GMmerge_10384509
uuugacaacuguagguugguu

SEQ ID NO: 4287 - RNA, 21 nt, Glycine max
  GMmerge_10385625
caaaauguaagaaaaaucaaa

SEQ ID NO: 4288 - RNA, 21 nt, Glycine max
  GMmerge_5464020
ugcauuugcaccugcacuuua

SEQ ID NO: 4289 - RNA, 22 nt, Glycine max
  GMmerge_7572394
uccaacaauucaacaagcucua

SEQ ID NO: 4290 - RNA, 22 nt, Glycine max
  GMmerge_8982171
guacuguagcaguaagacccgu

SEQ ID NO: 4291 - RNA, 21 nt, Glycine max
  GMmerge_2654171
gaaaagauggaagacgaacaa

SEQ ID NO: 4292 - RNA, 21 nt, Glycine max
  GMmerge_10389401
ucaucagauucugaggcaaug

SEQ ID NO: 4293 - RNA, 21 nt, Glycine max
  GMmerge_9687360
cuaaaaggcaaguaggggagu

SEQ ID NO: 4294 - RNA, 22 nt, Glycine max
  GMmerge_4064277
caagaagaaccaaaaucuguca

SEQ ID NO: 4295 - RNA, 22 nt, Glycine max
  GMmerge_6877134
aucaugaaacucagggacgcca

SEQ ID NO: 4296 - RNA, 22 nt, Glycine max
  GMmerge_5470932
agagacuuacggaucaacuuga

SEQ ID NO: 4297 - RNA, 22 nt, Glycine max
  GMmerge_549582
aaaggcgugucucugcaacggu

SEQ ID NO: 4298 - RNA, 22 nt, Glycine max
  GMmerge_8284829
accuuaguccaagcaucaacgu

SEQ ID NO: 4299 - RNA, 22 nt, Glycine max
  GMmerge_7087857
ucagaugaggacgaagcaccag

SEQ ID NO: 4300 - RNA, 22 nt, Glycine max
  GMmerge_10394819
aaguaccaagauaaaucaucau

SEQ ID NO: 4301 - RNA, 21 nt, Glycine max
  GMmerge_552127
ucuagaaguagaucaaaucca

SEQ ID NO: 4302 - RNA, 22 nt, Glycine max
  GMmerge_8286753
cuacaaagugaucauaguuauc

SEQ ID NO: 4303 - RNA, 22 nt, Glycine max
  GMmerge_553364
caaucccauccagaauuccuca

SEQ ID NO: 4304 - RNA, 21 nt, Glycine max
  GMmerge_2869419
agugugguagaaauuagauga

SEQ ID NO: 4305 - RNA, 21 nt, Glycine max
  GMmerge_1964180
agaacaaguaaaacuaugguu

SEQ ID NO: 4306 - RNA, 22 nt, Glycine max
  GMmerge_9701115
cgacuaugcuuggccaauugaa

SEQ ID NO: 4307 - RNA, 22 nt, Glycine max
  GMmerge_10404613
uagaauggaucaucuucuuggu

SEQ ID NO: 4308 - RNA, 21 nt, Glycine max
  GMmerge_4077383
uugaagcaacaagcaauguca

SEQ ID NO: 4309 - RNA, 22 nt, Glycine max
  GMmerge_11108114
ccgagacuaaugaugaccaaga

SEQ ID NO: 4310 - RNA, 22 nt, Glycine max
  GMmerge_1265100
ugccuggcucccuguaugccau

SEQ ID NO: 4311 - RNA, 20 nt, Glycine max
  GMmerge_3574375
cugggaacaggcagggcacg

SEQ ID NO: 4312 - RNA, 22 nt, Glycine max
  GMmerge_1266002
ucaugauuacuaaaacuaauua

SEQ ID NO: 4313 - RNA, 22 nt, Glycine max
  GMmerge_4080379
cagcagaacuuguuucuuccuu

SEQ ID NO: 4314 - RNA, 21 nt, Glycine max
  GMmerge_10407927
uuucuucuuuccaaguauaua

SEQ ID NO: 4315 - RNA, 22 nt, Glycine max
  GMmerge_1267387
ggaauguugucuggcucgaggu

SEQ ID NO: 4316 - RNA, 22 nt, Glycine max
  GMmerge_8299287
auacaaagaucguccaucaaaa

SEQ ID NO: 4317 - RNA, 21 nt, Glycine max
  GMmerge_10411123
uuuggaaguaauagguuccaa

SEQ ID NO: 4318 - RNA, 22 nt, Glycine max
  GMmerge_6192740
cgauacggacaccggacacgac

SEQ ID NO: 4319 - RNA, 22 nt, Glycine max
  GMmerge_8301395
cauugcaugauaggcugaagaa

SEQ ID NO: 4320 - RNA, 22 nt, Glycine max
  GMmerge_1974635
uuauaagagacauagaauuaga

SEQ ID NO: 4321 - RNA, 22 nt, Glycine max
  GMmerge_9710306
caaggcugggagauuuugggca

SEQ ID NO: 4322 - RNA, 21 nt, Glycine max
  GMmerge_9710627
uugcugucaugaucgucauau

SEQ ID NO: 4323 - RNA, 22 nt, Glycine max
  GMmerge_11116017
ucuucccaauuccgcccauucc

SEQ ID NO: 4324 - RNA, 22 nt, Glycine max
  GMmerge_9009566
cuuccuggaaauacagcuauau

SEQ ID NO: 4325 - RNA, 22 nt, Glycine max
  GMmerge_9010186
ggcguaugaggagccaagcaua

SEQ ID NO: 4326 - RNA, 22 nt, Glycine max
  GMmerge_4791686
uuuaagguuuggucuuuuggau

SEQ ID NO: 4327 - RNA, 21 nt, Glycine max
  GMmerge_9011351
ucuaagacggucguuagcuaa

SEQ ID NO: 4328 - RNA, 20 nt, Glycine max
  GMmerge_1980596
uuggcauucuguccaccucc

SEQ ID NO: 4329 - RNA, 22 nt, Glycine max
  GMmerge_3388768
ugguuuuugugaagguggcgua

SEQ ID NO: 4330 - RNA, 21 nt, Glycine max
  GMmerge_575712
agagaauuguaagucacugua

SEQ ID NO: 4331 - RNA, 22 nt, Glycine max
  GMmerge_11122349
caaggucaaaugauacugaaaa

SEQ ID NO: 4332 - RNA, 21 nt, Glycine max
  GMmerge_4278844
acauaugcaugaggccuucca

SEQ ID NO: 4333 - RNA, 22 nt, Glycine max
  GMmerge_10606359
ucugcaaaccaacugaacagca

SEQ ID NO: 4334 - RNA, 22 nt, Glycine max
  GMmerge_761933
ugaagaugagagauuagucuga

SEQ ID NO: 4335 - RNA, 22 nt, Glycine max
  GMmerge_6205988
uccauuugauccgguagguuau

SEQ ID NO: 4336 - RNA, 22 nt, Glycine max
  GMmerge_9722185
cauuacaggccaacagccacaa

SEQ ID NO: 4337 - RNA, 22 nt, Glycine max
  GMmerge_6388590
uuagagcugaaggaauuggaau

SEQ ID NO: 4338 - RNA, 21 nt, Glycine max
  GMmerge_1285229
caacaaggaguuucaaugaua

SEQ ID NO: 4339 - RNA, 21 nt, Glycine max
  GMmerge_8317042
ugauuuuuaagacuuacggau

SEQ ID NO: 4340 - RNA, 21 nt, Glycine max
  GMmerge_11129243
auuuaauaaauuggaguuucu

SEQ ID NO: 4341 - RNA, 22 nt, Glycine max
  GMmerge_9724155
auauccaugacagugcaaagcu

SEQ ID NO: 4342 - RNA, 21 nt, Glycine max
  GMmerge_10427555
aauggaaggccucaugcauau

SEQ ID NO: 4343 - RNA, 22 nt, Glycine max
  GMmerge_9021864
uguacuauuacucuccaagacg

SEQ ID NO: 4344 - RNA, 21 nt, Glycine max
  GMmerge_9022129
uaguuugaacggcaauccuau

SEQ ID NO: 4345 - RNA, 22 nt, Glycine max
  GMmerge_9725264
ggaagcuaagacggaacuuaca

SEQ ID NO: 4346 - RNA, 21 nt, Glycine max
  GMmerge_11131058
aagcagcugauccagagacuu

SEQ ID NO: 4347 - RNA, 21 nt, Glycine max
  GMmerge_5507824
ggugucgugucggugucggac

SEQ ID NO: 4348 - RNA, 21 nt, Glycine max
  GMmerge_5508059
uguuuugguauaucguuagac

SEQ ID NO: 4349 - RNA, 22 nt, Glycine max
  GMmerge_3399082
auuaaauaggucaggcuuaggc

SEQ ID NO: 4350 - RNA, 21 nt, Glycine max
  GMmerge_6915247
uuuugcaggaucaaugacauc

SEQ ID NO: 4351 - RNA, 21 nt, Glycine max
  GMmerge_6917738
uaaaucuugccaaaucguuga

SEQ ID NO: 4352 - RNA, 21 nt, Glycine max
  GMmerge_7620115
cucauuccauacaucgucuga

SEQ ID NO: 4353 - RNA, 22 nt, Glycine max
  GMmerge_6216706
uuugaaguauuaggauguuuau

SEQ ID NO: 4354 - RNA, 21 nt, Glycine max
  GMmerge_3405273
uuauucaaaagcaauugcauu

SEQ ID NO: 4355 - RNA, 22 nt, Glycine max
  GMmerge_7625091
uuguaugcaauuuuugucggag

SEQ ID NO: 4356 - RNA, 21 nt, Glycine max
  GMmerge_5518891
ugccuggcucccugcaugcca

SEQ ID NO: 4357 - RNA, 22 nt, Glycine max
  GMmerge_4113983
cagguauugcuucggauacauu

SEQ ID NO: 4358 - RNA, 22 nt, Glycine max
  GMmerge_3578121
ugucccauagacaucguagaaa

SEQ ID NO: 4359 - RNA, 22 nt, Glycine max
  GMmerge_5521787
ucacgaagcaggaaagucugag

SEQ ID NO: 4360 - RNA, 21 nt, Glycine max
  GMmerge_599919
gagaugggagggucgguaaag

SEQ ID NO: 4361 - RNA, 22 nt, Glycine max
  GMmerge_7632311
gggacuuaggguaagagauggu

SEQ ID NO: 4362 - RNA, 22 nt, Glycine max
  GMmerge_2711591
uuaaacaaucaagcagagacaa

SEQ ID NO: 4363 - RNA, 22 nt, Glycine max
  GMmerge_7632963
cagaacaauacggauuaacuug

SEQ ID NO: 4364 - RNA, 21 nt, Glycine max
  GMmerge_10446991
cguaaaagacuuauggaucaa

SEQ ID NO: 4365 - RNA, 21 nt, Glycine max
  GMmerge_8337817
uugcuaagaaugcugccaguu

SEQ ID NO: 4366 - RNA, 22 nt, Glycine max
  GMmerge_3420129
caagagaugcuuugcuuauugu

SEQ ID NO: 4367 - RNA, 22 nt, Glycine max
  GMmerge_7637374
ucaccacauaaggagaccugac

SEQ ID NO: 4368 - RNA, 21 nt, Glycine max
  GMmerge_9750637
ggaauguuggcuggcucgagg

SEQ ID NO: 4369 - RNA, 20 nt, Glycine max
  GMmerge_9751638
aguguagaaccuuagcggau

SEQ ID NO: 4370 - RNA, 22 nt, Glycine max
  GMmerge_1314164
ucagacacugacacggacgcgu

SEQ ID NO: 4371 - RNA, 22 nt, Glycine max
  GMmerge_2017609
aaaggcuuacggaucaaguuga

SEQ ID NO: 4372 - RNA, 21 nt, Glycine max
  GMmerge_11158468
caguauucugguuccauuugu

SEQ ID NO: 4373 - RNA, 22 nt, Glycine max
  GMmerge_2018746
uucaagguuugaagagugaaaa

SEQ ID NO: 4374 - RNA, 22 nt, Glycine max
  GMmerge_5688070
auuauuuaaguaggggacaaau

SEQ ID NO: 4375 - RNA, 21 nt, Glycine max
  GMmerge_7645165
ugauucuagaugauguugaca

SEQ ID NO: 4376 - RNA, 20 nt, Glycine max
  GMmerge_9053989
ugacuuguucuggagcagcc

SEQ ID NO: 4377 - RNA, 22 nt, Glycine max
  GMmerge_615321
uccucaaagcagcugauccaga

SEQ ID NO: 4378 - RNA, 21 nt, Glycine max
  GMmerge_1319180
uccauuggcuuuggaaguaau

SEQ ID NO: 4379 - RNA, 20 nt, Glycine max
  GMmerge_6242497
ucuagaaucaagagaaccuu

SEQ ID NO: 4380 - RNA, 22 nt, Glycine max
  GMmerge_8351788
acuuguucuggagcagccuuug

SEQ ID NO: 4381 - RNA, 21 nt, Glycine max
  GMmerge_4838128
aaguguugcuaacagaguuua

SEQ ID NO: 4382 - RNA, 21 nt, Glycine max
  GMmerge_9058214
gaagagcaucauccuuacuca

SEQ ID NO: 4383 - RNA, 21 nt, Glycine max
  GMmerge_3435561
ggagaugggagggucgguaaa

SEQ ID NO: 4384 - RNA, 21 nt, Glycine max
  GMmerge_621902
auaauguugaucaaguuggac

SEQ ID NO: 4385 - RNA, 22 nt, Glycine max
  GMmerge_2732595
uccuguaaaugguauuguccuc

SEQ ID NO: 4386 - RNA, 21 nt, Glycine max
  GMmerge_6249940
aauagaagcuccccauguucu

SEQ ID NO: 4387 - RNA, 20 nt, Glycine max
  GMmerge_9062890
acuaacggcguuacuuuaaa

SEQ ID NO: 4388 - RNA, 20 nt, Glycine max
  GMmerge_9063428
ucugccggaauacgugauuc

SEQ ID NO: 4389 - RNA, 22 nt, Glycine max
  GMmerge_6251515
auuuaagaucugcuggaauucg

SEQ ID NO: 4390 - RNA, 21 nt, Glycine max
  GMmerge_4142673
ugaggucgaccaugugacaca

SEQ ID NO: 4391 - RNA, 21 nt, Glycine max
  GMmerge_5549716
aacagcugaaggaauaaaaga

SEQ ID NO: 4392 - RNA, 21 nt, Glycine max
  GMmerge_2737671
ugaagcugccagcaugaucuu

SEQ ID NO: 4393 - RNA, 22 nt, Glycine max
  GMmerge_766617
uuaaucaaggaaaucacggucg

SEQ ID NO: 4394 - RNA, 21 nt, Glycine max
  GMmerge_11176140
cuguuugcacuaaagauuguc

SEQ ID NO: 4395 - RNA, 22 nt, Glycine max
  GMmerge_4849425
aaucaaggaaaucacggucgcg

SEQ ID NO: 4396 - RNA, 22 nt, Glycine max
  GMmerge_6960753
caggaagaagaaggaucauccu

SEQ ID NO: 4397 - RNA, 22 nt, Glycine max
  GMmerge_9773894
aaggauuugcuugauaaaggcc

SEQ ID NO: 4398 - RNA, 21 nt, Glycine max
  GMmerge_2743004
ugauacaaauuuaggacagcu

SEQ ID NO: 4399 - RNA, 21 nt, Glycine max
  GMmerge_4152078
gcaaggaucauaauggacaau

SEQ ID NO: 4400 - RNA, 21 nt, Glycine max
  GMmerge_4854661
ccagaagaagucggugaacaa

SEQ ID NO: 4401 - RNA, 19 nt, Glycine max
  GMmerge_8369979
caaacaaguuggaaccuau

SEQ ID NO: 4402 - RNA, 22 nt, Glycine max
  GMmerge_7668097
ccaacccccgaagccugauaca

SEQ ID NO: 4403 - RNA, 22 nt, Glycine max
  GMmerge_637717
agaugucgucucgaguuucgaa

SEQ ID NO: 4404 - RNA, 19 nt, Glycine max
  GMmerge_640287
uauugacgcugcacucaau

SEQ ID NO: 4405 - RNA, 22 nt, Glycine max
  GMmerge_5690989
caaggcgacggccaaggcuuuc

SEQ ID NO: 4406 - RNA, 22 nt, Glycine max
  GMmerge_3455046
agaauauggacuuauauugcuu

SEQ ID NO: 4407 - RNA, 21 nt, Glycine max
  GMmerge_1344453
gauagaagacaguaaaaucau

SEQ ID NO: 4408 - RNA, 22 nt, Glycine max
  GMmerge_4158986
agguaguuuuagggacaugaaa

SEQ ID NO: 4409 - RNA, 21 nt, Glycine max
  GMmerge_1347678
ugacagaagagagugagcaca

SEQ ID NO: 4410 - RNA, 22 nt, Glycine max
  GMmerge_8380123
caugacaaggcaaaacuggaaa

SEQ ID NO: 4411 - RNA, 22 nt, Glycine max
  GMmerge_1349830
auagaaauauccccguaaguaa

SEQ ID NO: 4412 - RNA, 21 nt, Glycine max
  GMmerge_11193808
uuuggacaaucuuuagugcaa

SEQ ID NO: 4413 - RNA, 22 nt, Glycine max
  GMmerge_6976623
cgugucggacaccggauacggc

SEQ ID NO: 4414 - RNA, 22 nt, Glycine max
  GMmerge_9086814
uugaggcaaucuggguugauga

SEQ ID NO: 4415 - RNA, 21 nt, Glycine max
  GMmerge_4868285
uggaacucaaaugacgucaug

SEQ ID NO: 4416 - RNA, 21 nt, Glycine max
  GMmerge_7679713
cagaugacgucugaggcagca

SEQ ID NO: 4417 - RNA, 21 nt, Glycine max
  GMmerge_9790845
ucacaagaugaugucucugcu

SEQ ID NO: 4418 - RNA, 22 nt, Glycine max
  GMmerge_1472284
uucuaccagaaugaggaugacu

SEQ ID NO: 4419 - RNA, 22 nt, Glycine max
  GMmerge_10495299
ugggugagagaaacgcguaucg

SEQ ID NO: 4420 - RNA, 22 nt, Glycine max
  GMmerge_2761004
ugagagaucaguggauggaaaa

SEQ ID NO: 4421 - RNA, 21 nt, Glycine max
  GMmerge_9091359
agagguguauggagugagaga

SEQ ID NO: 4422 - RNA, 21 nt, Glycine max
  GMmerge_9910913
aaggaagauggaaauagcuca

SEQ ID NO: 4423 - RNA, 22 nt, Glycine max
  GMmerge_4872828
uuuccauucacugaucucucaa

SEQ ID NO: 4424 - RNA, 21 nt, Glycine max
  GMmerge_11202422
aucucggaccaggcuucauuc

SEQ ID NO: 4425 - RNA, 22 nt, Glycine max
  GMmerge_2176730
accguugcagagacacgccuuu

SEQ ID NO: 4426 - RNA, 21 nt, Glycine max
  GMmerge_11203531
ggcguagauccccacaacagu

SEQ ID NO: 4427 - RNA, 22 nt, Glycine max
  GMmerge_7689008
cgggcuaugcucggucgggcug

SEQ ID NO: 4428 - RNA, 22 nt, Glycine max
  GMmerge_3472084
aaaggcuuacggaucaacuuga

SEQ ID NO: 4429 - RNA, 21 nt, Glycine max
  GMmerge_4878649
aaugaagucugcauuuccucu

SEQ ID NO: 4430 - RNA, 21 nt, Glycine max
  GMmerge_8394605
aauauggccuucaaguucuaa

SEQ ID NO: 4431 - RNA, 22 nt, Glycine max
  GMmerge_4177323
caauuauagacuagacaauuau

SEQ ID NO: 4432 - RNA, 22 nt, Glycine max
  GMmerge_2770620
cgauguaguaagaugcucuucu

SEQ ID NO: 4433 - RNA, 22 nt, Glycine max
  GMmerge_660779
uugaagucccaugauugucacg

SEQ ID NO: 4434 - RNA, 21 nt, Glycine max
  GMmerge_5585188
uguguucucaggucgccccug

SEQ ID NO: 4435 - RNA, 22 nt, Glycine max
  GMmerge_9103350
aagaaucuguauacuaauugcc

SEQ ID NO: 4436 - RNA, 21 nt, Glycine max
  GMmerge_4183721
cuauuguagcuguucuaggaa

SEQ ID NO: 4437 - RNA, 20 nt, Glycine max
  GMmerge_4184867
uagagcugcugaagaaggcu

SEQ ID NO: 4438 - RNA, 20 nt, Glycine max
  GMmerge_9809633
uggacuuauauugcuuuucu

SEQ ID NO: 4439 - RNA, 22 nt, Glycine max
  GMmerge_10615279
uuauuguaacuaauuugucggu

SEQ ID NO: 4440 - RNA, 21 nt, Glycine max
  GMmerge_6998141
cgcuauccauccugaguuuca

SEQ ID NO: 4441 - RNA, 21 nt, Glycine max
  GMmerge_1372655
aagcuucugacgguaggacaa

SEQ ID NO: 4442 - RNA, 21 nt, Glycine max
  GMmerge_3483538
ugcggguaucuuugccucuga

SEQ ID NO: 4443 - RNA, 22 nt, Glycine max
  GMmerge_9109209
uuuuaauugugcaggauuccaa

SEQ ID NO: 4444 - RNA, 21 nt, Glycine max
  GMmerge_9812415
ugaucaaugaucauaggaaua

SEQ ID NO: 4445 - RNA, 22 nt, Glycine max
  GMmerge_9109823
cauuuaauggauuggacuuuga

SEQ ID NO: 4446 - RNA, 22 nt, Glycine max
  GMmerge_2178181
cgugaggauaugucacaugguc

SEQ ID NO: 4447 - RNA, 21 nt, Glycine max
  GMmerge_4188653
uaacugaacauucuuagagca

SEQ ID NO: 4448 - RNA, 21 nt, Glycine max
  GMmerge_9813645
cugguggaugaaucaugaccg

SEQ ID NO: 4449 - RNA, 21 nt, Glycine max
  GMmerge_7703243
uguggggacugucggccuugc

SEQ ID NO: 4450 - RNA, 21 nt, Glycine max
  GMmerge_11219589
uggggcuugauccaagauagg

SEQ ID NO: 4451 - RNA, 22 nt, Glycine max
  GMmerge_672656
ccugcuaauccggagacaucuu

SEQ ID NO: 4452 - RNA, 21 nt, Glycine max
  GMmerge_8408138
ugauugagccgugccaauauc

SEQ ID NO: 4453 - RNA, 22 nt, Glycine max
  GMmerge_6300598
ggcaccaaaauacccgcuucaa

SEQ ID NO: 4454 - RNA, 19 nt, Glycine max
  GMmerge_5598314
ucaagaaagcugugggaga

SEQ ID NO: 4455 - RNA, 21 nt, Glycine max
  GMmerge_7004880
ucaagcauggauauaugagca

SEQ ID NO: 4456 - RNA, 21 nt, Glycine max
  GMmerge_4192686
agggacgccaacggccuuucg

SEQ ID NO: 4457 - RNA, 21 nt, Glycine max
  GMmerge_2786535
uuuuauuccuucagcuguuga

SEQ ID NO: 4458 - RNA, 21 nt, Glycine max
  GMmerge_2788181
uauuuaaaggaguccucguuc

SEQ ID NO: 4459 - RNA, 22 nt, Glycine max
  GMmerge_9117205
ugaucucugcaaucaacgucuu

SEQ ID NO: 4460 - RNA, 21 nt, Glycine max
  GMmerge_8415224
ccaagacacuuugguucggac

SEQ ID NO: 4461 - RNA, 21 nt, Glycine max
  GMmerge_5604080
ucggaccaggcuucauucccg

SEQ ID NO: 4462 - RNA, 22 nt, Glycine max
  GMmerge_9823306
uaaacacggauccacaaauguc

SEQ ID NO: 4463 - RNA, 21 nt, Glycine max
  GMmerge_9824246
auccaacgaugcgggagcugc

SEQ ID NO: 4464 - RNA, 21 nt, Glycine max
  GMmerge_4202963
ugagcaguagggacuuccuuc

SEQ ID NO: 4465 - RNA, 21 nt, Glycine max
  GMmerge_6313130
ucgauaaaccucugcauccag

SEQ ID NO: 4466 - RNA, 21 nt, Glycine max
  GMmerge_4205025
auuuagacuuguucaaacuug

SEQ ID NO: 4467 - RNA, 21 nt, Glycine max
  GMmerge_9127442
aucuuaaagaaaacaugaacc

SEQ ID NO: 4468 - RNA, 20 nt, Glycine max
  GMmerge_1391952
aucauuagucucggaugauu

SEQ ID NO: 4469 - RNA, 22 nt, Glycine max
  GMmerge_8423597
uugaccaaucagaacaugacau

SEQ ID NO: 4470 - RNA, 20 nt, Glycine max
  GMmerge_2096977
ucgaagagauuguguuuugg

SEQ ID NO: 4471 - RNA, 21 nt, Glycine max
  GMmerge_8425189
guaugaugucgauggcccgag

SEQ ID NO: 4472 - RNA, 21 nt, Glycine max
  GMmerge_9129846
uuggacuaagguuuuuuggca

SEQ ID NO: 4473 - RNA, 22 nt, Glycine max
  GMmerge_4208380
ugcaucagauaucgguuauggu

SEQ ID NO: 4474 - RNA, 22 nt, Glycine max
  GMmerge_2801634
uuuuuaaucaggguugauugca

SEQ ID NO: 4475 - RNA, 22 nt, Glycine max
  GMmerge_5614845
aaaggcuuacagaucaacuuga

SEQ ID NO: 4476 - RNA, 21 nt, Glycine max
  GMmerge_1414211
aaugaguuaucuauuagcuaa

SEQ ID NO: 4477 - RNA, 21 nt, Glycine max
  GMmerge_3508149
uuacucaauucuuucagcuca

SEQ ID NO: 4478 - RNA, 22 nt, Glycine max
  GMmerge_695858
uggauauucucauggcaauauc

SEQ ID NO: 4479 - RNA, 21 nt, Glycine max
  GMmerge_8431689
uguugcuucaaagaauaugga

SEQ ID NO: 4480 - RNA, 20 nt, Glycine max
  GMmerge_4215132
ugacagaagauagagagcac

SEQ ID NO: 4481 - RNA, 22 nt, Glycine max
  GMmerge_4215218
cgcugagcauguugaaggacga

SEQ ID NO: 4482 - RNA, 21 nt, Glycine max
  GMmerge_4919043
auaucaagaaauuccuaauaa

SEQ ID NO: 4483 - RNA, 20 nt, Glycine max
  GMmerge_10543825
uggagaagcagggcacgugc

SEQ ID NO: 4484 - RNA, 21 nt, Glycine max
  GMmerge_2109706
ucaacaggaaguggaagaaga

SEQ ID NO: 4485 - RNA, 21 nt, Glycine max
  GMmerge_5625825
uaucauuaagagaaauuggau

SEQ ID NO: 4486 - RNA, 22 nt, Glycine max
  GMmerge_3516976
agauccaugacagugcaaagcu

SEQ ID NO: 4487 - RNA, 22 nt, Glycine max
  GMmerge_4995416
aacacuucuucggcuuggcuug

SEQ ID NO: 4488 - RNA, 22 nt, Glycine max
  GMmerge_71347
aauuguguuggucuugaaauau

SEQ ID NO: 4489 - RNA, 21 nt, Glycine max
  GMmerge_71906
ugggugagagaaacgcguauc

SEQ ID NO: 4490 - RNA, 22 nt, Glycine max
  GMmerge_71941
uacuaucaacgucgguacuuuc

SEQ ID NO: 4491 - RNA, 21 nt, Glycine max
  GMmerge_7742484
ugggaaugggcugauugggaa

SEQ ID NO: 4492 - RNA, 22 nt, Glycine max
  GMmerge_2183685
cuuggacuaagguuuuuuggca

SEQ ID NO: 4493 - RNA, 22 nt, Glycine max
  GMmerge_2183796
aggauaugucacauggucgauc

SEQ ID NO: 4494 - RNA, 22 nt, Glycine max
  GMmerge_9918463
uacuuucaaagacguuguugag

SEQ ID NO: 4495 - RNA, 20 nt, Glycine max
  GMmerge_2887472
gaaugggcugauugggaagc

SEQ ID NO: 4496 - RNA, 21 nt, Glycine max
  GMmerge_3591691
aacaagucaagaacugguucc

SEQ ID NO: 4497 - RNA, 21 nt, Glycine max
  GMmerge_3592124
ggccaaaccuaaaagauucca

SEQ ID NO: 4498 - RNA, 22 nt, Glycine max
  GMmerge_10623279
uugauuuuuaagacuuauggau

SEQ ID NO: 4499 - RNA, 22 nt, Glycine max
  GMmerge_2889831
uaugcaaugacaugaucuuggc

SEQ ID NO: 4500 - RNA, 21 nt, Glycine max
  GMmerge_3594072
aaugaucucggaccaggcuuc

SEQ ID NO: 4501 - RNA, 22 nt, Glycine max
  GMmerge_4228727
uccaaacaaguuggaaccuauu

SEQ ID NO: 4502 - RNA, 21 nt, Glycine max
  GMmerge_7111101
uucaaaauugguuuucugggu

SEQ ID NO: 4503 - RNA, 22 nt, Glycine max
  GMmerge_7814067
aaucuuguguucccaggacugu

SEQ ID NO: 4504 - RNA, 20 nt, Glycine max
  GMmerge_4300804
ugaagcugccagcaugaucu

SEQ ID NO: 4505 - RNA, 22 nt, Glycine max
  GMmerge_79576
agggcgaaguacagguaaagga

SEQ ID NO: 4506 - RNA, 22 nt, Glycine max
  GMmerge_5707048
gaggauaugucacauggucgau

SEQ ID NO: 4507 - RNA, 22 nt, Glycine max
  GMmerge_7816598
ucugcgaucccuaugcuagcgg

SEQ ID NO: 4508 - RNA, 22 nt, Glycine max
  GMmerge_9929096
cugucuggaaggauugucuggg

SEQ ID NO: 4509 - RNA, 22 nt, Glycine max
  GMmerge_9226569
uacauuauuuguagauaauaua

SEQ ID NO: 4510 - RNA, 21 nt, Glycine max
  GMmerge_2897869
auucuuggcaugcucaaaauc

SEQ ID NO: 4511 - RNA, 21 nt, Glycine max
  GMmerge_3604236
agcucuguuggcuacacuuug

SEQ ID NO: 4512 - DNA, 1048 bp, Zea mays
  Zm_smallRNAprecursor_1
gtggttacaagaaacaaagcacggttggttgcccaaggctacactcaagtggaaggacttgattttggtgaaacatatgcgccgatagcaaggttagagtcaattagaatattaattgcctatgctactaaccatgatttcaagctatatcaaatggatgtcaagagcgcatttctaaatggaccactacaagagagggtctatgtggagcaaccaccgggctttgaagatccaaagaagccaaatcatgtttacctacttcacaaggcactctacgggcttaaacaagcccctagagcttgatatgattgccttaaagatttcttgcttaaaaatggttttgaaataggaaaagtagactctactttattcacttgcaaagttgacaataaattatttgtttgtcaaatatatgtcgacgacattatatttggcagtactgatgaaactttttgtgaggaatttagtagggttatgacaaataggtttgagatgtccatgatgggtgagctcaagtacttcctgggttttcaagttaaacaactcaaggaaggaacctttctgtgccaaaccaagtacacacaagacatgctcaaaaagtttggcatggaaaaggcaaagcacgccaagacaccaatggcttcaagtggccatctcgacttaaatgaagaaggtaaaattgtagatcaaaagctttatagatcaatgataggatctctactatatttgtgtgcatctaggccagatatcatgcttagtgtgtgcatgtgtggccgttttcaagctaacccaaaagagtgtcacttagtggccgttaagagaattttgagatatctagttcacacccaaaatctaggtctctggtatcctaagggctcctttttcgatttatttggctactctgattcggactatgccggttgtaaagtagatcgaaaaagcaccttggggacttgccaattccttaggcggtccctggtgtcttggaactctaagaagcaaaactgtgttgcactttccactgccgaggccgaatacatagctgctg

SEQ ID NO: 4513 - DNA, 1129 bp, Zea mays
  Zm_smallRNAprecursor_2
cattttcggggctagttgattcggcaggtgagttgttacacactccttagcggatttcgacttccatgaccaccgtcctgctgtcttaatcgaccaacaccctttgtgggttctaggttagcgcgcagtttggcaccgtaacccggcttccggttcatcccgcatcgccagttctgcttaccaaaaatggcccacttggagctcccgattccgtggcacggctcaccgaagcagccgcaccgtcctacctatttaaagtttgagaataggtcgagtgcgttgcgcccccgatgcctctaatcattggctttacccgatagaactcgtgtgggctccagctatcctgagggaaacttcggagggaaccagctactagatggttcgattagtctttcgcccctatacccaagtcagacgaacgatttgcacgtcagtatcgcttcgagcctccaccagagtttcctctggcttcgccccgctcaggcatagttcaccatctttcgggtctcgacaggcgtgctccaactcgaacccttcacagaagatcagggtcggccagcggtgcggccgatgagggcctcccgctcgtcagcttccttgcgcatctcaggtttctgaacccgtccactcgcacacatgtcagactccttggtccgtgtttcaagacgggtcggatggggagctcgcaggccgttgcggcgcagcgccccgaggggcgcgccagaggcgcgcggataccgtccgcgccgacgagggctgccgagggcgcctagggcccccgggctttggccgccggcacgggcgacaacggtccacgccccgagccgatcggcggaccagcaggagccgttccgcatacggccggtgcgcgtcgccagcccccatccgcttccctcccggcaatttcaagcactctttgactctcttttcaaagtccttttcatctttccctcgcggtacttgttcgctatcggtctctcgcctgtatttagccttggacggagtttaccgcccgatttgggctgcattcccaaacaacccgactcgttgacggcgccacatggtgcgacagggtccgggccggacggggctctcaccctcccaggcgtccctttccagagaacttggg

SEQ ID NO: 4514 - DNA, 1183 bp, Zea mays
  Zm_smallRNAprecursor_3
gtctaaataaattatgatcattcactgtatgtgcactttaattttatgcctaagctataggttagtgtatgtaataatttgtttatgaaataggaaaataaaaaggaaaaccctaatgatacttaggtatttaactttgtgagattaataatatgtcatgtatgaatttatccctggtataattttggtgtctcactaaaattagtggaactaaattatgtaatccataatatttagggaacctgttatggccgacagcctagcagccctaataaaatcagttagtttgtttagatggataagtatcagttagtttgtttagatggatagggataagagtttgtttagatagataaggataagcagagcttgtttagaaagataagggattagttgagataagaacaggttgagataagaatgggctgctatctcagccctataaaatgtacctgtgagttcaatgaaagcaagcaagcaatcattttgctcacgcttcctctccctgcgtctactgttctcccggcggtcaaattgttggagctgcggcttctaagaaggtatgagtggtgaggagaagggcgaggctctggaccacgacgtttgggcgtcgttgtcctagggttagggctgctggctggaagacagagtggcactgttcacgcgtgaacagtacccgccgggagaacagtagacgcagggagaggaagcgtgagcaaaatgattgcttgcttgctttcattgaactcacgagtacattttatagggctgagatagcagcccattcttatctcaacccgttcttatctcaactagtcccttatctttctagacaaactctgcttatccttatctatctaaacaaactccttatccctatccatctaaacaaactaactgatacttatccatctaaacaaactaactgattttattagggctgctaagctgtcggccataacagaatcactaatctctaagtgtactaatccaccctagcacctaggtttaccttttgtgtttatactgctttgtcaaatttgtgttcactcgattgcatttgtttggtgcattgttctttgtctttatccaaatgtattgaatgcatgatcgctttgtttagacaacgagcaggccgtggttcctgagtgtgttgccgaagatcttcctgagcaacaacctg

SEQ ID NO: 4515 - DNA, 1152 bp, Zea mays
  Zm_smallRNAprecursor_4
acgctgattccgccgaaagtaaaaggcgaagaagctccaaagtcgttcctaagggaatgcagagcttacagcgaaaagtcaacgctgattccaccgaaagtaaaaggcgaagaagctccaaagtcgttcctaagggaatgcagagcttatagcaaaaagttagcactgatatgtgattgtttctaaggaaataatggttgtgattatggcttcggatatgtgtttggacattcatttgcacatcacattacatcatagcatttgcattcataaacattcatccaggcatatgtaggataatcatcatcatagcataagtggttgcttcggcaaaaagaaaaaaaaagagcttcttcgtgtaaaaaaagaagagcttcggaagaaagggaaatgttgttttctatgcttcgctgtgtacgaaaagaagggaaggtgttttttcgccttcggctcaaaaagataatttcgtccacatcaaagcacctctcatacattaatggaaggataagagcatattacaaggtatgaacaaaattcattaaagacaagtttagttgcatttacaaaagttttctcaaaagtttcttgagtctgtctacagtctactcctatttaatcttcaagggacttcagcttcggcgtcattctttttaaccatcggcttcggcttcgtcatcctacatgaattaagttgttgtaagtcaaaatcgagcttgaaggaagaggtaagcacaaggtatgatttcttactggttcaagatgactccgagcttcgtctccagccttttctcgcccgccttttgtccatatcatcattacaaatctattggaaatgcttcgggcgagatcaggaatgtcatctaggattgatggtgataaagtgaaattgggcctattgacaatctttccatgatcgcagccagcttttaggaaagctgcagcagtgccccgagaagctacccaggcgcagaagtcaccgtgcccggccataacttcgtcaagctcatcaatttcaccctcaatatgttcgagggtctttggtaaatcttcagctgacggggtgaatttctcactgctagctccaactgagtggaaaatttttcttagtcgttgaatacatttgttgctaaattccaaacatttgtcttgaag

SEQ ID NO: 4516 - DNA, 1183 bp, Zea mays
  Zm_smallRNAprecursor_5
ctaaataaattatgatcattcactgtatgtgcactttaattttatgcctaagctataggttagtgtatgtaataatttgtttatgaaataggaaaataaaaaggaaaaccctaatgatacttaggtatttaactttgtgagattaataatatgtcatgtatgaatttatccctggtataattttggtgtctcactaaaattagtggaactaaattatgtaatccataatatttagggaacctgttatggccgacagcctagcagccctaataaaatcagttagtttgtttagatggataagtatcagttagtttgtttagatggatagggataagagtttgtttagatagataaggataagcagagcttgtttagaaagataagggattagttgagataagaacaggttgagataagaatgggctgctatctcagccctataaaatgtacctgtgagttcaatgaaagcaagcaagcaatcattttgctcacgcttcctctccctgcgtctactgttctcccggcggtcaaattgttggagctgcggcttctaagaaggtatgagtggtgaggagaagggcgaggctctggaccacgacgtttgggcgtcgttgtcctagggttagggctgctggctggaagacagagtggcactgttcacgcgtgaacagtacccgccgggagaacagtagacgcagggagaggaagcgtgagcaaaatgattgcttgcttgctttcattgaactcacgagtacattttatagggctgagatagcagcccattcttatctcaacccgttcttatctcaactagtcccttatctttctagacaaactctgcttatccttatctatctaaacaaactccttatccctatccatctaaacaaactaactgatacttatccatctaaacaaactaactgattttattagggctgctaagctgtcggccataacagaatcactaatctctaagtgtactaatccaccctagcacctaggtttaccttttgtgtttatactgctttgtcaaatttgtgttcactcgattgcatttgtttggtgcattgttctttgtctttatccaaatgtattgaatgcatgatcgctttgtttagacaacgagcaggccgtggttcctgagtgtgttgccgaagatcttcctgagcaacaacctggt

SEQ ID NO: 4517 - DNA, 1040 bp, Zea mays
  Zm_smallRNAprecursor_6
acaatcttcgtcgtcaagcttccactatgggtatgccctttgcccctcgctcgcctgatgtgcctctccatcctcctcccccggagatcaatgagtggcaccggcaggcctatggggtgccatttatgtcagcagacgaagaagaagaagaagaagaagaagaagcctacgttgatgatcgcgagcagtttgccccgcctccctaccatggggatccgggtcaatcatcctctcaccctccacctccctactcgggtcagggacccactcccggtgaccctaggtcgtccggctctggtcactatcctcctcctccctacccgggtccgggacccattcctggtgacccgcggccatccggctctggttaccatcaccaccctccacctcctcctcatcatcgtacatcttcgacatctggtttttctgtgggtgatgagccccctagggactcctcactcgaggaagacgtgatgaggaccttcttccctgactacacatcataccctccatcatatcctccgtcctatcctcctcctggaggatattgattcatgtatccttgtctctctctcttcgtttttggtacttgttgccaaaaagggggagaaaatccaaaaattctcgtcattctgtttgtggttcttttggttatgtatttcttttggattattttttgttttggccactgttgtggcttgtatcctcttatcattgtatgaaataaaactgctggttttttatcctcttatcattgtatgaaataaaactgtcgggtttttattcaaagtgatatgatggtcttctggccatcatcttttgtcccatcagtttgtaatgattgctttgctatgaagtaaaaatgatgtgtatttagagatactcatatgcatcacaactcctgttatgacactcttgcacccctcggatggttgtattcagtatggtttttgtcactatctctaaatgtgttgctcacatgacttattatgtcaaaacattggattcacaatcgtgcacacatttagggggagccatct

SEQ ID NO: 4518 - DNA, 1095 bp, Zea mays
  Zm_smallRNAprecursor_7
gttttctatgatattatcatccaaaagattgttagatacagtcatctgaagccccaagttcatgcattcggacgcccgtgttgccgccgagctgtcacggcgccatcggacagcccatgcaaatcttggcgtcatcatcacacacacagagctactatagctgagccatacgcttgatttggcacggataacgaatccttaatctgactgactgatgagcaaacaatgtgctgtactggtggtaagcagctgtaatgtcttgcctctgtgatttcatacagttgaccggctctaacacttttgtgtaagtgccagcggtacggcagacggcacagcagcatcgagacaggtatagctgtgacactaagagctgaacggctctaaatactttcatgcaccatttcaccaagacgtgacaacaaagtgatattaggccgcgtttggtttccgcagatttttaaaatctgcatgttcacgttacccaagaaaacccaactatggcttgattctacagattttgtttctatgagcgcagaatctaaggcacaaaataaactctgtttggatccataatatattcttaaaatcagattcttaaaatctaccgtaaaccaaacacgcccttaatcggtggtcagtggcagggccttttgcaccagagcattattttgtaaaagagagaaagctcgctagctgaaactctttttcattgtttttctgaatgaaaagaggaaaaaggaaaagagctcaaatttcagcggcgcacgcaccgaagaaggaccaggccgcaacaaagcacaagcacgaagctcacgcctcactgccactgggccagcacggcaatcggcaccacctgtcagaggtgatccggagctaactgctagcgacacccctgcggcctcacacgaaaaacgctacgcgcacccatctaagcctcccccgacacgcgcccctcccttctctagttcagttcgccttccatcacatctgcacacctctccgcccctctcatcagtcgcatgcatatgtaagccgcaagcccgcagcagcacctatcgaagccgccgcagcaggaggaggcaggggaatcccaag

SEQ ID NO: 4519 - DNA, 1070 bp, Zea mays
  Zm_smallRNAprecursor_8
acatggtgtacctaaaaacacaaatcgagatcattgtattaaattagaagataataaaactgatacctatctttctaattaaaatagttttgctaaataagctgcaaccatgcacatgcacacaacaaagcatgtatcttacatgaaaagtgagaaagcactttcatgcatccccctaccaacaaacagacgaggctgcacgaagacacacagcattagttcatgatgttcaactatagtcagcattatgaaaaacttacacattagttccagcatagaaaccaataagtaaaataatgttaattacctaaaagtaaattgtcccaaaaggtatctttcataatacaaaaggttatttaagtaaaaaatctacaattttttaagttagcatccatcatcttggttgctacattttttctggaatacacaaaagagcttgcacatcattatattattgggttttttaaattggtgcccttagttttggtggtgtgctcacctatacccttagtcgtgttttttgctcagttgtgtccttctgttctatagcactggaagggcacagctgagcaaaaaacacgactaagggtatagttgagcacaccaccaaaactaagggcaccaatttaaaaaacccattattaaataggagtctaataaatacccatagaagcctattaaggcatgattttagactatatgagatgtgacgtcgtcactacttcacataacacatgagaaaggcatattagtttggaaggtcaagtagtgcccaggaaaaataactttcagtatttatgatcaatgctacatagagacgaatattgatgacaatgttagccatagaatcaaagcaagatggatgaagtggcgtcaagaatccaacgttctatattacaagagggtaccacaaaagataaaataatctaatgtctagctaataaatgttgcaaaaatatgtatcttacgttggattttatggccatggaagaaggaattgagtccagaacgatgatgtatgtgataggctagagtagcatcaattgaagaaaaggttgtccaacactggt

SEQ ID NO: 4520 - DNA, 1149 bp, Zea mays
  Zm_smallRNAprecursor_9
tggctttgcatgacgacatgcgggtggaaaatcttttatttggtcaacagcaggggtgcgcatgcaggaatttttttattttattttttcttcttgttcttgtctggtcacatcagctctgctgcgcgcgcagactttctttatttattttctctgtccagttccttctcctcgcgccatgcatattttctttctttcttgcctcgctcaagtgcagggagcgcagacattttttttttgagcagtttttttggtcgctgcgcagcaaaaccagctgaactgggccatgggggcagttgaactggtcctgaggaccagctcaactgcctatatatatttgacactctctccttctcttttcccacttcattcactctcgccttggtcgcttcacaacctttagagcctttccttcacacactccaaccggttcacagtttcaccaccgttttcaatcatggtgcgtcgccgcaacccctctgtggttgagtttagcagcgactccgacgagattcaggaggaatctcccatcccctctcctccgcctcgtcgctccctctctaagagaggacgtggctctggtcggatgcctggcgagggctcttccatgccttcgcagccgactcgcgggagacgccaaaaggttggcgcctctcgtcctcgtcgtagcacgtcttcctcagggtatgctccctgccaagaggaggatggggctttcgacgacttcgtcgaccttccggcgcctgatgctctctacgtcaccggactgcacatgcatccggcgaacgtcagccgcggtccgcatgaatctcccgtcgacttcactcagaagggaatagaaacccttcagcgtctgaggttttccaaccctactctcactcctcgtcatcctggtgtccaggaccctcggttctggaatcttttccaggctgacttctacaattctgtcattcttacaaagaaacacccagtcgtccgacatagatttattgactgggagggttgtgagaatatgggagatgttgacatgtcgtcagctctcgttcacttagagagaaaggggttacgtaacattatgaccatggaatacccctggaacgatgaggtggtagctcagttctatgccaccctctggataaagaaagtaga

SEQ ID NO: 4521 - DNA, 1067 bp, Zea mays
  Zm_smallRNAprecursor_10
cagtttttttggtcgctgcgcagcaaaaccagctgaactgggccatgggggcagttgaactggtcctgaggaccagctcaactgcctatatatatttgacactctctccttctcttttcccacttcattcactctcgccttggtcgcttcacaacctttagagcctttccttcacacactccaaccggttcacagtttcaccaccgttttcaatcatggtgcgtcgccgcaacccctctgtggttgagtttagcagcgactccgacgagattcaggaggaatctcccatcccctctcctccgcctcgtcgctccctctctaagagaggacgtggctctggtcggatgcctggcgagggctcttccatgccttcgcagccgactcgcgggagacgccaaaaggttggcgcctctcgtcctcgtcgtagcacgtcttcctcagggtatgctccctgccaagaggaggatggggctttcgacgacttcgtcgaccttccggcgcctgatgctctctacgtcaccggactgcacatgcatccggcgaacgtcagccgcggtccgcatgaatctcccgtcgacttcactcagaagggaatagaaacccttcagcgtctgaggttttccaaccctactctcactcctcgtcatcctggtgtccaggaccctcggttctggaatcttttccaggctgacttctacaattctgtcattcttacaaagaaacacccagtcgtccgacatagatttattgactgggagggttgtgagaatatgggagatgttgacatgtcgtcagctctcgttcacttagagagaaaggggttacgtaacattatgaccatggaatacccctggaacgatgaggtggtagctcagttctatgccaccctctggataaagaaagtagatgaggaagccgatgggtatgattacccagtcatttatttcttcatccagggtaactggcacaaagtcagttatcgtcgttttgcccatattctgggcttctctgatgcagacattcagggcagcaacatgcgagtgcatggcattcggctgcccaggcag

SEQ ID NO: 4522 - DNA, 1190 bp, Zea mays
  Zm_smallRNAprecursor_11
agctctcgttcacttagagagaaaggggttacgtaacattatgaccatggaatacccctggaacgatgaggtggtagctcagttctatgccaccctctggataaagaaagtagatgaggaagccgatgggtatgattacccagtcatttatttcttcatccagggtaactggcacaaagtcagttatcgtcgttttgcccatattctgggcttctctgatgcagacattcagggcagcaacatgcgagtgcatggcattcggctgcccaggcaggaagagacggaattcattcatgtctctactgagcgggagttctggacaaccgctaacatgcataggtactataggtaccttaattccttgtcccggatgaccgttctcccaaagggcggtaatcaaatgaacgtccttggggagagtcgagtcctcctcctcctccttgctccaaacagtctcgcccgcatcaatgtgtttgacatgatctgggaggagatcgtccgtgcttcctggtctcctcacagagggtgtcttcatgcaccctttatcatgaagatgatcgaagtggtcacccagacccacttcgaaaaacccgtcaaacactcctgctacgtaccctactgggttgattcctccaacccagctgctcgtacgaagcgggttccctcacggtctggaggccctgcctcctcctctgagccacctcgccagcctccccaccatccttcctcctctccccccgctgctgcctcgcgtccctctcctggccgcggatctcccatgccacgtgctagtggtcgtggtcgaggtcgtggccacgggatgggtgctcgcttgctccatgggcttgcggcatttttctccgcgtgccgcaacatttctgctgatgtccatgaggtggcacggcgtcagcgggagactgacgacaatcttcgtcgtcaagcctcctccatgggcatgccttttgtccctcattcgcctgatgtgcctctccatcctcctcccccggagatcaatgagtggcaccagcaggcctacggggtgccttttatgtctgcagacgatgaagatgaagaagtctatgttgatgatcgcgaggagtttgtcccgcctccctaccatggggatccgggtcaatcatcctcccaccctccgcctccttacccgggtcctggacccattcctggtgacc

SEQ ID NO: 4523 - DNA, 1159 bp, Zea mays
  Zm_smallRNAprecursor_12
ttatgcaatttttccagttaattatgaaaccaacgtggattgattattgcttaaattgcatagaattcagaaaattttgtggtgattgaatattttaaccaacgttggatattgttaccacaatttaatacaagtttatgtttttctagatcatccaacgatgatttagaaatttgtgatcagaaattttcatagatatggcatggttattatttgaccaacgttgaatatttaattcatgcatgttctatgattcagtattcagtatttatttcagatgtcctaaatattttctgttttaattttgcaaaggtgctcataccgccatgctgattagccagattgctcagatgaaaccgctagatggtagtaattaccattcttggcgggaggatatagacatgataaccacagtgggtgagatagattacgcactgaggtttgataaaccagttgagcccacagtgggcactcccaactatgaccacaggtggatgcaatacagcatcgacaaggtcaagtgggagagatcaaatgacaaatgtatgattattcttaagaggagcatcaaggagcctcttaagagttccataccagagtgcgagactgccaaagaataccttgagagggtagcctctcatcaccaagggtcttctaaggcttatgcttgctctctaatgacagaatttgtcaatgcaaaatacgatggaaatggtgtcagaccattcattcagaaaatgatatccatcgtagctaagataaacaagtacctcgggtctcctttacacgaggaatttgtagtatttatgataatgaagtctctgcccaaggagtttgagacttttcacatacaatacaacactagtgtcactgataagtggaatatagaccaactcttggcacagtgtgtccaggaggaagagaggttaaagcagactggagactctgtcaacctcatcaaaggcaatatccccagacagaacaagaactcaaagaaaaagttcaagaagcaaggtaaacagaataaccaggcttcctcgagcaataataatcagccaagacaaggaggcagtttctcagttccccctgatacctgcctctattgcaagaagacaggtcattacaagagaaagtgccctgaattcctgcagtatctact

SEQ ID NO: 4524 - DNA, 1140 bp, Zea mays
  Zm_smallRNAprecursor_13
atttatttcagatgtcctaaatattttctgttttaattttgcaaaggtgctcataccgccatgctgattagccagattgctcagatgaaaccgctagatggtagtaattaccattcttggcgggaggatatagacatgataaccacagtgggtgagatagattacgcactgaggtttgataaaccagttgagcccacagtgggcactcccaactatgaccacaggtggatgcaatacagcatcgacaaggtcaagtgggagagatcaaatgacaaatgtatgattattcttaagaggagcatcaaggagcctcttaagagttccataccagagtgcgagactgccaaagaataccttgagagggtagcctctcatcaccaagggtcttctaaggcttatgcttgctctctaatgacagaatttgtcaatgcaaaatacgatggaaatggtgtcagaccattcattcagaaaatgatatccatcgtagctaagataaacaagtacctcgggtctcctttacacgaggaatttgtagtatttatgataatgaagtctctgcccaaggagtttgagacttttcacatacaatacaacactagtgtcactgataagtggaatatagaccaactcttggcacagtgtgtccaggaggaagagaggttaaagcagactggagactctgtcaacctcatcaaaggcaatatccccagacagaacaagaactcaaagaaaaagttcaagaagcaaggtaaacagaataaccaggcttcctcgagcaataataatcagccaagacaaggaggcagtttctcagttccccctgatacctgcctctattgcaagaagacaggtcattacaagagaaagtgccctgaattcctgcagtatctactagagagtggtaaggaccaagttacttttgtaaatgagtctttatacttagaatatcccagttattcttggtggattgactcaggtgcaactgttcatgttgcaaactctctacagggactccgtacaagccaaaggctcccaaagggccgaagaacaattagagtggcaaatggagttgaagcagcagtcgaggccattggagatatacatcttaaattagttaatggttttgtactgttgttgaga

SEQ ID NO: 4525 - DNA, 1059 bp, Zea mays
  Zm_smallRNAprecursor_14
cttgtacagctggggtatttggcccccatgcatggacgcgcgcgggggggaaacgggagcaccagctgtgctgtgtgtacaaccatgcatggcttcctgtcctgggggtcgacaggcggttgtaccatgagcaagtacaatgagacgcacggaccaatgcggacctagtgctagtggcatgccatcctcttctcccaccccttgtctcttcctcatgtggcagcccagcacaaaaatgtacatggctctccactcctgggctgggcgtagtctcttggcgccatgactgactgattgcgctccgatcctcccacatgatcgccacatgcacttgtccccgtgaattacttcgctttcactctctacctctgtctgtatctagaatgatattactatgtaatttttttaaaaaaaaaagatgcatagcttttactacctccaatcttatatatttgacgccggatagtgtcacaacagcaatccaggatattcccgtcggccgggtaccgacgggatttactctaaaaccgacgggatttagctattcccgtcggttttagagtaaatcccgtcggtacccggccgacaggagctacccgacggggattacattaactcccgtcgggccgacgggagataattatctcccgtcggccctaggtagccgacagcggttgtcgctccccggcccagggctgacgtggcgggcaattaactcccgtcggccttaggtagccgacgggagttatgtgtccgccacgtcagccctgattgccgggacgggggagcgacaactgccgtcggcttggctaagccgacggaagttatcctggacagtaccaggataactcccgtcggctttgcaaagccgacgggagttaaactgtcaccccccccaaaaaccccatatttatgatcaatggcacagaaaatatacacaatatcatcatgcacattcacacatcaatcacatccatccacacacatcaatcacatccatccacacacatatatataagaacattcatacacataagaagtgttcatccacataagaag

SEQ ID NO: 4526 - DNA, 1128 bp, Zea mays
  Zm_smallRNAprecursor_15
ctttatgcttatccaatgcctaccacatgagattcctaggtattttatcatatgccttttccaaatcgataaaaaccatgtgcaaatccttctactccttatatcgctccatgacctgccttattaagaaaactgcttccatggttgacctgctaggcatgaatccaaattggttcatggtgatatgtgtcatttctctcaggcgatgctcaataactctctcccatagcttcatagtgtggctcatgagcttaatccctcgatagttggtacaactttgaatatctcccttgttctttaagattggtactaatatactcctccactcatcggacaccttatttgatcgaaaaatatggttgaacaacttggttagccaaacgatagcaatatccccaaggcatttccacacctctattgggataccatccgggcctatcgccttgcccctttcatcctctttaaagcttctttgacctctgattcttggatcctgcgtacaaagcatctatttaaatcatcaaaaggagtcatccaattgggtgtccatagtctcattctcaccattgaaaagattgtcaaaatacctctgccacctctgtttaatgtcttgtcctttcaccaagagttgatccatctcatccttaatgcatttaacttggttgaggttcctcgtcttcctttcccgaatcctagctatcttatagacatccttctccccttcctttgtacttagtcttcggtaaagatcatcatagacttgagcctttgcctcactcacagctcgttttgcagtcttttttgccaccttatacctctctatgttgatcgtgctcctgtcatggaacaagctcctataacattctttcttctcctttattgccttttgaacatcttcggtccaccaccaagtatccttaggttcactgctactccctttggtcactccaaacacctctaacgccaccttcctaatacaagttgccatcttcatccacatgttatttgcatcttcttcctcggaccaagcgccctccacaaaaactctttacctaaaaacttcggatgtctcccctagaaagtgattaggacaaaactattaataaagaagagaaaaaggataaagaa

SEQ ID NO: 4527 - DNA, 1136 bp, Zea mays
  Zm_smallRNAprecursor_16
gtgtgtcgcccagggcataaggggcatgatgacttggcctcatcctctccttcctccggcttaacaccggcggtctgttcagggttccaaactcatagtggcaactaaacacgagggttgcgctcgttgcgagacttaacccaacaccttacggcacgagctgacgacagccatgcaccacctgtgtccgcgttcccgagggcacccctctctttcaagaggattcgcggcatgtcaagccctggtaaggttcttcgctttgcatcgaattaaaccacatgctccaccgcttgtgcgggcccccgtcaattcctttgagtttcattcttgcgaacgtactccccagccgggatacttaacgcgttagctacagcactgcacgggtcgagtcgcatagcacctagtatccatcgtttacggctaggactactggggtccttaatcccatttgctcccctagctttcgtctctcagtgtcaatgtcggcccagcagagtgctttcgccgttggtgttctttccgatctcaatgcatttcaccgctccaccggaaattccctctgcccctaccgtactccagcttggtagtttccaccgcctgtccagggttgagccctaggatttgacggcggacttgaaaagccacctacagacgctttacgcccaatcattccggataacgcttgcatcctctgtcttaccgcggctgctggcacagagttagccgatgcttattcctcagataccgtcattgtttcttcttcgagaaaagaagttgacgacccgtaggccttccacctccacacggcattgctccgtcaggctttcgcccattgcggaaaattccccactgctgcctcccgtaggagtctgggccgtgtctcagtcccagtgtggctgatcatcctctcggaccagctactgatcatcgccttggtaagctattgcctcaccaactagctaatcagacgcgagcccctccttgggtggatttctccttttgctcctcagcctacggggtattagcaaccgtttccagttgttgttcccctccaaagggcaggttcttacgcgttactcacccgttcgccactggaaacaccacttcccgttcgacttgcatgtgttaagcatgcc

SEQ ID NO: 4528 - DNA, 1048 bp, Zea mays
  Zm_smallRNAprecursor_17
tttggttacaaggaacaaggcacgactggttgctcagggtttcactcaagtggaaggacttgattttggtgaaacctatgcaccagtagcaaggttagagtccataagaatattaattgcctatgctactaaccatgatttcaaattgtatcaaatggatgtcaaaagtgttttcctaaatggaccactgcaagagttggtctatgtggagcaaccaccgggctttgaagatcctaagaagccaaaccatgtctaccttcttcacaaagcgctctatgggcttaaacaagctcctagagcatggtatgaatgtcttaaagatttcttgcttaaaatggttttgaaataggaaaagtagactctactttattcactcgcaaagttgacaatcaattatttatttgtcaaatatatgtcgacgacattatatttggcagtactgatgaaacttcctgtgaggaatttagtagggttatgacaaataggtttgagatgtccatgatgggtgagctcaagtacttcctgggttttcaagtaaaacaactcaaggaaggaacctttctgtgccaaaccaagtacacacaagacatgatcaagaagtttggcatggaaaaggcaaagcacgccaagacaccaatggcttcaagtggtcatctcgacttaaatgaagaaggtaaaactgtagatcaaaagctttatagatcaatgataggatctctactgtatttatgtgcatctaggtcagatattatgcttagtgtgtgcatgtgtgcccattttcaagctaacccaaaagagtgtcacctagtggccgttaagagaattttgagatatctagttcacacccaaaatctaggtctctggtatcccaagggctcctttttcgatttatttggctactctgatttagactatgtcagttgcaaagtagatcgaaaaagcacctcggggacttgccaattccttgggcggtccctggtgtcttggagctctaagaagcaaaactttgttgcactttccactgccgaggccgaatacatagctgctg

SEQ ID NO: 4529 - DNA, 1070 bp, Zea mays
  Zm_smallRNAprecursor_18
ttctaattcgtccacgtcacacgtactaacccttggtgattgtttagactccaaaaattacaaaaaatcataatttttttctcaccatttatactcacttagttcaacctcatttcacacattatttcatttcatacagattttataaattttatataatttcattttaagtattatgtaatacataatttttaattcaataaaaaatcatttgtgtaatttttacgtgatgaaataaatatagtatgtgcactacagcaaagactgcactgaagcaatgacaagaatagagttaagagctggcgtggaagaagcgagaggaggatggtgcggcaccagtaaaatgctgagactaatcttaaacacggcagagcatcacatacatttaacacatgctccactaccagctcacaacaaataagcacgaatgagaaactggattatcgataaccaaacaaaaattttaaattggtgcccttagttctggtggtgtgctcacatatacccttagtcgtgttttttgctcagctgtgcccttccagtgctatagaacagaagggcataactgagcaaaaaacacgactaagggtataggtgagcacaccaccaaaaccaagggcaccaatttaaaaaacccaacaaaaataatcatgcacacagcagtactcgaacccaaacataaacaaaaataatcttaaaacacttgttacgaataacctttgggtttagagtttagggcagggacagaagaaaacatgtcgccagacaattttatgaagttcgcgtcataagggacctcctgtccagattcgtctagataaagaagtagcaaataaactactcggcagcagcaacctcctgcatagcctcatcaccctcgacaggcctctcaagcttcacaccaacgtcctctttgtagtcgccatgaacctgagaagcaacgtgttaggataactacagggatgttgtctagataaattatttccatgcatgtagtaattacctccatcaacttcccgagatcaaacttgggggccatgagtatcttcaccttgcggatgaagacgttt

SEQ ID NO: 4530 - DNA, 1043 bp, Zea mays
  Zm_smallRNAprecursor_19
gctcactaaattactaaatgttttttttaaattattggagatgcactaagctctgcggattttaatttgcaagatgaaaacatgcatgccatgcattcggtctttttaaaaaagtagtaaaattttgaataatgcacggatgacattttataaaattactacattgcttttgtattgcacatgcatgatttgagctagtcgattatttacgcgcattttaaattcggaaactgtagattgaaatgcgcgcgcatgcagtgcaagatggaaggcaatactaggcacaacgacataaaaaaaatctaggcgagaaataaatttaagcggacacaccaacgacataaacaaaaaaaaacaaaaaaaatgcaaactatggggtttgaacccacgaccacatggttagaagccttatgctctaccaagtgggctagatgggctttgtgctcatgtatgcaacaaatattttaataacacaaccgagctcggcgccaagatctgtggcgccgagctcggttccacgtcgacgccacgcgtctgggttgtgccaacgcaacacgacctcggcgccatagcctatggcgccgagctgtgttagctcggcgccataggctatggcgccgagcaaagggtccaaaactgcatttaaaatttttttaggtctaaacgtgattttacttctgtttaagggctaaaatacaaaaaattcggcctctcggaatgggggcatgcaacgtatgtataacctaaccggttccggttccggcgaaaaaacccacgcgtcctttccttttgcaccgggacgagcagcaagcaaacaaaccggaaaatggcggcacataacgacccaaaaaaaagtctgcaacccctgcatgcatgcatgcattgcatgcatacagctggtggtattaaagagttgtttgaatatactagaattaatagttagttagctaaaaattattagtagaattagttagctattaactaatttaacaaaaatagctaatagctaaattattagctaggatgtttgaatatttcaacta

SEQ ID NO: 4531 - DNA, 1044 bp, Zea mays
  Zm_smallRNAprecursor_20
gctcactaaattactaaatgttttttttaaattattggagatgcactaagctctgcggattttaatttgcaagatgaaaacatgcatgccatgcattcggtctttttaaaaaagtagtaaaattttgaataatgcacggatgacattttataaaattactacattgcttttgtattgcacatgcatgatttgagctagtcgattatttacgcgcattttaaattcggaaactgtagattgaaatgcgcgcgcatgcagtgcaagatggaaggcaatactaggcacaacgacataaaaaaaatctaggcgagaaataaatttaagcggacacaccaacgacataaacaaaaaaaaacaaaaaaaatgcaaactatggggtttgaacccacgaccacatggttagaagccttatgctctaccaagtgggctagatgggctttgtgctcatgtatgcaacaaatattttaataacacaaccgagctcggcgccaagatctgtggcgccgagctcggttccacgtcgacgccacgcgtctgggttgtgccaacgcaacacgacctcggcgccatagcctatggcgccgagctgtgttagctcggcgccataggctatggcgccgagcaaagggtccaaaactgcatttaaaatttttttaggtctaaacgtgattttacttctgtttaagggctaaaatacaaaaaattcggcctctcggaatgggggcatgcaacgtatgtataacctaaccggttccggttccggcgaaaaaacccacgcgtcctttccttttgcaccgggacgagcagcaagcaaacaaaccggaaaatggcggcacataacgacccaaaaaaaagtctgcaacccctgcatgcatgcatgcattgcatgcatacagctggtggtattaaagagttgtttgaatatactagaattaatagttagttagctaaaaattattagtagaattagttagctattaactaatttaacaaaaatagctaatagctaaattattagctaggatgtttgaatatttcaactaa

SEQ ID NO: 4532 - DNA, 1041 bp, Zea mays
  Zm_smallRNAprecursor_21
tcactaaattactaaatgttttttttaaattattggagatgcactaagctctgcggattttaatttgcaagatgaaaacatgcatgccatgcattcggtctttttaaaaaagtagtaaaattttgaataatgcacggatgacattttataaaattactacattgcttttgtattgcacatgcatgatttgagctagtcgattatttacgcgcattttaaattcggaaactgtagattgaaatgcgcgcgcatgcagtgcaagatggaaggcaatactaggcacaacgacataaaaaaaatctaggcgagaaataaatttaagcggacacaccaacgacataaacaaaaaaaaacaaaaaaaatgcaaactatggggtttgaacccacgaccacatggttagaagccttatgctctaccaagtgggctagatgggctttgtgctcatgtatgcaacaaatattttaataacacaaccgagctcggcgccaagatctgtggcgccgagctcggttccacgtcgacgccacgcgtctgggttgtgccaacgcaacacgacctcggcgccatagcctatggcgccgagctgtgttagctcggcgccataggctatggcgccgagcaaagggtccaaaactgcatttaaaatttttttaggtctaaacgtgattttacttctgtttaagggctaaaatacaaaaaattcggcctctcggaatgggggcatgcaacgtatgtataacctaaccggttccggttccggcgaaaaaacccacgcgtcctttccttttgcaccgggacgagcagcaagcaaacaaaccggaaaatggcggcacataacgacccaaaaaaaagtctgcaacccctgcatgcatgcatgcattgcatgcatacagctggtggtattaaagagttgtttgaatatactagaattaatagttagttagctaaaaattattagtagaattagttagctattaactaatttaacaaaaatagctaatagctaaattattagctaggatgtttgaatatttcaacta

SEQ ID NO: 4533 - DNA, 1042 bp, Zea mays
  Zm_smallRNAprecursor_22
tcactaaattactaaatgttttttttaaattattggagatgcactaagctctgcggattttaatttgcaagatgaaaacatgcatgccatgcattcggtctttttaaaaaagtagtaaaattttgaataatgcacggatgacattttataaaattactacattgcttttgtattgcacatgcatgatttgagctagtcgattatttacgcgcattttaaattcggaaactgtagattgaaatgcgcgcgcatgcagtgcaagatggaaggcaatactaggcacaacgacataaaaaaaatctaggcgagaaataaatttaagcggacacaccaacgacataaacaaaaaaaaacaaaaaaaatgcaaactatggggtttgaacccacgaccacatggttagaagccttatgctctaccaagtgggctagatgggctttgtgctcatgtatgcaacaaatattttaataacacaaccgagctcggcgccaagatctgtggcgccgagctcggttccacgtcgacgccacgcgtctgggttgtgccaacgcaacacgacctcggcgccatagcctatggcgccgagctgtgttagctcggcgccataggctatggcgccgagcaaagggtccaaaactgcatttaaaatttttttaggtctaaacgtgattttacttctgtttaagggctaaaatacaaaaaattcggcctctcggaatgggggcatgcaacgtatgtataacctaaccggttccggttccggcgaaaaaacccacgcgtcctttccttttgcaccgggacgagcagcaagcaaacaaaccggaaaatggcggcacataacgacccaaaaaaaagtctgcaacccctgcatgcatgcatgcattgcatgcatacagctggtggtattaaagagttgtttgaatatactagaattaatagttagttagctaaaaattattagtagaattagttagctattaactaatttaacaaaaatagctaatagctaaattattagctaggatgtttgaatatttcaactaa

SEQ ID NO: 4534 - DNA, 1042 bp, Zea mays
  Zm_smallRNAprecursor_23
aacattgacttagaaaatgagaaagataaaacaagaaatttggaaagcgaaaacttatttctaaagaattcatgtgaacaacaaaaacatctactttatgttattacttgttcacatgaggaactaaaaattgagtcatgaggaacttagtgttgctcatgaaaatttggtacaaagatcacatttttctcactaacaagatttatagtgaagaaattaaaactagtgagaactcatcacatgatttatatgatcaattgcaaaatgttactaatccatgtgatgaagataagaagaatgtatccacctcttgtgaagatttattagctatgccatgttcttcaactatagattattattattcttccttgtcttgtgggactaaccttttgaaggaaaataataagctcaaaaacaaagtgaagaatttaagcaacatgtttgagaggtggcataaatcaaaagtcactcatgatcttataatgaaaaatcaaagaagatatgatgacaagagtggccttggtttcaacaagagcaatatcaaaggcagacaattcaaattaaaaggaaataagctatctcacttcatgtgctataaatgccatgagatgggtcatcttgcaaaggcatgccccaataaaaggaagctcaagttgaagaaggaagaaaagaggctaaagcatgacaagtgcttcaagtgccacacttggggtcacctcacctcaatgtgcccaaccaagaaattagtgaagccacaagtgaaacctcaaccaaagccatgagttgagcaaaagaataatccccaaaagcaaatcaagattgaccatgaatataatggtgatgtggggaagaaaaagaaaacaagaagagaaagaagaaggcattcaatatataatcaagataacatgatgagcacaaatcaaaagaagaaggatgtttggctcaaatcaagtactacatgtatggtgatatgggtcactttgcctcgaggtgtcccaacaatcttgagaagaaagctcaagcaaatgagaagaagcaagac

SEQ ID NO: 4535 - DNA, 1136 bp, Zea mays
  Zm_smallRNAprecursor_24
cggaaccagtcgttgtccttggccttgttcaccgacgtgtaggcgatgagcgcgcggtactcctccttgagcctctgccgccacgcctcgccgtcccgcggacccgcgcgcgtcgacagcagcgggatctcgcccaccgtgctcttggtccccttgtcccagccctccatcgatccgatgctgatgttcggcggcgacgcggcggagaagagaaggtgcgctgcgtgggtctgacgcgtgacggccgcggcttctgagaaatctgtctactagtgcaggcaaatgggttgatgcccactaacctgagccggcccatcttaaagtaatgatgtgtttcgggcttctttttcctggcggacgggcccgcattagatgaatgtgcgatctgctcgggcaccgacaaatccacaaagttatgtgcacgcacttcaaaagaaaagtgcacgcaattagtaataggcaacgactgctgtgcaagcagtccttctgcaagcgtgcaagcaaaccatctgatccgttagattacgattcaactacagatacaaccatggtttgttatggagttttttatatagattattaagctggtggtggaagagtttaagtgttaaatatgacctacagttggatcacgatctaacggatcagatggtttgcttgcacgcttgcacggaaagactgcttccacaacagtcgttgccttagtaataagggtcaatgggaaacatgtcaccatgggcggacccaggcccatggccacataggccacggcccggggcgcaggcaaaaaaaaagaaatagaaattctacgcagacgtagcccaccgtgaagaccccgtcctcccgccagctcacagacattagaaccctagccgctagcccacccggccgccacctctgccatcgccgagtcgccggccaccgccatgcgtactcccgacctcccatgactccgtcctcgcccgagcccggccaagcatcgtgcgctgtcgacgtcgcgcactcgcgccctgcgggctgcggcggtggcgcggtgaaagggaaataggctttaaaccttttcctaaatgattttggtggttgaatgtccaacacaaacaattggactaattagtttgctctagattacatgttct

SEQ ID NO: 4536 - DNA, 1166 bp, Zea mays
  Zm_smallRNAprecursor_25
tggcataataaaattttaaatgtaatatattagtaaaataactaataaattatatctatttttttaaaaatacgacttttgatatgtatgtcgattgtattcgaaaaagttgcccataaattagctcctgccacacagttggagtgcgggacaaatccgtggtacagcctacagtgggactaccaagatttaccaagccgatcgactaatccgatttatcggctctcatagccggtaaagccatagtcggtttactaatttaaatttagaatatttttataaattttaaagttttggagacaattctaaggcataaagctatcagttcttatttcatcaacgcatttaaagagacacaaaaatatgttgaatgtgaactcatagtttatcaatatcattccattttatacattagtgattaatatctaaccatgcttttataactacatgagtattatgttgctctcattatctctactacaccttaagtacctagcgagggcgtccaccaggcatccgtgcccctgccagtccgccaccaacgcacgtgcgacgcctccaactgcgaccgagccattagactaactgcagcggtgtacgctgcccttccccctccccttgcatgcggcgtgtagggggcaccctatggccgcagcggtgccccctacagcgccccctacgtgtcggtccccttctctctccccccagatatagcgtgtcactgttcatcaccctaaacattgtgttgtgggtccacgagtaattgttagtagataaaaaattgatagttggtatagaaaatgatattttatagtagtagtgggttatagggggagtatttagggggaaccgctgcgggagatgaaaaataggggggaaaagtgatatagggggaaaaatttaggggtaacggttgcggatagcctagcgcctacgtctgcgccgcgcctcccatcaacggcgcgcctccactggagtcatcttcgccccaaatcccagcgcccttccccaggccgccttcaatgccgatggagccatcctcgccccaactcaccgtcgacgctaccatggctacggagacaattgcatatatggaactctaaatagtgtgcttcgcaataataccattcgaaagatttaatccgtaaaaaagtactacaaacctt

SEQ ID NO: 4537 - DNA, 1142 bp, Zea mays
  Zm_smallRNAprecursor_26
catgcccatggaggaagcttgacgacgaagattgtcgtcagtctcccgctgacgccgtgccacttcatggacatcagcagaaatgttgcggcacatggagaaaaatgccgcaagcccatggaccaagcgagcacccatcccgcggccacgaccacgaccacgaccacgagcacgtggcatgggagagccgcggccaggagagggacgcgaggcagcagcgggggggggggggggaggaggaaggatggtggggaggctggcgaggtggctcagaggaggaggcagggcctccagaccgtgagggaacccgcttcgtacgagcagctgggttggaagaatcaacccagtagggtacgtagcgggagtgtttgacgggtttttcgaagtgggtctgggtgaccacttcgatcatcttcatgataaagggtgcatgaagacaccctctgtgaggagaccaggaagcacggacgatctcctcccagatcatgtcaaacacattgatgcgggcgagactgtttggagcaaggaggaggaggaggactcgactctccccaaggacgttcatttgattaccgccctttgggagaacggtcatccgggacaaggaattaaggtacatgtagtacctatgcatgttagcggttgtccagaactcccgctcagtagagacatgaatgaattccgtctcttcccgcatgggcagccgaatgccatgcactcgcatgttgctgccctgaatgtctgcatcagagaagcccagaatatgggcaaaacgacgataactgactttgtgccattaccctggatgaagaaatacatgactgggtaatcatacccatcggcttcctcatctactttctttatccagagggtggcatagaactgagctaccacctcatcattccaggggtattccatggttataatgttacgtaacccctttctctctaagtttacgagagctgacgacatgtcagcatctcccatattctcacaaccctcccagtcaataaatctatgtcggacgactgggtgtttcttggaaagaatgacagaattgtagaagtcagcctggaaaagattccagaaccgagggtcctggacaccaggatgacgaggagtgagagtagggttggtaaacc

SEQ ID NO: 4538 - DNA, 1058 bp, Zea mays
  Zm_smallRNAprecursor_27
tgttgcggcacatggagaaaaatgccgcaagcccatggaccaagcgagcacccatcccgcggccacgaccacgaccacgaccacgagcacgtggcatgggagagccgcggccaggagagggacgcgaggcagcagcgggggggggggggggaggaggaaggatggtggggaggctggcgaggtggctcagaggaggaggcagggcctccagaccgtgagggaacccgcttcgtacgagcagctgggttggaagaatcaacccagtagggtacgtagcgggagtgtttgacgggtttttcgaagtgggtctgggtgaccacttcgatcatcttcatgataaagggtgcatgaagacaccctctgtgaggagaccaggaagcacggacgatctcctcccagatcatgtcaaacacattgatgcgggcgagactgtttggagcaaggaggaggaggaggactcgactctccccaaggacgttcatttgattaccgccctttgggagaacggtcatccgggacaaggaattaaggtacatgtagtacctatgcatgttagcggttgtccagaactcccgctcagtagagacatgaatgaattccgtctcttcccgcatgggcagccgaatgccatgcactcgcatgttgctgccctgaatgtctgcatcagagaagcccagaatatgggcaaaacgacgataactgactttgtgccattaccctggatgaagaaatacatgactgggtaatcatacccatcggcttcctcatctactttctttatccagagggtggcatagaactgagctaccacctcatcattccaggggtattccatggttataatgttacgtaacccctttctctctaagtttacgagagctgacgacatgtcagcatctcccatattctcacaaccctcccagtcaataaatctatgtcggacgactgggtgtttcttggaaagaatgacagaattgtagaagtcagcctggaaaagattccagaaccgagggtcctggacaccaggatgacgaggagtgagagtagggttggtaaac

SEQ ID NO: 4539 - DNA, 1057 bp, Zea mays
  Zm_smallRNAprecursor_28
gttgcggcacatggagaaaaatgccgcaagcccatggaccaagcgagcacccatcccgcggccacgaccacgaccacgaccacgagcacgtggcatgggagagccgcggccaggagagggacgcgaggcagcagcgggggggggggggggaggaggaaggatggtggggaggctggcgaggtggctcagaggaggaggcagggcctccagaccgtgagggaacccgcttcgtacgagcagctgggttggaagaatcaacccagtagggtacgtagcgggagtgtttgacgggtttttcgaagtgggtctgggtgaccacttcgatcatcttcatgataaagggtgcatgaagacaccctctgtgaggagaccaggaagcacggacgatctcctcccagatcatgtcaaacacattgatgcgggcgagactgtttggagcaaggaggaggaggaggactcgactctccccaaggacgttcatttgattaccgccctttgggagaacggtcatccgggacaaggaattaaggtacatgtagtacctatgcatgttagcggttgtccagaactcccgctcagtagagacatgaatgaattccgtctcttcccgcatgggcagccgaatgccatgcactcgcatgttgctgccctgaatgtctgcatcagagaagcccagaatatgggcaaaacgacgataactgactttgtgccattaccctggatgaagaaatacatgactgggtaatcatacccatcggcttcctcatctactttctttatccagagggtggcatagaactgagctaccacctcatcattccaggggtattccatggttataatgttacgtaacccctttctctctaagtttacgagagctgacgacatgtcagcatctcccatattctcacaaccctcccagtcaataaatctatgtcggacgactgggtgtttcttggaaagaatgacagaattgtagaagtcagcctggaaaagattccagaaccgagggtcctggacaccaggatgacgaggagtgagagtagggttggtaaac

SEQ ID NO: 4540 - DNA, 1058 bp, Zea mays
  Zm_smallRNAprecursor_29
gttgcggcacatggagaaaaatgccgcaagcccatggaccaagcgagcacccatcccgcggccacgaccacgaccacgaccacgagcacgtggcatgggagagccgcggccaggagagggacgcgaggcagcagcgggggggggggggggaggaggaaggatggtggggaggctggcgaggtggctcagaggaggaggcagggcctccagaccgtgagggaacccgcttcgtacgagcagctgggttggaagaatcaacccagtagggtacgtagcgggagtgtttgacgggtttttcgaagtgggtctgggtgaccacttcgatcatcttcatgataaagggtgcatgaagacaccctctgtgaggagaccaggaagcacggacgatctcctcccagatcatgtcaaacacattgatgcgggcgagactgtttggagcaaggaggaggaggaggactcgactctccccaaggacgttcatttgattaccgccctttgggagaacggtcatccgggacaaggaattaaggtacatgtagtacctatgcatgttagcggttgtccagaactcccgctcagtagagacatgaatgaattccgtctcttcccgcatgggcagccgaatgccatgcactcgcatgttgctgccctgaatgtctgcatcagagaagcccagaatatgggcaaaacgacgataactgactttgtgccattaccctggatgaagaaatacatgactgggtaatcatacccatcggcttcctcatctactttctttatccagagggtggcatagaactgagctaccacctcatcattccaggggtattccatggttataatgttacgtaacccctttctctctaagtttacgagagctgacgacatgtcagcatctcccatattctcacaaccctcccagtcaataaatctatgtcggacgactgggtgtttcttggaaagaatgacagaattgtagaagtcagcctggaaaagattccagaaccgagggtcctggacaccaggatgacgaggagtgagagtagggttggtaaacc

SEQ ID NO: 4541 - DNA, 1171 bp, Zea mays
  Zm_smallRNAprecursor_30
ccgcatgggcagccgaatgccatgcactcgcatgttgctgccctgaatgtctgcatcagagaagcccagaatatgggcaaaacgacgataactgactttgtgccattaccctggatgaagaaatacatgactgggtaatcatacccatcggcttcctcatctactttctttatccagagggtggcatagaactgagctaccacctcatcattccaggggtattccatggttataatgttacgtaacccctttctctctaagtttacgagagctgacgacatgtcagcatctcccatattctcacaaccctcccagtcaataaatctatgtcggacgactgggtgtttcttggaaagaatgacagaattgtagaagtcagcctggaaaagattccagaaccgagggtcctggacaccaggatgacgaggagtgagagtagggttggtaaacctcagacgctgaagggtttctattcccttctgagtgaagtcgacgggagattcatgcggaccgcggctgacgttcgccggatgcatgtgcagtccggtgacgtagagagcatcaggcgccggaaggtcgacgaagtcgtcgaaagccccatcctcctcttggcagggagcataccctgaggaagacgtgctacgacgaggacgagaggagccaaccttctggcgtctcccgcgagtcggctgcgagggcatggaagagccctcgccagccatccgaccagagccacgtcctctcttagagagggagcgacgaggcggaggagaggggacgggagattcctcctgaatctcgtcggagtcgctgctgaactcgaccacagaggggttgcgacgacgcaccatgatttgaaaaggtggtgaaactgtgaagcggatgaagtgtgtgaaggagaggctctaaaggttgtgaagcgaccaaggcgagagtgaatgaagtgggagaagagaagggggagattgaagtatatataggcagttgagctggtccttaggaccagttcaaccgccccatgggccagttcagctggttctgaccagtgtggtcagagaaccagaaacaacaaattcaaatttgcgcgcagctgctggaagtggctggacagaaaaaaaatatggacgcccctgacacgcatgcacggctagtgcgcgggcagagcagaaat

SEQ ID NO: 4542 - DNA, 1036 bp, Zea mays
  Zm_smallRNAprecursor_31
cattggagatatacatcttaaattagttaatggttttgtactgttgttgagagacgtactttatgtaccttccttgcgaaggaaccttatttcggtttctagattagatgatcagcacattcattaccattttggtgatagacaatgtgtcattcagtttgataataaagatgttggtctcgccatccgacgagatatgctttatttactttcgcaaagtgatgttgttaatgtattagatataccagaaaatgatccagccaacagtggcaggaaaagaaaacgaagtgatggagaaacctcgtcgaaattatggcactatcgtttgggccatatttcgagggggagaatagaaagtcttgttaaggaacagattctccatcccctagatttcacagacttagagcaatgcagagattgcattaagggtaaattcgcgaagcagattaagaaagatgctaagcatagtacgagagtgttagaaattattcatacagatatctgtggtccttttccagttaggacagtagatgggtttaactcgttcataaccttcacagatgactactctcgctacggttatatttatccaattaaggaaagatcagaagctttagacaagtttaaacagttcaaggctgaagtagagaatcaacacgatttgaagataaagattgttcgatcagatcgtgggggggagtactatgggcgtcataccgagtatggccaggtcccaggacctttcgcgaggttcctaagagaaaacggtattgttgctcagtattcaacacctggcgaaccacaacagaatggggttgccgaaaggcgtaacagaacgctaatggatatggtaaggagtatgctaagtttctctaacctgccattgggtctacagatggaggctttaaaaccgctatgcatatactcacagagttctagtaatcagtgactagaactccatatgagtgtggactggcgaaaaccacgctcactacttcatatatgggttgtccagcagaagctagaatattaatcc

SEQ ID NO: 4543 - DNA, 1036 bp, Zea mays
  Zm_smallRNAprecursor_32
cattggagatatacatcttaaattagttaatggttttgtactgttgttgagagacgtacattatgtaccttccttgcgaaggaaccttatttcggtttctagattagatgatcagcacattcattgccattttggtgatagacagtgtgtcattcagtttgataataaagatgttggtctcgccatccgacgagatatgctttatttactttcgcagagtgatgttgttaatgtattagatataccagaaaatgatccagccaatagtggcaggaaaagaaaacgaagtgatggagaaacctcgtcgaaattatggcactatcgtttgggccatatttcgagggggagaatagaaagtcttgttaaggaacagattctccatcccctagatttcacagacttagagcaatgcagagattgcattaagggtaaattcgcgaagcagattaagaaagatgctaagcatagtacgagagtgttagaaattattcatacagatatctgtggtccttttccagttaggacagtagatgggtttaactcgttcataaccttcacagatgactactctcgctacggttatatttatccaattaaggaaagatcagaagctttagacaagtttaaacagttcaaggctgaagtagagaatcaacacgatttgaagataaagattgttcgatcagatcgtgggggggagtactatgggcgtcataccgagtatggccaggtcccaggacctttcgcgaggttcctaagagaaaacggtattgttgctcagtattcaacacctggcgaaccacaacagaatggggttgccgaaaggcgtaacagaacgctaatggatatggtaaggagtatgctaagtttctctaacctgccattgggtctacagatggaggctttaaaaaccgctatgcatatactcaacagagtttctagtaaatcagtgactagaactccatatgagttgtggactggcagaaaacccacgctcaactacttccatatatggggttgtccagcagaagctaga

SEQ ID NO: 4544 - DNA, 1040 bp, Zea mays
  Zm_smallRNAprecursor_33
cccgccgatcgatcgagctagcgatcccggccggcggcgaatcgtactactacttgcgcacggttagcagctggtcgcgcgcgcgcgtgcgtccaagggagttggtggccgtgcgggccgacgaccgcgcgctacgctccttgccgcgcggatacacgctggcagtcgcgcaggtctcactacagcttgcactttccagtgtgtgtgctgtgctggctagagagggcacgccacggccggccataatatagcagcggacggagtacgtacgtacgtacactagcgcttagtagagtgcagagtgcacgttacggaccgaccgaattttttgtattttagcccttaaacagaagtaaaatcacgtttagacctaaaaaaattttaaatgcagttttggacctttgctcggcgccataggctatggcgccgagctaacacagctcggcgccataggctatggcgccgaggtcgtgttgcgttggcacaacccagacgcgtggcgtcgacgtggaaccgagctcggcgccacagatcttggcgccgagctcggttccacgtcgacgccacgcgtctgggttgtgccagagcaaaacagaacttgccctggttgaagaccctgatggcgttgtttgtgaggcagcgacggcggcgacgcgtaggcacccatgccgctctcgccgtcgctcgagctagacctgttccaccgcgcggcggccgcgggcacgggcgccgccgccgtacgctttcctttcggcaacatccccgttacgcactcgtactatttcttcgggcaggccgcagccgccgcggaagtagggtgtcgtgtgctcaagctggcgtcggcggtcaccgtggcgcagagcgactcagactgttcttcggtagtggatctgtcgccgtcgccaccggccgctgtgtcggcgaggaagcccgtcgtgttcgatattgacctgaactgctcaccgccgacggaggcgggagcatagtcgccggagcttttaatgactgtctgtctgttagtttctttcttcgcctttttc

SEQ ID NO: 4545 - DNA, 1041 bp, Zea mays
  Zm_smallRNAprecursor_34
cccgccgatcgatcgagctagcgatcccggccggcggcgaatcgtactactacttgcgcacggttagcagctggtcgcgcgcgcgcgtgcgtccaagggagttggtggccgtgcgggccgacgaccgcgcgctacgctccttgccgcgcggatacacgctggcagtcgcgcaggtctcactacagcttgcactttccagtgtgtgtgctgtgctggctagagagggcacgccacggccggccataatatagcagcggacggagtacgtacgtacgtacactagcgcttagtagagtgcagagtgcacgttacggaccgaccgaattttttgtattttagcccttaaacagaagtaaaatcacgtttagacctaaaaaaattttaaatgcagttttggacctttgctcggcgccataggctatggcgccgagctaacacagctcggcgccataggctatggcgccgaggtcgtgttgcgttggcacaacccagacgcgtggcgtcgacgtggaaccgagctcggcgccacagatcttggcgccgagctcggttccacgtcgacgccacgcgtctgggttgtgccagagcaaaacagaacttgccctggttgaagaccctgatggcgttgtttgtgaggcagcgacggcggcgacgcgtaggcacccatgccgctctcgccgtcgctcgagctagacctgttccaccgcgcggcggccgcgggcacgggcgccgccgccgtacgctttcctttcggcaacatccccgttacgcactcgtactatttcttcgggcaggccgcagccgccgcggaagtagggtgtcgtgtgctcaagctggcgtcggcggtcaccgtggcgcagagcgactcagactgttcttcggtagtggatctgtcgccgtcgccaccggccgctgtgtcggcgaggaagcccgtcgtgttcgatattgacctgaactgctcaccgccgacggaggcgggagcatagtcgccggagcttttaatgactgtctgtctgttagtttctttcttcgcctttttcc

SEQ ID NO: 4546 - DNA, 1038 bp, Zea mays
  Zm_smallRNAprecursor_35
ccgccgatcgatcgagctagcgatcccggccggcggcgaatcgtactactacttgcgcacggttagcagctggtcgcgcgcgcgcgtgcgtccaagggagttggtggccgtgcgggccgacgaccgcgcgctacgctccttgccgcgcggatacacgctggcagtcgcgcaggtctcactacagcttgcactttccagtgtgtgtgctgtgctggctagagagggcacgccacggccggccataatatagcagcggacggagtacgtacgtacgtacactagcgcttagtagagtgcagagtgcacgttacggaccgaccgaattttttgtattttagcccttaaacagaagtaaaatcacgtttagacctaaaaaaattttaaatgcagttttggacctttgctcggcgccataggctatggcgccgagctaacacagctcggcgccataggctatggcgccgaggtcgtgttgcgttggcacaacccagacgcgtggcgtcgacgtggaaccgagctcggcgccacagatcttggcgccgagctcggttccacgtcgacgccacgcgtctgggttgtgccagagcaaaacagaacttgccctggttgaagaccctgatggcgttgtttgtgaggcagcgacggcggcgacgcgtaggcacccatgccgctctcgccgtcgctcgagctagacctgttccaccgcgcggcggccgcgggcacgggcgccgccgccgtacgctttcctttcggcaacatccccgttacgcactcgtactatttcttcgggcaggccgcagccgccgcggaagtagggtgtcgtgtgctcaagctggcgtcggcggtcaccgtggcgcagagcgactcagactgttcttcggtagtggatctgtcgccgtcgccaccggccgctgtgtcggcgaggaagcccgtcgtgttcgatattgacctgaactgctcaccgccgacggaggcgggagcatagtcgccggagcttttaatgactgtctgtctgttagtttctttcttcgccttttt

SEQ ID NO: 4547 - DNA, 1039 bp, Zea mays
  Zm_smallRNAprecursor_36
ccgccgatcgatcgagctagcgatcccggccggcggcgaatcgtactactacttgcgcacggttagcagctggtcgcgcgcgcgcgtgcgtccaagggagttggtggccgtgcgggccgacgaccgcgcgctacgctccttgccgcgcggatacacgctggcagtcgcgcaggtctcactacagcttgcactttccagtgtgtgtgctgtgctggctagagagggcacgccacggccggccataatatagcagcggacggagtacgtacgtacgtacactagcgcttagtagagtgcagagtgcacgttacggaccgaccgaattttttgtattttagcccttaaacagaagtaaaatcacgtttagacctaaaaaaattttaaatgcagttttggacctttgctcggcgccataggctatggcgccgagctaacacagctcggcgccataggctatggcgccgaggtcgtgttgcgttggcacaacccagacgcgtggcgtcgacgtggaaccgagctcggcgccacagatcttggcgccgagctcggttccacgtcgacgccacgcgtctgggttgtgccagagcaaaacagaacttgccctggttgaagaccctgatggcgttgtttgtgaggcagcgacggcggcgacgcgtaggcacccatgccgctctcgccgtcgctcgagctagacctgttccaccgcgcggcggccgcgggcacgggcgccgccgccgtacgctttcctttcggcaacatccccgttacgcactcgtactatttcttcgggcaggccgcagccgccgcggaagtagggtgtcgtgtgctcaagctggcgtcggcggtcaccgtggcgcagagcgactcagactgttcttcggtagtggatctgtcgccgtcgccaccggccgctgtgtcggcgaggaagcccgtcgtgttcgatattgacctgaactgctcaccgccgacggaggcgggagcatagtcgccggagcttttaatgactgtctgtctgttagtttctttcttcgcctttttc

SEQ ID NO: 4548 - DNA, 1036 bp, Zea mays
  Zm_smallRNAprecursor_37
cgccgatcgatcgagctagcgatcccggccggcggcgaatcgtactactacttgcgcacggttagcagctggtcgcgcgcgcgcgtgcgtccaagggagttggtggccgtgcgggccgacgaccgcgcgctacgctccttgccgcgcggatacacgctggcagtcgcgcaggtctcactacagcttgcactttccagtgtgtgtgctgtgctggctagagagggcacgccacggccggccataatatagcagcggacggagtacgtacgtacgtacactagcgcttagtagagtgcagagtgcacgttacggaccgaccgaattttttgtattttagcccttaaacagaagtaaaatcacgtttagacctaaaaaaattttaaatgcagttttggacctttgctcggcgccataggctatggcgccgagctaacacagctcggcgccataggctatggcgccgaggtcgtgttgcgttggcacaacccagacgcgtggcgtcgacgtggaaccgagctcggcgccacagatcttggcgccgagctcggttccacgtcgacgccacgcgtctgggttgtgccagagcaaaacagaacttgccctggttgaagaccctgatggcgttgtttgtgaggcagcgacggcggcgacgcgtaggcacccatgccgctctcgccgtcgctcgagctagacctgttccaccgcgcggcggccgcgggcacgggcgccgccgccgtacgctttcctttcggcaacatccccgttacgcactcgtactatttcttcgggcaggccgcagccgccgcggaagtagggtgtcgtgtgctcaagctggcgtcggcggtcaccgtggcgcagagcgactcagactgttcttcggtagtggatctgtcgccgtcgccaccggccgctgtgtcggcgaggaagcccgtcgtgttcgatattgacctgaactgctcaccgccgacggaggcgggagcatagtcgccggagcttttaatgactgtctgtctgttagtttctttcttcgcctttt

SEQ ID NO: 4549 - DNA, 1037 bp, Zea mays
  Zm_smallRNAprecursor_38
cgccgatcgatcgagctagcgatcccggccggcggcgaatcgtactactacttgcgcacggttagcagctggtcgcgcgcgcgcgtgcgtccaagggagttggtggccgtgcgggccgacgaccgcgcgctacgctccttgccgcgcggatacacgctggcagtcgcgcaggtctcactacagcttgcactttccagtgtgtgtgctgtgctggctagagagggcacgccacggccggccataatatagcagcggacggagtacgtacgtacgtacactagcgcttagtagagtgcagagtgcacgttacggaccgaccgaattttttgtattttagcccttaaacagaagtaaaatcacgtttagacctaaaaaaattttaaatgcagttttggacctttgctcggcgccataggctatggcgccgagctaacacagctcggcgccataggctatggcgccgaggtcgtgttgcgttggcacaacccagacgcgtggcgtcgacgtggaaccgagctcggcgccacagatcttggcgccgagctcggttccacgtcgacgccacgcgtctgggttgtgccagagcaaaacagaacttgccctggttgaagaccctgatggcgttgtttgtgaggcagcgacggcggcgacgcgtaggcacccatgccgctctcgccgtcgctcgagctagacctgttccaccgcgcggcggccgcgggcacgggcgccgccgccgtacgctttcctttcggcaacatccccgttacgcactcgtactatttcttcgggcaggccgcagccgccgcggaagtagggtgtcgtgtgctcaagctggcgtcggcggtcaccgtggcgcagagcgactcagactgttcttcggtagtggatctgtcgccgtcgccaccggccgctgtgtcggcgaggaagcccgtcgtgttcgatattgacctgaactgctcaccgccgacggaggcgggagcatagtcgccggagcttttaatgactgtctgtctgttagtttctttcttcgccttttt

SEQ ID NO: 4550 - DNA, 1035 bp, Zea mays
  Zm_smallRNAprecursor_39
gccgatcgatcgagctagcgatcccggccggcggcgaatcgtactactacttgcgcacggttagcagctggtcgcgcgcgcgcgtgcgtccaagggagttggtggccgtgcgggccgacgaccgcgcgctacgctccttgccgcgcggatacacgctggcagtcgcgcaggtctcactacagcttgcactttccagtgtgtgtgctgtgctggctagagagggcacgccacggccggccataatatagcagcggacggagtacgtacgtacgtacactagcgcttagtagagtgcagagtgcacgttacggaccgaccgaattttttgtattttagcccttaaacagaagtaaaatcacgtttagacctaaaaaaattttaaatgcagttttggacctttgctcggcgccataggctatggcgccgagctaacacagctcggcgccataggctatggcgccgaggtcgtgttgcgttggcacaacccagacgcgtggcgtcgacgtggaaccgagctcggcgccacagatcttggcgccgagctcggttccacgtcgacgccacgcgtctgggttgtgccagagcaaaacagaacttgccctggttgaagaccctgatggcgttgtttgtgaggcagcgacggcggcgacgcgtaggcacccatgccgctctcgccgtcgctcgagctagacctgttccaccgcgcggcggccgcgggcacgggcgccgccgccgtacgctttcctttcggcaacatccccgttacgcactcgtactatttcttcgggcaggccgcagccgccgcggaagtagggtgtcgtgtgctcaagctggcgtcggcggtcaccgtggcgcagagcgactcagactgttcttcggtagtggatctgtcgccgtcgccaccggccgctgtgtcggcgaggaagcccgtcgtgttcgatattgacctgaactgctcaccgccgacggaggcgggagcatagtcgccggagcttttaatgactgtctgtctgttagtttctttcttcgcctttt

SEQ ID NO: 4551 - DNA, 1043 bp, Zea mays
  Zm_smallRNAprecursor_40
ccggcggcgaagtcgcactactacttgcgcacggttagcagctggtcgcgcgcgcgcgtgcgtccaagggagttggtggccgtgcgggccgacgaccgcgcgctacgctccttgccgcgcggatacacgctggcagtcgcgcaggtctcactacagcttgcactttccagtgtgtgtgctgtgctggctagagagggcacgccacggccggccataatatagcagcggacggagtacgtacgtacgtacactagcgcttagtagagtgcagagtgcacgttacggaccgaccgaattttttgtattttagtccttaaacagaagtaaaatcacgtttagacctaaaaaaatttaaatgcagttttggaacctttctcggcgccataggctatgacgccgagctaacacagctcgcgccataggctatgcgccgagtcgtgttgcgttggcacacccagacgcgtgcgtcgacgtgaaccgagctcggcgccaagatctgtgcgccgagctcggttccacgtcgacgccacgcgtctgggttgtgccaacgcaacacgacctcggcgccatagcctatggcgccgagctgtgttagctcggcgtcatagcctatggcgccgagcaagggtccaaaactgtatttgtatttaaaatttttttaggtctaaacgtgattttacttctgtttaagggctaaaatacaaaaaattcagtcggtccgtaacgtgcactctgcactctactaagcgctagtgtacgtacgtacgtactccgtccgctgctatattatggccggccgtggcgtgccctctctagccagcacagcacacacactggaaagtgcaagctgtagtgagacctgcgcgactgccagcgtgtatccgcgcggcaaggagcgtagcgcgcggtcgtcggcccgcacggccaccaactcccttggacgcacgcgcgcgcgcgaccagctgctaaccgtgcgcaagtagtagtgcgacttcgccgccggccgggatcgctagctcgatcgatcggcgggaccacatacg

SEQ ID NO: 4552 - DNA, 1044 bp, Zea mays
  Zm_smallRNAprecursor_41
ccggcggcgaagtcgcactactacttgcgcacggttagcagctggtcgcgcgcgcgcgtgcgtccaagggagttggtggccgtgcgggccgacgaccgcgcgctacgctccttgccgcgcggatacacgctggcagtcgcgcaggtctcactacagcttgcactttccagtgtgtgtgctgtgctggctagagagggcacgccacggccggccataatatagcagcggacggagtacgtacgtacgtacactagcgcttagtagagtgcagagtgcacgttacggaccgaccgaattttttgtattttagtccttaaacagaagtaaaatcacgtttagacctaaaaaaatttaaatgcagttttggaacctttctcggcgccataggctatgacgccgagctaacacagctcgcgccataggctatgcgccgagtcgtgttgcgttggcacacccagacgcgtgcgtcgacgtgaaccgagctcggcgccaagatctgtgcgccgagctcggttccacgtcgacgccacgcgtctgggttgtgccaacgcaacacgacctcggcgccatagcctatggcgccgagctgtgttagctcggcgtcatagcctatggcgccgagcaagggtccaaaactgtatttgtatttaaaatttttttaggtctaaacgtgattttacttctgtttaagggctaaaatacaaaaaattcagtcggtccgtaacgtgcactctgcactctactaagcgctagtgtacgtacgtacgtactccgtccgctgctatattatggccggccgtggcgtgccctctctagccagcacagcacacacactggaaagtgcaagctgtagtgagacctgcgcgactgccagcgtgtatccgcgcggcaaggagcgtagcgcgcggtcgtcggcccgcacggccaccaactcccttggacgcacgcgcgcgcgcgaccagctgctaaccgtgcgcaagtagtagtgcgacttcgccgccggccgggatcgctagctcgatcgatcggcgggaccacatacga

SEQ ID NO: 4553 - DNA, 1041 bp, Zea mays
  Zm_smallRNAprecursor_42
ggcggcgaagtcgcactactacttgcgcacggttagcagctggtcgcgcgcgcgcgtgcgtccaagggagttggtggccgtgcgggccgacgaccgcgcgctacgctccttgccgcgcggatacacgctggcagtcgcgcaggtctcactacagcttgcactttccagtgtgtgtgctgtgctggctagagagggcacgccacggccggccataatatagcagcggacggagtacgtacgtacgtacactagcgcttagtagagtgcagagtgcacgttacggaccgaccgaattttttgtattttagtccttaaacagaagtaaaatcacgtttagacctaaaaaaatttaaatgcagttttggaacctttctcggcgccataggctatgacgccgagctaacacagctcgcgccataggctatgcgccgagtcgtgttgcgttggcacacccagacgcgtgcgtcgacgtgaaccgagctcggcgccaagatctgtgcgccgagctcggttccacgtcgacgccacgcgtctgggttgtgccaacgcaacacgacctcggcgccatagcctatggcgccgagctgtgttagctcggcgtcatagcctatggcgccgagcaagggtccaaaactgtatttgtatttaaaatttttttaggtctaaacgtgattttacttctgtttaagggctaaaatacaaaaaattcagtcggtccgtaacgtgcactctgcactctactaagcgctagtgtacgtacgtacgtactccgtccgctgctatattatggccggccgtggcgtgccctctctagccagcacagcacacacactggaaagtgcaagctgtagtgagacctgcgcgactgccagcgtgtatccgcgcggcaaggagcgtagcgcgcggtcgtcggcccgcacggccaccaactcccttggacgcacgcgcgcgcgcgaccagctgctaaccgtgcgcaagtagtagtgcgacttcgccgccggccgggatcgctagctcgatcgatcggcgggaccacatacg

SEQ ID NO: 4554 - DNA, 1042 bp, Zea mays
  Zm_smallRNAprecursor_43
ggcggcgaagtcgcactactacttgcgcacggttagcagctggtcgcgcgcgcgcgtgcgtccaagggagttggtggccgtgcgggccgacgaccgcgcgctacgctccttgccgcgcggatacacgctggcagtcgcgcaggtctcactacagcttgcactttccagtgtgtgtgctgtgctggctagagagggcacgccacggccggccataatatagcagcggacggagtacgtacgtacgtacactagcgcttagtagagtgcagagtgcacgttacggaccgaccgaattttttgtattttagtccttaaacagaagtaaaatcacgtttagacctaaaaaaatttaaatgcagttttggaacctttctcggcgccataggctatgacgccgagctaacacagctcgcgccataggctatgcgccgagtcgtgttgcgttggcacacccagacgcgtgcgtcgacgtgaaccgagctcggcgccaagatctgtgcgccgagctcggttccacgtcgacgccacgcgtctgggttgtgccaacgcaacacgacctcggcgccatagcctatggcgccgagctgtgttagctcggcgtcatagcctatggcgccgagcaagggtccaaaactgtatttgtatttaaaatttttttaggtctaaacgtgattttacttctgtttaagggctaaaatacaaaaaattcagtcggtccgtaacgtgcactctgcactctactaagcgctagtgtacgtacgtacgtactccgtccgctgctatattatggccggccgtggcgtgccctctctagccagcacagcacacacactggaaagtgcaagctgtagtgagacctgcgcgactgccagcgtgtatccgcgcggcaaggagcgtagcgcgcggtcgtcggcccgcacggccaccaactcccttggacgcacgcgcgcgcgcgaccagctgctaaccgtgcgcaagtagtagtgcgacttcgccgccggccgggatcgctagctcgatcgatcggcgggaccacatacga

SEQ ID NO: 4555 - DNA, 1101 bp, Zea mays
  Zm_smallRNAprecursor_44
gcggcgaagtcgcactactacttgcgcacggttagcagctggtcgcgcgcgcgcgtgcgtccaagggagttggtggccgtgcgggccgacgaccgcgcgctacgctccttgccgcgcggatacacgctggcagtcgcgcaggtctcactacagcttgcactttccagtgtgtgtgctgtgctggctagagagggcacgccacggccggccataatatagcagcggacggagtacgtacgtacgtacactagcgcttagtagagtgcagagtgcacgttacggaccgaccgaattttttgtattttagtccttaaacagaagtaaaatcacgtttagacctaaaaaaatttaaatgcagttttggaacctttctcggcgccataggctatgacgccgagctaacacagctcgcgccataggctatgcgccgagtcgtgttgcgttggcacacccagacgcgtgcgtcgacgtgaaccgagctcggcgccaagatctgtgcgccgagctcggttccacgtcgacgccacgcgtctgggttgtgccaacgcaacacgacctcggcgccatagcctatggcgccgagctgtgttagctcggcgtcatagcctatggcgccgagcaagggtccaaaactgtatttgtatttaaaatttttttaggtctaaacgtgattttacttctgtttaagggctaaaatacaaaaaattcagtcggtccgtaacgtgcactctgcactctactaagcgctagtgtacgtacgtacgtactccgtccgctgctatattatggccggccgtggcgtgccctctctagccagcacagcacacacactggaaagtgcaagctgtagtgagacctgcgcgactgccagcgtgtatccgcgcggcaaggagcgtagcgcgcggtcgtcggcccgcacggccaccaactcccttggacgcacgcgcgcgcgcgaccagctgctaaccgtgcgcaagtagtagtgcgacttcgccgccggccgggatcgctagctcgatcgatcggcgggaccacatacgactccggtgtggccagcggcggccgggccggggaacgcacgtgctgcgagcgagcgagggc

SEQ ID NO: 4556 - DNA, 1171 bp, Zea mays
  Zm_smallRNAprecursor_45
gctttcggatgaaactgcggaaacatatattaaataacttttaacgacttttagtggtttcgaccaaacggtttttagctttttaacagctcacagcacacatcaactttttccacagctcacatcccacaacagtttttttcacagccacagcccaaccaaacagaccctaagttcaaaggctaattttaaatcatatcatggtgagtatttaatgtagaagaaataaatccaaatgtacaagagagaatacatcacatagttttggattgttcttctttatacatttaattgcatagtccattgagaaactcattctcatgctgtgaaactacatagatcacttaggtaaaaacattagtttcacaactctagtcatatagagaattccctttttgataagtgcttcaagaatttgaatttcttacttagcaccttattcattcacgaacacggggtttttctcttttatgtctagatcatggcaataatagagtaatcaaattgaaatgtgccaagaaatacttacaaccaatttaagtatttggattgccatatgtaagaaagaagattatgtaatctgttatatgataacctcaattttgatcatcttcggtcttgatcttcaacttggagtaccaagataagtgccaaaatatttctcaacaaatatccttgtaccccttcactttccatgattatagatcaattcaaaaccaaattatggtctctcaaacaacttatgtgatttatcctatatgagagccttccaatcaaagtgactttcaatatttcaaatacttgtcacttatgacagattctgtatactccaaagaaacatccataaattttgatgtacagatcctatgaccacgaaaattggtggagatgtgctttaataagtttgctaacatctgtaaaaagttgagactcatttgacttcatatgtgctgccagccacaacatctcccacaataggtacatgctgaaaactgctgtgtttgtgttgacaagattgacttaatcaagaagtttcacttatccaatgattatgaaatttgcacaaactttgctatcatatgcatagagcaagtaaactaaatttcaagccaatccaaatagatttgatcactcaaacatggctatgagcacagccttgtcagattttcaa

SEQ ID NO: 4557 - DNA, 1136 bp, Zea mays
  Zm_smallRNAprecursor_46
gtgtgtcgcccagggcataaggggcatgatgacttggcctcatcctctccttcctccggcttaacaccggcggtctgttcagggttccaaactcatagtggcaactaaacacgagggttgcgctcgttgcgagacttaacccaacaccttacggcacgagctgacgacagccatgcaccacctgtgtccgcgttcccgagggcacccctctctttcaagaggattcgcggcatgtcaagccctggtaaggttcttcgctttgcatcgaattaaaccacatgctccaccgcttgtgcgggcccccgtcaattcctttgagtttcattcttgcgaacgtactccccaggcgggatacttaacgcgttagctacagcactgcacgggtcgagtcgcacagcacctagtatccatcgtttacggctaggactactggggtctctaatcccatttgctcccctagctttcgtctctcagtgtcagtgtcggcccagcagagtgctttcgccgttggtgttctttccgatctcaatgcatttcaccgctccaccggaaattccctctgcccctaccgtactccagcttggtagtttccaccgcctgtccagggttgagccctgggatttgacggcggacttgaaaagccacctacagacgctttacgcccaatcattccggataacgcttgcatcctctgtcttaccgcggctgctggcacagagttagccgatgcttattcctcagataccgtcattgtttcttctccgagaaaagaagttgacgacccgtaggccttccacctccacgcggcattgctccgtcaggctttcgcccattgcggaaaattccccactgctgcctcccgtaggagtctgggccgtgtctcagtcccagtgtggctgatcatcctctcggaccagctactgatcatcgccttggtaagctattgcctcaccaactagctaatcagacgcgagcccctccttgggcggatttctccttttgctcctcagcctacggggtattagcaaccgtttccagttgttgttcccctcccaagggcaggttcttacgcgttactcacccgttcgccactggaaacaccacttcccgttcgacttgcatgtgttaagcatgcc

SEQ ID NO: 4558 - DNA, 1153 bp, Zea mays
  Zm_smallRNAprecursor_47
gatcatccggtggacaacatcctgggtagcatcaggagagaggtaacaactcgatctcgtttagctaattattgtgaattttactcgtttgtttcctctcttgagccacttaaggttgaagaagcattgggtgatccggattggataattgccatgcaagaggagttgaacaacttcacccggaatgaagtttggtccttagtccaaagacccaaacaaaatgtgattgggacaaaatgggtctttaggaacaaacaagatgaacatggcgtggttacaagaaacaaagcacggttggttgcccaaggctacactcaagtggaaggacttgattttggtgaaacatatgcgccggtagcaaggttagagtcaattagaatattaattgcctatgctactaaccatgatttcaagttatatcaaatggatgtcaagagcgcatttctaaatggaccactacaagagagggtctatgtggagcaaccaccgggctttgaagatccaaagaagccaaaccatgtttacctacttaaaaggcactctacgggcttaaacaagcccctagagcttggtatgattgccttaaagatttcttgcttaaaaatggttttgaaataggaaaagtagactctactttattcactcgcaaagttgacaatcaattatttgtttgtcaaatatatgtcgatgacattatatttggcagtactgatgaaactttttgtgaggaatttagtagggttatgacaaataggtttgagatgtcccatgatgggtgagctcaagtacttcttgggttttcaagttaaacaactcaaggaaggaacctttctgtgccaaaccaagtacacacaagacatgctcaaaaagtttggcatggaaaaggcaaagcacgccaagacaccaatggcttcaagtggtcatctcgacttaaatgaagaaggtaaaactgtagatcaaaagctttatagatcaatgataggatccctactatatttatgtgcatctaggccagatatcatgcttagtgtgtgcatgtgtgcccgttttcaagctaacccaaaagagtgtcacttagtggccgttaagagaattttgagatatctagttgtcggggaccataattaggggtaccctcaaggctcctaattct

SEQ ID NO: 4559 - DNA, 1048 bp, Zea mays
  Zm_smallRNAprecursor_48
gtggttacaagaaacaaagcacggttggttgcccaaggctacactcaagtggaaggacttgattttggtgaaacatatgcgccggtagcaaggttagagtcaattagaatattaattgcctatgctactaaccatgatttcaagttatatcaaatggatgtcaagagcgcatttctaaatggaccactacaagagagggtctatgtggagcaaccaccgggctttgaagatccaaagaagccaaaccatgtttacctacttaaaaggcactctacgggcttaaacaagcccctagagcttggtatgattgccttaaagatttcttgcttaaaaatggttttgaaataggaaaagtagactctactttattcactcgcaaagttgacaatcaattatttgtttgtcaaatatatgtcgatgacattatatttggcagtactgatgaaactttttgtgaggaatttagtagggttatgacaaataggtttgagatgtcccatgatgggtgagctcaagtacttcttgggttttcaagttaaacaactcaaggaaggaacctttctgtgccaaaccaagtacacacaagacatgctcaaaaagtttggcatggaaaaggcaaagcacgccaagacaccaatggcttcaagtggtcatctcgacttaaatgaagaaggtaaaactgtagatcaaaagctttatagatcaatgataggatccctactatatttatgtgcatctaggccagatatcatgcttagtgtgtgcatgtgtgcccgttttcaagctaacccaaaagagtgtcacttagtggccgttaagagaattttgagatatctagttgtcggggaccataattaggggtaccctcaaggctcctaattctcagctggtaacccccatcagcataaagctgcaaaggcctgatgggcgcgattaagtcagggatcagtccattcgagcgactcgatcaggcctcgcccgagcctagcctcggacaagggcagccgaccccggaggatttccgtctcgcccgaggcccccctccaac

SEQ ID NO: 4560 - DNA, 1142 bp, Zea mays
  Zm_smallRNAprecursor_49
caaaaggcatgcccatggtggaagcttgacgatgaagattgtcgtcagtctcccgctgacgccgtgccacctcatggacatcagcagaaatgttgcggcacatggagaaaaatgccgcaaacccatggaccaagcgagcacccatcccgcggccacgacctcgaccacgaccacgagcacgtggcatgagagatccgcggccaggagagggacgcgaggcagcagcggggggagaggaggatggatgatggggaggctggcgaggtggctcagtggaggaggcagggcctccagaccgtgagggagcccgctttgtacgagcagatgggttggaggaatcaacccagtagtgtacgtagcgggagtgtttgacgggtttttcgaagtgggtctgggtgaccacttcgatcatcttcatgataaagggtgcatgaagacaccctctgagaggagaccaggaagcacggacgatctcttcccagatcatgtcaaacacattgatgcgggcgagactgtttggagcaaggaggaggaggaagactcgactctccccaaggacgttcatttgatttccgcccttcgggagaacggtcatccgggacaaagaattaaggtacctgtagtacctatgcatgttagcggttgtccagaactcccgctcagtagagacatgaatgaattccgtctcttcccgcatgggcagccgaatgtcatgcactcgcatgttgctgcccagaatatctgcatcagagaagcccagaatatgggcaaaacgacgataactgactttgtgccagttaccctggatgaagaaatacatgactgggtaatcatacccatcggcttcctcatctactttctttatccagagggtggcatagaactgagcgaccacctcgtcgttccaggggtattccatagtcataatgtttcgtaacccctttctctctaagttttcgagagctgacgtcatgtcagcatctcccatattctcacaaccctcccagtcaataaacctatgtctaacgactgggtgtttcttggaaagaatgacagaattgtagaagtcagcctggaaaagaatccagaaccgaggatcctggacaccaggatgacgaggagtgagagtagggttggtgaac

SEQ ID NO: 4561 - DNA, 1058 bp, Zea mays
  Zm_smallRNAprecursor_50
gcagaaatgttgcggcacatggagaaaaatgccgcaaacccatggaccaagcgagcacccatcccgcggccacgacctcgaccacgaccacgagcacgtggcatgagagatccgcggccaggagagggacgcgaggcagcagcggggggagaggaggatggatgatggggaggctggcgaggtggctcagtggaggaggcagggcctccagaccgtgagggagcccgctttgtacgagcagatgggttggaggaatcaacccagtagtgtacgtagcgggagtgtttgacgggtttttcgaagtgggtctgggtgaccacttcgatcatcttcatgataaagggtgcatgaagacaccctctgagaggagaccaggaagcacggacgatctcttcccagatcatgtcaaacacattgatgcgggcgagactgtttggagcaaggaggaggaggaagactcgactctccccaaggacgttcatttgatttccgcccttcgggagaacggtcatccgggacaaagaattaaggtacctgtagtacctatgcatgttagcggttgtccagaactcccgctcagtagagacatgaatgaattccgtctcttcccgcatgggcagccgaatgtcatgcactcgcatgttgctgcccagaatatctgcatcagagaagcccagaatatgggcaaaacgacgataactgactttgtgccagttaccctggatgaagaaatacatgactgggtaatcatacccatcggcttcctcatctactttctttatccagagggtggcatagaactgagcgaccacctcgtcgttccaggggtattccatagtcataatgtttcgtaacccctttctctctaagttttcgagagctgacgtcatgtcagcatctcccatattctcacaaccctcccagtcaataaacctatgtctaacgactgggtgtttcttggaaagaatgacagaattgtagaagtcagcctggaaaagaatccagaaccgaggatcctggacaccaggatgacgaggagtgagagtagggttggtgaa

SEQ ID NO: 4562 - DNA, 1057 bp, Zea mays
  Zm_smallRNAprecursor_51
cagaaatgttgcggcacatggagaaaaatgccgcaaacccatggaccaagcgagcacccatcccgcggccacgacctcgaccacgaccacgagcacgtggcatgagagatccgcggccaggagagggacgcgaggcagcagcggggggagaggaggatggatgatggggaggctggcgaggtggctcagtggaggaggcagggcctccagaccgtgagggagcccgctttgtacgagcagatgggttggaggaatcaacccagtagtgtacgtagcgggagtgtttgacgggtttttcgaagtgggtctgggtgaccacttcgatcatcttcatgataaagggtgcatgaagacaccctctgagaggagaccaggaagcacggacgatctcttcccagatcatgtcaaacacattgatgcgggcgagactgtttggagcaaggaggaggaggaagactcgactctccccaaggacgttcatttgatttccgcccttcgggagaacggtcatccgggacaaagaattaaggtacctgtagtacctatgcatgttagcggttgtccagaactcccgctcagtagagacatgaatgaattccgtctcttcccgcatgggcagccgaatgtcatgcactcgcatgttgctgcccagaatatctgcatcagagaagcccagaatatgggcaaaacgacgataactgactttgtgccagttaccctggatgaagaaatacatgactgggtaatcatacccatcggcttcctcatctactttctttatccagagggtggcatagaactgagcgaccacctcgtcgttccaggggtattccatagtcataatgtttcgtaacccctttctctctaagttttcgagagctgacgtcatgtcagcatctcccatattctcacaaccctcccagtcaataaacctatgtctaacgactgggtgtttcttggaaagaatgacagaattgtagaagtcagcctggaaaagaatccagaaccgaggatcctggacaccaggatgacgaggagtgagagtagggttggtgaa

SEQ ID NO: 4563 - DNA, 1058 bp, Zea mays
  Zm_smallRNAprecursor_52
cagaaatgttgcggcacatggagaaaaatgccgcaaacccatggaccaagcgagcacccatcccgcggccacgacctcgaccacgaccacgagcacgtggcatgagagatccgcggccaggagagggacgcgaggcagcagcggggggagaggaggatggatgatggggaggctggcgaggtggctcagtggaggaggcagggcctccagaccgtgagggagcccgctttgtacgagcagatgggttggaggaatcaacccagtagtgtacgtagcgggagtgtttgacgggtttttcgaagtgggtctgggtgaccacttcgatcatcttcatgataaagggtgcatgaagacaccctctgagaggagaccaggaagcacggacgatctcttcccagatcatgtcaaacacattgatgcgggcgagactgtttggagcaaggaggaggaggaagactcgactctccccaaggacgttcatttgatttccgcccttcgggagaacggtcatccgggacaaagaattaaggtacctgtagtacctatgcatgttagcggttgtccagaactcccgctcagtagagacatgaatgaattccgtctcttcccgcatgggcagccgaatgtcatgcactcgcatgttgctgcccagaatatctgcatcagagaagcccagaatatgggcaaaacgacgataactgactttgtgccagttaccctggatgaagaaatacatgactgggtaatcatacccatcggcttcctcatctactttctttatccagagggtggcatagaactgagcgaccacctcgtcgttccaggggtattccatagtcataatgtttcgtaacccctttctctctaagttttcgagagctgacgtcatgtcagcatctcccatattctcacaaccctcccagtcaataaacctatgtctaacgactgggtgtttcttggaaagaatgacagaattgtagaagtcagcctggaaaagaatccagaaccgaggatcctggacaccaggatgacgaggagtgagagtagggttggtgaac

SEQ ID NO: 4564 - DNA, 1171 bp, Zea mays
  Zm_smallRNAprecursor_53
cgcatgggcagccgaatgtcatgcactcgcatgttgctgcccagaatatctgcatcagagaagcccagaatatgggcaaaacgacgataactgactttgtgccagttaccctggatgaagaaatacatgactgggtaatcatacccatcggcttcctcatctactttctttatccagagggtggcatagaactgagcgaccacctcgtcgttccaggggtattccatagtcataatgtttcgtaacccctttctctctaagttttcgagagctgacgtcatgtcagcatctcccatattctcacaaccctcccagtcaataaacctatgtctaacgactgggtgtttcttggaaagaatgacagaattgtagaagtcagcctggaaaagaatccagaaccgaggatcctggacaccaggatgacgaggagtgagagtagggttggtgaacctcaggcgctgaagggtgtctattcccttcagagtgaaatcgacgggagattcatgcggaccgcggctgacgttcgccggatgcatgtgcagtccggtgacgtagagagcatcaggcgccggaaggtcgacgaagtcgtcgaaagccccatcctcctcctggcagggagcatacccagaggaagacgtggtacgacgaggacgagaggcgccaaccttttggcgtctcccgcgagtcggctgcgagggcatggaagagccctcgccatccatccgaccagagccacgtcctctcttagagagggagcgacgaggcggaggagaggggacgggagattcctccagaatctcgtccgagtcgctgctaaactcaatcactgaagggttgcgacgacgcaccatgattgaaaaggtggtgaaactgtgaaccggttgaggtgtgtaaaagagaggctctaaaggttgtgaagcgactaaggcgagagtgaatgaagtgggagaagagaaggggaatgtcaaatatatataggcagttgagctggtcctcaggaccggttcaaccgcccccatgggccagttcagctggttctgaccagtgtggtcagagagccagaaacagcagagggaagatgccaaaaatttaaatttctgacgcagaattctaaaaagtgtactgcagagattccatgcgccaaaaaaaaatcaaaaccaagtgtctgcgc

SEQ ID NO: 4565 - DNA, 1040 bp, Zea mays
  Zm_smallRNAprecursor_54
aaaaatttgagcgcccagcagaggaagtgaccgttcaaaaaaaatgttgcgcgccctgcagagaggattggactggacaaaggaaagagatgctgcgcgccctgcaggatgtgaccggattaaaaaatttgcacgccaggctgccagcagaagtggaagcgaccggtcaatagagaaaaagatgttgcgcgactgaaaaaaggtgcagctgacagacctgcgtggacaggcctgcgcggacagacctgcgcggacagaccggtcagagaccggttcaaccagtccactatgccggttcaaccggttttaaccaggatggtcctggtaaaaactggttaaaagcaggtgagctgaagttcagctccgaagttcagctggcctcctccagctgaactagaaagttcagctggtcaagccagttgagccccaaaaaaaatcttagcactaaaatacattcaaattttaacattttcaccaagttttttgaaagatcatcacatagctttaaaactatcaatcaaaaatagtgaatcaatcaatttttgtgaccgttttcaagttaagttacgagaatccaagatatttaattcactcctaagaaaacaaaacctagtctcatcgaggggttttgtgaagatatcggctagttgatttcggtgctcacatgaaacaattcgatatctcctttggcttcgtggtctctcaagaaatgatgtctgatgtcaatatgtttagttctagagtgttgcacaggattgtttgcaagttttatggcactctcattgtcacacaaaagtggaattttgttaaactcacaaccaaaatctctaagggtttgcttcatccataacaactgtgcacaacatgccccagctgctatgtactcagcttctgcagtggaaagagcaacacaattttgtttcttagaactccatgatactaaggatcacccaaggaattggcaagtcccagtagtgctttttcgatctactttgcaaccagcataatctgagtcagaatagccaagtaaatcgaaaagg

SEQ ID NO: 4566 - DNA, 1070 bp, Zea mays
  Zm_smallRNAprecursor_55
gtcatgctctcccctctacaacccatgcatatttgttagtgagagtaagaatctatccaacatcatggatattgcgggtggctagttcctcgagcatcatgtcatcccccaaaccctattggaaggcaactgttgggggccttcatcttacgaaggtcctcaaaaacacgactaatatgttttccaagtataatatactcacagggaccttcgaccttgggatgaaggtgtacacgatatgaaaagcgcagtctaagtataatatactcacagagaccttcggccttgggatgaaggtgtacacgatatgaaaagcgcagtctgggagggagatgaaccagttccgaagatatatatggagaagtttcagcttagcggtggagaatgaaaccgacttaaaggggaaaaggttgtctagtcctcaatagattaccccttagtcaatagtaaatgttagggttttttaaattggtgccctcagttttagtggtgtgctcacatatacccttagtcgtgttttttgctcagtcgtgcccttctgttctatagcactggaagggcacagctaagcaaaaaacacgactaagggtatagatgagcacaccaccaaaactgagggcaccaattttaaaaaccctaaatgttaagggtatggatgtaattttacacaggctgcgtcatgtgcctataaatagatgaacagtagcaccgtactgttcacgctgacttgtattcagtcgcacgtcacacttggattctcaccttctgtcaagtcgaaggtataaatgtaattcaatattgttgatgtttattcatgattatataatgagaatataaatagtctaatgatatcatatgattatacatttttatatgtcatatgatcctacttttcattatgtattgagatgatgaaggtatgcccttcatgaccttcgtctgaagatcattatatcctaagggagataatgcttcgaagtatgaaggtatttaatcattaacatttgtgttgtcttgttcttaattcatagcatttgagaacaagtccccaacaacaacgacaatgaaag

SEQ ID NO: 4567 - DNA, 1070 bp, Zea mays
  Zm_smallRNAprecursor_56
gttgggcattcaaccaccaaaattatttataggaaaaggttaaaccctatttccctttcatccgggcccttgcggcggaccgtccgcgacaccagggtgagccttggacaggaacactgcaaaaacacaagttaacactacggatcgtccgatggagaagcgagcaccgtccgagaccaagcacggaccgtccggcctcaggcgcgaatcgcccggtcgttgaaaaaccagaaaaacccgaaggtgacgggttcggtaaaatgcatttttagcgtccttgcggatcgtcctgggtgcacggtcggaccgtccacgactgctttatctgacatttgacgacgcattaaaagctctatagccgttactcctgaccgttgtgatttcagtcgttgatgtgcaggggtacggaccgtccgcggtcggtagaaaatgagcaacgactaggaagtggttggaggctataaatacaagagaaaattcctggtatgccatcagattttatactcatcccttgtgtgccactgagtggcatataagtatatttttttgtgtctatgacatgtggggccagtggcatacaaggaatgagtatatttttcagtggcatacagggaattggccctaaatacaaccccaaccacctccattcaaatgatccaagcactccactcattcacattcaatacaggagctagcaatacattccaagacacactcaaagctttcaatctctcaaagtcccacaatttagacaagtgatcattagtgcttagtgacttgagagagtgtgatctatgtgttatttgtcgctcttgttgcttggctttcacaattgggctttcttcatctctttctcaaccttctaagtgaattataaagcaagcaagagacacctaattttgtggtgatccttgtggggtcttagtgacccgtgtgattaagaagaagcactcgaccggtctaagtgaccgactgagagagggaaagggttggaatagacccggactttgtggcctccttaacggggactaggttctttggaatcaaacctcggtaaacaaatcgctgtg

SEQ ID NO: 4568 - DNA, 1097 bp, Zea mays
  Zm_smallRNAprecursor_57
cacttttttatttgttctgtccggtcacttctcctctgctgggcgcgtgcagaatttttttggacgcttctgctcagcccgcgcgccatgctgcagattttttctctcctcctcacagccatgcatgcgtgtcaggggcgccagtgtttttttttctctgtccagtcgcttccagcagctgcgcggacagtttttttggtcacagccacactccactgccgtgtgcgcagccttttgttcttgtgaccagtcgttgtgtctcccgcgcagcaaggaaactatttttttgtcacttccgtgcagcagtgtgagggatacagggcgcgcaaaacttttcttttgcgcagttctttttcttttgccgtccggtctcatctgcgcagacacttggttttgttttttttgcatggaatctctgtagtacactttttcagaatcctgcgtcagaaatttgaatttttggcatcttccctctgctgtttctggctctctgaccacactggtcagaaccagctgaactggcccatgggggcggttgaaccggtcctgaggaccagctcaactgcctatatatatttgacactccccttctcttctcccacttcattcactctcgccttagtcgcttcacaacctttagagcctctctttcacacacctcaaccggttcacagtttcaccaccttttcaatcatggtgcgtcgtcgcaacccttcagtgattgagtttagcagcaactcggacgagattcaggaggaatctcccgtcccctctcctccgcctcgtcgctccctctctaagagaggacgtggctctggtcggatggatggcgagggctcttccatgccctcgcagccgactcgcgggagacgccaaaaggttggcgcctctcgtcctcgtcgtagcacgtcttcctctgggtatgctccttgccaggaggaggatggggctttcgacgacttcgtcgaccttccggcgcctgatgctctctacctcatcggactgcacatgcatccgacgaacgtcagccgcggtccgcatgaatctcccgtcgacttcactctgaagggaatagacacccttcagcgcctgaggtt

SEQ ID NO: 4569 - DNA, 1164 bp, Zea mays
  Zm_smallRNAprecursor_58
gaatttttttcattatctggaattcaaccacacacactaatgtgtgttgcagcattagtgtgtattgcaactattttttttcctatttgtactgtgtgttttagtttgttgattagcaatttttggttatgagatctgtaccatgtgcttgtgccctcacgtttttttattcccatttttttagtggtttttataatggatcaagaacagaatgtcataggccagcaaggcgctgacactgtccgtcgctctcctcatgtacaaaacaagagaaaggaattagataaaaatgaattgaagaaaaggaggaagaggttaaggttgaaagtccccttgtctcctattcaagatgaagaaagtgatgatgaacaagacccagagtttgctcctgccggtgatggttctggcgacgtcaatgttgttattgttggtggcgatgagaataagggtaaaaataagacacgagctatacgatgctcacctgggaagttcataaagcttgtgaatgctctctccgatgaattgaaaggtgaagtagttgccaaggggtttggcggcctgctgagattcaagctgcacttattgtccagaaaattgctcagctggctgatgcggaagcttaactcagagacgatgaaattagagattggtggtggaaaagagattccaatcactgagcacaatgtttggtgtgttttgctgttaccaaacgttggccgtgacccgccccccatgtctgatgcagatgctcgtgccttgcgggacgagctgggagagaaaatttgtggcaactcttatagacgcagatctggtatcaatctatctgttatcactgatcggctgcagaagaggattctcactggggagctgggcctgagagcctttttcatggctgcatttcagtgtctgctattatccaacactgacactcgcatcaggattgatgatgtaaagtatactcaggacatccagaacatggccaacaagaactggtgcaaagcggtagttgacaggctcagcatagctgctcgtctttataaaaaggattttgcggagaaaggcatcaatgcacccatcagtggatgcgggatcttcgtagctgtaagctcaacgcacacattcaatttttgcccttgcaacttactcttccaattacacaagtag

SEQ ID NO: 4570 - DNA, 1060 bp, Zea mays
  Zm_smallRNAprecursor_59
atatttatcccttcctaatacacactgatacaccaatctaagatctcatcacctatttttatgggagctaattgggaaataaaccaatcaaaggataattgcgcaacggatgcgttggtgctgctggtaggtgatgctagtcataacaataccattattggtgttttactttttatttacctattaaaaatttttgatactgttcccacgcttttttctgacttgctaaaaaatgttcttcaggctcctcctatagagccactggatagtcaactgagcttagatgatctagacgttataaaagtgatcgggaaaggtagcagcgaaaatgtgcaattggtccgtcataaatttactggccagttttttgctctgaaggtatttctgacgcaatcattctttgatgctgcttatttatggttctttacagtcaagactttaaaacgatctctgcattgtactccctccattcttttttatttgtcgcggtttagttcaaaaataaactagcggacgacaaatattcgacaacggaggtagtactacctccggtctcgaatatttgtcgtccgctagtttatttttgaactaaacgcgacaaataaaaaagaacagagggagtatcttctttgtgtaatcttcctaactgttgtaaatggtcctccttcatcgtctgccactgtgtttgcaggttattcaactaaatattgacgagagtatacgcaaacagattgccaaggagttgaagataaacttatcaacacagtgccaatatgttgttgtgttctatcagtgtttctatttcaatggcgccatttctattgttttggaatacatggatggtggctcccttgcagattttctcgccctttcagatttgagaacaacaaggaggaaaattaagtggtatgtcgtttatgtttcggagtgttgttaggattagcttcgatatgaatttttgatgaaatgactcctgttccagttgatcctattccagttgaccgatgatggctcctgttctccggcaaggcaaccacaacatgagctcctcaagtgaagg

SEQ ID NO: 4571 - DNA, 1040 bp, Zea mays
  Zm_smallRNAprecursor_60
caaaagaaagagatgctgcgcgccctgcaggatgctgaccggataaaaaattcgcgcactgacgctagagcacaacggagaccaaaaaaatactgcatggcgccctgacccgctgcatgcctggctatgaccggacagaaaaaaaatctgcacgccaggccgccagcagagaggaagcgaccggtcaataaaaaaaattctgcgcgattgaaaaggctgcagctgacagacctgcgcggacaggcctgcgcggacagaccggtcagagaccggttcaaccggtccactatgtcggttcaaccggttttaaccaggatggtcctggtaaaatctggttaaaaacagctgagctggagttcagctctgaagttcagctggcctcctccagctgaactagaaagttcagctggtcaagccagttgagcccaaaaaaaaaatcttagcactaaaattcattcgaattttaacattttcaccaagtttttaaaagatcatcacaaagctttaaaactatcaatcaaaaatagtgaatcaaacaatttttgtgaccgttttcaagttaagttacgagaatccaagatatttaattcactcctaagaaagcaaaacctagtctcatcgaggggttttgtgaagatatcggctagttgattttcggtgctcacatgaaacaattcgatatctcctttggcttcgtggtctctcaagaaatggtgtctgatgtcaatatgtttagttctagagtgttgcacaggattgtttgcaagttttatggcactctcattgtcacacaaaagtggaattttgttgaactcacaaccaaaatctctaagggtttgcttcatccataacaactgtgcacaacatgcccagttgctatgtactcagcttctgaagtggaaagtgcaacacaattttgtttcttggaactccatgatactaaggatcgcccaaggaattggcaagtcccagtagtgctttttcgatctactttgcaaccggcataatctgaatcagaatagccaagtaaatcgaaaagg

SEQ ID NO: 4572 - DNA, 1056 bp, Zea mays
  Zm_smallRNAprecursor_61
agggcttaaaaaagggtacccaaaaacaaaagagagatcagtaagtgaaaaaaatgaaatataataaaacatatagcctctatgaccaaataagtgggcgtctgtggtggatagctaggggtacggaaatgagagatgtaaactaacacgcgtatgattggatcaagtaattaccattgtataagagtaagacgctggatgcccttaccatgcatatggtctctgtcttttttcaaattcatccttgcatggtttcaccgaattcattagtgacggcaactcggcaaacctgttatcgtcgtcacaaaaccgagttggttatctgtattgtccgcgctctatatttcactaggcaggcttttgacaagccaagcaacattttcataaaattaacactagaacatccatgcactactcaatgtaaattaaatttcgtctcagagattgactaccatatatagatagccaataagcacgaggcctgcgagcccggcacgaagcccgctgtttgggcccggtccgagcctgacataacccggttctatgcgggcccggcccggcccggcacgaataagcgggtcgggctcggacagaaaactatgcacggtgggctagctcgacacgacccgtttacctctaagccagttaaacccgctttttacactaaaacgtgcttaccgacctgcttttcggtccgatttttcgtgctaaacgggtcggcccgctgtggaacgagcccggacaggaaactgagcacgcgtgcttatacggcccggtccggtttcgtaaccgtgcctagcgggccgagcccaaaacggaccgggcttcaccgtaccctggctgggcggtccatttggccatctctactaccatgtatgtcgtcgatctgtactcctgtcttgtttgcgacagtttatgagggacgtgaaaaaggtctggcatcggtggtctcaccagatgagtttgcgcttagttagggttttaatctaacccttttttaaatttcgcaccagctgcacctgccagatcctgtccattcaaaaaacgaagacacta

SEQ ID NO: 4573 - DNA, 1153 bp, Zea mays
  Zm_smallRNAprecursor_62
tgaaaaaactattggcgggccttcaagacaaatgtttagaatttagcaacaaatgtattcaacgactgagaaaaattttccattcagtcggagctagcagtgagaaattcaccccgtcagctgaagatttagcaaagaccttcgaacatattgagggtgaaattgatgagcttgacgaagttatagccgggcacggtgacttctgcgcctgggtagcttctcggggcactgctgcagctttcctaaaggctggctgcgatcatggaaagattgtcaataggcccaatttcactttatcaccatcaattctagatgacattcctgatctcgcccgaagcatttccaatagatttgtaaagatgatatggacaaaaggcgggcgagaaaaggctggagacgaagctcgaagtcatcttgaaccagtaagaaatcataccttgtgcttacctcttccttcaagctcgatttttacttacaacaacttaattcatgtaggatgacgaagccgaagccgatggttaaaaagaatgacgccgaagctgaagtcccttgaagattaaataggagtagaatgtagacaaactcaagaaacttttgagataacttttgtaaatgtaactaaacttgtctttaatgaattctgttcataccttgtaatatgctcttatccttccattaatgtatgagaggtgctttgatgtggacgaaattatcttttttttgagccgaaggcgttgggactatgcttcgtcgccgaaggtcttgtaggaagaagcggctttcggctgaagctgtttgtttgagatggccgaaggttcctcttcatgaagcttcggtattacaaaccgacttaaagatagaatgaccttttagtccataaaggtctgagtcaatgttgtaaacttttatgaggggcataattgtaattcctcacaggctgtgtcctgtgcctataaatagtgaacagtattcctttactgttcacggattctagtaattgcaatcgcatcattcgggaaccaatctttgccaaggcagaggtataactgtattcaataattcaatatattaagtaaatataatatgattcgtttatgattcatttacctttgataccctttattttatgttattttatacaatctattaaaat

SEQ ID NO: 4574 - DNA, 1075 bp, Zea mays
  Zm_smallRNAprecursor_63
aagatgttgtgccatattgatacagttttgcaaggatcagggggagcacatttctaaatttagcccttatagaaaattcgatgtaatcctaatccaggagatcgaaatttgtcttgatgacatttgttgtattctttttctttggtgagtttttctgaagtttctcacataaggttttttaatgaggcaacaaagtgcaaatgcaatttgtgtcaccatgtactctttctccatattttcccactaggtttttgggagttttaaagaggcatgtgttggtcacggtattcgcccaaggggagagttaagtaaccctagttagggttatgtggctaaataccgactttgcccctgaggggtctcacatctctatataagaaacatgtacactctttcataatacagagaagagaaagaggccagaggcctaaccctatacactacaagaaactaataaatgttcgtgggttaatttaagaacgtgggtaccgacgttcttaattgagttatgttcgtgggttaatttaaaaacatgggtacccacgttcttatattaaattcgtgggctcgtgataaaaccgtcgaacttatcgtattaggaacgtgggtacccacgttcttaacttaaattcgtgggccacgtggacaccgtcgaacttaaccaaaaacctaaatctctcacaccccgcgcgtctgtcttcttttccctctgtctatcgcgcgcacccaccgctacctgcctcgccgccagcacgccgctacttgcccgccgccaccccgcgccccgccgccaccccgcgcccgcctggccgccccaccgcgcgcctgggcagggtggtaccgcgcggtgctcgccatcaagcgccactgcggcgagcacctcgacccgcagccgaggagcccatttctcggcatgcccaagtccttccacggtgtcaagccagagttctgggacgggatgcggtcccgcctcgccgccctccgacccaacgggtccatttcgcgctggttcctggccgacctacctaccgtgcttgtagtgggcgactcggtgttcatccatgattgttcagcc

SEQ ID NO: 4575 - DNA, 1153 bp, Zea mays
  Zm_smallRNAprecursor_64
tgaaaaaactactggcgggccttcaagaaaaatgtttggaatttagcaacaaatgtattcaacgactaagaaaaattttccactcagttggagctagcagtgagaaattcaccccgtcagctgaagatttaccaaagaccttcgaacatattgagggtgaaattgatgagcttgacgaagttatagccgggcacggtgacttctgcgcctgggtagcttctcggggcactgctgcagctttcctaaaagctggctgcgatcatggaaagattgtcaataggcccaatttcactttatcaccatcaattctagatgacattcctgatctcgcccgaagcatttccaatagattcgtaaagatgatatggacaaaaggcgggcgagaaaaggctggagacgaagctcggagtcatcttgaaccagtaagaaatcataccttgtgcttacctcttccttcaagctcgattttgacttacaacaacttaattcatgtaggatgacgaagccgaagccgatggttaaaaagaataacgccgaagctgaagtcccttgaagattaaataggagtagactgtagacagactcaagaaacttttgagataacttttgtaaatgtaactgaacttgtctttaatgaattttgttcataccttgtaatatgctcttatccttccattaatgtatgagaggtgctttgatgtggacgaaattatctttttgagccgaaggcgaaaaaacaccttcccttcttttcgtacacagcgaagcatagaaaacaacatttccctttcttccgaagctcttctttttgtacacgaagaagctcttcttttttttttctttttgccgaagcaaccacttatgctatgatgatgattatcctacatatgcctggatgaatgtttatgaatgcaaatgctatgatgtaatgtgatgtgcaaatgaatgtccaaacacatatccgaagccataatcacagccattatttccttagaaacaatcacacatcagctctgtattcccttaggaacgactttggagcttcttcgccttttactttcggcggaatcagcgttgacttttcgctgtaagctctgcattcccttaggaacgactttggagcttcttcgccttttactttcggcggaatcag

SEQ ID NO: 4576 - DNA, 1040 bp, Zea mays
  Zm_smallRNAprecursor_65
ttgtggcgtttttctccatgtgccgcaacatttctgctgatgtccatgaggtggcaaggcgtcagcgggagactgacgacaatcttcgtcgtcaagttttcactctaggtgtgccctttgcccctcgctcacctgacgtgcctctccatcctcctcccccggagatcaatgagtggcaccagcaggcctacggggtgccctttatgtcagcagacgatgaagaataagaagaagcctatgttgatgatcgcgagcagtttgccccgcctccctaccatggggatccgggtcaatcatcctctcaccctccacctccctacccgggtccgggacccattcctggtgaccctaggccatccggctctggttaccatcaccaccctccacctcctcctgatcatcgtacatcttcggcatctgttttttctgcggctgatgagccacctcgggacaccacatttgaggaggacgtgatgaggaccctcttccctgactacacttcataccctccatcatatcctccgtcatatcctcctcctggaggatattgattcatgtatctttgtctctctcttcgtttttggtacttgttgccaaaagggggagaaaatcctacttctagtttgtggttctttcggttttcttttggattatttttgttttggccacttgaaagggaaatgtgcccttgggccatttctaagtgttttggtgatttagtgtccaacacaagtgcctaagtgtcaaatggtggacaaagtacaaatcaagtataaaggtatgtttctcagacttagtacattgttttagagactaatgtattgtgtctaagtgctggaaacaggagaaatcgaattggagaagagatggccttgttcagccaaagccagttctgtctgagtgcactggactgtccggtggtgcaccagacagtgtccggtgcgccagactggctcaggcgaacttgctgctctcgggaagaaattaacgacgtacggctaaaattcaccggactgtccggtgagccaacggtcggccgg

SEQ ID NO: 4577 - DNA, 1069 bp, Zea mays
  Zm_smallRNAprecursor_66
gagcttatgagtcttctcgattgttattcaggctatcatcaaatttggatgaagaaggaggatgagccaaagaccagtttcataacccctagtggaacatattgttatctttggatgcctgagaggctcaagaacgctggaggaagtttcagcagaatgactgcgaaggttcttcaatctcagataggcagaaatgtgctaacttatgttgatgatatcattgtaaaaagcacgaagcaggaaaatcacattgctaatttacaggagaccttcgccagttttaggcaagctggcctaaagttgaatccagaaaaatgtgtcttcggagtcaagaaggggaaatttcttggatgcttggtttcaacaaagggaattgaagctaatccaagtaaaattgaagctatacttcgaatggagccaccaactacaaaaaagggggcccaaagattgacagggaggctggcatctcttaatagatttatatccagatcagcagaaagaaatctaccattcttcgaagtactgaaatcagtcgaagtctttcagtggggactaagccaacaaaaagccttcgaggacctgaagcaatatttgatagatttaacaacattaactccaccaacgccaggggctccgttgttattatatgtggcagcttcgcactcagcggtaagtgcagcacttgtccaggagaagcttgacggccaagtcaaggagcaggtcccagtgtattttgtatttgaagttcttagtatatcaaaaaaaactatacagaattagagaaggtgttatatgctgttttgatggcatccaggaagcttcggcattactttcaagcatacaatgttattgttccttcttcgcagccgttgaaggatattatgggaaatagagaagctactgggcggattggaaaatgggctgcagagctcaatgaattttgcattgattatgtgcatagatcttcgatccagtcccaagcgttggcagattttatcgccaattggacgccaggggctcaagatgaagaaacaaataaagatgccgaagtatggacagtgttttgcga

SEQ ID NO: 4578 - DNA, 1114 bp, Zea mays
  Zm_smallRNAprecursor_67
acaatgtgtccaagatgtaaaggcgaggcgaagatttacggcgacggccagtcccaatcacatcccctgtgagtcgatcctgtacaaaacaagatgagtcatcaaatccaacaaagcaattgtgatcggtaatttgaccaactgataaaagatccatggataattcaggtacaaagaaaatatttgggacagtaaagtttgaattggaaagagaacccttgtgggtgacatgacataatgtaccatcagcagtctgaacagaagtaccctcggtgacaggtgcagtagaagccagggcgtgactgatcagatgtcacatgaatgaagctccagagtcaagaacccaagtagatgacaaaagcaccagcagatgaagtagcagcaacagcaactgagcctctaggagatggtcctgtaccacgaccacgagtagcacgacggacatgaaaatcagccagcttctctggatacttagtaaagcagttctcagaccgatgagtggtcttcttacaatgctcacaaggcggaaaggaggtgctcctggacttctgagcagtagccaatacactgtgtgaactgacaccagtaatagaagacatggacttaaggcgagtctcttcagcaagtaattcagacaacgcctgagccatggtgagagtatcagaagtgtgtagtaaccttgcacgaagagaatcaaattcaggtcgaacgcccataacaaatctgtaggtaaagaacttctcaatgaacttatgggctgggcaaggcacagctgtacaaggctacaagcaggcaccatggaggtcaaagcactcataagacgatcaaaagctgaatagtaatcatcaatggacatatcttgttgctcaatgacatgagtttgctgcataagagtatgtaaaagagccccactgtcctgaacaaaccgatccttcagatgagaccagatagccctagcagtggtgaatttggacagactcataatcatagttggtttagtactattgaccattgcagccattactttgccatcattgatttgccaagtcttgattgcagctgcgttgcttctatcagctgctaaaactggtgaatcttcagttaaatggaatag

SEQ ID NO: 4579 - DNA, 1133 bp, Zea mays
  Zm_smallRNAprecursor_68
tcgagttttctggtgccggtcttgctactgagctcagaggacttggaatttcctcttgagatggcctttctcttcttcctttgccctttctacttgtatggctttgctggagaggtgcgagaaactgaggaagtcttggctggctaggatggtcttgagttctggtctgagccccttcaggaagcggggcatcttattgacttcggtgctgacgtcatccggcgcgtagcgggccaactctgtgaatttgtgcacgtactcactgacagatcttccgtcttgagtcagttcccggaattcatcttccttgagctgaacgatcccttggggcacatggtgctcccggaaagccgtttcaaactctgcccaggtagcatctctgatggtaacattgaaggtatcccaccaggctaaggccattccggaaagttgatgagcagccaattgaacacgctgattttctgggcatccgattgcttctagtttcctcttaatcatgtgcagccaatcgtcagcatcgaggggattgctagatccggcaaacatgggaagcttgagcctcaggaaatctcccatcctgtcttgtggtcttccaccattcgggcgttgattttccagacttcgagtgaggacctcgatgagtcgggtttggttggctagaacttgggctaaatctaggggtagttctggaggtgcggggaggtgggtctcacttccttctctaccggcttctcttttagctcttaggggaaaccctgctccaatcccggaggcggtaggcatggttttatccgaagccatctgccatgggaagagagtcactattatgcacatgccattttttcaaccaagttattttattcattacaccaatacattacaagcgtacagctactacaagtcgtactatacgtgagcgttccctgaggtacttcagaactctttttctaaagtgtccctaaattccttgagaaggtcatcaaggctagctagggacatatcctcgacgtcggacaaattttctatcctggcaggaggtggtgctagaggagctttcttcttttgcccagcctggcctcctggtttcttggtcttcttttggattttcttcgtgggggcaagcttctttagct

SEQ ID NO: 4580 - DNA, 1153 bp, Zea mays
  Zm_smallRNAprecursor_69
tgaaaaaactattggcgggccttcaagacaaatgtttagaatttagcaacaaatgtattcaacgactgagaaaaattttccattcagtcagagctagcagtgagaaattcaccccgtcagctgaagatttagcaaagaccttcgaacatattgagggtgaaattgatgagcttgacgaagttatagccgggcacggtgacttctgcgcctgggtagcttctcggggcactgctgcagctttcctaaaagctggctgcgatcatggaaagattgttaataggcccaatttcactttatcaccatcaattctagatgacattcctgatctcgcccgaagcatttccaatagatttgtaaagatgatatggacaaaaggcgggcgagaaaaggctggagacgaagctcgaagtcatcttgaaccagtaagaaatcataccttgtgcttacctcttccttcaagctcgatttttacttacaacaacttaattcatgtaggatgacgaagccgaagccgatggttaaaaagaatgacgccgaagctgaagtcccttgaagattaaataggagtagactgtagacagactcaagaaacttttgagataacttttgtaaatgtaactaaacttgtctttaatgaattctgttcataccttgtaatatgctcttatccttccattaatgtatgagaggtgctttgatgtggacgaaattatcttttttgagccgaaggcaaaaaaacaccttcccttctttttgtacacagcgaagcatagaacataacatttccctttcttccgaagctcttcttttcgtacacgaagaagctcttctctcttttttttctttttgccgaagcaaccacttatgctatgatgatgattatcctacatatgcctggatgaatgtttatgaatgcaaatgctatgatgtaatttgatgtgcaaatgaatgtccaaacacatatccgaagccataatcacagccattatttccttagaaacaatcacatatcagtgctaacttttcgctgtaagctctgcattcccttaggaacgactttggagcttcttcgccttttactttcggcggaatcagcgttgacttttcgctgtaagctctgcattcccttaggaacgactttggagcttcttcg

SEQ ID NO: 4581 - DNA, 1142 bp, Zea mays
  Zm_smallRNAprecursor_70
caaaaggcatgcccatggaggaagcttgacgacgaagattgtcgtcagtctcccgctgacgccgtgccacctcatggacatcagcagaaatgttgcggcacatggagaaaaatgtcgcaagcccatggaccaagcgagcacccatcccgcggccacgaccacgaccacgaccacgagcacgtggcatgggagagccgcggccaggagagggacgcgaggcagcagcggggggagaggaggaaggatggtggggaggctggcgaggtggctcagaggaggaggcagggcctccagaccgtgagggaacccgcttcgtacgagcagctgggttggaggaatcaacccagtagggtacgtagcgggagtgtttgacgggtttttcgaagtgggtctgggtgaccacttcgatcatcttcatgataaagggtgcatgaagacaccctctgtgaggagaccaggaagcacggacgatctcctcccagatcatgtcaaacacattgatgcgggcgagactgtttggagcaaggaggaggaggaggactcgactctccccaaggacgttcatttgattaccgccctttgggagaacggtcatccgggacaaggaattaaggtacctgtagtacctatgcatgttagcggttgtccagaactcccgctcagtagagacatgaatgaattccgtctcttcccgcatgggcagccgaatgccatgcactcgcatgttgctgccctgaatgtctgcatcagagaagcccagaatatgggcaaaacgacgataactgactttgtgccagttaccctggatgaagaaatacatgactgggtaatcatacccatcggcttcctcatctactttctttatccagagggtggcatagaactgagctaccacctcatcgttccaggggtattccatggtcataatgttacgtaacccctttctctctaagtttacgagagctgacgacatgtcagcatctcccatattctcacaaccctcccagtcaataaatctatgtcggacgactgagtgtttcttggtaagaatgacagaattgtagaagtcagcctggaaaagattccagaaccgagggtcctggacaccaggatgacgaggagtgagagtagggttggtaaac

SEQ ID NO: 4582 - DNA, 1058 bp, Zea mays
  Zm_smallRNAprecursor_71
gcagaaatgttgcggcacatggagaaaaatgtcgcaagcccatggaccaagcgagcacccatcccgcggccacgaccacgaccacgaccacgagcacgtggcatgggagagccgcggccaggagagggacgcgaggcagcagcggggggagaggaggaaggatggtggggaggctggcgaggtggctcagaggaggaggcagggcctccagaccgtgagggaacccgcttcgtacgagcagctgggttggaggaatcaacccagtagggtacgtagcgggagtgtttgacgggtttttcgaagtgggtctgggtgaccacttcgatcatcttcatgataaagggtgcatgaagacaccctctgtgaggagaccaggaagcacggacgatctcctcccagatcatgtcaaacacattgatgcgggcgagactgtttggagcaaggaggaggaggaggactcgactctccccaaggacgttcatttgattaccgccctttgggagaacggtcatccgggacaaggaattaaggtacctgtagtacctatgcatgttagcggttgtccagaactcccgctcagtagagacatgaatgaattccgtctcttcccgcatgggcagccgaatgccatgcactcgcatgttgctgccctgaatgtctgcatcagagaagcccagaatatgggcaaaacgacgataactgactttgtgccagttaccctggatgaagaaatacatgactgggtaatcatacccatcggcttcctcatctactttctttatccagagggtggcatagaactgagctaccacctcatcgttccaggggtattccatggtcataatgttacgtaacccctttctctctaagtttacgagagctgacgacatgtcagcatctcccatattctcacaaccctcccagtcaataaatctatgtcggacgactgagtgtttcttggtaagaatgacagaattgtagaagtcagcctggaaaagattccagaaccgagggtcctggacaccaggatgacgaggagtgagagtagggttggtaaa

SEQ ID NO: 4583 - DNA, 1057 bp, Zea mays
  Zm_smallRNAprecursor_72
cagaaatgttgcggcacatggagaaaaatgtcgcaagcccatggaccaagcgagcacccatcccgcggccacgaccacgaccacgaccacgagcacgtggcatgggagagccgcggccaggagagggacgcgaggcagcagcggggggagaggaggaaggatggtggggaggctggcgaggtggctcagaggaggaggcagggcctccagaccgtgagggaacccgcttcgtacgagcagctgggttggaggaatcaacccagtagggtacgtagcgggagtgtttgacgggtttttcgaagtgggtctgggtgaccacttcgatcatcttcatgataaagggtgcatgaagacaccctctgtgaggagaccaggaagcacggacgatctcctcccagatcatgtcaaacacattgatgcgggcgagactgtttggagcaaggaggaggaggaggactcgactctccccaaggacgttcatttgattaccgccctttgggagaacggtcatccgggacaaggaattaaggtacctgtagtacctatgcatgttagcggttgtccagaactcccgctcagtagagacatgaatgaattccgtctcttcccgcatgggcagccgaatgccatgcactcgcatgttgctgccctgaatgtctgcatcagagaagcccagaatatgggcaaaacgacgataactgactttgtgccagttaccctggatgaagaaatacatgactgggtaatcatacccatcggcttcctcatctactttctttatccagagggtggcatagaactgagctaccacctcatcgttccaggggtattccatggtcataatgttacgtaacccctttctctctaagtttacgagagctgacgacatgtcagcatctcccatattctcacaaccctcccagtcaataaatctatgtcggacgactgagtgtttcttggtaagaatgacagaattgtagaagtcagcctggaaaagattccagaaccgagggtcctggacaccaggatgacgaggagtgagagtagggttggtaaa

SEQ ID NO: 4584 - DNA, 1058 bp, Zea mays
  Zm_smallRNAprecursor_73
cagaaatgttgcggcacatggagaaaaatgtcgcaagcccatggaccaagcgagcacccatcccgcggccacgaccacgaccacgaccacgagcacgtggcatgggagagccgcggccaggagagggacgcgaggcagcagcggggggagaggaggaaggatggtggggaggctggcgaggtggctcagaggaggaggcagggcctccagaccgtgagggaacccgcttcgtacgagcagctgggttggaggaatcaacccagtagggtacgtagcgggagtgtttgacgggtttttcgaagtgggtctgggtgaccacttcgatcatcttcatgataaagggtgcatgaagacaccctctgtgaggagaccaggaagcacggacgatctcctcccagatcatgtcaaacacattgatgcgggcgagactgtttggagcaaggaggaggaggaggactcgactctccccaaggacgttcatttgattaccgccctttgggagaacggtcatccgggacaaggaattaaggtacctgtagtacctatgcatgttagcggttgtccagaactcccgctcagtagagacatgaatgaattccgtctcttcccgcatgggcagccgaatgccatgcactcgcatgttgctgccctgaatgtctgcatcagagaagcccagaatatgggcaaaacgacgataactgactttgtgccagttaccctggatgaagaaatacatgactgggtaatcatacccatcggcttcctcatctactttctttatccagagggtggcatagaactgagctaccacctcatcgttccaggggtattccatggtcataatgttacgtaacccctttctctctaagtttacgagagctgacgacatgtcagcatctcccatattctcacaaccctcccagtcaataaatctatgtcggacgactgagtgtttcttggtaagaatgacagaattgtagaagtcagcctggaaaagattccagaaccgagggtcctggacaccaggatgacgaggagtgagagtagggttggtaaac

SEQ ID NO: 4585 - DNA, 1171 bp, Zea mays
  Zm_smallRNAprecursor_74
cgcatgggcagccgaatgccatgcactcgcatgttgctgccctgaatgtctgcatcagagaagcccagaatatgggcaaaacgacgataactgactttgtgccagttaccctggatgaagaaatacatgactgggtaatcatacccatcggcttcctcatctactttctttatccagagggtggcatagaactgagctaccacctcatcgttccaggggtattccatggtcataatgttacgtaacccctttctctctaagtttacgagagctgacgacatgtcagcatctcccatattctcacaaccctcccagtcaataaatctatgtcggacgactgagtgtttcttggtaagaatgacagaattgtagaagtcagcctggaaaagattccagaaccgagggtcctggacaccaggatgacgaggagtgagagtagggttggtaaacctcagacgctgaagggtttctattcccttctgagtgaagtcgacgggagattcatgcggaccgcggctgacgttcgccggatgcatgtgcagtccggtgacgtagtgagcatcaggcgccggaaggtcgacgaagtcgtcgaaagccccatcctcctcttggcagggagcataccctgaggaagacgtgctacgacgaggacgagaggcgccaaccttttggcgtctcccgcgagtcggctgcgagggcatggaagagccctcgctagccatccgaccagagccacgtcctctcttagagagggagcgacgaggcggaggagaggggacgggagattcctcctgaatctcgtcggagtcgctgctaaactcgaccacagaggggttgcgacgacgcaccatgatttgaaaaggtggtgaaactgtgaagcggatgaagtgtgtgaaggagaggctctaaaggttgtgaagcgaccaaggcgagagtgaatgaagtgggagaagagaaggggagagtgaagtatatataggcagttgagctggtcctcaggaccagttcaaccgcccccatgggccagttcagctggttctgaccagtgtggtcagagaaccagtaacaacagagggaagaaagaaaaaattcaaatttgcgcacagctgctggaagtgactggacaggaaaaaaatgggcgcccctgacacgcatgcacggctagtgcgcg

SEQ ID NO: 4586 - DNA, 1040 bp, Zea mays
  Zm_smallRNAprecursor_75
agacgctgctgtctgcagagcggcagcaaaaaaaaatttgcgcgccagggaagtgaccggacgcagagcggcagcaagcagaaaaaaaatatttctgcgcgcagtgacaggacagagcaaaataaaaaatctgcaggaggaagggaccggtcaagaaaaagtgctgcgagaaaaaaaaaggcaggtgacagacctgcgaccggtcaaaaaggtgctgcgcgactgaaaaaattgcaggtgacagacctgcgcggacaggccggtcagagaccggttcaaccggtccaccaaggcggttcaaccgcttttaaccaggatggtcctggtaaaaacaggttaaaaacagctgagctgaagttcagctgctaagttcagctggcctcctccagctgaactagaaagttcagctggtcaagccagttgagccccaaaagaaatcttagcactaaaatgcattcaaattttaacaatttcaccaagtttttgaaagatcatcacatagctttaaaactatcaatcaaaaacagtgaatcaaccaatttttgtgaccgttttcaagttaagttacgagaatccaagatatttaattcactcctaagaaagcaaaacctagtctcatcgaggggttttgtgaagatatcggctagttgattttcggtgctcacatgaaacaattcgatatctcctttggcttcgtggtctctcaagaaatgatgtctgatgtcaatatgtttagttctagagtgttgcacagggttgtttgcaagttttatggcactctcattgtcacacaaaagtggaattttgttaaactcacaaccaaaatctcgaagggtttgcttcatccataacaactgtgcacaacatgccccagctgctatgtactcagcttctgcagtggaaagtgcaacacaattttgtttcttggaactccatgatactaaggatcgcccaaggaattggcaagtcccagtagtactttttcgatctactttgcaaccggcataatctgagtcagaatagccaagtaaatcgaaaag

SEQ ID NO: 4587 - DNA, 1062 bp, Zea mays
  Zm_smallRNAprecursor_76
agttctgacaaatgatgattcagacgagattcggtgtttttgaactattaaaggcttggcttccatttgggttgtagatgtaaccaaccccctattaaggatagcgtagaaagaaataatagaaaaagagctccaatataaagatcttcattggtgcgcaatccaattgtataccaccactaataaaccccagaataagcgatattcacttgaccgcagcacctcctcgagtaaatgcttccgcagcgggttgcccaaaatgaggaccccaaatggcatgagcaataggtcttacgtgtaaaggatcatgtatccatgattcaaaatttccttgccaagctacatgaaacagattttcggacgtccatagaaagattattgctgactgcccaaagtgagaagcaaaaatgttctgataatgacgttcctgagtaatatcatcatgaatttcgaaatcatgtgcggtagaaataccaaaccaaatacgacgagtagtggggtcctgagctaagccttggctaaacctaggaaatcttaattcattaatgcctttccaatcctcctagccactatcctactgcaataattctcgctaagaagaatgcccatgttgtgtcaattccacccaaaaggtaatgggttactcctatagcacgtccttgtataatgctcaaggctctaggctgagtagaaggagcaacttttaatttgttatgagcccaagtgatagattcaatgagttcttgctaataaccatgaccgctaaagaaaaaaaaattaaactgaaagcccaaacaaaatgagcgactaagaaaaaaagaccatatgcagataatgaagaaccataagactgaattacttgggatgcatgtgcccacaagaaatctcgaagccagccattaatcgtaatggaactctgtgcaaagtttccccctgtgatatgagttactatcccttgatcacttatagtaccccaaaaatccgactgcattttccaacaaaaatggaaaatgactaccgaaatagaattgtacatccattatagacctaagagaacatgat

SEQ ID NO: 4588 - DNA, 1171 bp, Zea mays
  Zm_smallRNAprecursor_77
cgcatgggcagccgaatgttatgcactcgcatgttgctgccctgaatatctgcatcagagaagcccagaatataggcaaaacgacgataactgactttgtgccagttaccctggatgaagaaatacatgactaggtaatcatacccatcagcttcctcatctactttctttatccagagggtggcatagaactgagctaccacctcgtcgttccaggggtattccatggtcataatgtttcgtaacccctttctctctaagtttatgagagctaacgtcatgtcagcatctcccatattctcacaaccctcccagtcaataaacctatgtctgacgactgggtgtttcttggaaagaatgacaaaattgtagaagtcagcctggaaaagattccagaaccgagggtcctggacaccaggatgacgaggagtgagagtagggttggtgaacctcaggcactgaagggtgtctattcccttcagagtgaagtcgacgggaggttcatgcggaccgcggctgacgttcgccggatgcatgtgcagtccggtgacgtagagagcatcaggcgccggaaggttgacgaagtcgtcgaaagccccatcctcctcctggcagggagcatacccagaggaagacgtgctacgacgaggacgagaggcgccaaccttgtggcgtctcccgcgagtcggctgcgagggcatggaagagccctcaccatccatccgaccagagccacgtcctctcttagagagggagcgacgaggcggaggagaggggacgggagattcctcctgaatctcgtcggagtcgctgctaaactcaatcactaaaggattgcgacgacgcaccatgattgaaaaagtggtgaaacggtgaactggttgaggtgtgtgaaagagaggctctaaatgttgtgaagcgactaaggcgagagtggatgaagtgggagaagagaaggggagtgtcaaatatatataggcagttgagctggtcctcaggaccggttcaaccgcccccatgggccagttcaactggttctgaccagtgtggtcagagagccagaaacagcagagggaatacgccaaaaattcaaatttctgacgcaggattctgaaaaagtgtactgcagagattccatgcgcccaacaaaaatcaaaaccaagtgtctgcg

SEQ ID NO: 4589 - DNA, 1040 bp, Zea mays
  Zm_smallRNAprecursor_78
cagcaggatgcgaccggacagcgaccaaataaaagattctggcgcgcgggctgacaatgctgtgcagaagcgtccaaaaaaaattctgcgtgcgcccagcagaggagaagtgaccggacagagaaagagaaaagaaaaaaaatctgcacgccaggccgccaacagagaggaagcgaccggtcaataaagaaaaagatgttgcgcgaccaaaaaaaaggtgcagctgacagacctgcgcggacgggcctgcgcggacagaccggtcagagaccggttcaaccggtccactatgccggttcaaccggttttaaccaggatggtcctggtaaaaactggttaaaaacagctgagctgaagttcagctccgaagttcagctagcctcctccagctgaactagaaagttcagctggtcaagctagttgagccccaaaaaaaatcttagcactaaaatgcattcgaattttaacattttcaccaagtttttgaaagatcatcacatagctttaaaactatcaatcaaaaatagtgaatcaaacaatttttgtgaccgttttcaagttaagttacgagaatccaagatatttaattcactcctaagaaagcaaaacctagtctcatcgaggggttttgtgaagatatcggctagttgatttttggtgctcacatgaaacaattcgatatctcctttggcttcgtggtctctcaagaaatggtgtctgatgtcaatatgtttagttctagagtgttgcacagggttgtttgcaagttttatggcactctcattgtcacacaaaagtggaatttggttaaactcaaccaaaatctctaaggatttgcttcatctataacaactgtgcacaacatgcccccagctgctatgtactcagcttctgcagtggaaagtgcaacacaattttgtttcttggaactccatgatactaaggatcgcccaaggaattggcaagtcccagtagtgctttttcgatctactttgcaaccggcataatctgagtcagaatagccaagtaaatcgaaaagg

SEQ ID NO: 4590 - DNA, 1040 bp, Zea mays
  Zm_smallRNAprecursor_79
tttgcgacgtttttctccatgtgccgcaacatttctgctgatgtccatgaggtggcaaggcgtcagcgggagactgacgacaatcttcgtcgtcaagcttccactctgggtgtgccctttgcccctcgctcgcctgacgtgcctctccatcctcctccccggagatcaatgagtggcaccagcaggcctacggggtgccctttatttcagcagacaaagaagaagaagaagaagcctatgttgatgatcgcgagcagtttgccccgcctacctaccatggggatccgggtcaatcatcctctcaccccctgcctccctacccgggtccgggacccattcctggtgaccctaggccatccggctctggttaccatcaccaccctccacctcctcctgatcatcgtacatcttcggcatctgttttttctgcggctgatgagccacctcgggactccacatttgaggaggacgtgatgaggaccctcttccctgactacacttcataccctccatcatatcctccgtcatatcctcctcctggaggatattgattcatgtatccttgtctctctcttcgtttttggtacttgttgccaaaaaggggagaaaatccaacttctagtttgtggttctttcggttttcttttggattatttttgttttggccactgttgtggcttgtatcatcttaccattgtatgaaataaaactattgggttgttattcaaagtaatatgatggtcttctggccatcatcttttgtcctatcagtttgtaatgattactttgctatgaagtaaaaatgatgtgtatttagagatagtcatgtgcatcacaactcctgttatgacactcttgcacccctcgaatggttgtatttagtatggtttttgtcactatctctaaatgtgttgctcacatgacatattatgtcaaaacgttggattcacaatcgtgcacacatttagggggagccatctacatacaatcattcaaaagaaattttctattgcaaatgtatatctttttgaccttaattg

SEQ ID NO: 4591 - DNA, 1163 bp, Zea mays
  Zm_smallRNAprecursor_80
gcaagtctgtcgtcggcggtttagctagcgagaggagagagctagcgcgcggccgggttggtcgcggtcggtgcagtggtgaatggaaatggaaatggaggcagggccactctcgctactccgtaagcacgcacgcaccactggcagcagtgggaaggcgaaggacccagcggagaagagcttctccggcaactggacagcactaccaccgtcgtcgagcagctagctagcttctagcgatgacagcttccgcgtacgctgtctgggaattggatcccgtttcagtccatatctgtctgtccagtgttcgttcagacgagcgttttttttttcctgttcgcggcagcacacactgcactgcgggcgtggccaacttttttacattttagtcctttttaagtttttttttcacaattatgttctttacagtttcatttcaaaaaatgaatctcaacctcggcactatcatcaaggtaacgcataacgacgccaatatcgttggcgccaacttttcctacgtggtgatagtcgatatgacaagtcccatgcggtcggcgccatagatcttggcgcccccccctcgacggcgagttctggtgctgtccaggagggtcggcgccaagatctatgacgctgactccctgggacttgccacatcgcttgccacgtaggaaaagttggcgccaattatgtcggcgtcactattcgttaccttgatgtcaatgatgatggtgccgaggttaagatctattttttaaagggaaatttggatccataccattaaaagatcaccactttagatccataccattactatctcacttacacgtgggtccacatgagtcaatgacatgtggggtccatgatatatatctaaagtttggatcttttaatgttatagatccaattgttccctttttaaaataaaactgcaaaagacataattatgaaaaaaaccctaaaaggactaaaatgcaaaaaaaaagttggcggacgcggcggcggtctaggtggctgctaatcatggtgtgctcagcgtgtgcatgacggtacgtagtgttcagacgagcgttgtttcgtcgacgagctcagaccatcatcatcgtgtgcgttacgacactaagcataaggacgaatttgtacggtggaaaataagacatctc

SEQ ID NO: 4592 - DNA, 1048 bp, Zea mays
  Zm_smallRNAprecursor_81
cgtggttacaagaaacaaagcacggttggttgcccaaggctacactcaagtggaaggacttgattttggtgaaacatatgcaccggtagcaaggttagagtcaattagaatattaattgcctatgctactaaccatgatttcaagttatatcaaatggatgtcaagagcgcattcctaaatggaccactacaagagagggtctatgtggagcaaccaccgggctttgaagatccaaagaagccaaaccatgtttacctacttcacaaggcactctagggcttaaacaagcccctagagcttggtatgattgccttaaagatttcttgcttaaaaatggttttgaaataggaaaagtagactctactttattcactcgcaaaattgacaatcaattatttgtgtgtcaaatatatgtcgacgacattatatttggcagtactgatgaaactttttgtgaggaatttagtagggttatgacaaataggtttgagatgtccatgatgggtgagctcaagtacttcctgggttttcaagttaaacaactcaaggaaggaacctttctgtgccaaacctagtacacacaagacatgctcaaaaagttttgcatggaaaaggcaaagcacgccaagacaccaatggcttcaagtggtcatctcgacttaaatgaagaaggtaaaactgtagatcaaaagctttatagatcaatgataggatctctactatatttatgtgcatctaggccagatatcatgcttagtgtgtgcatgtgtgctcattttcaagcaaacccaaaagagtgtcacctagtggccgttaagagaattttgagatatctagttcacacccaaaatctaggtctctggtatcccaagggctcctttttcgatttatttggctactctgattcagactatgccggttgtaaagtagatcgaaaaagcactcggtgacttgccaattccttgggcggtccctggagtcttggagctctaagaagcaaaactgtgttgcactttccactgccgaggctgaatacatagctgctgg

SEQ ID NO: 4593 - DNA, 1164 bp, Zea mays
  Zm_smallRNAprecursor_82
ctttttttcattatctggaattcaaccacacacactaatctgtgttgcaacattagtgtgtattgcaactattttttgttcctatttgtactgtgtgttttagtttgttgattagcaatttttggttatgagatctgtaccatgtgcttgtgccctcacgtttttttcattcccattttttcagtggtttttataatggatcaagaacagaatgtcacaggccagcaaggcgctgacactgtccatcgctctcctcgtgtacaaaacaagagaaaggaattagataaaaatgaattgaaggaaaggaggaagaggttaaggttgaaagtccccttgtctcctattcaagatgaagaaagtgatgatgaacaagacccagagtttgctcctgccggcgatggttctggcgacgacaatgttgttattgttggtgacgatgagaataagggtaaaactaagacgcgagctatacgatgctcaattgggaagttcataaagcttgtgaatgctctctccgatgaattgaaaggtgaagtagttgccaaggggtttggcggcttgctgagattcaagccgcacttattgtctagaaaattgctcagctggctgatgcggaatcttaacccagagacgatgaaattagagattggtggtggaaaagagattccaatcactgagcacagtgtttggtgtgttttgcagttaccaaacgttggccgtgacccgccccccatgtctgatgcagatgctcgtgccttgcgggacgagctgggagagcaaatttgtggcaactcttatagacgcagatctggtatcaatctatatgttatcactgatcgactgcagaagaggattctcactggggagctgagcctttttcatggctgcatttcagtgtctgctattctccaacactgacactcgcatcaggattgatgatgtaaagtatactcaggacatctagaacatggccaacaagaactggtggaaagcggtagttgacaggctcagcatagcttctcgtctttataaaaaggattttgcggagaaaggcatcaacgcacccattagtggatgcgggatcttcgtagctgtaagctcaacacacacatccattttttgcccttgcaacttactcttccaattacacaagtagtaattgtt

SEQ ID NO: 4594 - DNA, 1057 bp, Zea mays
  Zm_smallRNAprecursor_83
gccgttcaaataatatatcgacggcagcatggtcgttttgaaatataacagctcagctatcttagcaaaacaatcatgatataaaatgtaaacgtctgattttccatgtagcgcatatgcttcacagatctcttaattaaactgtgtgctcagttttcgttcgtaacgtctaacaatgttcaaatgaccctaaatagttttatgcggttaagtgggtgtttgaatgcgctacagctatagctaataatttagatattagctatttttaataaattagttaatagttagctaactatttgttagtcagctaattctactagcaattttttagctaactagttattagcgctagtacatttaaacacaaaaaacgctagcctaactgcacgtagctcatctatgagaaaatctcttcaatgccatccaaacttatactaatcccttcaatgccatcagattttatagcttccctttaatgccatcaaatttaaattctaatcccttaaatgccattgccgttagtttcaagttaacgccgttagttctatttaaagcaaatctcttcaatgccatcaaaatctatatcaatcccttcaatgccactagaaattggtttaatctatttagattttaaatattctagaataaaaaaatatggaccaattccacactttttaaaaactttagtacatatttttttgtaaacaccaaaaattactccgctatatctgttcggtctatttgattcctaatatttttttcaaactaacaacaaacactaatgataacagatggagataaattttaaaatcaatgtggtatatttgcgtttcaaaacttttgggttcaaaaaattttctattctgaaaattttaaaaccaaatagatcgaaccaatttctagtggcattgaagggatcagtatagattttgatggcattggagggatttgctttaaatataaaaaacggcgttaacttgaaactaacggcaatggtatttaagggattagaatttaaatttgatggcattgaagggaagctataaaatctgatggc

SEQ ID NO: 4595 - DNA, 1160 bp, Zea mays
  Zm_smallRNAprecursor_84
caacaagaatgctgagggaatttattccttttttctgccgcttccttactcttttcattattctgcaccaccagtcagcaaagctacgttcattttgctgaggcactgaatctgtgagctgcagcaagtttagcaagataaaccatacttgtcttaccgtcagacaagatattagaagatgttgtgctgtttcctcttcttgatcacatagtggacatttgtccggatgatcgggccctctcttagcgagtctgtcacctgtccagcatctgttttttcatagccaaccatagaaacattttgcatttagaaggtgcccaaatcttacagagttggtgtcaaggctcctctccccatatacatgaaatttaatcttccatggaagtcatattgtttttgttcttgtttgaaaattcattttacattgaaaaatattagtgttattacaattaatggtagcaataaacacaacaacaaccaagtgtgtcagtcccaagaaagttggagtaggctagagttgaaacacaacaaacacccgcagtcaaggttctggcacatcgatagccgttttccaagcactcttattcagacacagatctctaggtatatctcattctttcacatctctttttattgcttcccctcatgtcaacttcggtgttcctctgcctcaactcacattattatcttgacttagaactccacaatggtagcaataaccatattgaggattaaattgtgtgcttctcacttcagggttcttacttgttcctgaaacaagtacctcgtgagcatctacctcattcatgaagccaaattctaaagggattacaccacatgatgacggattatattcagactgcaggctgacacaattgtgttcaggacccgatgcagctcttttggtatgcttagcataaaccataaaatggaccttgctttgttacaattttttttactggtttgcgaaatcaaatatatctgtaattgcaatgactttgtgtctcattttgtactatgttacccttcacatttgatttataataggtcttccttttttatatttctatatctaccggtaatatctgaatgctttatacatactattaatacatgaaatcttatctttcttgtaagtaatgttgcgttttgtttaaaaa

SEQ ID NO: 4596 - DNA, 1146 bp, Zea mays
  Zm_smallRNAprecursor_85
gaatgctgagggaatttattccttttttctgccgcttccttactcttttcattattctgcaccaccagtcagcaaagctacgttcattttgctgaggcactgaatctgtgagctgcagcaagtttagcaagataaaccatacttgtcttaccgtcagacaagatattagaagatgttgtgctgtttcctcttcttgatcacatagtggacatttgtccggatgatcgggccctctcttagcgagtctgtcacctgtccagcatctgttttttcatagccaaccatagaaacattttgcatttagaaggtgcccaaatcttacagagttggtgtcaaggctcctctccccatatacatgaaatttaatcttccatggaagtcatattgtttttgttcttgtttgaaaattcattttacattgaaaaatattagtgttattacaattaatggtagcaataaacacaacaacaaccaagtgtgtcagtcccaagaaagttggagtaggctagagttgaaacacaacaaacacccgcagtcaaggttctggcacatcgatagccgttttccaagcactcttattcagacacagatctctaggtatatctcattctttcacatctctttttattgcttcccctcatgtcaacttcggtgttcctctgcctcaactcacattattatcttgacttagaactccacaatggtagcaataaccatattgaggattaaattgtgtgcttctcacttcagggttcttacttgttcctgaaacaagtacctcgtgagcatctacctcattcatgaagccaaattctaaagggattacaccacatgatgacggattatattcagactgcaggctgacacaattgtgttcaggacccgatgcagctcttttggtatgcttagcataaaccataaaatggaccttgctttgttacaattttttttactggtttgcgaaatcaaatatatctgtaattgcaatgactttgtgtctcattttgtactatgttacccttcacatttgatttataataggtcttccttttttatatttctatatctaccggtaatatctgaatgctttatacatactattaatacatgaaatcttatctttcttgtaagtaatgttgcgttttg

SEQ ID NO: 4597 - DNA, 1093 bp, Zea mays
  Zm_smallRNAprecursor_86
atattgaggattaaattgtgtgcttctcacttcagggttcttacttgttcctgaaacaagtacctcgtgagcatctacctcattcatgaagccaaattctaaagggattacaccacatgatgacggattatattcagactgcaggctgacacaattgtgttcaggacccgatgcagctcttttggtatgcttagcataaaccataaaatggaccttgctttgttacaattttttttactggtttgcgaaatcaaatatatctgtaattgcaatgactttgtgtctcattttgtactatgttacccttcacatttgatttataataggtcttccttttttatatttctatatctaccggtaatatctgaatgctttatacatactattaatacatgaaatcttatctttcttgtaagtaatgttgcgttttgtttaaaaagtgacatcttacattgaagaaaattagtgtacaatcagttgtggcaataagcaatgcatgttgtcctcattgttgtattatgcgaactgcgaagactgaaattgtgtttatttttcagagagatggttatggttctcactttattcctacagaagaggatacatcgcatgagaagtctgtgcctggtcctcaatttattcatgaaacatgagaaacatcatttgaggatttttttcaggtacctggcaatgagttctctgaagctaaaactatatttgttgatggtacttccttagagattgctgataccacaaagataggaagagttttttgactggatctattgcaagaaatgattttttctcataacacgggattaagttggaatggacagtttgacattagtacaatagttgtcattgatggggtccgtgctgaaatccgcgcaccctattgtgacaagttctctgaaaaggcaaaattcaatgactactccagttacattcacaatattattgagctatatagaataaaatgggttggtctgccggcattttttacccacttggcctataagttgtcagaacctccctgcagacctttattgtgtagcccacaacaacttgagggctaccgacgtcgacttcatggatt

SEQ ID NO: 4598 - DNA, 1115 bp, Zea mays
  Zm_smallRNAprecursor_87
gaataaagtagatgctctcgagatacttgtttcaggaacaaagtaagaaccctaaagtgagaagcacacaatttaatcatcaatatgtttattgctaccattgtggagttctaagtcaagataataatgtgaggagaggcagaggtagaccgaagttgatataaggggaagaaataaaaaaagatgtgaaagaacgggatatacctagagatctatgtctgaataggtgtgcttggaaaacggctattgatgtgcctcaaccgtgactgcgggtgcttgttgggtttcaactctagcctaccccaacttgcttgcgactgacacgcttggttgttgttgtttttattgctaccatcaattgtaataacgctaatattttttaatgcaaaatgaattttcaaataagaacaaagaaaacatgacttccatggaagataaaatttcatttatatggggagaggagccttgacaccaactctggaagactttggcaccttctaaatgcaaaatgttcctattgttggccatcaaaaaacagatgttggacagctgacacactcgctaagagagggcccgatcatccagacaaatgtccactatgtgatcaagaagaggaaacagcacaacatcttctaacatcttgtctggcggcaagacaagtatggttcatcttgttaaacctgttgcagctcataatttcagtgcctcagcaaaatgaacgcagctttgctgactggtggcgcagaataatgaaaagagtaaggaagcagcagaaaaaaggagcaaattccctcagcattcttgctgcttggtctatctggaagcatcgaaatgactatgttttgaaaggagtttctccttctattaacacaattcgagatgccataaaggatgatcttagtctttggggtttggccagggctaagaggttacgagagcttaatctcgtgcttacttcatcagcaagctaagtctctagattgtgtgtgtgtttttgtttcagttatggatctgctccaacttatgtgtaactgcctcactcatgttctggtcctcatatgagtgatgatcatgtaggggacccatctatttctctctaattttaatgaaacgca

SEQ ID NO: 4599 - DNA, 1040 bp, Zea mays
  Zm_smallRNAprecursor_88
ttgcggcgtttttctctatgtgccgcaacatttctgctgatgtacatgaggtggcaaggcgtcagcgggagactgacgacaatcttcgtcgtcaagcttccaccataggtatgccatttgcccctcgctcgcctgacgtgcctctccatcctcctccctcggagatcaatgagtggcaccagcaggcctacggggtgccatttatatcagcagacgacgacgaagaagaagaagcctatgttgatgatcgcgagcagtttgccccgccaccctaccatggggatctgggtcaatcatcctctcaccctccgcctccctacccgggtccgggacccattcctggtgaccctaggccatccggctctagttaccatcaccaccctccacctcctcctgatcatcgtacatcttcagcatctgttttttctacggctgatgagccacctcgggactccacattcgaggaggacgtgatgaggaccctcttccctgactacacttcataccctccatcatatcctccgtcctatcctcctcctggaggatattgattcatgtatccttgtctctctcttcgtttttggtacttgttgccaaaaagggggagaaaatccaacttctagtttgtggttctttcgtttttcttttggattatttttgttttggccactgttgtggcttgtatcctcttatcattgtatgaaataaaactgctgggttattattcaaagtgatatgatggtcttctggccatcatcttttgtcctatcagtttgaaatgattactttgctatgaagtaaaaatgatgtgtatttagagatagtcatgtgcatcacaactcctgttatgacactcttgcatccctcggatggttgtattcaatatggtttttgtcactatctctaaatgtgttgctcacatgacatattatgtcaaaacattggattcacaatcgtgcacacatttagggggagccatctacatactatcattcaaaagaaattttctattgcaaatgtatatctttttaaccttaatt

SEQ ID NO: 4600 - DNA, 1067 bp, Zea mays
  Zm_smallRNAprecursor_89
aagttcacttgataataatgattgtgtggctctaactcaagtaatgcaaatgatggttctatctcaagcatacttgatgattatggtgattgttcatgctcgtacaatgatatcgctactacaagcccaaccattgcatcacattgcttcatgtcacaaggtaatacgaaggtatataatgctaatgtgactaatcattcatattcatatgatgagcttgttggtatacttgcaagcatgaacattgctttagaaattgagaaagataaaacaagaaacttggaaaatgaaaactcatttctaaagtattcatgtgaacaacaaaagcatctactttatgttgttacttgttcacatgaggagctaaaattgagtcatgaggaacttagtgttgctcatgaaaatttgatacaagagcatgtttttctcactaacgagttttctagtaaagaaaataaaactagtgataattcatcccatgaattatatgatcaattgaaaaatgttgctaatccatgtgatgaagacaagaagcatgtatccacctcttgtgatgatttattagctatgccatgttcttcaagtatagattattactattcttccttgtcttgtgagactaaccttttgaaggaaaataataagctcaaaaacaaagtgaagaatttaagcaacatgtttgagagatggcataaatcaaaagtcactcatgatcttatattgaaaaatcaaagaagatatgatgacaagagtggccttggtttcaacaagagcaatatcaaaggcagacaattcaaattaaaaggaaatgagctatctcacttcatgtgctataaatgccatgagatgggtcatcttgcaaaggcatgccccaataaaaggaagctcaagttgaagaaggaagaaaggaggctaaagcatgacaagtgcttcaagtgccacacttggggtcacctcacctcaatgtgcccaaccaagaaattagttaagccacaagtgaagcctcaaccaaagccacgagttgagcaaaggaaggatccccaaaagcaaatcaagattaaccatga

SEQ ID NO: 4601 - DNA, 1042 bp, Zea mays
  Zm_smallRNAprecursor_90
tgaacattgctttagaaattgagaaagataaaacaagaaacttggaaaatgaaaactcatttctaaagtattcatgtgaacaacaaaagcatctactttatgttgttacttgttcacatgaggagctaaaattgagtcatgaggaacttagtgttgctcatgaaaatttgatacaagagcatgtttttctcactaacgagttttctagtaaagaaaataaaactagtgataattcatcccatgaattatatgatcaattgaaaaatgttgctaatccatgtgatgaagacaagaagcatgtatccacctcttgtgatgatttattagctatgccatgttcttcaagtatagattattactattcttccttgtcttgtgagactaaccttttgaaggaaaataataagctcaaaaacaaagtgaagaatttaagcaacatgtttgagagatggcataaatcaaaagtcactcatgatcttatattgaaaaatcaaagaagatatgatgacaagagtggccttggtttcaacaagagcaatatcaaaggcagacaattcaaattaaaaggaaatgagctatctcacttcatgtgctataaatgccatgagatgggtcatcttgcaaaggcatgccccaataaaaggaagctcaagttgaagaaggaagaaaggaggctaaagcatgacaagtgcttcaagtgccacacttggggtcacctcacctcaatgtgcccaaccaagaaattagttaagccacaagtgaagcctcaaccaaagccacgagttgagcaaaggaaggatccccaaaagcaaatcaagattaaccatgaatataatggtgatgtggggaagaaaaagaaaacaagaagaagacattcaatatataatcaagataacatgatgagcacaaatcaaaagaagaaggatggtttggctcaaatcaagtgctacatgtgtgatgatatgggtcactttgcctcaaggtgtcccgacaatcttgagaagaaggctcaagcaaatgagaagaggcaagacaatgtgaa

SEQ ID NO: 4602 - DNA, 1181 bp, Zea mays
  Zm_smallRNAprecursor_91
tttcatgtgcttgtgttatagggatttcagacaccacccgcttcagttgccgcacctggagatgggtctggtcaggacgacacaacaaattcgtgggtgaacaccattttcaacacgcagagtccagccggaggaggtggctactcgaaccatccagacgatggatatgattgatgtgtcgtgatgtttttttatgaaacacttttgcaacacttgttttgtgagacacaatttcagtttgcaacaaccgtcgaacctatatgttgattgttaccttttgtgaatgttaatatttatgtgagaatatttgtgattgtgaatacttattagaatgtgtatatttgtgattgtgaatgtgaatttgtatatgtgcatgaatctgtttttgttttgtaaatgtcagattttttaaaaaacagaattttgtgtaaattctgtaatttgttatgtccgacggcctaatggtagccgtcggacataacactttgttatgtccgacggtagttaatgccgtcggacataacacttgcttatctccgacggcctagtgggagccgtcggacttaattctgtggggcccacacccccgaccggtaaaacggttgggatttgttatctccgacgggcgtatgcagccgtcggagataacttatgtccgacggcagccgtcggacatagcactatttccgacgagttatctccgacggctttaagccgtcggagataaggctttaccgtcggaaataatctatttccgacggtttattccttatgtccgacggctttggccgtcggacgtttctgcgtttactgtagtgcgtttggcgttcaaataagcttagcaaataagtcagcaaagaaaaaaccatggagatatggttagtagtagtagagtcaaagatccggttctacactatatcaggaaagaaaatgccaaacagatatggttaaaaacagcaaataagtcaccaagctagggccattaagagtagtagtagagtcaaatacctgaaatgttaggtgatgtgttaggtgttgctgatgccttgttgatgaccttcagctgtcaaagttaggatctgtcagtaggtactcattaatcaaaaaagaaagatatcaaagtttcgtttattactttcttgtatggccatgcaagcgacatcatgtgagcagtagccata

SEQ ID NO: 4603 - DNA, 1089 bp, Zea mays
  Zm_smallRNAprecursor_92
gttctgtaaacatagcctgaggcgcgtagctaaagagcgttgtggtttgcgagggaagcaactggacgaattgtatgtgccaattgccatttagctaataagcctatgtatattgaagttccccaagcagtgcttcctgatactgtatttgaagcagttctacgaacgctaccgcacgtgcgcctgcggtgcggtaaggcaccaccctgttgtgccagcaaccaactccggcgtgtcagcttagttatcctcatcaagccacaaccttgatgtctagcttcccaactggtagacggttccctttcccccggatcaatgaagaagggagaagtcagttgattcttctaaagaaccgaaagcgaagcgctatgccggggcgaggggacggtggtatggaattctttggactacaagatcaaaccaaatagtagaacagggtctaataaataacgttcaacaaattgggattcatttagcaaccgatttttatcttcaaaatgtgtccgaaaaagaagagcaaagcaaaggtagcatggccaaaagtgaaccaacccttggactgctgtgacaaacaccatctgatttcaaagtagctcgatctaattcaaaaaatttcccctaattgagcacgccacacatattttttacagtagcaggatcagaataacttactccattaatttctggcaaaatagccccgtaacttcgggagaacgggtgcccctagggggtcgtagtgaccaggctcgggcgactgtttaccaaaaacactaaccggacaggttgttagtctaccaatctattctattcagaatcataatatgataaattacccatggatttctcccgtaggagaactaactaaagttctatttcatctttacctgtcgtgagtcgatgcttgaaccgtggttgaggctgctgatgcctctcacattagctcccggccgctaaaaataaggctaggcttgcgagcccgccttccctaatgagaaagaaaactagaactattatagcctttactataagctgggaactctttctgatttcaaggttgtgtatttctttttgtatatttattctactttc

SEQ ID NO: 4604 - DNA, 1072 bp, Zea mays
  Zm_smallRNAprecursor_93
tggcagaacacggtacacagatgtttaagaaagacctccggaccgcagatacaaacactagtacttcaaattcactgcatgctaaaggatttctggagtgggagttcaagactccaaggaaaaaaggcaaaaaaattgatcagctagtctacgaatcataaaaaaggaaatatgcatgtctaaccctagctcagcagaactgcagcactgcaaaaataattgcaagaaccagtgactctgccatggaatggaacttaaagccacagagacgaacagaaattttacacttgaatcgccaccacccgaccaccccagcaaagtggcgggcagccaggctcctccacgagctgtcaaaggcaaattttattcctgttggataaaaacgctgcatttttcctatataaatttcttgcataataagaatcgcctgggctgccaaaagtttttggctctgccactggtagcacgaacaatttctttaagggctagtttgggagccacaaaatcggaggggattggaggggctataatcttcttgttattcaaatttaaataagaagtggattctagcccctccaatcctctccggttttgtggctcccaaactagcccttagagttgaaaggccaacagaacgtatagacaacaacacaccagcatgtcccataaatcaaaacaaaactgaaaaatgggtagaataaggactagtataaacaattatgtatagatctaaacgaaacaaggtggctagtgaaaaacaaatctctgaaacgaatatcgactggcacagttaacaacttcatcacaagggcaatggaccagacatttgtactaacagataatcataagaccaatcaatatagtaagaacaaatgattggcaccattcaatcaaaataacaaacaaagcgagggccttctacggactaccacgagattagggccagaatcacaagagtgacagcggatcgcatcaggtgacgagtcatcacggaccacgcacgatgaaataaggcttactcctacaagcgggaagaaagcggatcgaggccaagcgggggtgcatacctggg

SEQ ID NO: 4605 - DNA, 1171 bp, Zea mays
  Zm_smallRNAprecursor_94
cgcatgggcagccgaatgtcatgcactcgcatgttgctgccctgaatatctgcatcagagaagcccagaatatgggcaaaacgacgataactgactttgtgccagttaccctggatgaagaaatacatgactgggtaatcatacccatcgacttcctcatctactttctttatccagagggtggcatagaactgagctaccacctcatcgttccaggggtattccatggtcataatgttacgtaacccctttctctctaagtttacgagagctgacgacatgtcagcatctcccatattctcacaaccctcccagtcaataaatctatgtcggacgactgggtgtttcttggaaagaatgacagaattgtagaagtcagcctggaaaagattccagaaccgagggtcctggacaccaggatgatgaggagtgagagtagggttggtgaacctcagacgctgaagggtgtctattcccttcagagtgaagtcgacgggaggttcatgcggaccgcggctgacgttcgccggatgcatgtgcagtccggtgacgtagagagcatcaggcgccggaaggtcgacgaagtcgtcgaaagccccatcctcctcctggcagggagcatacccagaggaagacgtgctatgacgaggacgagaggcgccaaccttttggcgtctcccgcgagtcggctgcgaaggcatagaagagccctcgccattcttccgaccagagccacgtcctctcttagagagggagcgacgaggcggaggagaggggacgagagattcctcctgaatctcgtcggagtcgctgctaaactcaaccacagaggggttgcgacgacgcaccatgattgaaaaggtggtgaaactgtgaaccggttgaagtgtgtgaaggagaggctctaaagtttgtgaagcgactaaggcgagagtgaatgaagtggaagaagagaaggggagagtcaagtatatataggcaattgagctggtcctcaggaccagttcaaccgcccccatgggccagttcagctggttctgaccagtgtggtcagagaaccagaaacaacagagaaaaaaaattcaaatttgcgtgcagatgctggaagtgactggacaggaaaaaatgggcgccaacgacacgcatgcatggctagtgcgcgggcatagca

SEQ ID NO: 4606 - DNA, 1040 bp, Zea mays
  Zm_smallRNAprecursor_95
cgctgctcagaggaaatgaccggtcatgcaggatgcgacctaataaaaaaaaaggtggcgcgctgagcggcagcaaaaaagaaaaaaaactttatctgcgcgccaggggaagtgacaggacagagcaaaataaaaaatctgcacgaggaagcgaccggtcaagaaaaagtgctgcgagacaaaagaaaaaggtgcagcgcgacaaaaaaagggcaggtgacagacctgcgaccggtcaaaaaggtgctgcgcgactgaaaaaattgcaggtgacagacctgcgcggacaggccggtcagagaccggttcaaccggtccactatgccggttcaaccggttttaaccaggatggtcctggtaaaaactggttaaaaacagctgagctgaagttcagctgctaagttcagctggtcaagccagttgagcccaaaaaaaaatcttagcacaaaaatgcattcaaattttaacattttcaccaagtttttgaaagatcatcacatagctttaaaactatcaatcaaaaatagtgaatcaaacaatttttgtgaccgttttcaagttaagttacgagaatccaagatatttaattcactcctaagaaagcaaaacctagtctcatcgaggggttttgtgaagatatcggctagttgattttcggtgctcacatgaaacaattcgatatctcctttggcttcgtggtctctcaagaaatggtgtctgatgtcaatatgtttagttctagagtgttgcacagggttgtttgcaagttttatggcactctcattgtcacacaaaagtggaattttgttaaactcacaaccaaaatgtcacacccgggtttcggggcaccaagacccgggcgcgaacataatcaccaggtgtgctgggaccaagtctcacacatatgatgaatcatggcacaggatcgaatgtcacatctttactatataatcggagttttgtacaaaataaataaataattacattatatggagacaacggtccagcaacccgaagttgactgggagacgacggcctag

SEQ ID NO: 4607 - DNA, 1149 bp, Zea mays
  Zm_smallRNAprecursor_96
tttgcatgcttctgtccggtcacgtcgcgcgcgcagtaattttttttggaccttagcccctgtccggtcgtcctgtctctttttgcatgaggactggcgttgcgcgcccgacgccatgtacttgcagactgcagcgtcctgtcttttcccccgcgcagtttttttttcttttgcatgcagtctgctgcgtcaggtcacttccccctgcgctgcgcgcaaattagaattttttcctctgttgtttctggttctctgaccacactggtcagtaccagctgagctggcccatgggggcggttgaactggttctgaggaccagctcaactgcctatatatacttcactcttcctcatctcttttcccacttcattcactctcgccttggtcgcttcacaacctttagagcctttccttcacacacttcaaccgcttcacagtttcaccaccgttttcaatcatggtgcgtcgccgcaacccctctgtggttgagtttagcagcgactccgacgagattcaggaggaatctcccatcccctctcctccgcctcgtcgctccctctctaagagaggacgtggctctggtcggatgcctggcgagggctcttccttgccctcgcagccgactcgcgggagacgccaaaaggttggcgcctctcgtcctcgtcgtagcacgtcttcctcagggtatgctccctgccaagaggaggatggggctttcgacgacttcgtcgaccttccggcgcctgatgctctctacgtcaccggactgcacatgcatccggcgaacgtcagccgcggtccgcatgaatctcccatcgacttcactcagaagggaatagaaacccttcagcgtctgaggttttccaaccctactctcactcctcgtcatcctggtgtccaggaccctcggttctggaatcttttccaggctgacttctacaattctgtcattcttaccaagaaacacccagtcgtccgacatagatttattgactgggagggttgtgagaatatgggagatgttgacatgtcgtcagctctcgttcacttagagagaaagggattacgtaacattatgaccatggaatacccctggaacgatgaggtggtagctcagttctatgccaccctctggataaagaaagtaga

SEQ ID NO: 4608 - DNA, 1178 bp, Zea mays
  Zm_smallRNAprecursor_97
atgttcactattatgttgctgttcatgttagtcgtgttgcagtcgtgtcactattatgagtcttgtcgtgttacaaaataaacatgtcgtacgcataattttcccctttgaacaattttgcaattattcgagttgaacatgtatttgaataatcagagttgtatgtttgtgaacaatgtcaatctgtgaactttctttcacctatgatacatgaatatgtgtcttatatactgtgcttatacatgaatatgtgactgctgtttgtgtgcatgcagatgtgtgaccctgctgcacacacatatgatgatgacacggatgacagagatggacaattgcttgttgccctatatgctgtagacatttggggcaggccttccagtgaggtttctagaagaacaatggttgaaacaggtattcaatgggttgagcgaactttggagaatagtaacgactgctttgacatgtttcgcatgcgacgtactgtttttagacgattgcatgatacgttggtggaaagttatggtctgcttccaagccgtggtgtcagtactatggaagctctaggtattttcttgtgggcatgtgggggtccacaatcatttaggcagataaggaataagtttggtcactccttggaaaactattagtcgcaagtatagtgaagtacttaatgcactatataagatgtcatctgacgtaatcaagcccaaagacacaaatttcatagagattcatcctcgtttgcgagaggggagattttggccccacttcaaggattgcataggagcaattgatggtagtcactttctagcgtctgccccagcctcggagcaagccaaatatattggtcggcacggttacgcatcacagaatgtaatggccgtttgtgacttcgatatgaggttcacatttgttgccacaggttggccaggttcagtacatgacactatagtattacaagatactttgataacttatgcggacaggttcccccatccaccggaaggtaaataagtatgttgtacttttgtatcatacgatattcatttatgtcttaagtattgaactttatatttctgtttgtgcaggtaaatactatctttgtggattcaggttatccaaatagaaaggtgtaccttgcaccttataagggtcagaagtaccacatttcagaatgg

SEQ ID NO: 4609 - DNA, 1080 bp, Zea mays
  Zm_smallRNAprecursor_98
aataattacgcttctctaagttaaacgaacctaacgcaaacatcacgagcaacaaattatacacaagaaacacaatttgcctaatcaactcatcagctaattaatttaaattctaaatttatccctcgttttataattgatactacatcgttcacaaagtactattttaattttattttacttctcacatattttacattccacaattaatcaaacatttctttatgtcatttatttagtgcaattgacaatgacaaaattcatcaaatagctatatgaaatactaaatcatatctatcctttatattgccacctcgtttagatatccctaaattaatctacctttcgcattactaaacctatcgtacttcacttatttttgacactaccacaacgcgcctgtgctaaatatgaggattattacgactaataattctagttaatccaatcatcagataaacgtacaaaaattataaatcggctcaccagcaccaaacgcgacccaatactcgtacgaatgctgataaatcctggctcgagcttcctgtcgtgcacttgatgaacaccatgctgttggctccgtcttcatccgacgcttgggatttcacgacgagatcgtgtttggagcgagctggtgaggtgggggtcgagcagaggatgacagcttcaacgacgatataggagggtggcatatatagagctacattcccgacgcgacgaactaagtcgcgaggtcggccgacgagggatttcaaggaacacgacggtcagtcggcgagctagcaagttcgaatagggacgactgacgtgaggaccatgataaatatgaaatcgatgactgaccaagatacgattggcgagttgagcgactccgacgatttgacagtggcgacttgggcgagcacagcacggaacgatgccccgcctggccgaactgaaggaagcgcggaccagagacagagtggacaccaggggcgagttcacggcaacagacacgcctgacaaccacagacatggccgggataacttaaaatactacgacagccaagaatcggcttggagacgacgacaggcacgcac

SEQ ID NO: 4610 - DNA, 1058 bp, Zea mays
  Zm_smallRNAprecursor_99
aatatgaggattattacgactaataattctagttaatccaatcatcagataaacgtacaaaaattataaatcggctcaccagcaccaaacgcgacccaatactcgtacgaatgctgataaatcctggctcgagcttcctgtcgtgcacttgatgaacaccatgctgttggctccgtcttcatccgacgcttgggatttcacgacgagatcgtgtttggagcgagctggtgaggtgggggtcgagcagaggatgacagcttcaacgacgatataggagggtggcatatatagagctacattcccgacgcgacgaactaagtcgcgaggtcggccgacgagggatttcaaggaacacgacggtcagtcggcgagctagcaagttcgaatagggacgactgacgtgaggaccatgataaatatgaaatcgatgactgaccaagatacgattggcgagttgagcgactccgacgatttgacagtggcgacttgggcgagcacagcacggaacgatgccccgcctggccgaactgaaggaagcgcggaccagagacagagtggacaccaggggcgagttcacggcaacagacacgcctgacaaccacagacatggccgggataacttaaaatactacgacagccaagaatcggcttggagacgacgacaggcacgcacgagaggagctcgacgcggaaacttaacacgccgttgtgagcagagaattttcgtgcgcgcaatagaagaatgtgacacgcgcagcaggggcgagcagcaggcgccgagctgcgcgacaaagcgaaatctgagctggagctcgcgacaacagcgagctggggcgagcagaagtccgggcgccatgggacgaagaaaaagcagccggacacactacagcttggaatcgatcctagaaacggcgactggcacggatgggtggagttcgcggacaagaatgccccagcaggcagagaggcaccgcggccaccatggggaacgagccggagctgcacgcgcacgtgaaaatcgctcggcagagaggacggacagggagctgtgcgcggtg

SEQ ID NO: 4611 - DNA, 1092 bp, Zea mays
  Zm_smallRNAprecursor_100
tcaggattttgggcataaagattccactgacccgtcagaaggggacccaacccctggggatagggtaatacatctaagaaattattccatcgaacgtactcccccctggatccgggaatagcaacatgaactaaatgtcctgtccaagccaaagaacttactccgaaaagtcctgacaaatgatgattcagacgagattcggcgtttttgaaccacgaaaggcttggcttccatttgggtttgtagatgtaaccaaccccctattaaggatagcgtagaaagaaataatagaaaaagagctccagtataaagatcttcattggtgcgcaatccaattgtataccaccactgataagccccagaataagcgatattcactggaccggcagcacctcctcgagtaaaggcttccacagcgggttgcccaaaatgaggatcccaaatggcatgagcaataggtcttacgtgtaaaggatcctgtatccatgattcaaaatttccttgccaagctacatgaaacagatttccggacgtccatagaaagattattgctaactgcccaaagtgagaagcaaaaatgttctgataaagacgttcctcagtaatatcatcatgactttcgaaatcatgtgcggtagcaataccaaaccaaatacgacgagtagtggggtcctgagctaagccttggctaaacctgggaaatcttaattccataatgcctttcaaatcctcctagccactatcctactgcaataattctcgctaagaagaatgcccatgttgtggcaattccacccagaaggtaatgggttactcctacagcacgtccttgtataatgctcaaggctctaggctgagtagcaggagcaacttttaatttgttatgagcccaaacgatagattcaatgagttcttgccaataaccacggccgctgaataaaaacattaaactgaaagcccagacaaaatgagcgcctaagaaaaaaagaccatatgcagataatgaagaaccataagactgaattacttgggatgcctgtgcccacaagaaatctcgaagccaaccattaatcgtaatggaactctgcgcaa

SEQ ID NO: 4612 - DNA, 1062 bp, Zea mays
  Zm_smallRNAprecursor_101
tcctgacaaatgatgattcagacgagattcggcgtttttgaaccacgaaaggcttggcttccatttgggtttgtagatgtaaccaaccccctattaaggatagcgtagaaagaaataatagaaaaagagctccagtataaagatcttcattggtgcgcaatccaattgtataccaccactgataagccccagaataagcgatattcactggaccggcagcacctcctcgagtaaaggcttccacagcgggttgcccaaaatgaggatcccaaatggcatgagcaataggtcttacgtgtaaaggatcctgtatccatgattcaaaatttccttgccaagctacatgaaacagatttccggacgtccatagaaagattattgctaactgcccaaagtgagaagcaaaaatgttctgataaagacgttcctcagtaatatcatcatgactttcgaaatcatgtgcggtagcaataccaaaccaaatacgacgagtagtggggtcctgagctaagccttggctaaacctgggaaatcttaattccataatgcctttcaaatcctcctagccactatcctactgcaataattctcgctaagaagaatgcccatgttgtggcaattccacccagaaggtaatgggttactcctacagcacgtccttgtataatgctcaaggctctaggctgagtagcaggagcaacttttaatttgttatgagcccaaacgatagattcaatgagttcttgccaataaccacggccgctgaataaaaacattaaactgaaagcccagacaaaatgagcgcctaagaaaaaaagaccatatgcagataatgaagaaccataagactgaattacttgggatgcctgtgcccacaagaaatctcgaagccaaccattaatcgtaatggaactctgcgcaaagtttccccctgtgatatgagttactatcccttgatcacttatagtaccccaaacatccgactgcattttccaactgaaatggaaaatgactaccgaaatagaattgtacatccagaatagacctaagaaaacatgatcc

SEQ ID NO: 4613 - DNA, 1172 bp, Zea mays
  Zm_smallRNAprecursor_102
ccacgaaaggcttggcttccatttgggtttgtagatgtaaccaaccccctattaaggatagcgtagaaagaaataatagaaaaagagctccagtataaagatcttcattggtgcgcaatccaattgtataccaccactgataagccccagaataagcgatattcactggaccggcagcacctcctcgagtaaaggcttccacagcgggttgcccaaaatgaggatcccaaatggcatgagcaataggtcttacgtgtaaaggatcctgtatccatgattcaaaatttccttgccaagctacatgaaacagatttccggacgtccatagaaagattattgctaactgcccaaagtgagaagcaaaaatgttctgataaagacgttcctcagtaatatcatcatgactttcgaaatcatgtgcggtagcaataccaaaccaaatacgacgagtagtggggtcctgagctaagccttggctaaacctgggaaatcttaattccataatgcctttcaaatcctcctagccactatcctactgcaataattctcgctaagaagaatgcccatgttgtggcaattccacccagaaggtaatgggttactcctacagcacgtccttgtataatgctcaaggctctaggctgagtagcaggagcaacttttaatttgttatgagcccaaacgatagattcaatgagttcttgccaataaccacggccgctgaataaaaacattaaactgaaagcccagacaaaatgagcgcctaagaaaaaaagaccatatgcagataatgaagaaccataagactgaattacttgggatgcctgtgcccacaagaaatctcgaagccaaccattaatcgtaatggaactctgcgcaaagtttccccctgtgatatgagttactatcccttgatcacttatagtaccccaaacatccgactgcattttccaactgaaatggaaaatgactaccgaaatagaattgtacatccagaatagacctaagaaaacatgatcccaggcggatacttgacatgttccccctcgcccaggtccgtcgcaagggaagcgaaagccaagatttgctttatcaggtatcagacgggaactgcgagcaaataaaacacctttcaaaagtattaatacagtcacatggatggtaaatgcgtg

SEQ ID NO: 4614 - DNA, 1122 bp, Zea mays
  Zm_smallRNAprecursor_103
agataaccaaccctgctgcattgtcttgatctctccccctttgtataaatatttcacatttcaaatgcaagtttgaaagattgtactgctcttttctttctttttctgcacaaaagaacccctcctaattcactaatttgtaggaagatactgaacttttggatttgaaaaaagtttcagaagatatatctaaagtagatggtgattgatagagcaattcttgttcgtaagttccagtgtgagtactgcgccgaacataaagtttgtgacgggtagtaaaagatctatttttcttttgactttgacatagagttcgatcctcaattatttctcgcgctatcttcttacgaagttttgttagggcatctataacagcctctggtttaggcgggcaacccggcaggtagacgtccacaggaattaacttatcaactcctcgaacagtactataggaatctgtactgaacatgccccctgtaatagtacaggctcccatagcaatgacgtatttcggttcaggcatttgctcatataatcgcactaaagatggagccattttcattgttaccgtaccagctgttaaaattaggtccgcttgtctaggacttgatcttggtaccaatccataacgatcaaagtcgaatcgtgagcctattaatgaagcaaattcaatgaaacaacaactggtaccatatagaaggggccataaacttgagagtcttgaccaatttgaaagatcgtttggtgtagttgaaataacggaattggaacttgtttggtcgagtaacggaaactcaatcaaactcataattgtctcaatggaatcttttccttctttttttttttctgaatattcagttaagaccattccaaggctccttttcgccatgcataaactaaaccaacaactaggataagcacaaaaatgaaagcttcgataaaaacggatacacccaatacgtcgaaactcattgcccaagggtagagaaagactgtttccacatcaaaaacaacaaaaactagcgcaaacatgtaatagcgtattcagaattgtaaccaagccccccccatgggttctatacccgattcataactagaaagcttctctggtccttcactaac

SEQ ID NO: 4615 - DNA, 1031 bp, Zea mays
  Zm_smallRNAprecursor_104
ttcttttcccattctcatcgcctttctatccttctaatcgaacttgaaattggattcaaaagaaagctattgtgaaaataaaagaaatacctctttcagaataccctttaatttaaaaagtagaagtggaatagaatacccagttgaagggtaatgatcatacgtctgtaatgcattgtatgtcccagaataggtcccattcttctaccctttccgggtagtcgatggctattcacagctactaccttaacaccaaagaagagttcgacccaatgctttatttctgtcttagtgaatcccgattcgacattaaaagtatattgattctttcccaataaacgaagactcttttctgtaaatactgcgtatttgattccattatcgtacgataatactatattttgatttatatttgtttattgtattatacctttctatattctagatatatagaatagaagaatctcgatttgtcaagtctcatgatcgtatcaagatctatttcaattcggctcagtcttttttttttagaaaagattgagccgaattgaattgcaatcaattagaggaataaagaagaattactgcatttcttaacttattttttctctttctattttgctttttttttattttatatggtatccatcgctttgaaaccatcaaatttgatctccttccatatttcacaagctgcggctagttcagcactccatttgcaagctgctttgataatttcattaccttcacgagcaagatcgcgcccttcgttacgagcttgtacacaggcttctaaagccacacgattagctgctgcaccaggtgcatttccccaaggatgtcctaaagttcctccaccaaattgtaatacggaatcatctccaaagatttcggtcagagctggcatatgccaaacatgaatacccccagaagccaccggtataacacctggcatggatacccagtcctgagtgaaaaagataccgcgagaacgatctttttcaataaaatcatcgcgcaataaatcaaca

SEQ ID NO: 4616 - DNA, 1032 bp, Zea mays
  Zm_smallRNAprecursor_105
ttcttttcccattctcatcgcctttctatccttctaatcgaacttgaaattggattcaaaagaaagctattgtgaaaataaaagaaatacctctttcagaataccctttaatttaaaaagtagaagtggaatagaatacccagttgaagggtaatgatcatacgtctgtaatgcattgtatgtcccagaataggtcccattcttctaccctttccgggtagtcgatggctattcacagctactaccttaacaccaaagaagagttcgacccaatgctttatttctgtcttagtgaatcccgattcgacattaaaagtatattgattctttcccaataaacgaagactcttttctgtaaatactgcgtatttgattccattatcgtacgataatactatattttgatttatatttgtttattgtattatacctttctatattctagatatatagaatagaagaatctcgatttgtcaagtctcatgatcgtatcaagatctatttcaattcggctcagtcttttttttttagaaaagattgagccgaattgaattgcaatcaattagaggaataaagaagaattactgcatttcttaacttattttttctctttctattttgctttttttttattttatatggtatccatcgctttgaaaccatcaaatttgatctccttccatatttcacaagctgcggctagttcagcactccatttgcaagctgctttgataatttcattaccttcacgagcaagatcgcgcccttcgttacgagcttgtacacaggcttctaaagccacacgattagctgctgcaccaggtgcatttccccaaggatgtcctaaagttcctccaccaaattgtaatacggaatcatctccaaagatttcggtcagagctggcatatgccaaacatgaatacccccagaagccaccggtataacacctggcatggatacccagtcctgagtgaaaaagataccgcgagaacgatctttttcaataaaatcatcgcgcaataaatcaacaa

SEQ ID NO: 4617 - DNA, 1032 bp, Zea mays; identical to SEQ ID NO: 4616
  Zm_smallRNAprecursor_106

SEQ ID NO: 4618 - DNA, 1032 bp, Zea mays; identical to SEQ ID NO: 4616
  Zm_smallRNAprecursor_107

SEQ ID NO: 4619 - DNA, 1032 bp, Zea mays; identical to SEQ ID NO: 4616
  Zm_smallRNAprecursor_108

SEQ ID NO: 4620 - DNA, 1033 bp, Zea mays
  Zm_smallRNAprecursor_109
ttcttttcccattctcatcgcctttctatccttctaatcgaacttgaaattggattcaaaagaaagctattgtgaaaataaaagaaatacctctttcagaataccctttaatttaaaaagtagaagtggaatagaatacccagttgaagggtaatgatcatacgtctgtaatgcattgtatgtcccagaataggtcccattcttctaccctttccgggtagtcgatggctattcacagctactaccttaacaccaaagaagagttcgacccaatgctttatttctgtcttagtgaatcccgattcgacattaaaagtatattgattctttcccaataaacgaagactcttttctgtaaatactgcgtatttgattccattatcgtacgataatactatattttgatttatatttgtttattgtattatacctttctatattctagatatatagaatagaagaatctcgatttgtcaagtctcatgatcgtatcaagatctatttcaattcggctcagtcttttttttttagaaaagattgagccgaattgaattgcaatcaattagaggaataaagaagaattactgcatttcttaacttattttttctctttctattttgctttttttttattttatatggtatccatcgctttgaaaccatcaaatttgatctccttccatatttcacaagctgcggctagttcagcactccatttgcaagctgctttgataatttcattaccttcacgagcaagatcgcgcccttcgttacgagcttgtacacaggcttctaaagccacacgattagctgctgcaccaggtgcatttccccaaggatgtcctaaagttcctccaccaaattgtaatacggaatcatctccaaagatttcggtcagagctggcatatgccaaacatgaatacccccagaagccaccggtataacacctggcatggatacccagtcctgagtgaaaaagataccgcgagaacgatctttttcaataaaatcatcgcgcaataaatcaacaaa

SEQ ID NO: 4621 - DNA, 1031 bp, Zea mays
  Zm_smallRNAprecursor_110
tcttttcccattctcatcgcctttctatccttctaatcgaacttgaaattggattcaaaagaaagctattgtgaaaataaaagaaatacctctttcagaataccctttaatttaaaaagtagaagtggaatagaatacccagttgaagggtaatgatcatacgtctgtaatgcattgtatgtcccagaataggtcccattcttctaccctttccgggtagtcgatggctattcacagctactaccttaacaccaaagaagagttcgacccaatgctttatttctgtcttagtgaatcccgattcgacattaaaagtatattgattctttcccaataaacgaagactcttttctgtaaatactgcgtatttgattccattatcgtacgataatactatattttgatttatatttgtttattgtattatacctttctatattctagatatatagaatagaagaatctcgatttgtcaagtctcatgatcgtatcaagatctatttcaattcggctcagtcttttttttttagaaaagattgagccgaattgaattgcaatcaattagaggaataaagaagaattactgcatttcttaacttattttttctctttctattttgctttttttttattttatatggtatccatcgctttgaaaccatcaaatttgatctccttccatatttcacaagctgcggctagttcagcactccatttgcaagctgctttgataatttcattaccttcacgagcaagatcgcgcccttcgttacgagcttgtacacaggcttctaaagccacacgattagctgctgcaccaggtgcatttccccaaggatgtcctaaagttcctccaccaaattgtaatacggaatcatctccaaagatttcggtcagagctggcatatgccaaacatgaatacccccagaagccaccggtataacacctggcatggatacccagtcctgagtgaaaaagataccgcgagaacgatctttttcaataaaatcatcgcgcaataaatcaacaa

SEQ ID NO: 4622 - DNA, 1031 bp, Zea mays; identical to SEQ ID NO: 4621
  Zm_smallRNAprecursor_111

SEQ ID NO: 4623 - DNA, 1129 bp, Zea mays
  Zm_smallRNAprecursor_112
caattagaggaataaagaagaattactgcatttcttaacttattttttctctttctattttgctttttttttattttatatggtatccatcgctttgaaaccatcaaatttgatctccttccatatttcacaagctgcggctagttcagcactccatttgcaagctgctttgataatttcattaccttcacgagcaagatcgcgcccttcgttacgagcttgtacacaggcttctaaagccacacgattagctgctgcaccaggtgcatttccccaaggatgtcctaaagttcctccaccaaattgtaatacggaatcatctccaaagatttcggtcagagctggcatatgccaaacatgaatacccccagaagccaccggtataacacctggcatggatacccagtcctgagtgaaaaagataccgcgagaacgatctttttcaataaaatcatcgcgcaataaatcaacaaaacctaaagttatttcgcgttccccttctaacttacctactactgtaccggagtggatatgatctccccccgacatacgcaatgctttagctaatacacggaaatgcataccatgatttttctgtctatcaataactgcatgcattgctcggtgaatgtgaagaagtaggccgttgtcgcggcaataatgagacaaagtagtatttgcggtgaatcctcctgttaagtagtcatgcattacaataggaacccctaattcccttgcaaatacagctctcttaatcatttcttcgcatgtacctgcagtcgcattcaagtaatgccccttgatttcaccagtttcggcttgtgctttataaattgcttcggcacaaaagacaaaacggtctctccagcgcataaatggttgtgagtttacgttttcatcatctttggtaaaatcaagtccaccgcgtagacactcataacacgctctaccgtaattttttgcggataatcccaattttggtttaatagtacatcccaataaaggacgaccgtacttgttcaacttatccctttcaacttggataccgtgaggcggaccttggaaagtttttgaataagcagggggaattcgtagatcctccaaacgtagagcgcgtaaggctttgaaa

SEQ ID NO: 4624 - DNA, 1168 bp, Zea mays
  Zm_smallRNAprecursor_113
gctcaaaagagatgacgttagtaatacaagcaccaatttcccttttatagcactttgaatatataaagttggcagttactaaaacaaggaaatcttattatatgaattaaatttctcttaatattcaatgcttaattttaacaaattaaacatgcatgataaattgattaagttcaaaggctaattttaaatcatatcatggtgagtatttaatgtagaagaaataaatccaaatgtacaagagagaatacatcacatagttttggattgttcttctttatatgtttaattgcatagtccatttgagaaactcattctcatgttgtgaaactacatagatcacctaggtaaaaacattagtttcacaactctagtcatatagataattccccttttgataagtgctttaagaatttgaatttcttacttagcaccttattcattcacgaacacggggttttttctctttcatgtctagatcatggcaataacagagtaatcaaattgaaatgtgccaagaaatacttacaaccaatttaagcatttggattgccatatgtaagaaaaaagattatgcaatctgttatatgataacctcaattttgatcatctttggtcatcttcaacttggagtaccaagataagtgccaaaatatttctcaacaaatatccttgtaccccttcactttccatgattataaatcaattaaaaaccaaactatggtctctcaaacaacttatgtgatttatcctatatgagagccttccaatcaaagtgactttcaatatttccaatatttgtcacttatgacagattctgtatactctaaagaaacattcataaattttgatgtacagatcctatgaccacgaaaattggtggagatgtgctttaataagtctgctaacagctgtaaaaagttgagactcatttgacttcatatgtgctgccagccataatatctcccacagtaggtacatgctgaaaactgctgtgtttgtgctgacaagattgacttaatcaagaagtttcacttatccaatgattatgaaatttgcacagactttgctatcatatgtatagagcaagtaaactgaatttcaagccaatttaaatagatttgatcactcaaacatggttatgagcacagccttgtcagattttcaa

SEQ ID NO: 4625 - DNA, 1061 bp, Zea mays
  Zm_smallRNAprecursor_114
tgtttcaatactatgtcgtacacgttggtggatgttttaattataaatgcaagtgtttatgtctaaatgcatgtgtttgtggatgtcgtatctctacatgtgtttgtaatgtggctgttatatgtgatttatgttatgtttgatatatgttatgtgtgcagaaatagtgacataatttagtgctgtttttgtagcagtatagggtaattcccgtcggcccagttaattcccgtcggctatggtcgaaccgacgggaattaactactaactcccgtcggcccagttaattcctgtcggccacgtaaggccgacgggaattaattaataattcccgtcggcctggggaaccgacgggaattaattaataactcccgtcggccagcaaaaccgacgggagttagccttaattcccgtcggccgctttctagccgacgggaattaattattcccgtcaaccgccgacggggataaccttatccccgacaagggacgcctgtcggcctgaaaccgacgggaataagccttaaaccgacgggaattacttattcccgtcggtttagggcttattcccgtcggtttcaggccgacgagaattaagtgaattcctgtagtgaacggtcagcagtaacggctatatcaacggctatagagaatttaatacgtcagatatcagataaagcagtcgcggacggtccggccgtgcaccccggacggtccgcgaggatgctaaaaatgaattttatggaatccgtcaccttcgggtttttctgggtttacaacgatcggacggtccgcgcttggtctggacggtgctcgcttcttcatcggacggtctgtagtgttaacttgtgtttttgcagtgttcctatctgaggctcactctggtgtcgcggacggtccgtcgcaagggcccggacggtccgcgcataggtgtttttccaaaaagcttctcctgtccggaataacctacggtaattccggacagtcgacttagaatagttgtagatgaacttatgcacctgagaaattatcaactaggcaaaccggttagtccacaaggt

SEQ ID NO: 4626 - DNA, 1142 bp, Zea mays
  Zm_smallRNAprecursor_115
caaaaggcatgcccatggaggaagcttgacgacgaagattgtcgtcagtctcccgctgacgtcgtgccacctcatggacatcagcagaaatgttgcggcacatggagaaaaatgctgcaaacccatggaccaaccgagcacccatcccgcggccacgacctcgaccacgaccacgagcacgtggcatgggagatccgcggccaggagagggacgcgaggcagcagcggggggagaggaggatggatgaaggggaggctggcgaggtggctcagtggaggaggcagggcctccagaccgtgagggagcccgcttcgtacgagcagctgggttggaggaatcaacccagtagggtacgtagcgggagtgtttgacgggtttttcgaagtgggtctgggtgaccacttcgatcatcttcatgataaagggtgcatgaagacaccctctgagaggagaccaggaagcacggacgatctcttcccagatcatgtcaaacacattgatgcgggcgagactgtttggagcaaggaggaggaggaagactcgactctccccaaggacgttcatttgatttccgcccttcggaagaacggtcatccggtacaaagaattaaggtacctgtagtacctatgcatgttagcggttgtccagaactcccgctcagtagagacatgaatgaattccgtctcttcccgcatgggcagccgaatgtcatgcacacgcatgttgctgccctgaatatctgcatcagagaagcccagtatatgggcaaaacgacgataactgactttgtgccagttaccctggatgaagaaatacatgactgggtaatcatacccatcggcttcctcatctactttctttatccagagggtggcatagaactgagctaccacctcatcgtttcaggggtattccatggtcataatgtttcgtaacccctttctctctaagtttacgagagctgacgacatgtcagcatctcccatattctcacaaccctcccagtcaataaatctatgtcggacgactgggtgtttcttggaaagaatgacagaattgtagaagtcagcctggaaaagattccagaaccgagggtcctggacaccaggatgacgaggagtgagagtagggttggtaaac

SEQ ID NO: 4627 - DNA, 1174 bp, Zea mays
  Zm_smallRNAprecursor_116
atatatatataatttatctattaagagacctgggctctacataactgtagagagccccagcccacgtccgatcactttttacgtaagcgaacagatttagcgtaaacggaaacccattttagcgtaaacagagtaacaactgcgagccctacatgtttacactattccattcttccgtttatacataatagtgatttagcataactacttcagccgacccacgttccagaaataaaggaatgggcccactaccccacttcccacgcggtcaaacacttctataccctaacccccgcgcggtcaaccatcctggccgactcgccgcgtttcttcagcggtcgcctgggcgattcttgttcatccgccgccaccagcccgtttcgccgtcctccaccgccgcacgccctcaacattaatcgccgccgccgttgacatcatcgtcgagccgctgccgttgtcaatcttgcgcgccccgcgtcacattggctcacgtccgcggtcgctatgtcgtccggattccaaggtgctcgagttgattttttaattttatgctttacaatgcaacttcctaatctccttccccactccggcagtgtgaatcgccttcatttgtctccgcgcgaactcaaccctaatcggcgccgccgttgacagtgtcgtcgagccggccgctgctgtcaatcctccgccaccgcgtcctataggtattttacatgcccaccaacggtcttcattgatcttactgttcttgtgcgattatggttcagttatttatcatagagcctttagctttgataaaggttcacggacatgttcttttagactcattgtatgctcaaattgtgtgggtgaagatatatgcaatgatgtgaattatacatacctttatgaagtaggggttgatattttgatgtggaaacaagtgtgctgctcatgacttcgtgctactatatattattcaaataaactgtaatgcatttcactttttatatacttactggatcatatttttcacataaatatggtcatcaatcatgtccaaattaatcactcaacaatcataaaccactacttcataacattagtaaactaataggcactgcctacatttatcttttgtgctgcagctatatgaacatatatgttcaacttccaaaatggaactaaatcgacc

SEQ ID NO: 4628 - DNA, 1159 bp, Zea mays
  Zm_smallRNAprecursor_117
gggctgcaaccaacggttaggatagcccccccgatcaggggcgcggttagacggttaggattaaccctaccccggttactgttaaccggctagtgtagaggacacatcccaacaataaccacaattttatacgagtttatgttttctagatcatccaacgatggtttagaatttttgtgatcagaaattttcatagatatggcatgattattatttgaccaacgttgaatatttaattcatgcatgttctatgattcagtattcagtatttatttcagatgtcctaaatattttctgttttaattttgcaaaggtgctcataccgccatgctgattagccagattgctcagatgaaaccgctagatggtacaattaccattcttggcgggaggatatatacatgataaccacagtgggtgagatagattacgcactgaggtttgataaaccagttgagcccacagtgggcactcccaactatgaccacaggtggatgcaatacagcatcgacaaggtcaagtgggagagatcaaatgacaaatgtatgattattcttaagaggagcatcaaggagcctcttaagagttccataccagagtgcgagactgccaaagaataccttgagagggtagtctctcatcaccaagggtcttctaaggcttatgcttgctctctaatgacagaatttgtcaatgcaaaatacgatggaaatggtgtcagaccattcattcagaaaatgatatccatcgtagctaagataaacaagtacctcgggtctcctttacacgaggaatttgtagtatttatgataatgaagtctctgcccaaggagtttgagacttttcacatacagtacaacactagtgtcactgataagtggaatatagaccaactcttggcacagtgtgtccaggaagaagagaggttaaagcagactggagactctgtcaacctcttaaaaggcaatatcaccagacagaataagaattcaaagaaaaagttcaagaagcagggtaaacagaataaccaggcttcctccagcaacaataatcagccaagacaaggaggcagtttttcagttccccctgatacatgcctctattgcaagaagacaggtcattacaagagaaagtgccctgaattcctgcagtatctact

SEQ ID NO: 4629 - DNA, 1133 bp, Zea mays
  Zm_smallRNAprecursor_118
tcgagttttctggtgccggtcttgctgctaagctcggaggacttggaatttcctcttgagatggcctttttcttcttcatttgccctttccacttgcatggctttgttggagaggtgcgagaaactaaggaagtcttggctagctaggatggtcttgagttctggtctgagccccttcagaaagcgggccatcttcttgacttcggtgctgacgtcatccggcgcgtagtgggccaactctgtgaatttgtgcatgtactcactgacagatctttcgccttgagtcagttcccagaattcatcttccttgatctgaacgatcccttggggcacatgatgctcccggaaagctgtttcaaactctgcccaggtagcatctctgatggtaacattgaaggtatcccaccaggctaaggccattccggaaagttgatgagcagccaattgaacacgctgattttccgggcatccgatggcttccagcttccttttaatcgtgcgcagccaatcgtcagcatcgaggggattgctagatccgacaaacgtgggaggcttgagcctcaggaaatctcccatcctgtcttgtggtcttccaccatttgggcgttgattttccagacttcgagtgagaacctcgatgagtcgggtttggttggctagaacttgggctaaatctaagggtagttctagaggtgcggggaggtgggtctcacttccttctctaccggcttctctttcagcttttaggggaaaccttgctccaatcccggaggtggtaggcgtggttttatccgaagccatctgccagggggagagagtcactattatgcacatgccttttttccaaccaagttattttattcaatacaccaataaattacaagcatacaactactacaagtcgtactacacatgagcgttttctgaggtactaccgaactctttttctaacgtgtccccaaattccttgagaaggtcatcaaggctagctagggacatatcctcgatgtcggacaaattctctatcctggcgggagtttgtgctggaggggccttcttcctccgctcagcttggcctccttggttcttggtcttcttttggattttctttgtgggggcgagcttccttagct

SEQ ID NO: 4630 - DNA, 1036 bp, Zea mays
  Zm_smallRNAprecursor_119
ccattagagacctacatcttaatttacctaatggttttgtactgttgttgagagacgtactttatgtaccttccttgcgaaggaatcttattttagtttctagattagatgataagcacattcattgccatttcggcgataggcagtatgtcattcagtttgacaataaagatgttggtctcgccatctgacgagatatgctttatttacttttgcacagtgatgttgttaatgtattagatacaccatgaacaatccagccagcagtggcaggaaaagaaaacaaagtgacggagaaacctcgtcgaaattatgccaccatcgtttagtccatatttcgaggaggagactataacgtctcgttaaggaacagattctccatcccctagacttcacatacttagagcaatgtagagattgcattaagggtaaatttgcgaagcagattaagaaaaatgctaagcatagtacgagagtgttagaaattattcatacagatatctgtggtccttttccagttaggacagtagatgggtttaactcgttcataaccttcacagatgactactctcgatacggttatatttatccaattaaggaaatatcaaaagctttagacaagtataaacagttcaaggctgaagtagaaatcaatacgatttgaagataaagattgtcagatcagatcttgggggagtactatgggtgccataccaaatatggccaggtcctaggacatttcgcgaggttcctaaggggggtattgttgctcattattcaacacctggcgaactgcaacagaatggggttgccgaaaggcgtaacagaacgctaatggatatgataaggagtatgcttagttactctaacctaccattgggtctgtggatggaggctttaaaaaccgctatgcatatactcaacagagttcctattaattcagtggctaaaactctatatgagttgtggactggcagaaagcccacgctcaactacttccacatatggggttgtctagtagaagctagaataatta

SEQ ID NO: 4631 - DNA, 1154 bp, Zea mays
  Zm_smallRNAprecursor_120
gaccatccggtggacaacatcctgggtagcatcaggagaggggtaacaactcgatctcgtttagctaatttttgtgaattttactcgtttgtttcctctcttgagccacttaaggttgaagaagcattgggtgatccggattggataattgccatgcaagaggagttgaacaacttctcccggaataaagtttggtccttagtccaaagacccaaacaaaatgtgattgggacaaaatgggcctttaggaacaaacaagatgaacatggtatggttacaagaaacaaagcacggttggttgcccaaggctacactcaagtggaaggacttgattttggtgaaacatatgcgccggtagcaaggttagagtcaattagaatattaattgcctatgctactaaccatgatttcaagctatatcaaatggatgtcaagagcgcatttctaaatggaccactacaagagagggtctatgtggagcaaccaccgggctttgaagatccaaagaagccaaaccatgtttacctactacacaaggcactctacgggcttaaacaagcccctagagcttggtataattgccttaaagatttcttgcttaaaaatggttttgaaataggaaaagtagactctactttattcactcgcaaagttgacaatcaattatttgtttgtcaaatatatgtcgacgacattatatttggcagtactgatgaaactttttgtgaggaatttagtagggttatgacaaataggtttgagatgtccatgatgggtgagctcaagtacttcctgggttttcaagttaaacaactcaaggaaggaaccattctgtgccaaaccaaagtacacacaagacatgctcaaaaagtttggcatggaaaaggcaaagcacgccaagacaccaatggcttcaagtggtcatctcgacttaaatgaagaaggtaaaactgtagatcaaaagctttatagatcaatgataggatctctactatatttgtgtgcatctaggccagatatcatgcttagtgtgtgcatgtgtgcccgttttcaagctaacccaaaagagtgtcacttagtggtcgttaagagatatttgagatatctagttcacacccaaaatctaggtctctggtatcctaagggctcctttt

SEQ ID NO: 4632 - DNA, 1040 bp, Zea mays
  Zm_smallRNAprecursor_121
gggcggtcgaggagtctgtgcgccgtcgcaggaccgaccggctgcatgaggatcttcgtcgttatgcagtcgcgactggtcatcctctccctcctgggtcccctccacctctagcccctaccatccccgcagaccttaatgagtggcaccaacaggagtttggtgtgccattcattaccccagaggatgaggtcgaggactatgatgacccattcttcacctcggaccctcctcatcctcctcctccctactcgggtcagggacccactcccggtgaccctaggcaatccggctctggtcactatcctcctcctccctacccgggtccgggacccattcctggtgacccgcggccatccggctctggttaccatcaccatcctccacctcctcctcatcatcgtacatcttcggcatctagtttttctgcgggtgatgagccccctagggactcctcactcgaggaagacgtgatgaggaccttcttccctgactacacatcataccctccatcatatcctccgtcctatcctcctcttggaggatattgattcatgtatacttggcgactccgctggggacgaaaaatcggatctatcaaattcgattcattagattagatctattaaattagacatatcagatcgatctaaaagtcgcctagatggggggtgaatagacggaatctgaaaattacaaacttaagcacacactacaagccggggttagcattagaaatgaatctgagtccgaaagataggggaaaacaaatcaagaacaaatcaagtggatgaacaccgtgatttgttttaccgaggttcggttctaaagaacctagtccccgttgagctggtcacaaagaccgggtctctttcaaccctgtccctctctcaaacggtcacctagaccgagtgagctttctccttaatcaaacgggtcacttagaccccgcaaggaccaccacacacttggtgtctcttgctttgattacaagtcacttgggaacaagaatgaggaaggaagaaagcgatccaattaac

SEQ ID NO: 4633 - DNA, 1100 bp, Zea mays
  Zm_smallRNAprecursor_122
gtatgtcgcaaaattatttgtgcattagtaaatatttctgtttccttaattaactaagcagttaaaaaataacggtattatctccttacaagagagggagtatgcccatacataatttcacaaaaatggagaacaaagttcttctaacaataatgcgtcgaattagcaaaaataatagaaatcaaatagtgaataataaattccaccgatcaaatgacgattttttttcacattcttttttttttgtcttcccaaatagtgaatatggacttgtgctagttacaaaaaggcgatagttctatattttgttttttatttaataacacgaattaatcttgtattcgccatattaaattgcatttatacaaaaaccagaagcatcccaagggtttccatcacccgagctgcttgaatccaatgtatcagagcaactccaatagattagctaaaagactagccaaatttactgatttagctactctctaaaatagattttagaaaaaaaagtgtaggctaatccaacagactcagtaaacctacggacttaatagagagtgaagcaggctatctagccactaaatttgaagagtcgtttacagagtctattggatacaattttcttttaatattagctaaatttacctttataaaaccatatacctagtcttttggagttgctctcagtacgagcaagggcggataggtatagcctaacgagagggcatatgtctccgctcatttatatgttataaatagtaaaatctagaggttttttacttatcttaatttagatatttctattctaatattttggtgctcgtccttctaattatgtcctcagtcttattttattctgagtctgtctcttatactgtcttaatcagattccttatctcattttctatcatacttatattttaaaatttactctataaataatataatctaccgttacaaaatagcactttgcatggtcgtttacaaggactcctgcagatgtgcttagtacgagtggatgcgtccaaacagaaggcgtatagtttgtcttcaccggtggataaatatgcaaaggtccctttcagaagcaagcaagtcagtgt

SEQ ID NO: 4634 - DNA, 1202 bp, Zea mays
  Zm_smallRNAprecursor_123
tatacgatgctcacctgggaagttcataaagcttgtgaatgctctcttcgatgaattgaaaggtgaagtagttgccaaggggtttggcggcctgctgagattcaagccgcacttattgtccagaaaattgctcagctggctgatgcggaagcttaacccggagacgatgaaattagagattggtggtggaaaagagattccaatcactgagcacagtgtttggtgtgttttgcagttaccaaacgttggccgtgacccgcccccatgtctgatgcagatgctcgtgccttgcgggacgagctgggagagcaaatttgtggcaactcttatagacgcagatctggtatcaatctatctgttatcactgatcgactgcagaagaggattctcactggggagctgggcctgagagccttttttatggctgcatttcagtgtctgctattctccaacactgacactcgcatcaggattgatgatgtatactcaggacatccataacatggccaacaagaactggtgcaaagcggtagttgacaggcatccagaacatggctaataagaactgatgtaaagtatactcaagacatccagaacatggccaacaagaactggtgcaaagcggtagttgacaggcatccagaacatggccaataagaactggtgcaaagcggtagttgacaggcgtcaactaccgctttgcaccagttcttgttggccatgttctgcctgtcaactaccgctttgcaccagttcttgttggccatgttctggatgtcttgagtatactttacatcatcaatcctgatgcgtgctgcctgtcaactaccgctttgcaccagttcttgttggtcatgttgtggatgtcctgagtatactttacatcatcaatcctgatgcgagtgtcagtgttggagaatagcagacactgaaatgcagccatgaaaaaggctctcaggcccagctccccagtgagaatcctcttctgcagtcgatcagtgataacaaatagattgataccagatctgtgtttataagagttgccacaaatttgctctcctagctcgtcccgcaaggcacgagcatctgcatcagacatggggggcgggtcacggccaacgtttggtaactgcaaaacacaccaaacactgtgctcagtgattggaatctcttttccaccaccaatctctaatttcatcgtc

SEQ ID NO: 4635 - DNA, 1247 bp, Zea mays
  Zm_smallRNAprecursor_124
tatacgatgctcacctgggaagttcataaagcttgtgaatgctctcttcgatgaattgaaaggtgaagtagttgccaaggggtttggcggcctgctgagattcaagccgcacttattgtccagaaaattgctcagctggctgatgcggaagcttaacccggagacgatgaaattagagattggtggtggaaaagagattccaatcactgagcacagtgtttggtgtgttttgcagttaccaaacgttggccgtgacccgcccccatgtctgatgcagatgctcgtgccttgcgggacgagctgggagagcaaatttgtggcaactcttatagacgcagatctggtatcaatctatctgttatcactgatcgactgcagaagaggattctcactggggagctgggcctgagagccttttttatggctgcatttcagtgtctgctattctccaacactgacactcgcatcaggattgatgatgtatactcaggacatccataacatggccaacaagaactggtgcaaagcggtagttgacaggcatccagaacatggctaataagaactgatgtaaagtatactcaagacatccagaacatggccaacaagaactggtgcaaagcggtagttgacaggcatccagaacatggccaataagaactggtgcaaagcggtagttgacaggcgtcaactaccgctttgcaccagttcttgttggccatgttctgcctgtcaactaccgctttgcaccagttcttgttggccatgttctggatgtcttgagtatactttacatcatcaatcctgatgcgtgctgcctgtcaactaccgctttgcaccagttcttgttggtcatgttgtggatgtcctgagtatactttacatcatcaatcctgatgcgagtgtcagtgttggagaatagcagacactgaaatgcagccatgaaaaaggctctcaggcccagctccccagtgagaatcctcttctgcagtcgatcagtgataacaaatagattgataccagatctgtgtttataagagttgccacaaatttgctctcctagctcgtcccgcaaggcacgagcatctgcatcagacatggggggcgggtcacggccaacgtttggtaactgcaaaacacaccaaacactgtgctcagtgattggaatctcttttccaccaccaatctctaatttcatcgtctccgggttaagcttccgcatcagccagctgagcaattttctggac

SEQ ID NO: 4636 - DNA, 1113 bp, Zea mays
  Zm_smallRNAprecursor_125
tgctgagattcaagccgcacttattgtccagaaaattgctcagctggctgatgcggaagcttaacccggagacgatgaaattagagattggtggtggaaaagagattccaatcactgagcacagtgtttggtgtgttttgcagttaccaaacgttggccgtgacccgcccccatgtctgatgcagatgctcgtgccttgcgggacgagctgggagagcaaatttgtggcaactcttatagacgcagatctggtatcaatctatctgttatcactgatcgactgcagaagaggattctcactggggagctgggcctgagagccttttttatggctgcatttcagtgtctgctattctccaacactgacactcgcatcaggattgatgatgtatactcaggacatccataacatggccaacaagaactggtgcaaagcggtagttgacaggcatccagaacatggctaataagaactgatgtaaagtatactcaagacatccagaacatggccaacaagaactggtgcaaagcggtagttgacaggcatccagaacatggccaataagaactggtgcaaagcggtagttgacaggcgtcaactaccgctttgcaccagttcttgttggccatgttctgcctgtcaactaccgctttgcaccagttcttgttggccatgttctggatgtcttgagtatactttacatcatcaatcctgatgcgtgctgcctgtcaactaccgctttgcaccagttcttgttggtcatgttgtggatgtcctgagtatactttacatcatcaatcctgatgcgagtgtcagtgttggagaatagcagacactgaaatgcagccatgaaaaaggctctcaggcccagctccccagtgagaatcctcttctgcagtcgatcagtgataacaaatagattgataccagatctgtgtttataagagttgccacaaatttgctctcctagctcgtcccgcaaggcacgagcatctgcatcagacatggggggcgggtcacggccaacgtttggtaactgcaaaacacaccaaacactgtgctcagtgattggaatctcttttccaccaccaatctctaatttcatcgtctcc

SEQ ID NO: 4637 - DNA, 1158 bp, Zea mays
  Zm_smallRNAprecursor_126
tgctgagattcaagccgcacttattgtccagaaaattgctcagctggctgatgcggaagcttaacccggagacgatgaaattagagattggtggtggaaaagagattccaatcactgagcacagtgtttggtgtgttttgcagttaccaaacgttggccgtgacccgcccccatgtctgatgcagatgctcgtgccttgcgggacgagctgggagagcaaatttgtggcaactcttatagacgcagatctggtatcaatctatctgttatcactgatcgactgcagaagaggattctcactggggagctgggcctgagagccttttttatggctgcatttcagtgtctgctattctccaacactgacactcgcatcaggattgatgatgtatactcaggacatccataacatggccaacaagaactggtgcaaagcggtagttgacaggcatccagaacatggctaataagaactgatgtaaagtatactcaagacatccagaacatggccaacaagaactggtgcaaagcggtagttgacaggcatccagaacatggccaataagaactggtgcaaagcggtagttgacaggcgtcaactaccgctttgcaccagttcttgttggccatgttctgcctgtcaactaccgctttgcaccagttcttgttggccatgttctggatgtcttgagtatactttacatcatcaatcctgatgcgtgctgcctgtcaactaccgctttgcaccagttcttgttggtcatgttgtggatgtcctgagtatactttacatcatcaatcctgatgcgagtgtcagtgttggagaatagcagacactgaaatgcagccatgaaaaaggctctcaggcccagctccccagtgagaatcctcttctgcagtcgatcagtgataacaaatagattgataccagatctgtgtttataagagttgccacaaatttgctctcctagctcgtcccgcaaggcacgagcatctgcatcagacatggggggcgggtcacggccaacgtttggtaactgcaaaacacaccaaacactgtgctcagtgattggaatctcttttccaccaccaatctctaatttcatcgtctccgggttaagcttccgcatcagccagctgagcaattttctggacaat

SEQ ID NO: 4638 - DNA, 1107 bp, Zea mays
  Zm_smallRNAprecursor_127
tgagattcaagccgcacttattgtccagaaaattgctcagctggctgatgcggaagcttaacccggagacgatgaaattagagattggtggtggaaaagagattccaatcactgagcacagtgtttggtgtgttttgcagttaccaaacgttggccgtgacccgcccccatgtctgatgcagatgctcgtgccttgcgggacgagctgggagagcaaatttgtggcaactcttatagacgcagatctggtatcaatctatctgttatcactgatcgactgcagaagaggattctcactggggagctgggcctgagagccttttttatggctgcatttcagtgtctgctattctccaacactgacactcgcatcaggattgatgatgtatactcaggacatccataacatggccaacaagaactggtgcaaagcggtagttgacaggcatccagaacatggctaataagaactgatgtaaagtatactcaagacatccagaacatggccaacaagaactggtgcaaagcggtagttgacaggcatccagaacatggccaataagaactggtgcaaagcggtagttgacaggcgtcaactaccgctttgcaccagttcttgttggccatgttctgcctgtcaactaccgctttgcaccagttcttgttggccatgttctggatgtcttgagtatactttacatcatcaatcctgatgcgtgctgcctgtcaactaccgctttgcaccagttcttgttggtcatgttgtggatgtcctgagtatactttacatcatcaatcctgatgcgagtgtcagtgttggagaatagcagacactgaaatgcagccatgaaaaaggctctcaggcccagctccccagtgagaatcctcttctgcagtcgatcagtgataacaaatagattgataccagatctgtgtttataagagttgccacaaatttgctctcctagctcgtcccgcaaggcacgagcatctgcatcagacatggggggcgggtcacggccaacgtttggtaactgcaaaacacaccaaacactgtgctcagtgattggaatctcttttccaccaccaatctctaatttcatcgtc

SEQ ID NO: 4639 - DNA, 1152 bp, Zea mays
  Zm_smallRNAprecursor_128
tgagattcaagccgcacttattgtccagaaaattgctcagctggctgatgcggaagcttaacccggagacgatgaaattagagattggtggtggaaaagagattccaatcactgagcacagtgtttggtgtgttttgcagttaccaaacgttggccgtgacccgcccccatgtctgatgcagatgctcgtgccttgcgggacgagctgggagagcaaatttgtggcaactcttatagacgcagatctggtatcaatctatctgttatcactgatcgactgcagaagaggattctcactggggagctgggcctgagagccttttttatggctgcatttcagtgtctgctattctccaacactgacactcgcatcaggattgatgatgtatactcaggacatccataacatggccaacaagaactggtgcaaagcggtagttgacaggcatccagaacatggctaataagaactgatgtaaagtatactcaagacatccagaacatggccaacaagaactggtgcaaagcggtagttgacaggcatccagaacatggccaataagaactggtgcaaagcggtagttgacaggcgtcaactaccgctttgcaccagttcttgttggccatgttctgcctgtcaactaccgctttgcaccagttcttgttggccatgttctggatgtcttgagtatactttacatcatcaatcctgatgcgtgctgcctgtcaactaccgctttgcaccagttcttgttggtcatgttgtggatgtcctgagtatactttacatcatcaatcctgatgcgagtgtcagtgttggagaatagcagacactgaaatgcagccatgaaaaaggctctcaggcccagctccccagtgagaatcctcttctgcagtcgatcagtgataacaaatagattgataccagatctgtgtttataagagttgccacaaatttgctctcctagctcgtcccgcaaggcacgagcatctgcatcagacatggggggcgggtcacggccaacgtttggtaactgcaaaacacaccaaacactgtgctcagtgattggaatctcttttccaccaccaatctctaatttcatcgtctccgggttaagcttccgcatcagccagctgagcaattttctggac

SEQ ID NO: 4640 - DNA, 1094 bp, Zea mays
  Zm_smallRNAprecursor_129
ttgcgggacgagctgggagagcaaatttgtggcaactcttatagacgcagatctggtatcaatctatctgttatcactgatcgactgcagaagaggattctcactggggagctgggcctgagagccttttttatggctgcatttcagtgtctgctattctccaacactgacactcgcatcaggattgatgatgtatactcaggacatccataacatggccaacaagaactggtgcaaagcggtagttgacaggcatccagaacatggctaataagaactgatgtaaagtatactcaagacatccagaacatggccaacaagaactggtgcaaagcggtagttgacaggcatccagaacatggccaataagaactggtgcaaagcggtagttgacaggcgtcaactaccgctttgcaccagttcttgttggccatgttctgcctgtcaactaccgctttgcaccagttcttgttggccatgttctggatgtcttgagtatactttacatcatcaatcctgatgcgtgctgcctgtcaactaccgctttgcaccagttcttgttggtcatgttgtggatgtcctgagtatactttacatcatcaatcctgatgcgagtgtcagtgttggagaatagcagacactgaaatgcagccatgaaaaaggctctcaggcccagctccccagtgagaatcctcttctgcagtcgatcagtgataacaaatagattgataccagatctgtgtttataagagttgccacaaatttgctctcctagctcgtcccgcaaggcacgagcatctgcatcagacatggggggcgggtcacggccaacgtttggtaactgcaaaacacaccaaacactgtgctcagtgattggaatctcttttccaccaccaatctctaatttcatcgtctccgggttaagcttccgcatcagccagctgagcaattttctggacaataagtgcggcttgaatctcagcaggccaccaaaccccttggcaactacttcacctttcaattcatcggagagagcattcacaagctttatgaacttcccaggtgagcatcgtatagctcgcgtcttagtttta

SEQ ID NO: 4641 - DNA, 1098 bp, Zea mays
  Zm_smallRNAprecursor_130
tgtatactcaggacatccataacatggccaacaagaactggtgcaaagcggtagttgacaggcatccagaacatggctaataagaactgatgtaaagtatactcaagacatccagaacatggccaacaagaactggtgcaaagcggtagttgacaggcatccagaacatggccaataagaactggtgcaaagcggtagttgacaggcgtcaactaccgctttgcaccagttcttgttggccatgttctgcctgtcaactaccgctttgcaccagttcttgttggccatgttctggatgtcttgagtatactttacatcatcaatcctgatgcgtgctgcctgtcaactaccgctttgcaccagttcttgttggtcatgttgtggatgtcctgagtatactttacatcatcaatcctgatgcgagtgtcagtgttggagaatagcagacactgaaatgcagccatgaaaaaggctctcaggcccagctccccagtgagaatcctcttctgcagtcgatcagtgataacaaatagattgataccagatctgtgtttataagagttgccacaaatttgctctcctagctcgtcccgcaaggcacgagcatctgcatcagacatggggggcgggtcacggccaacgtttggtaactgcaaaacacaccaaacactgtgctcagtgattggaatctcttttccaccaccaatctctaatttcatcgtctccgggttaagcttccgcatcagccagctgagcaattttctggacaataagtgcggcttgaatctcagcaggccaccaaaccccttggcaactacttcacctttcaattcatcggagagagcattcacaagctttatgaacttcccaggtgagcatcgtatagctcgcgtcttagttttacccttattctcatcgccaccaacaataacaacattgtcgtcgccagaaccatcgccggcaggagcaaactctgggtcttgttcatcatcactttcttcatcttgaataggagacaaggggactttcaaccttaacctcttcctcctttccttcaattcatttttatctaattcctttctcttgttttgtacacga

SEQ ID NO: 4642 - DNA, 1064 bp, Zea mays
  Zm_smallRNAprecursor_131
gcaattttaagtttcgttgtgtataatcatagtatatctgtttgcgaattcaggcgattattagtgcaaatagaatgttgtcgtcacgggttttggatgaatcgtcgtcatcagatgatgatgattatttcatactttgtgctgcacaaattattcaaagttactctcaagagaggggaatgccaggaggctctgttccaggccatgcatacatatatcgggatagagaaacaggacacgcgagaatgtaccaagattaccttgctgaaaatcctacgtatgccccaagcttatttcgacgaaggtaaacaatctatttgatatttgtatcgtttatatgtgtcttattttttattgtagatgcatttttcacaggtttaggatgaatcacaaccgcttcgcctagcagcacaacgcttgtattgctctcccacaaccccgttttcacggtttaggctgctcccatttcgctcgccgctactatgggaatcgcttttgctttcttttcctctggctactaagatgtttcagttcgccaggttgtctcttgcctgctcatggattcagcaggcagttcaaaaggttgacctatttgggaatctccggatctatgcttattttcaactccccgaagcatttcgtcgcttgctacgcccttcctcgtcaccactatttattcgcataatgaatgttgtggaacaacatgattattgaagacgaaggaagtgtggatccagaagaacggttcgagaatggaggagataatgtggagccctaccatgagatgacaacagattttgatgaatttcttgagaatcataggaaaattaggaaccaagaaacacactatcaacttcgagaatacctagtggaacacttgtggcagcaccacccagatctatatagttagctttgcaatctctaaatagcatgaatgacaccggcatggatttttagtagttcaactcaatttattgtaactacaagtgtccaactgagtgttttaatatatcattgtccgattgagtgtttttaattagtagatttatttcagatattacgtg

SEQ ID NO: 4643 - DNA, 1108 bp, Zea mays
  Zm_smallRNAprecursor_132
cgccctagtatactctacttgttcacctgtgtcggtttggggtacggtcagttcaccgggaggatcgccctcccaattcgaagttttttcctggaagtttaaaccgtcgttgactatgacaacagtcgcgaccgactattaagatcctcgcgactatggcagggcggtacgctctgctctctcgcgacctctactctaatcaaaagactaaaggcccctacggaagatgaaaaaggcgaggactgaaatgagaaaggaaggacaagacgacttcggttcacacgtgaaagtgcttcgaaaggtgtgagcaggtgcgcggagccggagccggcatgttcgcccgctgggccgagtgttcgcccacttcagagtcttcgcctttagagaaccgtgtccgcccaaaacggctgcgcgttattgtactaagttaagtactaagtactaacctaacctaacgcgcgacggagcaagagtatgcgcgtgtacggaagcgcaacggctttcgcgctcatcccttgcttcaaaacgaaaggttttagccctccctccgtttgctttgctggtcgccaaagacgagagcttcgcctttggaagcgccagtagcgtagggcgaccgggccagccgagcccctccgaattagttgacggctttgatgactcgacggtgaatattaaggaaaggagagcgaggggaagagggggcagccctcggcccgatcatccaattcgctccgacgatccaggcatggttcagtagtcaaagcaacttcgtcactttcgtgtacccatcggacggcagccctttcgggagttccttagggaccgattcactctgcgtagattgactgaacgcagaaagccttccactggcaggcgatcgtgtttttcacaggatttctcgttactcatgtcagcattctcacttctgatatctccaggtcttgtcaccaaaaaccttccccgattgacagaacgtcccgctactgacacttgaaaaagcagctttcaaggtctcgtcgcttcggtgaatcacttgagccctgagacattttcggtgccatggagctagaccagtgagctattacgctttcttcaaaggatggctgct

SEQ ID NO: 4644 - DNA, 1101 bp, Zea mays
  Zm_smallRNAprecursor_133
tgccacatacgtgggttcggtcctccaaggcctgttagagctctcttcaacctgctcatggctagatcgatcggtttcgggtcaaataggaagaacgtaaatcttccattccacctctggaaagcgcctacacctaatggcttaagccgctgttcccatttcctcgctgacccatcatgcgaaaggtacgccgttagagtgagtgcgcccgcgctccgctccttcgactgattgttcgcatcggatctcaggttctctattgcactccccgattggggttcttttcacctttccctcacggtacttgtacgctatcggtcattgaggaatacttaggcttagagggtggtccccctttctcgcgtaaaagcgatcatcattcgaacacgccgcgttttactgggaaggatcgaaccatgggaacgaatgaacagggctatcaccttctttggccggatcttccaatctttttagaaaaccagttcactgcgcgccccaccccgtcctgtgttgcctatgcttgcgccccaatgctgactttgtacaattccgtagggcgcgctacggcaacacagcctatgcttgctgcttgctggtttttccatcatccaatccacaacaaatcgaatgaaaccgcttcggatttcttttgatgaaaacccttgttccgctctcgctcgctgctactaacggggtctcggttgattttccttcctttagctactcagatgtttcagttcgctaagtttgaaaagtccaaagagcgcagactagccacggagcttggatacggtttcccgatcggagatccatggatcacagacgctctctctccccatggcctttcgcctctgaaagcgtccttccttctcaatgcccgggcatccatccaatgcatgattttcgatagcgtcgaacatgagcggtagactgaacacccacacaatctcaatttgacacagcaacactttccacctctcttccttcccttggatcagataggaaatcctcactttacttttccaagacagaagagaagcaagcaacggattgagcaactagcgctaggcgcatcctcttgcttgatttttatacgatttt

SEQ ID NO: 4645 - DNA, 1070 bp, Zea mays
  Zm_smallRNAprecursor_134
actaagaaatagacctagcagctaaaagagggtatcctgagcaattgcaagaatggggttcattgatattcctggtatagtagatgctatcacacatacagtcatactcaattcgatggaattgtttgatcttaaaggggatcttctataatttcgcacataaggggttatttcttggtttcgtccagtcattaataacttgattatttttagataatagtagatagaaagaacgctcgtaaggagtcctattgaaaccaagaaatataggcctgcttgccatccacaccagaatagatagagttttccgaagaaacctgctagtggaggaaggcctcctagggataagagacatagggctaaagagagagccaaaaaaggatctttcgtgtataatcctgcataatctcgaatgttatcagttccggtacgtagaccaaataatacaatgcaagcaaaagttcctagattcatggagatatagaacagcatataagttatcatgcttgcatatccatcatttgagtctccaacaattattccaataattacatatccgatttgccctatggacgaatatgcaagcatacgtttcatgcttgtttgagtaatagcaaggagattccccaatatcatgctaagaatagctaggatttccagaagaagatgccattcgtttgatgagaaataaaaaggaatatcgagaattcgcgtggctaaagctgaagcagctactttcgaagtaacagaaagaaaagcaacgactggagtgggggagtcagagtcgaaaagaggattcctcgcttctttctctcatgcaaaaccgtgcatgagactttcatctcgcacggctcctaagtgataaaagaaagaagaactcgtcttctttcttttttgattaccttcctcgcgtatgtataagaccgaatccattctttttcgaaatggatttcgaaaaagaactactaatccttaacttttcgaggaatccttcatcagtggttgtgaatgactgactttttcaatcctttcgaccttggttccgtaggagcaagtcagaaaggttgaga

SEQ ID NO: 4646 - DNA, 1126 bp, Zea mays
  Zm_smallRNAprecursor_135
ctccaacaattattccaataattacatatccgatttgccctatggacgaatatgcaagcatacgtttcatgcttgtttgagtaatagcaaggagattccccaatatcatgctaagaatagctaggatttccagaagaagatgccattcgtttgatgagaaataaaaaggaatatcgagaattcgcgtggctaaagctgaagcagctactttcgaagtaacagaaagaaaagcaacgactggagtgggggagtcagagtcgaaaagaggattcctcgcttctttctctcatgcaaaaccgtgcatgagactttcatctcgcacggctcctaagtgataaaagaaagaagaactcgtcttctttcttttttgattaccttcctcgcgtatgtataagaccgaatccattctttttcgaaatggatttcgaaaaagaactactaatccttaacttttcgaggaatccttcatcagtggttgtgaatgactgactttttcaatcctttcgaccttggttccgtaggagcaagtcagaaaggttgagaaatagaaccatctgatttgattcgttcccaatagccatgagatgatcatcttagggtgatccttttgtcaacggatgctcctattacactcgtagtctctgaaggatgagaacccactatgtagcatttacatcgataattcaagcattgtatacgtcattagtccgattctttgtaggaactacccgtaataacgagcttgcaaaatggatctgtttatcataaagagattcgttgttcctgaccctgcttcaccttaattgttatttgaacaaaaagatcacaataaacttttggtaaaagttctgtcttggtcggagtggggatagcatttctcttctgcatgtctatggagttttgcaaaacccaaacacctcagatagaggtaggaatttgtcgaacgaaccacactccttcgtagacgtcaggagtccattgatgaaaaggggctggggaaagcttgaacccaagtcctacagtgatgaatataagcgcaattgaaattcctggggagttatacatttgtgtattgataagaccattcacaatttcttgaagctcgatctcccccccagatgaacca

SEQ ID NO: 4647 - DNA, 1051 bp, Zea mays
  Zm_smallRNAprecursor_136
tctaaaaccctcttgaacactaagaggaggatttttgttgagggggagttttgtttagtcaaatgaaaagcatttgaaacaggggagaaaatttcaaatcttgaaaatgcttctcaaaatcttattcatatatctttgactatttacaaaagactttgaaaaagaatttccaaaagagtttgcaaaaacaaaacatgtggtgcaagcgtggtccaaatttttaatatgaagaaagcatccttgcatatgttatgagaatatatattggttcaattctaagtaacctttgcacttacattatgcaaactagttcaattatgcacttagatacttgctttgatttgtattggcatcaatcaccaaaaagggggagattgtgtaacgcacccactgggccagtccgcccaaagcccaccatcgccagcgtcggacgttcatgcgctcgtgtgcagcctatttagacgggcacctcgctctcaaaacctaggctgagagaggagggaggcccgcccttataagtgcatcatggcccccttagctaggcgaggtggtactaacccagggcgtgcataccggtcccttacagattgaaagggaaataggcttacaccttttcctaattgattttgctggttgaattgcccaacacaaatatttggactaactagtttgctctagattataagttttacaggtgccaaaggttcacaacaaaccaataaaaagaccaagaaaggattcaaataaaaagagcaaaagacaaccgaagtgtgccctggtctagcgcaccggacagtgtccggtgcaccagggaaccaaactctgaacttgccaccttcgagaattctgggagccactccgctataattcactggactgtccggtgtagcaccggactgtctggcatgccagcggagtaacggctacacagcgccaatggttgtctgcaagaacaataaatgcgctagagtgcgcgcctgcgcgcgcagaagtcaggacaggcgcaccggactgtccggtggcccagctgtcaaaagctccaacggtcaga

SEQ ID NO: 4648 - DNA, 1190 bp, Zea mays
  Zm_smallRNAprecursor_137
tagcttttgctacacacttagatgtgtactaatatactatgtctagataaatagtaaaacaatgtatctacaaaagccaaattgccttataatttggaagggagggattaattttttttgaacttctacgatttccttactcaaccaccattctcatgtctttaaacttgtacaagcagtgtcaaactttgccatcttttgcctaacacggttttgtcttcagatattcaggtgtgtggctcatcactagatgtggagcattgatccaaggggactatgatatcaacgattttaatctttgcatcaccattattatactctatggtgtgctcttccgtcttgttgcgtttcttagcatgttaaagttgaaatagatgtaagtatacatacgcttcttttttttttcacttcacatctatgttactgctcccacaattctaaactataaggcgtttatgtttttctaggtacattacttttattaggcaacgactgctatgcaagcagtccttctgtgcaagagtgcaagcaaaccatctgatccattagatcgtgatccaaccgtaggtcacatttaacacttaaacccttccaccaccagcccattaatctttataaaaaaacccctgacaaaccatgattgtatctgtggttggatcgtaatctaatggatcagatagcttgcttgcacgcttgcacagaaggactgcttgcatagcagttgttgcccttttattatgcatttagacatagtgtatatcttagtgcatattaaaacctatatatttagaaaagctaaattgtcttataaagtggaaatattactttaacgatgaagtttcgtgatcgaaatattttgtctgcaaaagcccaacgctgtcaagggtccggttcttcatctagcttctcctgcagggcaggatccagtgtcgtcacaacctgttcaagaacattgtctattctccaatttgtgaagtgtgtaatattgaagatgaaacttctgatcaaatcatcttccgctgtggttttgctgtggccttcttggaggcaattgttttttcatggcctactgatcaaccgatcagcgagttataccggacggagttccatccctgaggagcagtttggaactttcattgcattatgctgctggcagctttggaagcgttggaatggtatcgtctccagga

SEQ ID NO: 4649 - DNA, 1191 bp, Zea mays
  Zm_smallRNAprecursor_138
tagcttttgctacacacttagatgtgtactaatatactatgtctagataaatagtaaaacaatgtatctacaaaagccaaattgccttataatttggaagggagggattaattttttttgaacttctacgatttccttactcaaccaccattctcatgtctttaaacttgtacaagcagtgtcaaactttgccatcttttgcctaacacggttttgtcttcagatattcaggtgtgtggctcatcactagatgtggagcattgatccaaggggactatgatatcaacgattttaatctttgcatcaccattattatactctatggtgtgctcttccgtcttgttgcgtttcttagcatgttaaagttgaaatagatgtaagtatacatacgcttcttttttttttcacttcacatctatgttactgctcccacaattctaaactataaggcgtttatgtttttctaggtacattacttttattaggcaacgactgctatgcaagcagtccttctgtgcaagagtgcaagcaaaccatctgatccattagatcgtgatccaaccgtaggtcacatttaacacttaaacccttccaccaccagcccattaatctttataaaaaaacccctgacaaaccatgattgtatctgtggttggatcgtaatctaatggatcagatagcttgcttgcacgcttgcacagaaggactgcttgcatagcagttgttgcccttttattatgcatttagacatagtgtatatcttagtgcatattaaaacctatatatttagaaaagctaaattgtcttataaagtggaaatattactttaacgatgaagtttcgtgatcgaaatattttgtctgcaaaagcccaacgctgtcaagggtccggttcttcatctagcttctcctgcagggcaggatccagtgtcgtcacaacctgttcaagaacattgtctattctccaatttgtgaagtgtgtaatattgaagatgaaacttctgatcaaatcatcttccgctgtggttttgctgtggccttcttggaggcaattgttttttcatggcctactgatcaaccgatcagcgagttataccggacggagttccatccctgaggagcagtttggaactttcattgcattatgctgctggcagctttggaagcgttggaatggtatcgtctccaggaa

SEQ ID NO: 4650 - DNA, 1167 bp, Zea mays
  Zm_smallRNAprecursor_139
tgtactaatatactatgtctagataaatagtaaaacaatgtatctacaaaagccaaattgccttataatttggaagggagggattaattttttttgaacttctacgatttccttactcaaccaccattctcatgtctttaaacttgtacaagcagtgtcaaactttgccatcttttgcctaacacggttttgtcttcagatattcaggtgtgtggctcatcactagatgtggagcattgatccaaggggactatgatatcaacgattttaatctttgcatcaccattattatactctatggtgtgctcttccgtcttgttgcgtttcttagcatgttaaagttgaaatagatgtaagtatacatacgcttcttttttttttcacttcacatctatgttactgctcccacaattctaaactataaggcgtttatgtttttctaggtacattacttttattaggcaacgactgctatgcaagcagtccttctgtgcaagagtgcaagcaaaccatctgatccattagatcgtgatccaaccgtaggtcacatttaacacttaaacccttccaccaccagcccattaatctttataaaaaaacccctgacaaaccatgattgtatctgtggttggatcgtaatctaatggatcagatagcttgcttgcacgcttgcacagaaggactgcttgcatagcagttgttgcccttttattatgcatttagacatagtgtatatcttagtgcatattaaaacctatatatttagaaaagctaaattgtcttataaagtggaaatattactttaacgatgaagtttcgtgatcgaaatattttgtctgcaaaagcccaacgctgtcaagggtccggttcttcatctagcttctcctgcagggcaggatccagtgtcgtcacaacctgttcaagaacattgtctattctccaatttgtgaagtgtgtaatattgaagatgaaacttctgatcaaatcatcttccgctgtggttttgctgtggccttcttggaggcaattgttttttcatggcctactgatcaaccgatcagcgagttataccggacggagttccatccctgaggagcagtttggaactttcattgcattatgctgctggcagctttggaagcgttggaatggtatcgtctccaggaa

SEQ ID NO: 4651 - DNA, 1149 bp, Zea mays
  Zm_smallRNAprecursor_140
atttgaaaaaactattggcgggccttcaagaaaaatgtttggaatttggcaataaatgtattcaacgactaagaaaaattttccactcagttggagccagcagtgagaaattcaccccgtcagctgaagatttaccaaagaccttcgaacatattgaaggtgaaattgatgagcttgacgaagttatagccgggcacggtgacttctgtgcctcggtagcttctcggggcactgctgcagctttcctaaaagctggctgcgatcatggaaagattgtcaataggcccaatttcactttatcaccatcaatcctagatgatattcctgatctcgcccgaagtatttccaatagatttataaagatgatatggacaaaaggcgggcgagaaaaggctggagacaaagctcggattcatcttgaaccagtaagaagtcataccttgtgcttacctcttccttcaagctcgatttttacttacaacttaattcatgtaggatgacgaagccgaagccgatggttaaaaagaatgacgccgaagctgaagtcccttgaaaataggagtagactgtagacagactcaagaaactttttgagataacttttgtaaatgtaactaaacttgtctttaatgaattttgttcataccttgtaatatgctcttatccttccattaatgtatgagaggtgctttgatgtggacgaaattttctttttgagccgaaggcgaaaaaacaccttcccttcttttcgtacacagcgaagcatagaaaacaacatttccctttcttccgaagctctcctttttgtacacgaagaagctcttctctttttttttcttttttgccgaagcaaccacttatgccatgatgatgattatcctacacatgcctggatgaatgtttatgaatgcaaatgctatgatgtaatgtgatgtgcaaatgaatgtccaaacacatatccgaagccatactcacagccattatttccttagaaacaaccacacatcagctctgcattcccttaggaacgactttggagcttcttcgccttttactttcggcgaaatcagcgttgacttttcgctgtaagctctgcattcccttaggaacgactttggagcttcttcgccttttactttcggcggaatc

SEQ ID NO: 4652 - DNA, 1147 bp, Zea mays
  Zm_smallRNAprecursor_141
gacccgtttccctttgcccagcccacgacgagacgtcattgaggggcagctggcatgtggccccaggcagagttttcgcgcccgagtggactcgagggatatctgtcccccacatgtgctagccccgcccgagagacatgccatgtttgggccttgtcttggctcgtagtgcctgtttggcttgatatgattatttttttattagtttgaaaactcagcctacacatatttataacacctattgactattagatacaaatatatgattgggctcaagtggctagcagagcataaccaatgtcgtctgctgcctctaccaaggcgcattggttcgatctctctccccgcgttatacttttggactattttcctatagacatcgtgtatccgaagcgctctaagcaagcacaaagcccacacaaaagcatgacccaaactactcgtcactgacatgtgacccagggcaacgactgttatgcaaacagttcttctgtgcaagcgtgcaagcaaaccatttgatccattagattacgatccaaccacagatacaaccatgatttgttaggggtttttttataaagattattgagctggtggtggaagggtttaagtgttaaatgtgacctactgtcggatcacgatctaatggatcagatggtttgcttgcacgcttgcatataatgattgcttgcatagcagtctgttgggggccttcggcttccaaaggtcctcaaaaacatgatttaacaatgtttctggagtataatacatgaacaggtaccttcagacttgggtcaaaaccacagtatgaagaagcacaaagaatacgaaggatggtgcagagccgaagctatgcgcaggggagcttcggcgtgatagcagaaaaggaaaccgacttaaagaggaaaaggctatttagtccccgatggattactatagagttattagcaaatgtaaagggcatgggtgtaattttacatgggctatgtcccgtgcctataaataggtgaacagtgctcccgtactgttcacgctggtctggcatttgcttttgcgtcacacttgtacccttaccttctttcgagccaaaggtacatttataatttgacattatttctatctttctacaataataaaatagaaacga

SEQ ID NO: 4653 - DNA, 1059 bp, Zea mays
  Zm_smallRNAprecursor_142
tgaaattctgccatatgttgcttgatacatatgtctaatctcaattcaaccggtgtgtggctagtcaattcaaggatgagtcaccagacatatcacctaggtgtataaatggcaagaaactgaaattctgccatatgttgcttgatacatatgtctaatctcaattcaaccggtgtgtggctagtcaattcaaggatgagtcaccaagcgataggatcgggtccatgcaatatctgtctccactggaagtttatctttttacttcaatctttctttggcataatacaagggctcctttttttatgggtctctccaagattatttccaggaacttcagatgaagttggggcatcaacatatgcaccattcacttagatgagtatttgcccatgggaatgcatttattccactcagcatgtgcgagcaagaaggaatagataattctatcaagtcatttaagggggtgtttggtatctagtccctccattttagtcccttttagtccctaaattgccaaacacatggattaaaagaggaattatctctattttagtccttgtgtttggcaatttagggaataaaattgagagactaaaatggaggggctaaaaattagtccctacaccaaacaccccctaaactatgttactcacaaacttgatcagatacctcatttaaaaatattacaagaacagtccccaacacaaaattcaaacaaacctacatttgttcagctaagaacctacttgttatcacccattacactcaagtgcaaacataatatactgacctacctaggtaaacatgtaaagatctaagtatctaacatgagaaaaattaaaagctttcatattgtttctcttaaattatgcaatacacctatgggtcaactcttggtcacaaaacacaaagctcaatagcaatgtgccatacaacactattgaatgtggtgtatccaaggtcaaaagctgagaagtcacatcaaagtcaagatccatggcattcaagccatcaaatctagtacaaatacataggtatctataatgtacccttgtaagt

SEQ ID NO: 4654 - DNA, 1040 bp, Zea mays
  Zm_smallRNAprecursor_143
ttgcggcgtttttctctatgtgccgcaacatttctgctgatgtacatgaggtggcaaggcatcagcgggagactgacgacaatcttcgtcgtcaagcttccaccatgggtatgccatttgcccctcgctcgcctgacgtgcctctccatcctcctcccccggagatcaatgagtggcaccagcaggcctacggggtgccatttatgtcagcaaacgacgaagaagaagaagaagcctatgttgatgatcacgagcagtttgccccgcctccctaccatggggatccgggtcaatcatcctctcaccctctgcctccctacccgggtccgggacccattcctggtgaccctaggccatccggctctggttaccatcaccaccctccacctcctcctgatcatcgtacatcttcggcctctgttttttctgtggctgatgagccacctagggactccacattcgaggaggacgtgatgaggaccctcttccctgactacacttcataccctccatcatatcctccgtcctatcctcctcctggaggatattgattcatgtatccatgtctctctctttgtttttggtacttgttgccaaaaagggggagaaaatccaacctctagtttgtggttctttcggttttcttttggattatttttgttttggccactgttgtggcttgtatcctcttatcattgtatgaaataaaactgctgggttattattcaaagtgatatgatggtcttctggacatcatcttttgtcctatcagtttgaaatgattactttgctatgaagtaaaaatgatgtgtatttagagatagtcatgtgcatcacaactcctgttatgacactcttgcacccccagatggttgtattcagtatggtttttgtcactatctctaaatgtgttgctcacatgacatattatgtcaaaacattggattcacaatcgtgcacacatttagggggagccatctacatacaatcattcaaaagaaattttctattgcaaatgtatatctttttgaccttaattg

SEQ ID NO: 4655 - DNA, 1136 bp, Zea mays
  Zm_smallRNAprecursor_144
aatggataaatacctattgggtattactatcccatacacatacacacgatgaaaaatagtccaactcatatccactggttgatatggatttatcctcgggtcatccgtagctacaaagatttaacatttacattatacaaatgtcaattatattcatctaattaccattacaaaatttatagcatcaatcaatctattcaagaacatcatagataattggatacaatagcaacactaggatattaccacataacatattacacgtttccattacatggtcatcaaatagttgttaagacttttatgacattatcatcctaaaggttgttaaatagtaaaaaaagatggatgactaaagtctaaattcacattttttggctaagtttatatcgggtattatacatatggttaacgggtataaataagtgtggaacgttctaatactcatttattcatggcaacgactgttgtgcaagcagtctttccgtgcaagcgtgcaagcaaaccatctgatccgttagatcgtgatccaaccgtaggttatatttaacacttaaacccttccaccaccagcttaataatctgtataaaaaactctataacaaaccatggttgtatctgtagttggatcgtaatctaacggatcagatggtttgcttgcacgcttgcacagaaggactgcttgcacagcagtcgttgtctttattcattgagccaaggtttttgtccaattaaaaatctataaacattttattcatatacatatctattaaatacctagcaaggctctaaacgccgccgactcgccgtccaactagcgatgggaaccaccaccatgcaaatatgcaattcgccgccgctctaacaaaaaccccaacccgctacaccctcccggccgatggctcagtccacccctgatcccccggctttagtggcgatgacgttggcggagctagaggcagccatcgccgccctgcccggcaagtggggtgccctgcgggaggcgttcgatcgcctcgccgcctgctcaccctcgccgctccccttcgcctgggaggacctcgacggctacatctcctcgctccagtcgtcagtcgcgctgcggtttcgccaggtccgcgcactcgaggccgccg

SEQ ID NO: 4656 - DNA, 1165 bp, Zea mays
  Zm_smallRNAprecursor_145
aatatcattatgcactagccacgatgctattggatatgagggcagtatcgcttggaagttggaactagagataagaccaactccagcagcactccgcatgcggctccgtatccctattttgcggagcctagcacactattcatcagtccagcaggctccgcatccgactccgtataacgcacggcctgtacctgcactccccatttccacgctttctctctcctctccgcagctctctgcatgcgcgcgcggctgctcgcggaccctaggtgtcatagactgcatgcggagtgggatgaggagtattgctggaaacggagacggatacggagaggagagagaatgtgttggccgcgcgttttagggatacggagagggagtctgctggagttggtctaaggacaagaagagacatgttagaggttagggttaggtatgaaggagtggcacaatccatattggagatgccgagcttaagggggtgtttggttaccctaaactaaaatttagcccctgtcatatcgaatgtttgaacctccgttccgggtattaaatgtagtcggattataaaactaatttctcagccaaagattaaaagacgagacgaatctagtccagttggttgggtctatatttcatacttctatttgaaagtcaaatgctcgatgtgacccggactaaactttagtccctacaaccaaacaccccctaaagaaggatccataggtaggtcaggtcgacaagagtcaagcagtagactaacgaggcagtgttgacaaaatccgaggccttgtacaaattttaaaataaggcctcttttactagtcgagggtgttaaccgtctgtgaatgaaacgtcacaaaattgcaggactgtgggctgtggctaaactcacgatcatagaataaacggatgagtaaagaattagagactaagagcaactctaaaatactttctatattttcttcctaattgatatgagtagatattttttaaaaatgtctataacaacttatttaaatgactatccaaaaacagcaatcttacgagtttctcgctagccaaagctaaaaaacgtgaatgactctctagaatacaaacaaaatatagaaaatttgtcgaagacaagatatagaaagtgatttttgtataaatggccctctag

SEQ ID NO: 4657 - DNA, 1043 bp, Zea mays
  Zm_smallRNAprecursor_146
cactctttcagctgtacacacgtagctggcacgacgtgtgcagtgcgcgtaggtatatacgcccagatgtagcacaggacatacatgtcttattggcatgcatgcatcatctaggatggcagggatcgatcggaccattttgtaaattaagaaaacgttaacttggttgaaacctagattaatttgtatattcgtgccgagaatatatatggtttatcgtctcagctagagctaggaataatggcatgcagacgacataggttatggcgccgaggtacgtgatacgccgagataaaaaaaaatctaggcgagaaataaatttaagcggacacaccaacaacataaacaaaaaaaacaaaaaaaatgcaaactatggggcttgaacccacgaccacatggttagaagccttgtgctctaccaagtgggctagatggactttgtgctcatgtctgcaacaaatattttaataacacaaccgagctcggcgccaagatctgtggcgccgagctcggttccacgtcgacgccacgcgtctgggttgtgccaacgcaacacgacctcggcaccatagcctatggcgccgagctgtgttagctcggcgccataggctatggcgccgagcaaaggatccaaaactgcatttaaaatttttttaggtctaagcgtgattttacttctgtttaagggctaaaatacaaaaaaaaaatcggacgatacgacgactacatacagatacaatacagcaaaatgcgaggtgaaaggacgtatatatcacgcgtctgccgtccggggagggctcctaatcacgcgcacccacacatgcaccctggccccacgtgccaggcaatttggcactgtttcgtcggtgcagctgctagggcacctgccaaactcagaaggagcgacaagttcttgcacgcagatcgattgcgggaattctcctactggagaataatctctgcggctctgcctggccgagcgatcgatggaccgtctgtctgcgtctgcgtccggcggggccgatgagccgtcgccattgggg

SEQ ID NO: 4658 - DNA, 1044 bp, Zea mays
  Zm_smallRNAprecursor_147
cactctttcagctgtacacacgtagctggcacgacgtgtgcagtgcgcgtaggtatatacgcccagatgtagcacaggacatacatgtcttattggcatgcatgcatcatctaggatggcagggatcgatcggaccattttgtaaattaagaaaacgttaacttggttgaaacctagattaatttgtatattcgtgccgagaatatatatggtttatcgtctcagctagagctaggaataatggcatgcagacgacataggttatggcgccgaggtacgtgatacgccgagataaaaaaaaatctaggcgagaaataaatttaagcggacacaccaacaacataaacaaaaaaaacaaaaaaaatgcaaactatggggcttgaacccacgaccacatggttagaagccttgtgctctaccaagtgggctagatggactttgtgctcatgtctgcaacaaatattttaataacacaaccgagctcggcgccaagatctgtggcgccgagctcggttccacgtcgacgccacgcgtctgggttgtgccaacgcaacacgacctcggcaccatagcctatggcgccgagctgtgttagctcggcgccataggctatggcgccgagcaaaggatccaaaactgcatttaaaatttttttaggtctaagcgtgattttacttctgtttaagggctaaaatacaaaaaaaaaatcggacgatacgacgactacatacagatacaatacagcaaaatgcgaggtgaaaggacgtatatatcacgcgtctgccgtccggggagggctcctaatcacgcgcacccacacatgcaccctggccccacgtgccaggcaatttggcactgtttcgtcggtgcagctgctagggcacctgccaaactcagaaggagcgacaagttcttgcacgcagatcgattgcgggaattctcctactggagaataatctctgcggctctgcctggccgagcgatcgatggaccgtctgtctgcgtctgcgtccggcggggccgatgagccgtcgccattggggg

SEQ ID NO: 4659 - DNA, 1041 bp, Zea mays
  Zm_smallRNAprecursor_148
ctctttcagctgtacacacgtagctggcacgacgtgtgcagtgcgcgtaggtatatacgcccagatgtagcacaggacatacatgtcttattggcatgcatgcatcatctaggatggcagggatcgatcggaccattttgtaaattaagaaaacgttaacttggttgaaacctagattaatttgtatattcgtgccgagaatatatatggtttatcgtctcagctagagctaggaataatggcatgcagacgacataggttatggcgccgaggtacgtgatacgccgagataaaaaaaaatctaggcgagaaataaatttaagcggacacaccaacaacataaacaaaaaaaacaaaaaaaatgcaaactatggggcttgaacccacgaccacatggttagaagccttgtgctctaccaagtgggctagatggactttgtgctcatgtctgcaacaaatattttaataacacaaccgagctcggcgccaagatctgtggcgccgagctcggttccacgtcgacgccacgcgtctgggttgtgccaacgcaacacgacctcggcaccatagcctatggcgccgagctgtgttagctcggcgccataggctatggcgccgagcaaaggatccaaaactgcatttaaaatttttttaggtctaagcgtgattttacttctgtttaagggctaaaatacaaaaaaaaaatcggacgatacgacgactacatacagatacaatacagcaaaatgcgaggtgaaaggacgtatatatcacgcgtctgccgtccggggagggctcctaatcacgcgcacccacacatgcaccctggccccacgtgccaggcaatttggcactgtttcgtcggtgcagctgctagggcacctgccaaactcagaaggagcgacaagttcttgcacgcagatcgattgcgggaattctcctactggagaataatctctgcggctctgcctggccgagcgatcgatggaccgtctgtctgcgtctgcgtccggcggggccgatgagccgtcgccattgggg

SEQ ID NO: 4660 - DNA, 1042 bp, Zea mays
  Zm_smallRNAprecursor_149
ctctttcagctgtacacacgtagctggcacgacgtgtgcagtgcgcgtaggtatatacgcccagatgtagcacaggacatacatgtcttattggcatgcatgcatcatctaggatggcagggatcgatcggaccattttgtaaattaagaaaacgttaacttggttgaaacctagattaatttgtatattcgtgccgagaatatatatggtttatcgtctcagctagagctaggaataatggcatgcagacgacataggttatggcgccgaggtacgtgatacgccgagataaaaaaaaatctaggcgagaaataaatttaagcggacacaccaacaacataaacaaaaaaaacaaaaaaaatgcaaactatggggcttgaacccacgaccacatggttagaagccttgtgctctaccaagtgggctagatggactttgtgctcatgtctgcaacaaatattttaataacacaaccgagctcggcgccaagatctgtggcgccgagctcggttccacgtcgacgccacgcgtctgggttgtgccaacgcaacacgacctcggcaccatagcctatggcgccgagctgtgttagctcggcgccataggctatggcgccgagcaaaggatccaaaactgcatttaaaatttttttaggtctaagcgtgattttacttctgtttaagggctaaaatacaaaaaaaaaatcggacgatacgacgactacatacagatacaatacagcaaaatgcgaggtgaaaggacgtatatatcacgcgtctgccgtccggggagggctcctaatcacgcgcacccacacatgcaccctggccccacgtgccaggcaatttggcactgtttcgtcggtgcagctgctagggcacctgccaaactcagaaggagcgacaagttcttgcacgcagatcgattgcgggaattctcctactggagaataatctctgcggctctgcctggccgagcgatcgatggaccgtctgtctgcgtctgcgtccggcggggccgatgagccgtcgccattggggg

SEQ ID NO: 4661 - DNA, 1043 bp, Zea mays
  Zm_smallRNAprecursor_150
cagaggaaaacacggaagcaacatgacgcgtctaaatatcatctcgggttaaccatccataataatggcaaaaaaaagatgccgggggaggaagcctctcatggttgatgaataaccctattccggagctatgtgcacctcctattgcgagctcaaaaaggctcgtcgaatcgaccgaattttttgtattttagcacaaaagcggacacaagaaaatgagttctggcagcaaaaacccaagaaaaaaaatatacctaatgagttatttaaaaaatgagtagtgacaaagataaaaaaaatctaggcgagaaataaatttgagcggacacaccagcgacataaacaaaagaaaaacaaataaaaatgcaaactatggggcttgaacccacaaccacaaagttagaagccttgtgctctaccaagtgggctaactgggctttgtgctcatgtttgcaacaaatattttaataacacaaccgagctcggcgccaagatctgtggcgccgagctcggttccacgtcgacgccacgcgtccgtgttgtgccaacgcaacacgacctcggcgccatagcctatggcgccgagctgtgttacttcggcgccataggctatgtcgccgagcaaagggttaaaaatgacattaaatttttttaagatctaaacgtgaattttttttccgaaaaatggctaaaatacaaaaaattcggtttagccgacgcctgcgtcgtccactactccaacgtgtccttcttctccttcgccgacctgaacgtggcgttctacgtttggatcgacgcctacgttaccgacatggccagcatgaacgccacgcggtggagcctgatgacccggctcgcggaggaggctgccggcaacggcaactcgctgcgtctagcgaacgggaccttgaagcgtacatggattcgcagggcagctcacacgtggtgtacgggctggcacagtgcaccagggacctcaccgccaacgagtgcgccaggtgcctcgccaagttcgtcaacgagctgtcgatcgaactcgcgcc

SEQ ID NO: 4662 - DNA, 1044 bp, Zea mays
  Zm_smallRNAprecursor_151
cagaggaaaacacggaagcaacatgacgcgtctaaatatcatctcgggttaaccatccataataatggcaaaaaaaagatgccgggggaggaagcctctcatggttgatgaataaccctattccggagctatgtgcacctcctattgcgagctcaaaaaggctcgtcgaatcgaccgaattttttgtattttagcacaaaagcggacacaagaaaatgagttctggcagcaaaaacccaagaaaaaaaatatacctaatgagttatttaaaaaatgagtagtgacaaagataaaaaaaatctaggcgagaaataaatttgagcggacacaccagcgacataaacaaaagaaaaacaaataaaaatgcaaactatggggcttgaacccacaaccacaaagttagaagccttgtgctctaccaagtgggctaactgggctttgtgctcatgtttgcaacaaatattttaataacacaaccgagctcggcgccaagatctgtggcgccgagctcggttccacgtcgacgccacgcgtccgtgttgtgccaacgcaacacgacctcggcgccatagcctatggcgccgagctgtgttacttcggcgccataggctatgtcgccgagcaaagggttaaaaatgacattaaatttttttaagatctaaacgtgaattttttttccgaaaaatggctaaaatacaaaaaattcggtttagccgacgcctgcgtcgtccactactccaacgtgtccttcttctccttcgccgacctgaacgtggcgttctacgtttggatcgacgcctacgttaccgacatggccagcatgaacgccacgcggtggagcctgatgacccggctcgcggaggaggctgccggcaacggcaactcgctgcgtctagcgaacgggaccttgaagcgtacatggattcgcagggcagctcacacgtggtgtacgggctggcacagtgcaccagggacctcaccgccaacgagtgcgccaggtgcctcgccaagttcgtcaacgagctgtcgatcgaactcgcgccc

SEQ ID NO: 4663 - DNA, 1041 bp, Zea mays
  Zm_smallRNAprecursor_152
gaggaaaacacggaagcaacatgacgcgtctaaatatcatctcgggttaaccatccataataatggcaaaaaaaagatgccgggggaggaagcctctcatggttgatgaataaccctattccggagctatgtgcacctcctattgcgagctcaaaaaggctcgtcgaatcgaccgaattttttgtattttagcacaaaagcggacacaagaaaatgagttctggcagcaaaaacccaagaaaaaaaatatacctaatgagttatttaaaaaatgagtagtgacaaagataaaaaaaatctaggcgagaaataaatttgagcggacacaccagcgacataaacaaaagaaaaacaaataaaaatgcaaactatggggcttgaacccacaaccacaaagttagaagccttgtgctctaccaagtgggctaactgggctttgtgctcatgtttgcaacaaatattttaataacacaaccgagctcggcgccaagatctgtggcgccgagctcggttccacgtcgacgccacgcgtccgtgttgtgccaacgcaacacgacctcggcgccatagcctatggcgccgagctgtgttacttcggcgccataggctatgtcgccgagcaaagggttaaaaatgacattaaatttttttaagatctaaacgtgaattttttttccgaaaaatggctaaaatacaaaaaattcggtttagccgacgcctgcgtcgtccactactccaacgtgtccttcttctccttcgccgacctgaacgtggcgttctacgtttggatcgacgcctacgttaccgacatggccagcatgaacgccacgcggtggagcctgatgacccggctcgcggaggaggctgccggcaacggcaactcgctgcgtctagcgaacgggaccttgaagcgtacatggattcgcagggcagctcacacgtggtgtacgggctggcacagtgcaccagggacctcaccgccaacgagtgcgccaggtgcctcgccaagttcgtcaacgagctgtcgatcgaactcgcgcc

SEQ ID NO: 4664 - DNA, 1042 bp, Zea mays
  Zm_smallRNAprecursor_153
gaggaaaacacggaagcaacatgacgcgtctaaatatcatctcgggttaaccatccataataatggcaaaaaaaagatgccgggggaggaagcctctcatggttgatgaataaccctattccggagctatgtgcacctcctattgcgagctcaaaaaggctcgtcgaatcgaccgaattttttgtattttagcacaaaagcggacacaagaaaatgagttctggcagcaaaaacccaagaaaaaaaatatacctaatgagttatttaaaaaatgagtagtgacaaagataaaaaaaatctaggcgagaaataaatttgagcggacacaccagcgacataaacaaaagaaaaacaaataaaaatgcaaactatggggcttgaacccacaaccacaaagttagaagccttgtgctctaccaagtgggctaactgggctttgtgctcatgtttgcaacaaatattttaataacacaaccgagctcggcgccaagatctgtggcgccgagctcggttccacgtcgacgccacgcgtccgtgttgtgccaacgcaacacgacctcggcgccatagcctatggcgccgagctgtgttacttcggcgccataggctatgtcgccgagcaaagggttaaaaatgacattaaatttttttaagatctaaacgtgaattttttttccgaaaaatggctaaaatacaaaaaattcggtttagccgacgcctgcgtcgtccactactccaacgtgtccttcttctccttcgccgacctgaacgtggcgttctacgtttggatcgacgcctacgttaccgacatggccagcatgaacgccacgcggtggagcctgatgacccggctcgcggaggaggctgccggcaacggcaactcgctgcgtctagcgaacgggaccttgaagcgtacatggattcgcagggcagctcacacgtggtgtacgggctggcacagtgcaccagggacctcaccgccaacgagtgcgccaggtgcctcgccaagttcgtcaacgagctgtcgatcgaactcgcgccc

SEQ ID NO: 4665 - DNA, 1086 bp, Zea mays
  Zm_smallRNAprecursor_154
taaacatagaaactgtctaacagcaacattacactcttgaagagtagtgcaggctaacaacttctaccatttccatttcagcttacaacaaaaggcttctcaacctatgactgctcagttcaaaccttttaagtacgacaaagtgaatacaagcgacaatgggcacatcaatggatggcaaagccaccccaccacaagtgtagcttgtccagatgtgacacatgaccacacgcacatcagtttgaaagatgtcaatgcctaggtgatagacaggtcacaaaaaataggaagcacctgtcacggtaggaaggcatcaagcacaaagcaaacaggagaactaagcctagtatagctagggctaccaacttttttggattttagccctttttgggttttttttcacaactatgccctttgcagtttcatttcaaaaaatagaccccaacctcggcgccatcatcattggcgccgaggtaacgcacagcgacgccagtaccattggcgccaacttttcctacgtggcagccgatgtggcaagtcccagggggtcggcgccatagatcttggcgccgatccacatcgtctgccacgtaggaaaagttggcgccaattatgtcgacgccactatgcgttacctcggcgccaatgatgatggcgccgagtttgaggtccattttttgaaatgaaactgcaaagggcataattgtgcaaaaaaaccaaaagggctaaaatgcaaaaaagttgggctagggctacaaagtgcaggtgctgctgtgctgcaacctgtctatccaggatgtccgttgttcagcttggtcaggtcctaaaactcaatcaacaaaactctatattgttttctatgaggtgcggaattaccgcttccaatgtgttgagaaaaataagttacaacaccagtacaccctacatgggacaccaaaattacaatgtacaggaaccaatggcaaatgaatggttcctaagctatgaaatgcctatagcaatatagccttagcctcgtataccttcagctccaaccctctgctcactccatgctaggctccagttcaaataagttgatcggttagg

SEQ ID NO: 4666 - DNA, 1070 bp, Zea mays
  Zm_smallRNAprecursor_155
gaaactgtctaacagcaacattacactcttgaagagtagtgcaggctaacaacttctaccatttccatttcagcttacaacaaaaggcttctcaacctatgactgctcagttcaaaccttttaagtacgacaaagtgaatacaagcgacaatgggcacatcaatggatggcaaagccaccccaccacaagtgtagcttgtccagatgtgacacatgaccacacgcacatcagtttgaaagatgtcaatgcctaggtgatagacaggtcacaaaaaataggaagcacctgtcacggtaggaaggcatcaagcacaaagcaaacaggagaactaagcctagtatagctagggctaccaacttttttggattttagccctttttgggttttttttcacaactatgccctttgcagtttcatttcaaaaaatagaccccaacctcggcgccatcatcattggcgccgaggtaacgcacagcgacgccagtaccattggcgccaacttttcctacgtggcagccgatgtggcaagtcccagggggtcggcgccatagatcttggcgccgatccacatcgtctgccacgtaggaaaagttggcgccaattatgtcgacgccactatgcgttacctcggcgccaatgatgatggcgccgagtttgaggtccattttttgaaatgaaactgcaaagggcataattgtgcaaaaaaaccaaaagggctaaaatgcaaaaaagttgggctagggctacaaagtgcaggtgctgctgtgctgcaacctgtctatccaggatgtccgttgttcagcttggtcaggtcctaaaactcaatcaacaaaactctatattgttttctatgaggtgcggaattaccgcttccaatgtgttgagaaaaataagttacaacaccagtacaccctacatgggacaccaaaattacaatgtacaggaaccaatggcaaatgaatggttcctaagctatgaaatgcctatagcaatatagccttagcctcgtataccttcagctccaaccctctgctcactccatgctaggctccagttcaaataagttgat

SEQ ID NO: 4667 - DNA, 1067 bp, Zea mays
  Zm_smallRNAprecursor_156
tgtttctggttctctgaccacactggtcagaacgagctgaactggcccatgggggcggttgaactggtcctgaggaccagctcaactgcctatatatacttgactctcctcttctcttctcccacttcattctctctcgccttagtcgcttcacaacctttagagcctctccttcacacacttcaaccggttcgcagtttcaccaccttttcaatcatgtgcgtcgtcgcaatccctctgtgattgagtttagcagcgacttcgacgagattcaggaggaatctcctgtcccctctcctccgcctcgtcgctccctctctaagagaggacgtggctctggtcggatggatggcgagggctcttccatgccctcgcagccgactcgcgggagacgccaaaaggttggcgcctctcgtcctcgtcgtagcacgtcttcctctaggtatgctccctgccaggaggaggatggggctttcgacgacttcgtcgaccttccggcgcctgatgctctctacgtcaccggactgcacatgcatccggcgaacgtcagccgcggtccgcatgaatctcccgtcgacttcactcagaagagaatagacacccttcagcgtctgaggtttaccaaccctactctcactcctcgtcatcctggtgtccaggaccctcggttctggaatcttttccaggctgacttctacaattctgtcattctttccaagaaacacccagtcgtccgacatagatttattgactgggagggttgtgagaatatgggagatgctgacatgtcgtcagctctcgtaaacttagagagaaaggggttacggaacattatgaccatggaatacccctggaacgatgaggtggtagctcagttctatgccaccctctggataaagaaagtagatgaggaagccgatgggtatgattacccagtcatgtatttcttcatccagggtaactggcacaaagtcagttatcgtcgttttgcccacattctgggcttctctgatgcagatatacagggcagcaacatgcgagtgcatgacattcggctgcccatgcgg

SEQ ID NO: 4668 - DNA, 1062 bp, Zea mays
  Zm_smallRNAprecursor_157
acaacatcaagtgtttccaggtacgtaggtgttcagaagtttcatgaaagtaatgctcgaaaagtacggttgccaatatttggttcaaataaaatgacaaattatgaccaaccggagacccatattccaataaaattttattcacatatttttgtagtcacagcctcacagggacatataaataaaaaataagtcatttttttcatttacactgtcaaggtccgcaaatttatttgcagatatgggtccagtcttattatgctggatatccaggtaatttgtgccaggctaccagctgtaagcccgtcgccacattacaggtacgagaggaattaacagcaatattcagtaacctgaaaccccccaagaaaggaccaaaaggactgtacaaatgcatttcaatggagtgtgtggaaatgcagaaacctgcactttagggtctgtttacttccctcttagattatataagctggattatagtgaaagtgtatgagggtaaaatatcactttgagaccacaaataaactgaaataagttaacattgggtagcttattttagcttatttgtggttccaaaatgatattttactctcctaaccttctatcataacccaacttatataatctaggagggccttagtattctcatccattagagaaatcaccaattgctaatcctggcacgaaatctgaaaggaagcatgcccaacgaacttgaagatgggatctagtgatctaatcgccttttatcaacacggggctgtcaaaattcgagttgatgacaagcagagtaatttgtactggcagtagagaacagcaggcatttctagtctcttatctgggggaagctggacctgaaaggaaaatggaaaaggtgcagccaaacagaaatatccaatcgacatgtcatcaaccaagcacaccaaactactagaatccagcaacaaacagacgaaaccgcgggtgcagcgtgtggcctcagtttgcacccagagttccttagcggcggcggcaggattccggaggaacggcgcgcaggcaccaaatccaccagaaaacctg

SEQ ID NO: 4669 - DNA, 1058 bp, Zea mays
  Zm_smallRNAprecursor_158
gcagaaatgttgcggcacatggagaaaaatgccgcaaacccatggaccaagcgagcacccatcccgcggccacgaccttgaccacgaccacgagcacgtggcatgggagagccgcggccaggagagggacgcgaggcagcagcggggggagaggaggatggatgatggggaggctggcgaggtggctcagaggaggaggcagggcctccagaccgtgagggagcccgcttcgtacgagcagctgggttggaggaatcaacccagtagggtacgtagcgggagtgtttgacgggtttttcgaagtgggtctgggtgaccacttcgatcatcttcatgataaagggtgcatgaagacaccctctgtgaggagaccaggaagcacggacgatctcttcccagatcatgtcaaacacattgatgcgggcgagactatttggagcaaggaggaggaggaagactcgactctccccaaggacgttcatttgattaccgccctttgggagaacggtcatccgggacaaagaattaaggtacctgtagtacctatgcatgttagcggttgtccagaactcccgctcagtggagacatgaatgaattccgtctcttcccgcatgggcagccgaatgtcatgcactcgcatgttgctgccctgaatgtctgcatcagagaagcccagaatatgggcaaaacgacgataactgactttgtaccagttaccctggatgaagaaatacatgactgggtaatcatacccatcggcttcctcatctactttctttatccagagggtggcatagaactgagctaccacctcatcgttccaggggtattccatggtcataatgtttcgtaaccccgttctctctaagtttacgagagccgacgacatgtcagcatctcccatattctcacaaccctcccagtcaataaatatatgtgggacgactgggtgttttcttggaaaagaatgacagaattgtagaaagtcagcctggaaaagattccagaacccgagggtccctggacaccaggatgacgaggagtgagagtagggttg

SEQ ID NO: 4670 - DNA, 1057 bp, Zea mays
  Zm_smallRNAprecursor_159
cagaaatgttgcggcacatggagaaaaatgccgcaaacccatggaccaagcgagcacccatcccgcggccacgaccttgaccacgaccacgagcacgtggcatgggagagccgcggccaggagagggacgcgaggcagcagcggggggagaggaggatggatgatggggaggctggcgaggtggctcagaggaggaggcagggcctccagaccgtgagggagcccgcttcgtacgagcagctgggttggaggaatcaacccagtagggtacgtagcgggagtgtttgacgggtttttcgaagtgggtctgggtgaccacttcgatcatcttcatgataaagggtgcatgaagacaccctctgtgaggagaccaggaagcacggacgatctcttcccagatcatgtcaaacacattgatgcgggcgagactatttggagcaaggaggaggaggaagactcgactctccccaaggacgttcatttgattaccgccctttgggagaacggtcatccgggacaaagaattaaggtacctgtagtacctatgcatgttagcggttgtccagaactcccgctcagtggagacatgaatgaattccgtctcttcccgcatgggcagccgaatgtcatgcactcgcatgttgctgccctgaatgtctgcatcagagaagcccagaatatgggcaaaacgacgataactgactttgtaccagttaccctggatgaagaaatacatgactgggtaatcatacccatcggcttcctcatctactttctttatccagagggtggcatagaactgagctaccacctcatcgttccaggggtattccatggtcataatgtttcgtaaccccgttctctctaagtttacgagagccgacgacatgtcagcatctcccatattctcacaaccctcccagtcaataaatatatgtgggacgactgggtgttttcttggaaaagaatgacagaattgtagaaagtcagcctggaaaagattccagaacccgagggtccctggacaccaggatgacgaggagtgagagtagggttg

SEQ ID NO: 4671 - DNA, 1058 bp, Zea mays
  Zm_smallRNAprecursor_160
cagaaatgttgcggcacatggagaaaaatgccgcaaacccatggaccaagcgagcacccatcccgcggccacgaccttgaccacgaccacgagcacgtggcatgggagagccgcggccaggagagggacgcgaggcagcagcggggggagaggaggatggatgatggggaggctggcgaggtggctcagaggaggaggcagggcctccagaccgtgagggagcccgcttcgtacgagcagctgggttggaggaatcaacccagtagggtacgtagcgggagtgtttgacgggtttttcgaagtgggtctgggtgaccacttcgatcatcttcatgataaagggtgcatgaagacaccctctgtgaggagaccaggaagcacggacgatctcttcccagatcatgtcaaacacattgatgcgggcgagactatttggagcaaggaggaggaggaagactcgactctccccaaggacgttcatttgattaccgccctttgggagaacggtcatccgggacaaagaattaaggtacctgtagtacctatgcatgttagcggttgtccagaactcccgctcagtggagacatgaatgaattccgtctcttcccgcatgggcagccgaatgtcatgcactcgcatgttgctgccctgaatgtctgcatcagagaagcccagaatatgggcaaaacgacgataactgactttgtaccagttaccctggatgaagaaatacatgactgggtaatcatacccatcggcttcctcatctactttctttatccagagggtggcatagaactgagctaccacctcatcgttccaggggtattccatggtcataatgtttcgtaaccccgttctctctaagtttacgagagccgacgacatgtcagcatctcccatattctcacaaccctcccagtcaataaatatatgtgggacgactgggtgttttcttggaaaagaatgacagaattgtagaaagtcagcctggaaaagattccagaacccgagggtccctggacaccaggatgacgaggagtgagagtagggttgg

SEQ ID NO: 4672 - DNA, 1171 bp, Zea mays
  Zm_smallRNAprecursor_161
gcagccgaatgtcatgcactcgcatgttgctgccctgaatgtctgcatcagagaagcccagaatatgggcaaaacgacgataactgactttgtaccagttaccctggatgaagaaatacatgactgggtaatcatacccatcggcttcctcatctactttctttatccagagggtggcatagaactgagctaccacctcatcgttccaggggtattccatggtcataatgtttcgtaaccccgttctctctaagtttacgagagccgacgacatgtcagcatctcccatattctcacaaccctcccagtcaataaatatatgtgggacgactgggtgttttcttggaaaagaatgacagaattgtagaaagtcagcctggaaaagattccagaacccgagggtccctggacaccaggatgacgaggagtgagagtagggttggtaaacctcagaacgctgaaggggtgtctattcccttctgagtaaagtcgacgggagattcatgcggaccgcggctgacgttcgccggatgcatgtgcagtccggtgacgaagagagcatcaggcgccggaaggtcgacgaagtcgtcgaacgccccatcctcctcctggcagggagcatacccagaggaagacgtgctacgacgaggacgagaggcgccaaccttttggcgtctcccgcgagtcggctgtgaaggcatagaagaaccctcgccatccttccgaccagagccacgtcctctcttagagagggagcgacgaggcggaggagaggggacgggagattcctcctgaatctcgtcggagtcgctgctaaactcaaccacagaggggttgcgacgacgcaccatgattgaaaaggtggtgaaactgtgaaccgtttgaagtgtgtaaaggagaggctctaaaggttgtgaagcgactaaggcgagagagaatgaagtgggagaagagaagaggagagtcaagtatatataggcagttgagctggtcctcaggaccagttcaaccgcccccatgggccagttcagctggttctgactagtgtggtcagagaaccagaaacagcagagggaagatgcaaaaaaaatcaaatttgcgcgcagctgctggaagcgactggacaggaaaaatgggtgcccctgacacgcatgcagggctagtgcgcgtg

SEQ ID NO: 4673 - DNA, 1149 bp, Zea mays
  Zm_smallRNAprecursor_162
gcatgcttctgtccggtcacgtcgcgcgcgcagtaatttttttttggaccttagcccctgtccggtcgtcctgtctctttttgcatgaggactggccttgcgcgcccgacgccatgtacttgcagactgcagcgtcctgtcttttcccccgcgcagttttttttttttttttgcatgcagtctgctgcgtcaggtcacttccccctgcgctgcgcgcaaattagaattttttcctctgttgtttctggttctctgaccacactggtcagtaccagctgagctggcccatgggggcggttgaactggttctgaggaccagctcaactgcctatatatacttcactcttcctcatctcttttcccacttcattcactctcgccttggtcgcttcacaacctttagagcctttccttcacacacttcaaccgcttcacagtttcaccaccgttttcaatcatggtgcgtcgccgcaacccctctgtggttgagtttagcagcgactccgacgagattcaggaggaatctcccatcccctctcctccgcctcgtcgctccctctctaagagaggacgtggctctggtcggatgcctggcgagggctcttccttgccctcgcagccgactcgcgggagacgccaaaaggttggcgcctctcgtcctcgtcgtagcacgtcttcctcagggtatgctccctgccaagaggaggatggggctttcgacgacttcgtcgaccttccggcgcctgatgctctctacgtcaccggactgcacatgcatccggcgaacgtcagccgcggtccgcatgaatctcccatcgacttcactcagaagggaatagaaacccttcagcgtctgaggttttccaaccctactctcactcctcgtcatcctggtgtccaggaccctcggttctggaatcttttccaggctgacttctacaattctgtcattcttaccaagaaacacccagtcgtccgacatagatttattgactgggagggttgtgagaatatgggagatgttgacatgtcgtcagctctcgttcactgagagagaaaggggttacgtaacattatgaccatggaatacccctggaacgatgaggtggtagctcagttctatgccaccctctggataaagaaagtaga

SEQ ID NO: 4674 - DNA, 1097 bp, Zea mays
  Zm_smallRNAprecursor_163
cccagtcatgtatttctttatccagggtaactggcacaaagtcagttatcgtcgttttgcccatattctgggcttctctgatacagacattcagggcagcaacatgcgagtgcatggcattcggctgcccatgcgggaagagacggaattcattcatgtctctactgagcgggagttctggacaaccgctaacatgcataggtactacaggtaccttaattccttgtcccggatgaccgttctcccaaagggcggtaatcaaatgaacgtccttggggagagtcgagtcttcctcctcctccttgctcccaacagtctcgcccgcatcaatgtgtttgacatgatctgggaagagatcgtccgtgcttcctggtctcctctcagagggtgtcttcatgcaccctttatcatgaagttgatcgaagtggtcacccagacccacttcgaaaaacctgtcaaacactcccgctacgtaccctactgggttgattcctccaacccagctgctcgtacaaagcgggttccctcacggtctggaggccctgcctcctcctctgagccacctcgccagcctcctcaccatccttcctcctctccccccgctgctgcctcgcgtccctctcctggccgcggatctcccatgccacgtgctagtggtcgtggtcgaggtcgtggccgcgggatgggtgctcgcttgctccatgggcttgcggcatttttctccgcgtgccgcaacatttctgctgatgtccatgaggtggcacggcgtcagcgggagactgacgacaatcttcgtcgtcaagcctcctccatgggcatgccttttgtccctcgttcgcctgatgtgcctctccatcctcctcccccggagatcaatgagtggcaccagcaggcctacggggtgccttttatgtctgcagacgatgaagatgaagaagtctatgttgatgatcgcgaggagtttgtcccgcctccctaccatggggatccgggtcaatcatcctcccaccctccgcctccttacccgggtcctggacccattcctggtgaccctaggccatccggctctggttaccaccctccacctcctcctgatc

SEQ ID NO: 4675 - DNA, 1058 bp, Zea mays
  Zm_smallRNAprecursor_164
atttagatacatgtgacaaaatgtggaaaaatatgtaataagggacaacatttagccaacaccatggacaagaaaggctgaccgacctaagtcatgatcgcacgaccacttggttgcccgcctcgcctctactttggtcctgcacatgtgccacaactcaaagcaacacagctcttacatggttgacatgtattcaagcccgaagatggcatgtcatcaatccatggcttggaatctaaggactgagaagaaacatacacatatgatccaatagtgaataaatccaactgccaaccgacattcaatcgttttgaaggaacactgatcatcattgatttgaagatggatgctagagggaggtcgatcggcctcctccctagcgaggcgaccacggggataattagctcataaggaccgctattgtataaccattcatcaacagatgcagcttcccaaattgggtaaaaatacaatccgatcgccgcagaagtagaaataatagcaccagagataatattgtttccataaagtaaagaaccagaaacaggctcatgaataccatcaatatctactggaggagcagcgatgaaggcgataataaatacggaagttgtggtcaataaggtagggatcatcaaaacaccgaaccatccaatgtaaagacggttttcggtgctggccacccgacctgccacctcatgtccgttcagccgacttacccactcaaccgacattatgaagctataaatacccccccccccggccttgggagggctataaatagcctataagagctcatttataagggagtgaagaaagttgggagtagatacaccctagagagttgtaagtgcaatcaagccctaacgagggttttggtgttgatgaccacccaattgaaggactaacgagattcgttgatatgacaagcatagaatcaaaaagggaggatgatatgtaggttgaaggacccctaatcaccaaagatgactttgtcgccttaataagttcaaattcttttatttttgtagcttgagtttataaaattcatactatca

SEQ ID NO: 4676 - DNA, 1197 bp, Zea mays
  Zm_smallRNAprecursor_165
gtaagagaaatgagtgtagactttctaaattacatttttaataaattcgagagaggaaagtgttggagtgatggctgagaattaagtgatatggaaatggaagttgaagcaagaagaaagtttgtcattaccaaggaggctgacgcagatcttactgttgaagatgacacacaaaatatatttgttcatcttggttttctggtaccgtattataaaaaaggaaactcaatccagcattttttgattccttcggaaaagatatattatacttttctgatcttaagaatttttcaataaaatggaaaaggtttgtcaaactcattagatcagcgttagctttgaaagcgcctttggtcagattaaccttaatctgtgagatgtctacaattatcgtattgcagctttaattatctaattctgcatattattaagtattataaaaaaatgtcaagattgacgtgcttcagtaaaatgggttatgccacacagacaggtctaccactacaggaacaatatctctttaaggtatttttatgataagtggtgttgtaacttatgacacgtaatgtggtatttaagaaacttcgttaagcatgtcctgacctacgtaaaagagtagaggaaatgctgaaggaagtttcttcaataccacattacgtgccataagttacaacaccacttatcataggaatacattaaagagatattgttcctgtagtggtagacctgtccgtgtggcataacccattttattgaagcacgccaatattgacattttttgataacacttgatgatatgcagaattagataatttaagctgcaatgcgataactgtggacatctcacagattaaggtcgatctgatcaaagacgcttttaaagctaacactgatctaatgagtttgacaaacattttccattttattagaaatttcttaaaatcatgaaagtataagatattttttctcaaggaataaaaaaatgctagaattgagttttctttcttataatacggtaccaggagaccaagataaacaaataaattttgtgtgccctcttcaacagtaagatctgcgtcagcctacttggtaatgacaaactttcttcctgcctcaatttctatttccatatcacttaattcccagccatcactccagcactttctttccttaaatttattaaaaatgtaatttaga

SEQ ID NO: 4677 - DNA, 1127 bp, Zea mays
  Zm_smallRNAprecursor_166
gcttatccaatgcccaccacatgagattcctaggtattttatcatatgccatttccaagtcaataaaaaccatgtgcaagtacttcttccgctccttatatcgctcaatgttctgccttattaagaaaattgcttgcatggttgaccttacatgcatgaatccaaattcattcatggtgatatgcgtcattcctctcagacgatgcctaataactatctcccatagcttcatagtgtggctcatgagcttaatctctcgatagttggtacaactttgaatatctcccttgttcttgaagattggtactaatgtactcctcatccactcatcggacatcctgtttgatcgaaaaatatggttgaacaacttggttagccaaacgatagcaatattccaaggcattttcacatctctattaggataccatccaggcccatcaccttgccccatttcatcctctttaaagcttctttgacctctgattcttggatcctgcgtacaaagcatctatttaaatcattaaatgagtcatccaattggatgtccatagtctcattcccaccattaaaaagattgtcaaaatacatctgccacctctatttgatgtcttgtcctttcaccaagagttgatccatctcatccttaattcatttaacttggttgaggtccctcgtcttcctttctcgaatcgtagctatcttatagacatctttctccccctttctttgcacttagtctttggtaaagatcatcatagtagtttcgaccctttatgcctgattcatagctcgctttgcagtcttctttgccaccttatattacccctctatgttgacctcgctcctgtcatggaacaatctcctgtaacattatttcttatgcttttattgtcttttgaacatcctcggtccaccatcaagtatccttagattaatcgcccctccctttggtcactccaaacacctctggcgccacctttctaatacaagttgccaccttcctaacaaagatggagtacaatattgatttgttcttaatatttttcagcggaaagcataatttattaatgaagccttactaattaattatagattgttttttttctcgaatatgaaactccatacat

SEQ ID NO: 4678 - DNA, 1040 bp, Zea mays
  Zm_smallRNAprecursor_167
ttgcggcatttttctccatgtgccgcaacatttctgctgatgtccatgaggtggcacggcgtcagcgggagactgacgacaatcttcgtcgtcaagcttccactatgggtgtgccctttgcccctcgctcgcctgacgtgcctctccatcctcctcccccggagatcaatgagtggcaccagcaggcctacggggtgccatttatgtcagcagacgaagaagaagaagaagaagcctatgttgatgattgcgagcagtttgccccgcctccctaccatggggatccgggtcaatcatcctctcaccccccgcctccctacccgggtccgggacccattcctggtgaccctaggccatccggctctggttaccatcaccaccctccacctcctcctgatcatcgtacatcttcgggatctattttttctgcggctgacgagccacctcgggactccacatttgaggaggacgtgatgaggaccctcttccctgactatacttcataccctccatcatatcctccgtcatatcctcctcctggaggatattgattcatgtatccttgtctctctcttcgtttttggtacttgttgccaaaaagggggagaaaatccaacttctagtttgtggttctttcggttttcttttggattatttttgttttggccactgttgtggcttgtatcatcttaccattgtatgaaataaaactgttgggttgttattcaaagtaatatgatggtcttctggccatcatcttttgtcctatcagtttgtaatgattactttgctatgaagtaaaaatgatgtgtatttagagatagtcatgtgcatcacaactcctgttatgacactcttgcacccctcagatggttgtatttagtatggtttttgtcactatctctaaatgtgttgctcacatgacatattatgtcaaaacgttggattcacaatcgtgcacacatttagggggagtcatctacatacaatcattcaaaagaaattttctattgcaaatgtatatctttttgaccttaatt

SEQ ID NO: 4679 - DNA, 1064 bp, Zea mays
  Zm_smallRNAprecursor_168
cccggaaccacaagaatccttagaatgggattccaactcagcaccttttgttttgggattttgagaagagttgctctttggagagcacagtacgatgaaagttgtaagctgtgttcgggggggagttattgcctatcgttgtcctctatggtagaacccgtcggggaggcctgagaggcggtggtttaccctgtggcggatgtcagcggttcgagtccgcttatctccagcccgtgaacttagcggatactatgatagcaccgaaggttgccaattcgtcagttcgatctatgatttcgcattcatggacgttgataagatccttccatttagtagcaccttaggatggcatagccttaacgttaatggcgaggttcaaaagaggaaaggcttgcggtggatacctaggcacccagagacgaggaagggcgtagcaagcgacgaaatgcttcggggagttgaaaataagcatagatccggagattcccaaataggtcaaccttttgaactgcctgctgaatccatgagcaggcaagagacaacctggcgaactgaaacatcttagtagccagaggaaaagaaagcaaaagcgattcccgtagtagcggcgagcgaaatgggagcagcctaaaccgtgaaaacggggttgtgggagagcaatacaagcgttgtgctgctaggcgaagcggttgagtgccgcaccctagatggctaaagtccagtagccgaaagcatcactagcttacgctctgacccgagtagcatggggcacgtggaatcccgtgtgaatcagcaaggaccaccttgcaaggctaaatactcctgggtgaccgatagcgaagtagtaccgtgagggaaaggtgaaaagaacccccagtgggtagtgaaatagaacgtgaaaccgtgctgagctcccaagcagtgggaggggaaagtgatctctgaccgcgtgcctgttgaagaatgagccggcgactcataggcagtggcttggttaagggaatggaacccaccggagccgtagcgaaagcgagtcttcatagggcgattgtcactgcttatgg

SEQ ID NO: 4680 - DNA, 1063 bp, Zea mays
  Zm_smallRNAprecursor_169
gtgcctgttgaagaatgagccggcgactcataggcagtggcttggttaagggaatggaacccaccggagccgtagcgaaagcgagtcttcatagggcgattgtcactgcttatggacccgaacctgggtgatctatccatgaccaggatgaagcttggatgaaactaagcagaggtccgaaccgactgatgttgaagaatcagcggatgagttgtggttaggggtgaaatgccactcgaacccagagctagctggttctccccgaaatgcgttgaggcgcagcagttgactggacatctaggggtaaagcactgtttcggtgcgggctgcgcgagcggtaccaaatcgaggcaaactctgaatactagatatgacccaaaaataacaggggtcaaggtcggccagtgagacgatgggggataagcttcatcgtcgagagggaaacagcccggatcaccagctaaggcccctaaatgaccgctcagtgataaaggaggtgggggtgcaaagacagccaggaggtttgcctagaagcagccaccctttaaagagtgcgtaatagctcactgatcgagcgcccttgcgctgaagatgaacggggctaagcgatctgccgaagctgtgggatgtcaaaatgcatcggtaggggagcgttccgccttagagggaagcaaacgcgaaagcgggggtcgacgaagcggaagcgagaatgtcggcttgagtaacgaaaacattggtgagaatccaatgccccgaaaacccaaggtttcctccgcaaggttcgtccacggagggtgagtcagggcctaagatcaggccgaaaggcgtagtcgatggacaacaggtcaatattcctgtactaccccttgttggtacggagggacggaggaggctaggttagccgaaagatggttataggtttaaggacacaaggtgaccctgctttttcagggtaagaaggggtagagaaaatgcctcgagccgaggtccgagtaccaagcgctgcagcgctgaagtatgagccccgtggactagccattgcttctccacgaggctcatacca

SEQ ID NO: 4681 - DNA, 1048 bp, Zea mays
  Zm_smallRNAprecursor_170
gcaactgagcacaacaagcaccagcagttatgtattcggcctcgacagtggaaagtgcaacacggttttgctttttagacctccaagacaccagagaccgcccaaggaattggcaagtccccgaggtgctttttcgatctactttgcaaccggcatagtctgaatcagagtagccaactaaatctaaaaaggagccattgggataccagagacctagattttgggtgtgaactagatatctcaaaattctcttaactgccactaggtgacactctttcgggttagcttgaaaacgggcacacatacacacactaagcatgatatctggcctagatgcacataaatacagtatagatcctatcattgatctataaagcttttgatctacagttctaccttcttcatttaagtcgagatgaccacttgaagccattggtgtcttgacgtgctttgccttttccatgccaaacttcttgagcatgtcttgtgtgtacttggtttggcacagaaaggttccttccttgggttgttcaacttgaaaacccaggaagtacttgagctcacccatcatggacatctcaaacctgtttgtcatgaccctactaaattcctcacagaaagtttcatcagtactgccaaatataatgtcgtcgacatatatttgacaaacaaataattgattgtcaactttgtgagtgaataaagtagagtctacttttcctatttcaaaaccatttttaagcaagaaatctttaagacattcatactatgctctaggagcttgtttaagcccatagagcgctttgtgaagaaggtagacatggtttggcttcttaggatcttcaaagcccggtggttgctccacatagaccaactcttgcagtggtccatttaggaaagcacttttgacatccatttgatacaatttgaaatcatggttagtagcataggcaattaatattcttatgaactctaaccttgctactggtgcattggtttctccaaagtcaagtccttccacttgagtgaaacactaagcaaccaggca

SEQ ID NO: 4682 - DNA, 1070 bp, Zea mays
  Zm_smallRNAprecursor_171
atggtgtacctaaaaacacaaatcgagatcattgtattaaattagaagataataaaactgatacctatctttctaattaaaatagttttgctaaataagctgcaaccatgcacatgcacacaacaaagcatgtatcttacatgaaaagtgagaaagcactttcatgcatccccctaccaacaaacagacgaggctgcacgaagacacacagcattagttcatgatgttcaactatagtcagcattatgaaaaacttacacattagttccagcatagaaaccaataagtaaaataatgttaattacctaaaagtaaattgtcccaaaaggtatctttcataatacaaaaggttatttaagtaaaaaatctacaattttttaagttagcatccatcatcttggttgctacattttttctggaatacacaaaagagcttgcacatcattatattattgggttttttaaattggtgcccttagttttggtggtgtgctcacctatacccttagtcgtgttttttgctcagttgtgtccttctgttctatagcactggaagggcacagctgagcaaaaaacacgactaagggtatagttgagcacaccaccaaaactaagggcaccaatttaaaaaacccattattaaataggagtctaataaatacccatagaagcctattaaggcatgattttagactatatgagatgtgacgtcgtcactacttcacataacacatgagaaaggcatattagtttggaaggtcaagtagtgcccaggaaaaataactttcagtatttatgatcaatgctacatagagacgaatattgatgacaatgttagccatagaatcaaagcaagatggatgaagtggcgtcaagaatccaacgttctatattacaagagggtaccacaaaagataaaataatctaatgtctagctaataaatgttgcaaaaatatgtatcttacgttggattttatggccatggaagaaggaattgagtccagaacgatgatgtatgtgataggctagagtagcatcaattgaagaaaaggttgtccaacactggttg

SEQ ID NO: 4683 - DNA, 1097 bp, Zea mays
  Zm_smallRNAprecursor_172
agagcgaggagacccttccgcttgggattcccctgcctcctcctgctgcggcggcttcgataggtgctgctgcgggcttgcggcttacatatgcatgcgactgatgagaggggcggagaggtgtgcagatgtgatggaaggcgaactgaactagagaagggaggggcgcgtgtcgggggaggcttagatgggtgcgcgtagcgtttttcgtgtgaggccgcaggggtgtcgctagcagttagctccggatcacctctgacaggtggtgccgattgccgtgctggcccagtggcagtgaggcgtgagcttcgtgcttgtgctttgttgcggcctggtccttcttcggtgcgtgcgccgctgaaatttgagctcttttcctttttcctcttttcattcagaaaaacaatgaaaaagagtttcagctagcgagctttctctcttttacaaaataatgctctggtgcaaaaggccctgccactgaccaccgattaagggcgtgtttggtttacggtagattttaagaatctgattttaagaatatattatggatccaaacagagtttattttgtgccttagattctgcgctcatagaaacaaaatctgtagaatcaagccatagttgggttttcttgggtaacgtgaacatgcagattttaaaaatctgcggaaaccaaacgcggcctaatatcactttgttgtcacgtcttggtgaaatggtgcatgaaagtatttagagccgttcagctcttagtgtcacagctatacctgtctcgatgctgctgtgccgtctgccgtaccgctggcacttacacaaaagtgttagagccggtcaactgtatgaaatcacagaggcaagacattacagctgcttaccaccagtacagcacattgtttgctcatcagtcagtcagattaaggattcgttatccgtgccaaatcaagcgtatggctcagctatagtagctctgtgtgtgtgatgatgacgccaagatttgcatgggctgtccgatggcgccgtgacagctcggcggcaacacgggcgtccgaatgcatgaacttggggcttcagatgactgtatctaacaatcttttggat

SEQ ID NO: 4684 - DNA, 1102 bp, Zea mays
  Zm_smallRNAprecursor_173
acgcaacccggaggagaaaaccctctcgcacgccgcatcacgacaagggcacgggggtccttggggacagacaatgtgtggcgcagaccgcctcgccgaggtgaagaggacgtgtgggtgggccagcggccgccgccgtctccctcaggctgcagtacagctcaagaacgctagtagtaccaccgtcgtctccctcaggctgcagtacactcagaaacctcacgagcatggatggagtacacactggccgccgcgctcttcccagttcccgtgtagtacactagtacgtacttcagcagctagtagtaccaccactgaagcgagcgagcgagcacagactgaatcggtactactacgtacaccattgctcgcccgcctacaaataagtcacgagtgatgagtggcctgcaaagccatggcaggttgagcatctcctctagttctgggattagggataggaatcagggtcagtttgctctgctggctagtagcagcagcggtggaaggggcatgcagaggaggagcacgagcgaggtgtggctggaagaagcagccggggcctgtgtgctatatacccctcgcaagctctcctcactcctctcctgtgcctgcctcttccattccttctgctacgccattatatgtttgcaagcgtcagaagtgcatgcttctgcgcagttgccctgtgatgaggcaaccaacagccaaacatcgctggcattccattccacacagctctactgcattgtgctagtactaaaagtttctcaggctctgcgtttggtttgcttgagatttttggaatctgcctttggtttaattgctagattctacagattcaattacatacaagcacattacccctaggcatagtagtatctacatgcgtttggttcattatgagatatttttatccggattctaaaaaccccatgaaaaccaaacagactttcagtcacttctgaatctcactctctgctatgttagcaccacggatgctgagtgtcgctcctgaaatggaggcatctttccttgcgcgtgatcatgcataggcgcatagctgtgggtgtgaaagttcagagggcaggaagcgtcatacccc

SEQ ID NO: 4685 - DNA, 1102 bp, Zea mays; identical to SEQ ID NO: 4684
  Zm_smallRNAprecursor_174

SEQ ID NO: 4686 - DNA, 1102 bp, Zea mays; identical to SEQ ID NO: 4684
  Zm_smallRNAprecursor_175

SEQ ID NO: 4687 - DNA, 1103 bp, Zea mays
  Zm_smallRNAprecursor_176
acgcaacccggaggagaaaaccctctcgcacgccgcatcacgacaagggcacgggggtccttggggacagacaatgtgtggcgcagaccgcctcgccgaggtgaagaggacgtgtgggtgggccagcggccgccgccgtctccctcaggctgcagtacagctcaagaacgctagtagtaccaccgtcgtctccctcaggctgcagtacactcagaaacctcacgagcatggatggagtacacactggccgccgcgctcttcccagttcccgtgtagtacactagtacgtacttcagcagctagtagtaccaccactgaagcgagcgagcgagcacagactgaatcggtactactacgtacaccattgctcgcccgcctacaaataagtcacgagtgatgagtggcctgcaaagccatggcaggttgagcatctcctctagttctgggattagggataggaatcagggtcagtttgctctgctggctagtagcagcagcggtggaaggggcatgcagaggaggagcacgagcgaggtgtggctggaagaagcagccggggcctgtgtgctatatacccctcgcaagctctcctcactcctctcctgtgcctgcctcttccattccttctgctacgccattatatgtttgcaagcgtcagaagtgcatgcttctgcgcagttgccctgtgatgaggcaaccaacagccaaacatcgctggcattccattccacacagctctactgcattgtgctagtactaaaagtttctcaggctctgcgtttggtttgcttgagatttttggaatctgcctttggtttaattgctagattctacagattcaattacatacaagcacattacccctaggcatagtagtatctacatgcgtttggttcattatgagatatttttatccggattctaaaaaccccatgaaaaccaaacagactttcagtcacttctgaatctcactctctgctatgttagcaccacggatgctgagtgtcgctcctgaaatggaggcatctttccttgcgcgtgatcatgcataggcgcatagctgtgggtgtgaaagttcagagggcaggaagcgtcatacccct

SEQ ID NO: 4688 - DNA, 1103 bp, Zea mays; identical to SEQ ID NO: 4687
  Zm_smallRNAprecursor_177

SEQ ID NO: 4689 - DNA, 1103 bp, Zea mays; identical to SEQ ID NO: 4687
  Zm_smallRNAprecursor_178

SEQ ID NO: 4690 - DNA, 1104 bp, Zea mays
  Zm_smallRNAprecursor_179
acgcaacccggaggagaaaaccctctcgcacgccgcatcacgacaagggcacgggggtccttggggacagacaatgtgtggcgcagaccgcctcgccgaggtgaagaggacgtgtgggtgggccagcggccgccgccgtctccctcaggctgcagtacagctcaagaacgctagtagtaccaccgtcgtctccctcaggctgcagtacactcagaaacctcacgagcatggatggagtacacactggccgccgcgctcttcccagttcccgtgtagtacactagtacgtacttcagcagctagtagtaccaccactgaagcgagcgagcgagcacagactgaatcggtactactacgtacaccattgctcgcccgcctacaaataagtcacgagtgatgagtggcctgcaaagccatggcaggttgagcatctcctctagttctgggattagggataggaatcagggtcagtttgctctgctggctagtagcagcagcggtggaaggggcatgcagaggaggagcacgagcgaggtgtggctggaagaagcagccggggcctgtgtgctatatacccctcgcaagctctcctcactcctctcctgtgcctgcctcttccattccttctgctacgccattatatgtttgcaagcgtcagaagtgcatgcttctgcgcagttgccctgtgatgaggcaaccaacagccaaacatcgctggcattccattccacacagctctactgcattgtgctagtactaaaagtttctcaggctctgcgtttggtttgcttgagatttttggaatctgcctttggtttaattgctagattctacagattcaattacatacaagcacattacccctaggcatagtagtatctacatgcgtttggttcattatgagatatttttatccggattctaaaaaccccatgaaaaccaaacagactttcagtcacttctgaatctcactctctgctatgttagcaccacggatgctgagtgtcgctcctgaaatggaggcatctttccttgcgcgtgatcatgcataggcgcatagctgtgggtgtgaaagttcagagggcaggaagcgtcatacccctt

SEQ ID NO: 4691 - DNA, 1104 bp, Zea mays; identical to SEQ ID NO: 4690
  Zm_smallRNAprecursor_180

SEQ ID NO: 4692 - DNA, 1104 bp, Zea mays; identical to SEQ ID NO: 4690
  Zm_smallRNAprecursor_181

SEQ ID NO: 4693 - DNA, 1101 bp, Zea mays
  Zm_smallRNAprecursor_182
cgcaacccggaggagaaaaccctctcgcacgccgcatcacgacaagggcacgggggtccttggggacagacaatgtgtggcgcagaccgcctcgccgaggtgaagaggacgtgtgggtgggccagcggccgccgccgtctccctcaggctgcagtacagctcaagaacgctagtagtaccaccgtcgtctccctcaggctgcagtacactcagaaacctcacgagcatggatggagtacacactggccgccgcgctcttcccagttcccgtgtagtacactagtacgtacttcagcagctagtagtaccaccactgaagcgagcgagcgagcacagactgaatcggtactactacgtacaccattgctcgcccgcctacaaataagtcacgagtgatgagtggcctgcaaagccatggcaggttgagcatctcctctagttctgggattagggataggaatcagggtcagtttgctctgctggctagtagcagcagcggtggaaggggcatgcagaggaggagcacgagcgaggtgtggctggaagaagcagccggggcctgtgtgctatatacccctcgcaagctctcctcactcctctcctgtgcctgcctcttccattccttctgctacgccattatatgtttgcaagcgtcagaagtgcatgcttctgcgcagttgccctgtgatgaggcaaccaacagccaaacatcgctggcattccattccacacagctctactgcattgtgctagtactaaaagtttctcaggctctgcgtttggtttgcttgagatttttggaatctgcctttggtttaattgctagattctacagattcaattacatacaagcacattacccctaggcatagtagtatctacatgcgtttggttcattatgagatatttttatccggattctaaaaaccccatgaaaaccaaacagactttcagtcacttctgaatctcactctctgctatgttagcaccacggatgctgagtgtcgctcctgaaatggaggcatctttccttgcgcgtgatcatgcataggcgcatagctgtgggtgtgaaagttcagagggcaggaagcgtcatacccc

SEQ ID NO: 4694 - DNA, 1101 bp, Zea mays; identical to SEQ ID NO: 4693
  Zm_smallRNAprecursor_183

SEQ ID NO: 4695 - DNA, 1101 bp, Zea mays; identical to SEQ ID NO: 4693
  Zm_smallRNAprecursor_184

SEQ ID NO: 4696 - DNA, 1101 bp, Zea mays; identical to SEQ ID NO: 4693
  Zm_smallRNAprecursor_185

SEQ ID NO: 4697 - DNA, 1102 bp, Zea mays
  Zm_smallRNAprecursor_186
cgcaacccggaggagaaaaccctctcgcacgccgcatcacgacaagggcacgggggtccttggggacagacaatgtgtggcgcagaccgcctcgccgaggtgaagaggacgtgtgggtgggccagcggccgccgccgtctccctcaggctgcagtacagctcaagaacgctagtagtaccaccgtcgtctccctcaggctgcagtacactcagaaacctcacgagcatggatggagtacacactggccgccgcgctcttcccagttcccgtgtagtacactagtacgtacttcagcagctagtagtaccaccactgaagcgagcgagcgagcacagactgaatcggtactactacgtacaccattgctcgcccgcctacaaataagtcacgagtgatgagtggcctgcaaagccatggcaggttgagcatctcctctagttctgggattagggataggaatcagggtcagtttgctctgctggctagtagcagcagcggtggaaggggcatgcagaggaggagcacgagcgaggtgtggctggaagaagcagccggggcctgtgtgctatatacccctcgcaagctctcctcactcctctcctgtgcctgcctcttccattccttctgctacgccattatatgtttgcaagcgtcagaagtgcatgcttctgcgcagttgccctgtgatgaggcaaccaacagccaaacatcgctggcattccattccacacagctctactgcattgtgctagtactaaaagtttctcaggctctgcgtttggtttgcttgagatttttggaatctgcctttggtttaattgctagattctacagattcaattacatacaagcacattacccctaggcatagtagtatctacatgcgtttggttcattatgagatatttttatccggattctaaaaaccccatgaaaaccaaacagactttcagtcacttctgaatctcactctctgctatgttagcaccacggatgctgagtgtcgctcctgaaatggaggcatctttccttgcgcgtgatcatgcataggcgcatagctgtgggtgtgaaagttcagagggcaggaagcgtcatacccct

SEQ ID NO: 4698 - DNA, 1102 bp, Zea mays; identical to SEQ ID NO: 4697
  Zm_smallRNAprecursor_187

SEQ ID NO: 4699 - DNA, 1102 bp, Zea mays; identical to SEQ ID NO: 4697
  Zm_smallRNAprecursor_188

SEQ ID NO: 4700 - DNA, 1102 bp, Zea mays; identical to SEQ ID NO: 4697
  Zm_smallRNAprecursor_189

SEQ ID NO: 4701 - DNA, 1103 bp, Zea mays
  Zm_smallRNAprecursor_190
cgcaacccggaggagaaaaccctctcgcacgccgcatcacgacaagggcacgggggtccttggggacagacaatgtgtggcgcagaccgcctcgccgaggtgaagaggacgtgtgggtgggccagcggccgccgccgtctccctcaggctgcagtacagctcaagaacgctagtagtaccaccgtcgtctccctcaggctgcagtacactcagaaacctcacgagcatggatggagtacacactggccgccgcgctcttcccagttcccgtgtagtacactagtacgtacttcagcagctagtagtaccaccactgaagcgagcgagcgagcacagactgaatcggtactactacgtacaccattgctcgcccgcctacaaataagtcacgagtgatgagtggcctgcaaagccatggcaggttgagcatctcctctagttctgggattagggataggaatcagggtcagtttgctctgctggctagtagcagcagcggtggaaggggcatgcagaggaggagcacgagcgaggtgtggctggaagaagcagccggggcctgtgtgctatatacccctcgcaagctctcctcactcctctcctgtgcctgcctcttccattccttctgctacgccattatatgtttgcaagcgtcagaagtgcatgcttctgcgcagttgccctgtgatgaggcaaccaacagccaaacatcgctggcattccattccacacagctctactgcattgtgctagtactaaaagtttctcaggctctgcgtttggtttgcttgagatttttggaatctgcctttggtttaattgctagattctacagattcaattacatacaagcacattacccctaggcatagtagtatctacatgcgtttggttcattatgagatatttttatccggattctaaaaaccccatgaaaaccaaacagactttcagtcacttctgaatctcactctctgctatgttagcaccacggatgctgagtgtcgctcctgaaatggaggcatctttccttgcgcgtgatcatgcataggcgcatagctgtgggtgtgaaagttcagagggcaggaagcgtcatacccctt

SEQ ID NO: 4702 - DNA, 1103 bp, Zea mays; identical to SEQ ID NO: 4701
  Zm_smallRNAprecursor_191

SEQ ID NO: 4703 - DNA, 1100 bp, Zea mays
  Zm_smallRNAprecursor_192
gcaacccggaggagaaaaccctctcgcacgccgcatcacgacaagggcacgggggtccttggggacagacaatgtgtggcgcagaccgcctcgccgaggtgaagaggacgtgtgggtgggccagcggccgccgccgtctccctcaggctgcagtacagctcaagaacgctagtagtaccaccgtcgtctccctcaggctgcagtacactcagaaacctcacgagcatggatggagtacacactggccgccgcgctcttcccagttcccgtgtagtacactagtacgtacttcagcagctagtagtaccaccactgaagcgagcgagcgagcacagactgaatcggtactactacgtacaccattgctcgcccgcctacaaataagtcacgagtgatgagtggcctgcaaagccatggcaggttgagcatctcctctagttctgggattagggataggaatcagggtcagtttgctctgctggctagtagcagcagcggtggaaggggcatgcagaggaggagcacgagcgaggtgtggctggaagaagcagccggggcctgtgtgctatatacccctcgcaagctctcctcactcctctcctgtgcctgcctcttccattccttctgctacgccattatatgtttgcaagcgtcagaagtgcatgcttctgcgcagttgccctgtgatgaggcaaccaacagccaaacatcgctggcattccattccacacagctctactgcattgtgctagtactaaaagtttctcaggctctgcgtttggtttgcttgagatttttggaatctgcctttggtttaattgctagattctacagattcaattacatacaagcacattacccctaggcatagtagtatctacatgcgtttggttcattatgagatatttttatccggattctaaaaaccccatgaaaaccaaacagactttcagtcacttctgaatctcactctctgctatgttagcaccacggatgctgagtgtcgctcctgaaatggaggcatctttccttgcgcgtgatcatgcataggcgcatagctgtgggtgtgaaagttcagagggcaggaagcgtcatacccc

SEQ ID NO: 4704 - DNA, 1100 bp, Zea mays; identical to SEQ ID NO: 4703
  Zm_smallRNAprecursor_193

SEQ ID NO: 4705 - DNA, 1101 bp, Zea mays
  Zm_smallRNAprecursor_194
gcaacccggaggagaaaaccctctcgcacgccgcatcacgacaagggcacgggggtccttggggacagacaatgtgtggcgcagaccgcctcgccgaggtgaagaggacgtgtgggtgggccagcggccgccgccgtctccctcaggctgcagtacagctcaagaacgctagtagtaccaccgtcgtctccctcaggctgcagtacactcagaaacctcacgagcatggatggagtacacactggccgccgcgctcttcccagttcccgtgtagtacactagtacgtacttcagcagctagtagtaccaccactgaagcgagcgagcgagcacagactgaatcggtactactacgtacaccattgctcgcccgcctacaaataagtcacgagtgatgagtggcctgcaaagccatggcaggttgagcatctcctctagttctgggattagggataggaatcagggtcagtttgctctgctggctagtagcagcagcggtggaaggggcatgcagaggaggagcacgagcgaggtgtggctggaagaagcagccggggcctgtgtgctatatacccctcgcaagctctcctcactcctctcctgtgcctgcctcttccattccttctgctacgccattatatgtttgcaagcgtcagaagtgcatgcttctgcgcagttgccctgtgatgaggcaaccaacagccaaacatcgctggcattccattccacacagctctactgcattgtgctagtactaaaagtttctcaggctctgcgtttggtttgcttgagatttttggaatctgcctttggtttaattgctagattctacagattcaattacatacaagcacattacccctaggcatagtagtatctacatgcgtttggttcattatgagatatttttatccggattctaaaaaccccatgaaaaccaaacagactttcagtcacttctgaatctcactctctgctatgttagcaccacggatgctgagtgtcgctcctgaaatggaggcatctttccttgcgcgtgatcatgcataggcgcatagctgtgggtgtgaaagttcagagggcaggaagcgtcatacccct

SEQ ID NO: 4706 - DNA, 1171 bp, Zea mays
  Zm_smallRNAprecursor_195
ctctgctgcgcgcgcagactttctttatttattttctctgtccagttccttctcctcgcgccatgcatattttctttctttcttgcctcgctcaagtgcagggagcgcagacattttttttttgagcagtttttttggtcgctgcgcagcaaaaccagctgaactgggccatgggggcagttgaactggtcctgaggaccagctcaactgcctatatatatttgacactctctccttctcttttcccacttcattcactctcgccttggtcgcttcacaacctttagagcctttccttcacacactccaaccggttcacagtttcaccaccgttttcaatcatggtgcgtcgccgcaacccctctgtggttgagtttagcagcgactccgacgagattcaggaggaatctcccatcccctctcctccgcctcgtcgctccctctctaagagaggacgtggctctggtcggatgcctggcgagggctcttccatgccttcgcagccgactcgcgggagacgccaaaaggttggcgcctctcgtcctcgtcgtagcacgtcttcctcagggtatgctccctgccaagaggaggatggggctttcgacgacttcgtcgaccttccggcgcctgatgctctctacgtcaccggactgcacatgcatccggcgaacgtcagccgcggtccgcatgaatctcccgtcgacttcactcagaagggaatagaaacccttcagcgtctgaggttttccaaccctactctcactcctcgtcatcctggtgtccaggaccctcggttctggaatcttttccaggctgacttctacaattctgtcattcttacaaagaaacacccagtcgtccgacatagatttattgactgggagggttgtgagaatatgggagatgttgacatgtcgtcagctctcgttcacttagagagaaaggggttacgtaacattatgaccatggaatacccctggaacgatgaggtggtagctcagttctatgccaccctctggataaagaaagtagatgaggaagccgatgggtatgattacccagtcatttatttcttcatccagggtaactggcacaaagtcagttatcgtcgttttgcccatattctgggcttctctgatgcagacattcagggcagcaacatgcgagtgca

SEQ ID NO: 4707 - DNA, 1058 bp, Zea mays
  Zm_smallRNAprecursor_196
aaacccttcagcgtctgaggttttccaaccctactctcactcctcgtcatcctggtgtccaggaccctcggttctggaatcttttccaggctgacttctacaattctgtcattcttacaaagaaacacccagtcgtccgacatagatttattgactgggagggttgtgagaatatgggagatgttgacatgtcgtcagctctcgttcacttagagagaaaggggttacgtaacattatgaccatggaatacccctggaacgatgaggtggtagctcagttctatgccaccctctggataaagaaagtagatgaggaagccgatgggtatgattacccagtcatttatttcttcatccagggtaactggcacaaagtcagttatcgtcgttttgcccatattctgggcttctctgatgcagacattcagggcagcaacatgcgagtgcatggcattcggctgcccaggcaggaagagacggaattcattcatgtctctactgagcgggagttctggacaaccgctaacatgcataggtactataggtaccttaattccttgtcccggatgaccgttctcccaaagggcggtaatcaaatgaacgtccttggggagagtcgagtcctcctcctcctccttgctccaaacagtctcgcccgcatcaatgtgtttgacatgatctgggaggagatcgtccgtgcttcctggtctcctcacagagggtgtcttcatgcaccctttatcatgaagatgatcgaagtggtcacccagacccacttcgaaaaacccgtcaaacactcctgctacgtaccctactgggttgattcctccaacccagctgctcgtacgaagcgggttccctcacggtctggaggccctgcctcctcctctgagccacctcgccagcctccccaccatccttcctcctctccccccgctgctgcctcgcgtccctctcctggccgcggatctcccatgccacgtgctagtggtcgtggtcgaggtcgtggccacgggatgggtgctcgcttgctccatgggcttgcggcatttttctcc

SEQ ID NO: 4708 - DNA, 1141 bp, Zea mays
  Zm_smallRNAprecursor_197
aaacccttcagcgtctgaggttttccaaccctactctcactcctcgtcatcctggtgtccaggaccctcggttctggaatcttttccaggctgacttctacaattctgtcattcttacaaagaaacacccagtcgtccgacatagatttattgactgggagggttgtgagaatatgggagatgttgacatgtcgtcagctctcgttcacttagagagaaaggggttacgtaacattatgaccatggaatacccctggaacgatgaggtggtagctcagttctatgccaccctctggataaagaaagtagatgaggaagccgatgggtatgattacccagtcatttatttcttcatccagggtaactggcacaaagtcagttatcgtcgttttgcccatattctgggcttctctgatgcagacattcagggcagcaacatgcgagtgcatggcattcggctgcccaggcaggaagagacggaattcattcatgtctctactgagcgggagttctggacaaccgctaacatgcataggtactataggtaccttaattccttgtcccggatgaccgttctcccaaagggcggtaatcaaatgaacgtccttggggagagtcgagtcctcctcctcctccttgctccaaacagtctcgcccgcatcaatgtgtttgacatgatctgggaggagatcgtccgtgcttcctggtctcctcacagagggtgtcttcatgcaccctttatcatgaagatgatcgaagtggtcacccagacccacttcgaaaaacccgtcaaacactcctgctacgtaccctactgggttgattcctccaacccagctgctcgtacgaagcgggttccctcacggtctggaggccctgcctcctcctctgagccacctcgccagcctccccaccatccttcctcctctccccccgctgctgcctcgcgtccctctcctggccgcggatctcccatgccacgtgctagtggtcgtggtcgaggtcgtggccacgggatgggtgctcgcttgctccatgggcttgcggcatttttctccgcgtgccgcaacatttctgctgatgtccatgaggtggcacggcgtcagcgggagactgacgacaatcttcgtcgtcaagcctc

SEQ ID NO: 4709 - DNA, 1057 bp, Zea mays
  Zm_smallRNAprecursor_198
aacccttcagcgtctgaggttttccaaccctactctcactcctcgtcatcctggtgtccaggaccctcggttctggaatcttttccaggctgacttctacaattctgtcattcttacaaagaaacacccagtcgtccgacatagatttattgactgggagggttgtgagaatatgggagatgttgacatgtcgtcagctctcgttcacttagagagaaaggggttacgtaacattatgaccatggaatacccctggaacgatgaggtggtagctcagttctatgccaccctctggataaagaaagtagatgaggaagccgatgggtatgattacccagtcatttatttcttcatccagggtaactggcacaaagtcagttatcgtcgttttgcccatattctgggcttctctgatgcagacattcagggcagcaacatgcgagtgcatggcattcggctgcccaggcaggaagagacggaattcattcatgtctctactgagcgggagttctggacaaccgctaacatgcataggtactataggtaccttaattccttgtcccggatgaccgttctcccaaagggcggtaatcaaatgaacgtccttggggagagtcgagtcctcctcctcctccttgctccaaacagtctcgcccgcatcaatgtgtttgacatgatctgggaggagatcgtccgtgcttcctggtctcctcacagagggtgtcttcatgcaccctttatcatgaagatgatcgaagtggtcacccagacccacttcgaaaaacccgtcaaacactcctgctacgtaccctactgggttgattcctccaacccagctgctcgtacgaagcgggttccctcacggtctggaggccctgcctcctcctctgagccacctcgccagcctccccaccatccttcctcctctccccccgctgctgcctcgcgtccctctcctggccgcggatctcccatgccacgtgctagtggtcgtggtcgaggtcgtggccacgggatgggtgctcgcttgctccatgggcttgcggcatttttctcc

SEQ ID NO: 4710 - DNA, 1058 bp, Zea mays
  Zm_smallRNAprecursor_199
aacccttcagcgtctgaggttttccaaccctactctcactcctcgtcatcctggtgtccaggaccctcggttctggaatcttttccaggctgacttctacaattctgtcattcttacaaagaaacacccagtcgtccgacatagatttattgactgggagggttgtgagaatatgggagatgttgacatgtcgtcagctctcgttcacttagagagaaaggggttacgtaacattatgaccatggaatacccctggaacgatgaggtggtagctcagttctatgccaccctctggataaagaaagtagatgaggaagccgatgggtatgattacccagtcatttatttcttcatccagggtaactggcacaaagtcagttatcgtcgttttgcccatattctgggcttctctgatgcagacattcagggcagcaacatgcgagtgcatggcattcggctgcccaggcaggaagagacggaattcattcatgtctctactgagcgggagttctggacaaccgctaacatgcataggtactataggtaccttaattccttgtcccggatgaccgttctcccaaagggcggtaatcaaatgaacgtccttggggagagtcgagtcctcctcctcctccttgctccaaacagtctcgcccgcatcaatgtgtttgacatgatctgggaggagatcgtccgtgcttcctggtctcctcacagagggtgtcttcatgcaccctttatcatgaagatgatcgaagtggtcacccagacccacttcgaaaaacccgtcaaacactcctgctacgtaccctactgggttgattcctccaacccagctgctcgtacgaagcgggttccctcacggtctggaggccctgcctcctcctctgagccacctcgccagcctccccaccatccttcctcctctccccccgctgctgcctcgcgtccctctcctggccgcggatctcccatgccacgtgctagtggtcgtggtcgaggtcgtggccacgggatgggtgctcgcttgctccatgggcttgcggcatttttctccg

SEQ ID NO: 4711 - DNA, 1094 bp, Zea mays
  Zm_smallRNAprecursor_200
cccactacatatgaagctgctatgagaagtgcaaattcatccaaatggttatctgccatggaagatgaattagaatccatgagaatgaacaaagtttgggacttagaagtcattccccatggagccaaaacagtaggctgtaaatgggtctacaagacaaagcgtgactccagagggaacatagaaagatacaaggctagacttgtggccaaagggttcacacagagagaaggcattgactaccatgaaaccttctcacctgtctcaacaaaagattcattcaggatcataatggcactagttgctcattttgatctagagctccatcagatggatgtaaagacagcattcctaaatggagagttagaagaaaacgtgttcatggcacaaccaaagggttttgttgtgagcggtaaagaacacatgggatgtcacttgaggaggtccatttatggattaaaacaggcctccagacagtggtacatcaagtttgatcagactataagaaagtttggtttcgaggaaaacaaggaagacaattgcatttatgcaaaatttaagaaaggaaagtatatcttccttgttctgtatgtcgatgacatactcttagctagtagtgataaggatctactagcggaaacaaaagggtttctttcctcgaattttgatatgaaagacatgggagaagcctcttatgttcttggaatagaaattcgcagagacagacaaaagagagtactaggactctcacagaagtcatatatagaaaatgtactaaagaggtataatatgcacaagtgtaatgcctcgcctggtccaatagtcaagggtgataagtttggggaatatcagtgtcccaagaatcagtatgagaaaaacaagatgaagtcagtaccatatgcttcagctatcggaagcattatgtatgctcaagtatgtactcgccctgacttagcttttaccaccgggatgcttggacgctatcagaagaatccaggcatagaacactggaaagcagtcaagaaggctctaaggtaccttcaaggtactaaaggtctcatgcttacgtacagaagatctaattccctacaaat

SEQ ID NO: 4712 - DNA, 1059 bp, Zea mays
  Zm_smallRNAprecursor_201
tgtacagctggggtatttggcccccatgcatggacgcgcgcgggggggaaacgggagcaccagctgtgctgtgtgtacaaccatgcatggcttcctgtcctgggggtcgacaggcggttgtaccatgagcaagtacaatgagacgcacggaccaatgcggacctagtgctagtggcatgccatcctcttctcccaccccttgtctcttcctcatgtggcagcccagcacaaaaatgtacatggctctccactcctgggctgggcgtagtctcttggcgccatgactgactgattgcgctccgatcctcccacatgatcgccacatgcacttgtccccgtgaattacttcgctttcactctctacctctgtctgtatctagaatgatattactatgtaatttttttaaaaaaaaaagatgcatagcttttactacctccaatcttatatatttgacgccggatagtgtcacaacagcaatccaggatattcccgtcggccgggtaccgacgggatttactctaaaaccgacgggatttagctattcccgtcggttttagagtaaatcccgtcggtacccggccgacaggagctacccgacggggattacattaactcccgtcgggccgacgggagataattatctcccgtcggccctaggtagccgacagcggttgtcgctccccggcccagggctgacgtggcgggcaattaactcccgtcggccttaggtagccgacgggagttatgtgtccgccacgtcagccctgattgccgggacgggggagcgacaactgccgtcggcttggctaagccgacggaagttatcctggacagtaccaggataactcccgtcggctttgcaaagccgacgggagttaaactgtcaccccccccaaaaaccccatatttatgatcaatggcacagaaaatatacacaatatcatcatgcacattcacacatcaatcacatccatccacacacatcaatcacatccatccacacacatatatataagaacattcatacacataagaagtgttcatccacataagaagtg

SEQ ID NO: 4713 - DNA, 1046 bp, Zea mays
  Zm_smallRNAprecursor_202
gcgcatccacgcaaagtagagcagcgcgatgcgggggcgtggaggcggacggacgtgttccaggggaatcggtcgcgggcggcgggatccggggggcgcgcgaagacggcgtccgcgagcgtggcgacaccgggatggacgcgagggcgaggaggaagcggttggagagccataacggggaggcggagaggtggcctgactgcccgaggaacgcgtgaggctggaggcgagagaggagcatctgcagggcgaccgggggaggccgcatcaatcaggcatcgccacttcaaactctgaaggcttgctattgatgggccttggcgagcacattttcacagcggcccgctacgaaatagcgcgcgccgtggttccgtgtgcgtggagcgcgtctaggtttagtcccaccccggaggcaatggacgagcggagccagaggaacgctataaaagaagaccctggtggctagtgcaattcatacctttctcggccttttggctaagatcaagtgtagtatctgttcttatcagtttaatatctgatatgtgaactatgtgttcacttcgatattaaatttattttttgtgggggagggtccgtatagtagcttgctacttggtcctcgtgtgtcgctcgggcgttgcacttctgcccgagccaggcgcatcccaaccagttcaaatcaaatttcgtgttctctgcttaaacggcttacagtagtttgttttcagtttattttgattgcggaatcttgttgtattaccggttaagatgatttttatcttgtatatgtccacagaccagtaatcagataaatctatattgaacagaaaagtgacttccacgcacctcaacacttgaccgtcccaaactaaatccgtacctcaacatcagacccttgctttgcttgagatcatcgaaactaagccgttttagagttaaaaacctgtgattatcagtaaccggttttctatttttaaatctaaaaacaattttcaggtttctcagctggttttggcgttttcgactgattttcttcgctgattctt

SEQ ID NO: 4714 - DNA, 1070 bp, Zea mays
  Zm_smallRNAprecursor_203
atatggacatgtcaatctaccatgtgtactccaaccggtaaaaatagcatacgccatgaagtcatgcaccgaccacaaatacgcaactcgaagtttgaatatctgttttttaaaaacattgtatgtttcaacacctttccaaagctcttcaactcttcaatcaagggttttaacatgacattgaggttcttttcaggatagtctgggccaggaatgattaagcaaagaaatataaattcatatttcatacaaagagaaggtggaatgttgtatggaataacaaagatgagccaacatcagtatgatgatgccatttgaccaaaaggtgtgaagtcatcggtcgcgaggccgatttgaacattcctcggatcagctgcaaagtcgagatcaaacgtgtcgagagccttccatgcatccccatctgaagggtgcacgattaggtcatcgttatcacagacaccttctttggggccaattccctgtataccactggaaaatatactcattccttgtatgccactgaccccacatgtcatagacaccaaaaaatatacctatatgccactcaatggcacacaaggaatgagtataaaatctgatggcataccaggaattttctcttctttgtgtcgtcgcatgtgcatagcggttttttagatagaaacatttgtttgactcgaggagttagtggcaagtagcggagctgcttatgtgcaacatctatcctcaccttctcaccctcatcattaacaacttccacaaatctaaattgtccacatttcagacattttttctcttccgcgtgctccttcatgaaaagcatacaattatttttgcatacatcaatcttctcataatccataccgagacctttgataattgtctatgaatggtacatgtctttaggcaacttattgggcttttgggagcacatctcccaataatctttaaagtctcattgtaacaattgttcgagaaaaagtacttatactttaatggccatgaaccgagtcacaaaagtgagtatactcacatctgtgtgttcatgcaacggctcttcagagtctttt

SEQ ID NO: 4715 - DNA, 1058 bp, Zea mays
  Zm_smallRNAprecursor_204
atagacacctctacataacattatcacgggtgacaaatcatataaaatgactttatttccgagggtataataattaccctcggaaattaaaaattaaaattatctaagcaccactaattaaatttaggccctcggatataataagataaacattatttaacatactaactattaaataacaacattggaaactacaaaacaatattaatatatacaaaatattaataatacattaaatacattaatattaaataccttacaccggcggccgacggcgggcgggcggggcgggcgtcgacggcgggctgggcgggcgtcgacggcgggcgggcgggcggggcggcgggcgtcgacggtgggcgggcgtcgacggcggcggcggcgagcggcgagcgtcgacggcggcggcggcgagcgggcagagacagagagaagagagaagcgagcgcgcgcgcgtgaaaatgaaccgcgcaccgggccaggaccgtgttaaaaaagtttatctccgacggctagttacgaggctgtcggatataaccttatgtccgacggcctcgtaactagccgtcggagataagtctatatttccaagagcccatgttggccgtcggacataagataatatccgacggcctcgtaggaagccgtcggagatagagtgaccgtcggatattcatcagtttactgcagtgcacaagctatcctcgcgtgcttgtagtgccctccccagtcgatcgtaccctagccctagtcgaccaagggcatgccacgtagccaccttctcatggttaggaattgcaacaggtacacataagtttgatagaatcattttatatatgtattcataaaaaaagtctattgtcgggttatccatatctactcatagatatagaatcttactcatactcatatatccacaacggtaattttacctgtcgggttacacgtatcgttaaaaaaagtctaaaattaaaatatgccaatcactcaaaatattaaaaaaacacaagagtccaacttaagatattacaaaccatatgatattacataacttttag

SEQ ID NO: 4716 - DNA, 1040 bp, Zea mays
  Zm_smallRNAprecursor_205
aattaaggtcaaaaagataaacatttgcaatagaaaatttcttttgaatgattgtatgtagatggctccccctaaatgtgtgcacgattgtgaatccaatgttttgacataatatgtcatgtgagcaacacatttagagatagtgacaaaaaccatactgaatacaaccatccgaggggtgcaagagtgtcctaacaggagttgtgatgcatatgactatctctaaatacacatcatttttacttcatagcaaagcaatcattacaaactgatgggacaaaagatgatggccagaagaccatcatatcactttgaataaaaacccagcagttttatttcatacaatgattataggatacaagtcacaacagtggccaaaacaaaaataatccaaaagaaatacataaccgaaagaaccacaaacagaatgactagaaattttggattttctccccctttttggcaacaagtaccaaaaacggagagagcgagagagaaggatacatgaatcaatatcctccaggaggaggataggacggaggatatgatggagggtatgatgtgtagtcagggaagaaggtcctcatcacatcttcctcgaatgaggagtccctagggggctcatcacccgcagaaaaaccagatgccgaagatgcacgatgatgaggaggaggtggagggtggtgatggtaaccagagccggatggcctagggtcaccgggagtgggtccctgacccgagtagggaggcggagggtgagaggatgattgacctggatccccatggtagggaggcggggcaaactgctcgcgatcatcaacgtaggcttcttcttcttctgctgacataaatggcaccccgtaggcctgccggtgccactcattgatctccgggggaggaggatggagaggcacgtcaggcgagcaaggggcaaagggcatacccatagtggaagcttgacgacaaagattgtcgtcagtctcctgctgacgccttgccagctcatgtacatcagcagaaatgttctggcacatagagaa

SEQ ID NO: 4717 - DNA, 1070 bp, Zea mays
  Zm_smallRNAprecursor_206
ctaattcgtccacgtcacacgtactaacccttggtgattgtttagactccaaaaattacaaaaaatcataatttttttctcaccatttatactcacttagttcaacctcatttcacacattatttcatttcatacagattttataaattttatataatttcattttaagtattatgtaatacataatttttaattcaataaaaaatcatttgtgtaatttttacgtgatgaaataaatatagtatgtgcactacagcaaagactgcactgaagcaatgacaagaatagagttaagagctggcgtggaagaagcgagaggaggatggtgcggcaccagtaaaatgctgagactaatcttaaacacggcagagcatcacatacatttaacacatgctccactaccagctcacaacaaataagcacgaatgagaaactggattatcgataaccaaacaaaaattttaaattggtgcccttagttctggtggtgtgctcacatatacccttagtcgtgttttttgctcagctgtgcccttccagtgctatagaacagaagggcataactgagcaaaaaacacgactaagggtataggtgagcacaccaccaaaaccaagggcaccaatttaaaaaacccaacaaaaataatcatgcacacagcagtactcgaacccaaacataaacaaaaataatcttaaaacacttgttacgaataacctttgggtttagagtttagggcagggacagaagaaaacatgtcgccagacaattttatgaagttcgcgtcataagggacctcctgtccagattcgtctagataaagaagtagcaaataaactactcggcagcagcaacctcctgcatagcctcatcaccctcgacaggcctctcaagcttcacaccaacgtcctctttgtagtcgccatgaacctgagaagcaacgtgttaggataactacagggatgttgtctagataaattatttccatgcatgtagtaattacctccatcaacttcccgagatcaaacttgggggccatgagtatcttcaccttgcggatgaagacgttttg

SEQ ID NO: 4718 - DNA, 1041 bp, Zea mays
  Zm_smallRNAprecursor_207
tcccacgtgactgacgtgagggctggcttggatggatgcatccccctgcgtctgcacggccgctcctaattaatcgccctagctaggggctttgcgtttgtgctggcatcctctgtttgctggctgccgcgacatgccacagctagctgctgcctcgccagcgccagaactagcgtttggaaggattagcgcgcgcggaagagtcaactgcatctgcgcgtgtaaatatatgtgtcgctgcatctgcttgtgtcgtagctgttgttgttcttgcattgcatatggatggcatatgcaactgcagagacagctggggagcgaggaggagtatacacgtacgttctcgcctctcggaccgaattttttgtattttagcccttaaacagaagtaaaatcacgtttagacgtaaaaaaattttaaatgcagttttggaccctttgctcggcgccatagcctatggcgccgagctaacacagctcggcgccttaggctatggcgccgaggtcgtgttgcgttggcacaacccagacgcgtggcgtcgacgtggaaccgagctcggcgccacagatcttggcgccgagctcggttgtgttattaaaatatttgttgcagacatgagcacaaagcccatctagcccacttggtagagcacaaggcttctaaccatgtggtcgtgggttcaagccccatagtttgcattttttttgttttttttgtttatgtcgttggtgtgtccgcttaaatttatttctcgcctagattttttttcacaattgaaaaaatcgacccaaaatatatgctcatgtactgatcggccaatatctctgtatgtgaaaggttgtggagaataataataagtagggcatgctgtttatcaaagcaaatgtatataaggaagaaaaaaatgtataaaaatagttatagtgatttagaaatagttaatgattcgtaatgcaaaattgttttctatatttttactaagttagattttgttcaagaaatttgttcttaaccttttttagctacatgaaaagctcact

SEQ ID NO: 4719 - DNA, 1041 bp, Zea mays; identical to SEQ ID NO: 4718
  Zm_smallRNAprecursor_208

SEQ ID NO: 4720 - DNA, 1042 bp, Zea mays
  Zm_smallRNAprecursor_209
tcccacgtgactgacgtgagggctggcttggatggatgcatccccctgcgtctgcacggccgctcctaattaatcgccctagctaggggctttgcgtttgtgctggcatcctctgtttgctggctgccgcgacatgccacagctagctgctgcctcgccagcgccagaactagcgtttggaaggattagcgcgcgcggaagagtcaactgcatctgcgcgtgtaaatatatgtgtcgctgcatctgcttgtgtcgtagctgttgttgttcttgcattgcatatggatggcatatgcaactgcagagacagctggggagcgaggaggagtatacacgtacgttctcgcctctcggaccgaattttttgtattttagcccttaaacagaagtaaaatcacgtttagacgtaaaaaaattttaaatgcagttttggaccctttgctcggcgccatagcctatggcgccgagctaacacagctcggcgccttaggctatggcgccgaggtcgtgttgcgttggcacaacccagacgcgtggcgtcgacgtggaaccgagctcggcgccacagatcttggcgccgagctcggttgtgttattaaaatatttgttgcagacatgagcacaaagcccatctagcccacttggtagagcacaaggcttctaaccatgtggtcgtgggttcaagccccatagtttgcattttttttgttttttttgtttatgtcgttggtgtgtccgcttaaatttatttctcgcctagattttttttcacaattgaaaaaatcgacccaaaatatatgctcatgtactgatcggccaatatctctgtatgtgaaaggttgtggagaataataataagtagggcatgctgtttatcaaagcaaatgtatataaggaagaaaaaaatgtataaaaatagttatagtgatttagaaatagttaatgattcgtaatgcaaaattgttttctatatttttactaagttagattttgttcaagaaatttgttcttaaccttttttagctacatgaaaagctcacta

SEQ ID NO: 4721 - DNA, 1042 bp, Zea mays; identical to SEQ ID NO: 4720
  Zm_smallRNAprecursor_210

SEQ ID NO: 4722 - DNA, 1043 bp, Zea mays
  Zm_smallRNAprecursor_211
tcccacgtgactgacgtgagggctggcttggatggatgcatccccctgcgtctgcacggccgctcctaattaatcgccctagctaggggctttgcgtttgtgctggcatcctctgtttgctggctgccgcgacatgccacagctagctgctgcctcgccagcgccagaactagcgtttggaaggattagcgcgcgcggaagagtcaactgcatctgcgcgtgtaaatatatgtgtcgctgcatctgcttgtgtcgtagctgttgttgttcttgcattgcatatggatggcatatgcaactgcagagacagctggggagcgaggaggagtatacacgtacgttctcgcctctcggaccgaattttttgtattttagcccttaaacagaagtaaaatcacgtttagacgtaaaaaaattttaaatgcagttttggaccctttgctcggcgccatagcctatggcgccgagctaacacagctcggcgccttaggctatggcgccgaggtcgtgttgcgttggcacaacccagacgcgtggcgtcgacgtggaaccgagctcggcgccacagatcttggcgccgagctcggttgtgttattaaaatatttgttgcagacatgagcacaaagcccatctagcccacttggtagagcacaaggcttctaaccatgtggtcgtgggttcaagccccatagtttgcattttttttgttttttttgtttatgtcgttggtgtgtccgcttaaatttatttctcgcctagattttttttcacaattgaaaaaatcgacccaaaatatatgctcatgtactgatcggccaatatctctgtatgtgaaaggttgtggagaataataataagtagggcatgctgtttatcaaagcaaatgtatataaggaagaaaaaaatgtataaaaatagttatagtgatttagaaatagttaatgattcgtaatgcaaaattgttttctatatttttactaagttagattttgttcaagaaatttgttcttaaccttttttagctacatgaaaagctcactaa

SEQ ID NO: 4723 - DNA, 1043 bp, Zea mays; identical to SEQ ID NO: 4722
  Zm_smallRNAprecursor_212

SEQ ID NO: 4724 - DNA, 1041 bp, Zea mays
  Zm_smallRNAprecursor_213
actaaattactaaatgttttttttaaattattggagatgcactaagctctgcggattttaatttgcaagatgaaaacatgcatgccatgcattcggtctttttaaaaaagtagtaaaattttgaataatgcacggatgacattttataaaattactacattgcttttgtattgcacatgcatgatttgagctagtcgattatttacgcgcattttaaattcggaaactgtagattgaaatgcgcgcgcatgcagtgcaagatggaaggcaatactaggcacaacgacataaaaaaaatctaggcgagaaataaatttaagcggacacaccaacgacataaacaaaaaaaaacaaaaaaaatgcaaactatggggtttgaacccacgaccacatggttagaagccttatgctctaccaagtgggctagatgggctttgtgctcatgtatgcaacaaatattttaataacacaaccgagctcggcgccaagatctgtggcgccgagctcggttccacgtcgacgccacgcgtctgggttgtgccaacgcaacacgacctcggcgccatagcctatggcgccgagctgtgttagctcggcgccataggctatggcgccgagcaaagggtccaaaactgcatttaaaatttttttaggtctaaacgtgattttacttctgtttaagggctaaaatacaaaaaattcggcctctcggaatgggggcatgcaacgtatgtataacctaaccggttccggttccggcgaaaaaacccacgcgtcctttccttttgcaccgggacgagcagcaagcaaacaaaccggaaaatggcggcacataacgacccaaaaaaaagtctgcaacccctgcatgcatgcatgcattgcatgcatacagctggtggtattaaagagttgtttgaatatactagaattaatagttagttagctaaaaattattagtagaattagttagctattaactaatttaacaaaaatagctaatagctaaattattagctaggatgtttgaatatttcaactaat

SEQ ID NO: 4725 - DNA, 1040 bp, Zea mays
  Zm_smallRNAprecursor_214
ctaaattactaaatgttttttttaaattattggagatgcactaagctctgcggattttaatttgcaagatgaaaacatgcatgccatgcattcggtctttttaaaaaagtagtaaaattttgaataatgcacggatgacattttataaaattactacattgcttttgtattgcacatgcatgatttgagctagtcgattatttacgcgcattttaaattcggaaactgtagattgaaatgcgcgcgcatgcagtgcaagatggaaggcaatactaggcacaacgacataaaaaaaatctaggcgagaaataaatttaagcggacacaccaacgacataaacaaaaaaaaacaaaaaaaatgcaaactatggggtttgaacccacgaccacatggttagaagccttatgctctaccaagtgggctagatgggctttgtgctcatgtatgcaacaaatattttaataacacaaccgagctcggcgccaagatctgtggcgccgagctcggttccacgtcgacgccacgcgtctgggttgtgccaacgcaacacgacctcggcgccatagcctatggcgccgagctgtgttagctcggcgccataggctatggcgccgagcaaagggtccaaaactgcatttaaaatttttttaggtctaaacgtgattttacttctgtttaagggctaaaatacaaaaaattcggcctctcggaatgggggcatgcaacgtatgtataacctaaccggttccggttccggcgaaaaaacccacgcgtcctttccttttgcaccgggacgagcagcaagcaaacaaaccggaaaatggcggcacataacgacccaaaaaaaagtctgcaacccctgcatgcatgcatgcattgcatgcatacagctggtggtattaaagagttgtttgaatatactagaattaatagttagttagctaaaaattattagtagaattagttagctattaactaatttaacaaaaatagctaatagctaaattattagctaggatgtttgaatatttcaactaat

SEQ ID NO: 4726 - DNA, 1102 bp, Zea mays
  Zm_smallRNAprecursor_215
taacatgttcatattttaattaaaattatgaaatagtcagcataaccacttgtaatatacacgatggcttaaataaaatgaggtgtggaggaggaggggtgacaaaaagatcgagtttgcataaactgatgtgtataagaggaagggtagaaaattggaaaataaaatagaaataaataaataaattaacgctggaatattgtttctagagaagtctatatttgtatatactgaatattgttatatagaaggcatgcgaaatgattactgtaatataaaaaaatcttggtagccagggcaaacgaaacgtgacaggataacgagataggcagacaacaaagaggggagagttttggcattatgaaatacggtacattcggcttcatcaaaatagagacgttggagagggatttgacgatttggaaatccacacgacgagtagccgctgatatggacttaaaatctctcttaggcgttgagtacatccattaagggcgtgtttggtttacggtagattttaagaatctgattttaagaatatattatggatccaaacagagtttattttattctgtgccttagattctgagctcatagaaacaaaatctgtagaatcaagccatagttgggttatcttgggtaacgtgaacatgcagattttaaaaatctgcggaaaccaaacgcggcctaaacctcctcagtccaaattagtatgcggaggtacggcttccgtcagcatcgtcgtcagtgctagtgtagccaccgctcgtgagtatgtctggtgagctctctacttctctctctacctctgcagccacggggagtagtcgacggtgaggtactcccgatacgggcgacagtacacctgcgcgccgccgccgcccgcagtgacgacgaacccgaacgcgatgaggccgaggaggaagacgatgaggagcatcacgacggcgaggtacagccacagcgcctaggccacgtggaagcaggcgccgacgaagccggtgagggagacgagcagcacggcgaagccgacggcgaggagtggtgcttgaaggatggaggagcacgtggccgtggccgagcccttggccagccagaggcc

SEQ ID NO: 4727 - DNA, 1141 bp, Zea mays
  Zm_smallRNAprecursor_216
aaggaaggtacataaagtacgtctctcaacaacagtacaaaaccattaggtaaattaagatgtagatctccaatggcctcgactgctgcttcaactttatttgtcactctaattgttctttggccctttgggagcctttggcttgtacggagtccctgtagagagtttgcaacatgaacagttgcacctgagtcaatccaccaagaataactgggatattctaagtataaagactaatttacaaaagtaacttggtccttaccactctcttgtagagactgtaggaattcagagcactttctgttgtaatgacctgtattcttgcagtagagacatgtatcagggggaactgaaaaaatgtctccttgtcttggttgattattgttgcttgaggaagcctggttattcagtttatcctgcttcttgaacttcttctttgagttcttgttctgtagggatattgtcttttacgaggttgacagagtctccaatctgctttaacctctcttcctcctggacacactgtgcaaagagttggtcaatgttccacttatcagtgacattggtgttatattgtatgttaaaagtatcaaactccttggatagagaattcattatcataaacactacaaattcctcgtgtaaaggagacccgaggtacttatttattttagccacgatggatatcattttctgaatgaatggtctgacaccatttccatcgtattttgcattgacaaattctgtcattagagagcaagcataagccttagatgaccctttatgatgagaggctaccctctcaaggtactccttagcagtctcgcactctggtatgaaactcttaagaggctccttgatgctcctcttaagaataatcatacacttgccatttgacctttcccacttgaccttgtcgatgctatattgcatccacctgtggccatagttgggagtgcccaccgtgagctctactggtttatcaaaccgctgtgcgtaatctatctcacccactgtggttatcatgtcaatatcctctcgtcatgaatagtaattactaccatctagcggtttcatctgtgcaatctggctaatcagcatagcagtatgagcacctttgcaaaattaaaatagaaaatat

SEQ ID NO: 4728 - DNA, 1171 bp, Zea mays
  Zm_smallRNAprecursor_217
atcaagcttggattgatttatgttgaataaattcaagagacttcatttaccatgtttgagtgatcaaatctatttggattggcttgaaattcagtgtacttgctctatgcatatgatagcaaagtctgtgcaaatttcataatcattggataagtgaaacttcttgattaagtcaatcttgtcagcacaaacacatcagttttcagcatgtacctattatgggagatgttgtggctggcagcacatatgaagtcaaatgagtctcaactttttacagctgttagcagacttattaaagcacatctccaccaattttcgtggtcatagcatctgtacatcaaaatttatgaatgattctttggagtatacagaatctgtcataagtgacaaatatttgaaatattgaaagtcactttgattggaaggctctcatataggataaatcacataagttgtttgagagaccatagtttggttttgaattgatctataatcatggaaagtgaaggggtacaaggatatttgttgagaaaaattttggcacttatcttggtactccaagttgaagatcaagaccaaagatgatcaaaattgaggttatcatataacagattgcataatcttctttcttacatatggcaatccaaatacttaaattggttgtaagtatttcttggcacatttcaatttgattactctattattgccatgatctagacataaaagagaaaaaccccgtgttcgtgaatgaataaggtgctaagtaagaaattcaaattcttaaagcacttatcaaaaagggaattctctatatgactagagttgtgaagctaatgtttttacctaagtgatctatgtagtttcacaacatgaaaatgagtttctcaatggactatgcaattaaatgtataaagaagaacaatccaaaactatgtgatgtattctctcttgtacatttggatttatttcttctacattaaatactcaccatgatatgatttaaaattagcctatgaacttaatcaatttatcatgcatgtttaatttgttaaaattaagcattgaagattaagagaattttatttcatataataaggtttccttgtttaagtacctgcctactttatatattcaaagtgttataaaagagaatttggtgcttgtattacta

SEQ ID NO: 4729 - DNA, 1136 bp, Zea mays
  Zm_smallRNAprecursor_218
gaaccagtcgttgtccttggccttgttcaccgacgtgtaggcgatgagcgcgcggtactcctccttgagcctctgccgccacgcctcgccgtcccgcggacccgcgcgcgtcgacagcagcgggatctcgcccaccgtgctcttggtccccttgtcccagccctccatcgatccgatgctgatgttcggcggcgacgcggcggagaagagaaggtgcgctgcgtgggtctgacgcgtgacggccgcggcttctgagaaatctgtctactagtgcaggcaaatgggttgatgcccactaacctgagccggcccatcttaaagtaatgatgtgtttcgggcttctttttcctggcggacgggcccgcattagatgaatgtgcgatctgctcgggcaccgacaaatccacaaagttatgtgcacgcacttcaaaagaaaagtgcacgcaattagtaataggcaacgactgctgtgcaagcagtccttctgcaagcgtgcaagcaaaccatctgatccgttagattacgattcaactacagatacaaccatggtttgttatggagttttttatatagattattaagctggtggtggaagagtttaagtgttaaatatgacctacagttggatcacgatctaacggatcagatggtttgcttgcacgcttgcacggaaagactgcttccacaacagtcgttgccttagtaataagggtcaatgggaaacatgtcaccatgggcggacccaggcccatggccacataggccacggcccggggcgcaggcaaaaaaaaagaaatagaaattctacgcagacgtagcccaccgtgaagaccccgtcctcccgccagctcacagacattagaaccctagccgctagcccacccggccgccacctctgccatcgccgagtcgccggccaccgccatgcgtactcccgacctcccatgactccgtcctcgcccgagcccggccaagcatcgtgcgctgtcgacgtcgcgcactcgcgccctgcgggctgcggcggtggcgcggtgaaagggaaataggctttaaaccttttcctaaatgattttggtggttgaatgtccaacacaaacaattggactaattagtttgctctagattacatgttctac

SEQ ID NO: 4730 - DNA, 1076 bp, Zea mays
  Zm_smallRNAprecursor_219
aagagggactgccactggatagctctctctagcattctccacgctccaatacagcggcgtcgggtctatccgggtctatccgcgaacacgtgagaactctccagaaactgctttctcctccacttcatctctctcgctttccctctataaaaagaccccttctaggaattgagggagacagcaagcagcgatccgaagctcaatcaattcactcaaacctcttccccaaatcttcgattagattctcgttgacaagaagactagaaccgaacctgaccatgtcgctgatccgccgcagcaacgtgttcgatcccttctccctcgacctctgggacccctttgagggcttccccttcggctccggcaacagcagcagtctcttcccctcgttcccgcggaccagctcggagaccgcggccttcgctggcgcgcggatcgactggaaggagactccagaggcgcacgtgttcaaggccgacgtaccggggctgaagaaggaggaggtcaaggtggaggtcgaggacggcaacgtccttcagatcagcggcgagcgcaacaaggagcaggaggagaagacggacacctggcaccgcgtggagcggagcagcgggaggttcctgcgcaggttccgactgcccgagaacgccaagacggagcagatcacggccgccatggagaacggcgtgcttacagtcactgtgccgaaggaggacgccaagaagcctgaagtgaagtccattcagatctccggctagacctcggtctgcggtcgtcgtacctgcgtggtttgaggaacggcagttcgcctcggtcgttctgtgaaataaaattgggttacaagaattatggcgtttgtcaatatggtcgtaatgtcgtaggatggtggaatgtggtcacaaactttgcgtatgttgggtctacttgtggtgtctgaatctatgtatggatgtcatgagtttgtctactagagttctagttcctgtggtgttcgtatgatgtatatcatgagttaactctatctaaaatttcttcattatggtatttttaagaaataaattctttattatggttttttt

SEQ ID NO: 4731 - DNA, 1076 bp, Zea mays
  Zm_smallRNAprecursor_220
actgccactggatagctctctctagcattctccacgctccaatacagcggcgtcgtgtctatccgggtctatccgcgaacacgtgagaactctccagaaactgctttctcctccacttcatctctctcgctttccctctataaaaagaccccttctaggaattgagggagacagcaagcaccaagcagcgatccgaagctcaatcaattcactcaaacctcttccccaaatcttcgattagattctcgttgacaagaagactagaaccgaacctgaccatgtcgctgatccgccgcagcaacgtgttcgatcccttctccctcgacctctgggacccctttgagggcttccccttcggctccggcagcagcagcagtctcttcccctcgttcccgcggaccagctcggagaccgcggccttcgctggcgcgcggatcgactggaaggagactccagaggcgcacgtgttcaaggccgacgtaccggggctgaagaaggaggaggtcaaggtggaggtcgaggacggcaacgtccttcagatcagcggcgaacgcaacaaggagcaggaggagaagacggacacctggcaccgcgtggagcggagcagcgggaggttcctgcgcaggttccgactgcccgagaacgctaagacggagcagatcacggccgccatggagaacggcgtgcttacagtcactgtgccgaaggaggacgccaagaagcctgaagtgaagtccattcagatctccggctagacctcggtctgcggtcgtcgtacctgcgtggtttgaggaacggcagttcgcctcggtcgttctgtgaaataaaattgggttacaagaattatggcgtttgtcaatatggtcgtaatgtcgtaggatggtggaatgtggtcacaaactttgcgtatgttgggtctactggtggtgtctgaatctatgtatggatgtcatgagtttgtctactagagtcccagttcctgtggtgttcgtatgatgtatatcatgggttaactctatctaaaatttcttcattatggtatttttaagaaataaattcttcattatggtattttt

SEQ ID NO: 4732 - DNA, 1070 bp, Zea mays
  Zm_smallRNAprecursor_221
aactcacctttggtcgacgaatttaaccgagcactagttgagattgacgacctcgccaaggatcttgaagacgtagcagtgcaaactcagtgggaggtagaaaatatggctaagagtgaagtgaaagaacatccacaacaagaggaagcagtagaggaccttctcatacatgatggttcagaagacgagctactgatagacgaagagtcaccaattaactatgaagaccttgtgggctacgacgatggtcgtgactactcaaccgacgacacatatccgtactagtgttgtaggttaaacttcagtacaagtattgtagcatgtttaggtctatgttcagctgtagttgtcggttggtatgttcatgcttttgggggagtttaatgttctggtctatgtaaactgaatccggttcagttactacaataattattgtgttatgttggactatgtttgccttactttatagggccaattccctatatgccactgggaaatatactcattccttgtatgccactggccccacatgtcatagacaccaaaaaatatacctatatgccactcaatggcacacaagggatgagtataaaatctgatggcataccaggaattttctctactttataccatgttacatgatgactacatgctcatttatgtcatgtttgatctgcctgtattcaatagaatgggtagtgattggaaccaggtgatgtctcaatatggaagcttccttagccagattgacgagcagcctatcggaacacaatattctgaatttccagttgatgggcaacccgagggctcaagaacaccagctgttactaaaaaggcaactcaaagaactaagctagcaaacttcactgctgaagaggacacaagggtatgccatgcatggcttgctgttagttgcgatcccattattaacacagggcagaaacgtcaaggattttggagtagaattactgcagcatacaactcaagacgaggaacattgccagaaaggtccacaaaatctttgatgagtagatgggatactatcaaaacacagtgttccacttttgctg

SEQ ID NO: 4733 - DNA, 1190 bp, Zea mays
  Zm_smallRNAprecursor_222
ccggatggcctagggtcaccaggaatgggtcctggacccgggtaaggaggcggagggtgggaggatgattgacccggatccccatggtagggaggcggggcaaactcctcgcgatcatcaacatagacatcttcatcttcatcgtctgcagacataaaaggcaccccgtaggcctgctggtgccactcattgatctccaggggaggaggatggagaggcacatcaggcgaacgagggacaaaaggcatgcccatggaggaagcttgacgacgaagattgtcgtcagtctcccgctgacgccgtgccacttcatggacatcagcagaaatgttgcggcacatggagaaaaatgccgcaagcccatggaccaagcgagcacccatcccgcggccacgaccacgaccacgaccacgagcacgtggcatgggagagccgcggccaggagagggacgcgaggcagcagcgggggggggggggggaggaggaaggatggtggggaggctggcgaggtggctcagaggaggaggcagggcctccagaccgtgagggaacccgcttcgtacgagcagctgggttggaagaatcaacccagtagggtacgtagcgggagtgtttgacgggtttttcgaagtgggtctgggtgaccacttcgatcatcttcatgataaagggtgcatgaagacaccctctgtgaggagaccaggaagcacggacgatctcctcccagatcatgtcaaacacattgatgcgggcgagactgtttggagcaaggaggaggaggaggactcgactctccccaaggacgttcatttgattaccgccctttgggagaacggtcatccgggacaaggaattaaggtacatgtagtacctatgcatgttagcggttgtccagaactcccgctcagtagagacatgaatgaattccgtctcttcccgcatgggcagccgaatgccatgcactcgcatgttgctgccctgaatgtctgcatcagagaagcccagaatatgggcaaaacgacgataactgactttgtgccattaccctggatgaagaaatacatgactgggtaatcatacccatcggcttcctcatctactttctttatccagagggtggcatagaactgagctaccacctcatcattccaggggtattccatggttataatgttacgtaacccctttct

SEQ ID NO: 4734 - DNA, 1068 bp, Zea mays
  Zm_smallRNAprecursor_223
tgaatgaattccgtctcttcccgcatgggcagccgaatgccatgcactcgcatgttgctgccctgaatgtctgcatcagagaagcccagaatatgggcaaaacgacgataactgactttgtgccattaccctggatgaagaaatacatgactgggtaatcatacccatcggcttcctcatctactttctttatccagagggtggcatagaactgagctaccacctcatcattccaggggtattccatggttataatgttacgtaacccctttctctctaagtttacgagagctgacgacatgtcagcatctcccatattctcacaaccctcccagtcaataaatctatgtcggacgactgggtgtttcttggaaagaatgacagaattgtagaagtcagcctggaaaagattccagaaccgagggtcctggacaccaggatgacgaggagtgagagtagggttggtaaacctcagacgctgaagggtttctattcccttctgagtgaagtcgacgggagattcatgcggaccgcggctgacgttcgccggatgcatgtgcagtccggtgacgtagagagcatcaggcgccggaaggtcgacgaagtcgtcgaaagccccatcctcctcttggcagggagcataccctgaggaagacgtgctacgacgaggacgagaggagccaaccttctggcgtctcccgcgagtcggctgcgagggcatggaagagccctcgccagccatccgaccagagccacgtcctctcttagagagggagcgacgaggcggaggagaggggacgggagattcctcctgaatctcgtcggagtcgctgctgaactcgaccacagaggggttgcgacgacgcaccatgatttgaaaaggtggtgaaactgtgaagcggatgaagtgtgtgaaggagaggctctaaaggttgtgaagcgaccaaggcgagagtgaatgaagtgggagaagagaagggggagattgaagtatatataggcagttgagctggtccttaggaccagttcaaccgccccatgggccagttcagctggttctgaccagtg

SEQ ID NO: 4735 - DNA, 1096 bp, Zea mays
  Zm_smallRNAprecursor_224
agtgagagtagggttggtaaacctcagacgctgaagggtttctattcccttctgagtgaagtcgacgggagattcatgcggaccgcggctgacgttcgccggatgcatgtgcagtccggtgacgtagagagcatcaggcgccggaaggtcgacgaagtcgtcgaaagccccatcctcctcttggcagggagcataccctgaggaagacgtgctacgacgaggacgagaggagccaaccttctggcgtctcccgcgagtcggctgcgagggcatggaagagccctcgccagccatccgaccagagccacgtcctctcttagagagggagcgacgaggcggaggagaggggacgggagattcctcctgaatctcgtcggagtcgctgctgaactcgaccacagaggggttgcgacgacgcaccatgatttgaaaaggtggtgaaactgtgaagcggatgaagtgtgtgaaggagaggctctaaaggttgtgaagcgaccaaggcgagagtgaatgaagtgggagaagagaagggggagattgaagtatatataggcagttgagctggtccttaggaccagttcaaccgccccatgggccagttcagctggttctgaccagtgtggtcagagaaccagaaacaacaaattcaaatttgcgcgcagctgctggaagtggctggacagaaaaaaaatatggacgcccctgacacgcatgcacggctagtgcgcgggcagagcagaaatgtccaagaaaagctgcgcgcgctgagcagagaagaggtgaccggacaaaacaaataaaaaaaaaatctgcatgcgcacccctgctgttgaccaaataaaagattctccactcgcatgtcttcatgcaaagtcaaaaggacaaaaaatctgcgcgcgcggcaggaagggaagtgaccagacgctgcatgcaaaaaagattctgcatgcacaccagaccggactccacacaaaaaatttttttggcgcgcacaggtcctgctgtcctgctgagcggcagcaagcaaaaaaacaaaaacagtgcgcgcgccagggaagtgaccggacacagaaatggcgcgtctgaaaaaaaaaat

SEQ ID NO: 4736 - DNA, 1094 bp, Zea mays
  Zm_smallRNAprecursor_225
cccactacatatgaagctgctatgagaagtgcaaattcatccaaatggctatcagccatggaagatgaattagaatccatgagaatgaacaaagtttgggacttagaagtcattccccatggagccaaaacagtaggctgtaaatgggtctacaagacaaagcgtgactccagagggaacatagaaagatataaggctagacttgtggccaaagggttcacacagagagaaggcattgactaccatgaaaccttctcacctgtctcaacaaaagattcattcaggatcataatggcactagttgctcattttgatctagaactccatcagatggatgtaaagacagcattcctaaatggagagttagaagaaaatgtgttcatggcacaaccaaagggttttgttgtgagcggtaaagaacacatgggatgtcacttgaggaggtccatttatggattaaaacaggcctccagacagtggtacatcaagtttgatcagactataagaaagtttggtttcgaggaaaacaaggaagacaattgcatttatgcaaaatttagaaaaggaaagtatatcttccttgttctgtatgtcgatgacatactcttagctagtagtgataaggatctactagcggaaacaaaagggtttctttcctcgaattttgatatgaaagacatgggagaagcctcctatgttcttggaatagaaattcacagagacagacaaaagggagtattaggactctcacagaagtcatatatagaaaatgtactaaagaggtataatatgcacaagtgtaatgcctcgcctggtccaatagtcaagggtgataagtttggggaatatcagtgtcccaagaatcagtatgagaaaaacaagatgaagtcagtaccatatgcttcagctgtcggaagcattatgtatgctcaagtatgtactcgccctgacttagcttttaccaccgggatgcttggacgctatcagaagaatccaggcatagaacactggaaagcagtcaagaaggctctaaggtaccttcaaggtactaaaggtctcatgcttacgtacagaagatctaattccctacaaat

SEQ ID NO: 4737 - DNA, 1041 bp, Zea mays
  Zm_smallRNAprecursor_226
tgtaaaaaaaccgggcttaacgggcttagaggtaaacgggccgtgccgggctagcccgccgtgcctagtttcctgtccaagcccgcccgcttattctaccgtgccgggttcggaccgggcccaaaaaccgggcttcgtgccgggctcacgggcctcgtgctttttggccatctatagtggccgtgcgggccgacgaccgcgcgctacgctccttgccgcgcggatacacgctggcagtcgcgcaggtctcactacagcttgcactttccagtgtgtgtgctgtgctggctagagagggcacgccacggccggccataatatagcagcggacggagtacgtacgtacgtacactagcgcttagtagagtgcagagtgcacgttacggaccgaccgaattttttgtattttagcccttaaacagaagtaaaatcacgtttagacctaaaaaaattttaaatgcagttttggaccctttgctcggcgccataggctatggcgccgaggtcgtgttgcgttggcacaacccagacgcgtggcgtcgacgtggaaccgagctcggcgccacagatcttggcgccgagctcggttgtgttattaaaatatttgttgcagacatgagcacaaagcccatctagcccacttggtagagcacaaggcttctaaccatgtggtcgcgggttctcaaaccccatagtttgcattttttttgtttttttttgtttatgtcgttggtgtgtccgcttaaatttatttctcgcctagattttttttatgtcattgtgcctagtgttgccttccatacttgcactgcatgcgcgcgcatttcaatctacagtttccgaatttaaaatgcgcgtaaataatcgactagctcaaatcatgcatgtgcaatacaaaagcaatgtagtaattttataaaatgtcatccgtgcattattcaaaatttgcattacgaatcattaactatttctaaatcactataaatatttttatacatttttttcttccttatatacatttgctttgataaacagcatgcc

SEQ ID NO: 4738 - DNA, 1041 bp, Zea mays; identical to SEQ ID NO: 4737
  Zm_smallRNAprecursor_227

SEQ ID NO: 4739 - DNA, 1042 bp, Zea mays
  Zm_smallRNAprecursor_228
tgtaaaaaaaccgggcttaacgggcttagaggtaaacgggccgtgccgggctagcccgccgtgcctagtttcctgtccaagcccgcccgcttattctaccgtgccgggttcggaccgggcccaaaaaccgggcttcgtgccgggctcacgggcctcgtgctttttggccatctatagtggccgtgcgggccgacgaccgcgcgctacgctccttgccgcgcggatacacgctggcagtcgcgcaggtctcactacagcttgcactttccagtgtgtgtgctgtgctggctagagagggcacgccacggccggccataatatagcagcggacggagtacgtacgtacgtacactagcgcttagtagagtgcagagtgcacgttacggaccgaccgaattttttgtattttagcccttaaacagaagtaaaatcacgtttagacctaaaaaaattttaaatgcagttttggaccctttgctcggcgccataggctatggcgccgaggtcgtgttgcgttggcacaacccagacgcgtggcgtcgacgtggaaccgagctcggcgccacagatcttggcgccgagctcggttgtgttattaaaatatttgttgcagacatgagcacaaagcccatctagcccacttggtagagcacaaggcttctaaccatgtggtcgcgggttctcaaaccccatagtttgcattttttttgtttttttttgtttatgtcgttggtgtgtccgcttaaatttatttctcgcctagattttttttatgtcattgtgcctagtgttgccttccatacttgcactgcatgcgcgcgcatttcaatctacagtttccgaatttaaaatgcgcgtaaataatcgactagctcaaatcatgcatgtgcaatacaaaagcaatgtagtaattttataaaatgtcatccgtgcattattcaaaatttgcattacgaatcattaactatttctaaatcactataaatatttttatacatttttttcttccttatatacatttgctttgataaacagcatgccc

SEQ ID NO: 4740 - DNA, 1042 bp, Zea mays; identical to SEQ ID NO: 4739
  Zm_smallRNAprecursor_229

SEQ ID NO: 4741 - DNA, 1043 bp, Zea mays
  Zm_smallRNAprecursor_230
tgtaaaaaaaccgggcttaacgggcttagaggtaaacgggccgtgccgggctagcccgccgtgcctagtttcctgtccaagcccgcccgcttattctaccgtgccgggttcggaccgggcccaaaaaccgggcttcgtgccgggctcacgggcctcgtgctttttggccatctatagtggccgtgcgggccgacgaccgcgcgctacgctccttgccgcgcggatacacgctggcagtcgcgcaggtctcactacagcttgcactttccagtgtgtgtgctgtgctggctagagagggcacgccacggccggccataatatagcagcggacggagtacgtacgtacgtacactagcgcttagtagagtgcagagtgcacgttacggaccgaccgaattttttgtattttagcccttaaacagaagtaaaatcacgtttagacctaaaaaaattttaaatgcagttttggaccctttgctcggcgccataggctatggcgccgaggtcgtgttgcgttggcacaacccagacgcgtggcgtcgacgtggaaccgagctcggcgccacagatcttggcgccgagctcggttgtgttattaaaatatttgttgcagacatgagcacaaagcccatctagcccacttggtagagcacaaggcttctaaccatgtggtcgcgggttctcaaaccccatagtttgcattttttttgtttttttttgtttatgtcgttggtgtgtccgcttaaatttatttctcgcctagattttttttatgtcattgtgcctagtgttgccttccatacttgcactgcatgcgcgcgcatttcaatctacagtttccgaatttaaaatgcgcgtaaataatcgactagctcaaatcatgcatgtgcaatacaaaagcaatgtagtaattttataaaatgtcatccgtgcattattcaaaatttgcattacgaatcattaactatttctaaatcactataaatatttttatacatttttttcttccttatatacatttgctttgataaacagcatgccct

SEQ ID NO: 4742 - DNA, 1043 bp, Zea mays; identical to SEQ ID NO: 4741
  Zm_smallRNAprecursor_231

SEQ ID NO: 4743 - DNA, 1041 bp, Zea mays
  Zm_smallRNAprecursor_232
cgccgatcgatcgagctagcgatcccggccggcggcgaatcgtactactacttgcgcacggttagcagctggtcgcgcgcgcgcgtgcgtccaagggagttggtggccgtgcgggccgacgaccgcgcgctacgctccttgccgcgcggatacacgctggcagtcgcgcaggtctcactacagcttgcactttccagtgtgtgtgctgtgctggctagagagggcacgccacggccggccataatatagcagcggacggagtacgtacgtacgtacactagcgcttagtagagtgcagagtgcacgttacggaccgaccgaattttttgtattttagcccttaaacagaagtaaaatcacgtttagacctaaaaaaattttaaatgcagttttggacctttgctcggcgccataggctatggcgccgagctaacacagctcggcgccataggctatggcgccgaggtcgtgttgcgttggcacaacccagacgcgtggcgtcgacgtggaaccgagctcggcgccacagatcttggcgccgagctcggttccacgtcgacgccacgcgtctgggttgtgccagagcaaaacagaacttgccctggttgaagaccctgatggcgttgtttgtgaggcagcgacggcggcgacgcgtaggcacccatgccgctctcgccgtcgctcgagctagacctgttccaccgcgcggcggccgcgggcacgggcgccgccgccgtacgctttcctttcggcaacatccccgttacgcactcgtactatttcttcgggcaggccgcagccgccgcggaagtagggtgtcgtgtgctcaagctggcgtcggcggtcaccgtggcgcagagcgactcagactgttcttcggtagtggatctgtcgccgtcgccaccggccgctgtgtcggcgaggaagcccgtcgtgttcgatattgacctgaactgctcaccgccgacggaggcgggagcatagtcgccggagcttttaatgactgtctgtctgttagtttctttcttcgcctttttcccg

SEQ ID NO: 4744 - DNA, 1039 bp, Zea mays
  Zm_smallRNAprecursor_233
gccgatcgatcgagctagcgatcccggccggcggcgaatcgtactactacttgcgcacggttagcagctggtcgcgcgcgcgcgtgcgtccaagggagttggtggccgtgcgggccgacgaccgcgcgctacgctccttgccgcgcggatacacgctggcagtcgcgcaggtctcactacagcttgcactttccagtgtgtgtgctgtgctggctagagagggcacgccacggccggccataatatagcagcggacggagtacgtacgtacgtacactagcgcttagtagagtgcagagtgcacgttacggaccgaccgaattttttgtattttagcccttaaacagaagtaaaatcacgtttagacctaaaaaaattttaaatgcagttttggacctttgctcggcgccataggctatggcgccgagctaacacagctcggcgccataggctatggcgccgaggtcgtgttgcgttggcacaacccagacgcgtggcgtcgacgtggaaccgagctcggcgccacagatcttggcgccgagctcggttccacgtcgacgccacgcgtctgggttgtgccagagcaaaacagaacttgccctggttgaagaccctgatggcgttgtttgtgaggcagcgacggcggcgacgcgtaggcacccatgccgctctcgccgtcgctcgagctagacctgttccaccgcgcggcggccgcgggcacgggcgccgccgccgtacgctttcctttcggcaacatccccgttacgcactcgtactatttcttcgggcaggccgcagccgccgcggaagtagggtgtcgtgtgctcaagctggcgtcggcggtcaccgtggcgcagagcgactcagactgttcttcggtagtggatctgtcgccgtcgccaccggccgctgtgtcggcgaggaagcccgtcgtgttcgatattgacctgaactgctcaccgccgacggaggcgggagcatagtcgccggagcttttaatgactgtctgtctgttagtttctttcttcgcctttttccc

SEQ ID NO: 4745 - DNA, 1040 bp, Zea mays
  Zm_smallRNAprecursor_234
gccgatcgatcgagctagcgatcccggccggcggcgaatcgtactactacttgcgcacggttagcagctggtcgcgcgcgcgcgtgcgtccaagggagttggtggccgtgcgggccgacgaccgcgcgctacgctccttgccgcgcggatacacgctggcagtcgcgcaggtctcactacagcttgcactttccagtgtgtgtgctgtgctggctagagagggcacgccacggccggccataatatagcagcggacggagtacgtacgtacgtacactagcgcttagtagagtgcagagtgcacgttacggaccgaccgaattttttgtattttagcccttaaacagaagtaaaatcacgtttagacctaaaaaaattttaaatgcagttttggacctttgctcggcgccataggctatggcgccgagctaacacagctcggcgccataggctatggcgccgaggtcgtgttgcgttggcacaacccagacgcgtggcgtcgacgtggaaccgagctcggcgccacagatcttggcgccgagctcggttccacgtcgacgccacgcgtctgggttgtgccagagcaaaacagaacttgccctggttgaagaccctgatggcgttgtttgtgaggcagcgacggcggcgacgcgtaggcacccatgccgctctcgccgtcgctcgagctagacctgttccaccgcgcggcggccgcgggcacgggcgccgccgccgtacgctttcctttcggcaacatccccgttacgcactcgtactatttcttcgggcaggccgcagccgccgcggaagtagggtgtcgtgtgctcaagctggcgtcggcggtcaccgtggcgcagagcgactcagactgttcttcggtagtggatctgtcgccgtcgccaccggccgctgtgtcggcgaggaagcccgtcgtgttcgatattgacctgaactgctcaccgccgacggaggcgggagcatagtcgccggagcttttaatgactgtctgtctgttagtttctttcttcgcctttttcccg

SEQ ID NO: 4746 - DNA, 1037 bp, Zea mays
  Zm_smallRNAprecursor_235
ccgatcgatcgagctagcgatcccggccggcggcgaatcgtactactacttgcgcacggttagcagctggtcgcgcgcgcgcgtgcgtccaagggagttggtggccgtgcgggccgacgaccgcgcgctacgctccttgccgcgcggatacacgctggcagtcgcgcaggtctcactacagcttgcactttccagtgtgtgtgctgtgctggctagagagggcacgccacggccggccataatatagcagcggacggagtacgtacgtacgtacactagcgcttagtagagtgcagagtgcacgttacggaccgaccgaattttttgtattttagcccttaaacagaagtaaaatcacgtttagacctaaaaaaattttaaatgcagttttggacctttgctcggcgccataggctatggcgccgagctaacacagctcggcgccataggctatggcgccgaggtcgtgttgcgttggcacaacccagacgcgtggcgtcgacgtggaaccgagctcggcgccacagatcttggcgccgagctcggttccacgtcgacgccacgcgtctgggttgtgccagagcaaaacagaacttgccctggttgaagaccctgatggcgttgtttgtgaggcagcgacggcggcgacgcgtaggcacccatgccgctctcgccgtcgctcgagctagacctgttccaccgcgcggcggccgcgggcacgggcgccgccgccgtacgctttcctttcggcaacatccccgttacgcactcgtactatttcttcgggcaggccgcagccgccgcggaagtagggtgtcgtgtgctcaagctggcgtcggcggtcaccgtggcgcagagcgactcagactgttcttcggtagtggatctgtcgccgtcgccaccggccgctgtgtcggcgaggaagcccgtcgtgttcgatattgacctgaactgctcaccgccgacggaggcgggagcatagtcgccggagcttttaatgactgtctgtctgttagtttctttcttcgcctttttcc

SEQ ID NO: 4747 - DNA, 1038 bp, Zea mays
  Zm_smallRNAprecursor_236
ccgatcgatcgagctagcgatcccggccggcggcgaatcgtactactacttgcgcacggttagcagctggtcgcgcgcgcgcgtgcgtccaagggagttggtggccgtgcgggccgacgaccgcgcgctacgctccttgccgcgcggatacacgctggcagtcgcgcaggtctcactacagcttgcactttccagtgtgtgtgctgtgctggctagagagggcacgccacggccggccataatatagcagcggacggagtacgtacgtacgtacactagcgcttagtagagtgcagagtgcacgttacggaccgaccgaattttttgtattttagcccttaaacagaagtaaaatcacgtttagacctaaaaaaattttaaatgcagttttggacctttgctcggcgccataggctatggcgccgagctaacacagctcggcgccataggctatggcgccgaggtcgtgttgcgttggcacaacccagacgcgtggcgtcgacgtggaaccgagctcggcgccacagatcttggcgccgagctcggttccacgtcgacgccacgcgtctgggttgtgccagagcaaaacagaacttgccctggttgaagaccctgatggcgttgtttgtgaggcagcgacggcggcgacgcgtaggcacccatgccgctctcgccgtcgctcgagctagacctgttccaccgcgcggcggccgcgggcacgggcgccgccgccgtacgctttcctttcggcaacatccccgttacgcactcgtactatttcttcgggcaggccgcagccgccgcggaagtagggtgtcgtgtgctcaagctggcgtcggcggtcaccgtggcgcagagcgactcagactgttcttcggtagtggatctgtcgccgtcgccaccggccgctgtgtcggcgaggaagcccgtcgtgttcgatattgacctgaactgctcaccgccgacggaggcgggagcatagtcgccggagcttttaatgactgtctgtctgttagtttctttcttcgcctttttccc

SEQ ID NO: 4748 - DNA, 1035 bp, Zea mays
  Zm_smallRNAprecursor_237
cgatcgatcgagctagcgatcccggccggcggcgaatcgtactactacttgcgcacggttagcagctggtcgcgcgcgcgcgtgcgtccaagggagttggtggccgtgcgggccgacgaccgcgcgctacgctccttgccgcgcggatacacgctggcagtcgcgcaggtctcactacagcttgcactttccagtgtgtgtgctgtgctggctagagagggcacgccacggccggccataatatagcagcggacggagtacgtacgtacgtacactagcgcttagtagagtgcagagtgcacgttacggaccgaccgaattttttgtattttagcccttaaacagaagtaaaatcacgtttagacctaaaaaaattttaaatgcagttttggacctttgctcggcgccataggctatggcgccgagctaacacagctcggcgccataggctatggcgccgaggtcgtgttgcgttggcacaacccagacgcgtggcgtcgacgtggaaccgagctcggcgccacagatcttggcgccgagctcggttccacgtcgacgccacgcgtctgggttgtgccagagcaaaacagaacttgccctggttgaagaccctgatggcgttgtttgtgaggcagcgacggcggcgacgcgtaggcacccatgccgctctcgccgtcgctcgagctagacctgttccaccgcgcggcggccgcgggcacgggcgccgccgccgtacgctttcctttcggcaacatccccgttacgcactcgtactatttcttcgggcaggccgcagccgccgcggaagtagggtgtcgtgtgctcaagctggcgtcggcggtcaccgtggcgcagagcgactcagactgttcttcggtagtggatctgtcgccgtcgccaccggccgctgtgtcggcgaggaagcccgtcgtgttcgatattgacctgaactgctcaccgccgacggaggcgggagcatagtcgccggagcttttaatgactgtctgtctgttagtttctttcttcgcctttttc

SEQ ID NO: 4749 - DNA, 1036 bp, Zea mays
  Zm_smallRNAprecursor_238
cgatcgatcgagctagcgatcccggccggcggcgaatcgtactactacttgcgcacggttagcagctggtcgcgcgcgcgcgtgcgtccaagggagttggtggccgtgcgggccgacgaccgcgcgctacgctccttgccgcgcggatacacgctggcagtcgcgcaggtctcactacagcttgcactttccagtgtgtgtgctgtgctggctagagagggcacgccacggccggccataatatagcagcggacggagtacgtacgtacgtacactagcgcttagtagagtgcagagtgcacgttacggaccgaccgaattttttgtattttagcccttaaacagaagtaaaatcacgtttagacctaaaaaaattttaaatgcagttttggacctttgctcggcgccataggctatggcgccgagctaacacagctcggcgccataggctatggcgccgaggtcgtgttgcgttggcacaacccagacgcgtggcgtcgacgtggaaccgagctcggcgccacagatcttggcgccgagctcggttccacgtcgacgccacgcgtctgggttgtgccagagcaaaacagaacttgccctggttgaagaccctgatggcgttgtttgtgaggcagcgacggcggcgacgcgtaggcacccatgccgctctcgccgtcgctcgagctagacctgttccaccgcgcggcggccgcgggcacgggcgccgccgccgtacgctttcctttcggcaacatccccgttacgcactcgtactatttcttcgggcaggccgcagccgccgcggaagtagggtgtcgtgtgctcaagctggcgtcggcggtcaccgtggcgcagagcgactcagactgttcttcggtagtggatctgtcgccgtcgccaccggccgctgtgtcggcgaggaagcccgtcgtgttcgatattgacctgaactgctcaccgccgacggaggcgggagcatagtcgccggagcttttaatgactgtctgtctgttagtttctttcttcgcctttttcc

SEQ ID NO: 4750 - DNA, 1041 bp, Zea mays
  Zm_smallRNAprecursor_239
gcgttccccggcccggccgccgctggccacaccggagtcgtatgtggtcccgccgatcgatcgagctagcgatcccggccggcggcgaagtcgcactactacttgcgcacggttagcagctggtcgcgcgcgcgcgtgcgtccaagggagttggtggccgtgcgggccgacgaccgcgcgctacgctccttgccgcgcggatacacgctggcagtcgcgcaggtctcactacagcttgcactttccagtgtgtgtgctgtgctggctagagagggcacgccacggccggccataatatagcagcggacggagtacgtacgtacgtacactagcgcttagtagagtgcagagtgcacgtttgtattttagcccttaaacagaagtaaaatcacgtttagacctaaaaaaattttaaatgcagttttggaccctttgctcggcgccataggctatggcgccgagctaacacagctcggcgccatagccataggctatggcgccgaggtcgtgttgcgttggcacaacccagacgcgtggcgtcgacgtggaaccgagctcggcgccaagatcttggcgccgagctcggttgtgttattaaaatatttgttgcagacatgagcacaaagcccatctagcccacttggtagagcacaaggcttctaaccatgtggtcgtgggttcaaacccccatagtttgcattttttttgttttttttttgtttatgtcgttggtgtgtccgcttaaatttatttctcgcctagattttttttatgtcgttgtgcctagtgttgccttccatacttgcactgcatgcgcgcgcatttcaatctacagtttccgaatttaaaatgcgcgtaaataatcgactagctcaaatcatgcatgtgcaatacaaaagcaatgtagtaattttataaaatgtcatccgtgcattattcaaaatttgcattacgaatcattaactatttctaaatcactataaatatttttatacatttttttcttccttatatacatttgctttgataaacagcatgccc

SEQ ID NO: 4751 - DNA, 1041 bp, Zea mays; identical to SEQ ID NO: 4750
  Zm_smallRNAprecursor_240

SEQ ID NO: 4752 - DNA, 1042 bp, Zea mays
  Zm_smallRNAprecursor_241
gcgttccccggcccggccgccgctggccacaccggagtcgtatgtggtcccgccgatcgatcgagctagcgatcccggccggcggcgaagtcgcactactacttgcgcacggttagcagctggtcgcgcgcgcgcgtgcgtccaagggagttggtggccgtgcgggccgacgaccgcgcgctacgctccttgccgcgcggatacacgctggcagtcgcgcaggtctcactacagcttgcactttccagtgtgtgtgctgtgctggctagagagggcacgccacggccggccataatatagcagcggacggagtacgtacgtacgtacactagcgcttagtagagtgcagagtgcacgtttgtattttagcccttaaacagaagtaaaatcacgtttagacctaaaaaaattttaaatgcagttttggaccctttgctcggcgccataggctatggcgccgagctaacacagctcggcgccatagccataggctatggcgccgaggtcgtgttgcgttggcacaacccagacgcgtggcgtcgacgtggaaccgagctcggcgccaagatcttggcgccgagctcggttgtgttattaaaatatttgttgcagacatgagcacaaagcccatctagcccacttggtagagcacaaggcttctaaccatgtggtcgtgggttcaaacccccatagtttgcattttttttgttttttttttgtttatgtcgttggtgtgtccgcttaaatttatttctcgcctagattttttttatgtcgttgtgcctagtgttgccttccatacttgcactgcatgcgcgcgcatttcaatctacagtttccgaatttaaaatgcgcgtaaataatcgactagctcaaatcatgcatgtgcaatacaaaagcaatgtagtaattttataaaatgtcatccgtgcattattcaaaatttgcattacgaatcattaactatttctaaatcactataaatatttttatacatttttttcttccttatatacatttgctttgataaacagcatgccct

SEQ ID NO: 4753 - DNA, 1042 bp, Zea mays; identical to SEQ ID NO: 4752
  Zm_smallRNAprecursor_242

SEQ ID NO: 4754 - DNA, 1043 bp, Zea mays
  Zm_smallRNAprecursor_243
gcgttccccggcccggccgccgctggccacaccggagtcgtatgtggtcccgccgatcgatcgagctagcgatcccggccggcggcgaagtcgcactactacttgcgcacggttagcagctggtcgcgcgcgcgcgtgcgtccaagggagttggtggccgtgcgggccgacgaccgcgcgctacgctccttgccgcgcggatacacgctggcagtcgcgcaggtctcactacagcttgcactttccagtgtgtgtgctgtgctggctagagagggcacgccacggccggccataatatagcagcggacggagtacgtacgtacgtacactagcgcttagtagagtgcagagtgcacgtttgtattttagcccttaaacagaagtaaaatcacgtttagacctaaaaaaattttaaatgcagttttggaccctttgctcggcgccataggctatggcgccgagctaacacagctcggcgccatagccataggctatggcgccgaggtcgtgttgcgttggcacaacccagacgcgtggcgtcgacgtggaaccgagctcggcgccaagatcttggcgccgagctcggttgtgttattaaaatatttgttgcagacatgagcacaaagcccatctagcccacttggtagagcacaaggcttctaaccatgtggtcgtgggttcaaacccccatagtttgcattttttttgttttttttttgtttatgtcgttggtgtgtccgcttaaatttatttctcgcctagattttttttatgtcgttgtgcctagtgttgccttccatacttgcactgcatgcgcgcgcatttcaatctacagtttccgaatttaaaatgcgcgtaaataatcgactagctcaaatcatgcatgtgcaatacaaaagcaatgtagtaattttataaaatgtcatccgtgcattattcaaaatttgcattacgaatcattaactatttctaaatcactataaatatttttatacatttttttcttccttatatacatttgctttgataaacagcatgcccta

SEQ ID NO: 4755 - DNA, 1043 bp, Zea mays; identical to SEQ ID NO: 4754
  Zm_smallRNAprecursor_244

SEQ ID NO: 4756 - DNA, 1041 bp, Zea mays
  Zm_smallRNAprecursor_245
cggcgaagtcgcactactacttgcgcacggttagcagctggtcgcgcgcgcgcgtgcgtccaagggagttggtggccgtgcgggccgacgaccgcgcgctacgctccttgccgcgcggatacacgctggcagtcgcgcaggtctcactacagcttgcactttccagtgtgtgtgctgtgctggctagagagggcacgccacggccggccataatatagcagcggacggagtacgtacgtacgtacactagcgcttagtagagtgcagagtgcacgttacggaccgaccgaattttttgtattttagtccttaaacagaagtaaaatcacgtttagacctaaaaaaatttaaatgcagttttggaacctttctcggcgccataggctatgacgccgagctaacacagctcgcgccataggctatgcgccgagtcgtgttgcgttggcacacccagacgcgtgcgtcgacgtgaaccgagctcggcgccaagatctgtgcgccgagctcggttccacgtcgacgccacgcgtctgggttgtgccaacgcaacacgacctcggcgccatagcctatggcgccgagctgtgttagctcggcgtcatagcctatggcgccgagcaagggtccaaaactgtatttgtatttaaaatttttttaggtctaaacgtgattttacttctgtttaagggctaaaatacaaaaaattcagtcggtccgtaacgtgcactctgcactctactaagcgctagtgtacgtacgtacgtactccgtccgctgctatattatggccggccgtggcgtgccctctctagccagcacagcacacacactggaaagtgcaagctgtagtgagacctgcgcgactgccagcgtgtatccgcgcggcaaggagcgtagcgcgcggtcgtcggcccgcacggccaccaactcccttggacgcacgcgcgcgcgcgaccagctgctaaccgtgcgcaagtagtagtgcgacttcgccgccggccgggatcgctagctcgatcgatcggcgggaccacatacgac

SEQ ID NO: 4757 - DNA, 1040 bp, Zea mays
  Zm_smallRNAprecursor_246
ggcgaagtcgcactactacttgcgcacggttagcagctggtcgcgcgcgcgcgtgcgtccaagggagttggtggccgtgcgggccgacgaccgcgcgctacgctccttgccgcgcggatacacgctggcagtcgcgcaggtctcactacagcttgcactttccagtgtgtgtgctgtgctggctagagagggcacgccacggccggccataatatagcagcggacggagtacgtacgtacgtacactagcgcttagtagagtgcagagtgcacgttacggaccgaccgaattttttgtattttagtccttaaacagaagtaaaatcacgtttagacctaaaaaaatttaaatgcagttttggaacctttctcggcgccataggctatgacgccgagctaacacagctcgcgccataggctatgcgccgagtcgtgttgcgttggcacacccagacgcgtgcgtcgacgtgaaccgagctcggcgccaagatctgtgcgccgagctcggttccacgtcgacgccacgcgtctgggttgtgccaacgcaacacgacctcggcgccatagcctatggcgccgagctgtgttagctcggcgtcatagcctatggcgccgagcaagggtccaaaactgtatttgtatttaaaatttttttaggtctaaacgtgattttacttctgtttaagggctaaaatacaaaaaattcagtcggtccgtaacgtgcactctgcactctactaagcgctagtgtacgtacgtacgtactccgtccgctgctatattatggccggccgtggcgtgccctctctagccagcacagcacacacactggaaagtgcaagctgtagtgagacctgcgcgactgccagcgtgtatccgcgcggcaaggagcgtagcgcgcggtcgtcggcccgcacggccaccaactcccttggacgcacgcgcgcgcgcgaccagctgctaaccgtgcgcaagtagtagtgcgacttcgccgccggccgggatcgctagctcgatcgatcggcgggaccacatacgac

SEQ ID NO: 4758 - DNA, 1041 bp, Zea mays
  Zm_smallRNAprecursor_247
gcacgtgcgttccccggcccggccgccgctggccacaccggagtcgtatgtggtcccgccgatcgatcgagctagcgatcccggccggcggcgaagtcgcactactacttgcgcacggttagcagctggtcgcgcgcgcgcgtgcgtccaagggagttggtggccgtgcgggccgacgaccgcgcgctacgctccttgccgcgcggatacacgctggcagtcgcgcaggtctcactacagcttgcactttccagtgtgtgtgctgtgctggctagagagggcacgccacggccggccataatatagcagcggacggagtacgtacgtacgtacactagcgcttagtagagtgcagagtgcacgtttgtattttagcccttaaacagaagtaaaatcacgtttagacctaaaaaaattttaaatgcagttttggaccctttgctcggcgccataggctatggcgccgagctaacacagctcggcgctataggctatggcgccgaggtcgtgttgcgttggcacaacccagacgcgtggcgtcgacgtggaaccgagctcggcgccacagatcttggcgccgagctcggttgtgttattaaaatatttgttgcagacatgagcataaagcccatctagcccacttggtagagcacaaggcttctaaccatgtggttgtgggttcaaaccccatagtttgcatttttttttgtttttttttgtttatgtcgttggtgtgtccgcttaaatttatttctcgcctagattttttttatgttgttgtgcctagtgttgccttccatacttgcactgcatgcgcgcgcatttcaatctacagtttccgaatttaaaatgcgcgtaaataatcgactagctcaaatcatgcatgtgcaatacaaaagcaatgtagtaattttataaaatgtcatccgtgcattattcaaaatttgcattacgaatcattaactatttctaaatcactataaatatttttatacatttttttcttccttatatacatttgctttgataaacagcatgccc

SEQ ID NO: 4759 - DNA, 1041 bp, Zea mays; identical to SEQ ID NO: 4758
  Zm_smallRNAprecursor_248

SEQ ID NO: 4760 - DNA, 1042 bp, Zea mays
  Zm_smallRNAprecursor_249
gcacgtgcgttccccggcccggccgccgctggccacaccggagtcgtatgtggtcccgccgatcgatcgagctagcgatcccggccggcggcgaagtcgcactactacttgcgcacggttagcagctggtcgcgcgcgcgcgtgcgtccaagggagttggtggccgtgcgggccgacgaccgcgcgctacgctccttgccgcgcggatacacgctggcagtcgcgcaggtctcactacagcttgcactttccagtgtgtgtgctgtgctggctagagagggcacgccacggccggccataatatagcagcggacggagtacgtacgtacgtacactagcgcttagtagagtgcagagtgcacgtttgtattttagcccttaaacagaagtaaaatcacgtttagacctaaaaaaattttaaatgcagttttggaccctttgctcggcgccataggctatggcgccgagctaacacagctcggcgctataggctatggcgccgaggtcgtgttgcgttggcacaacccagacgcgtggcgtcgacgtggaaccgagctcggcgccacagatcttggcgccgagctcggttgtgttattaaaatatttgttgcagacatgagcataaagcccatctagcccacttggtagagcacaaggcttctaaccatgtggttgtgggttcaaaccccatagtttgcatttttttttgtttttttttgtttatgtcgttggtgtgtccgcttaaatttatttctcgcctagattttttttatgttgttgtgcctagtgttgccttccatacttgcactgcatgcgcgcgcatttcaatctacagtttccgaatttaaaatgcgcgtaaataatcgactagctcaaatcatgcatgtgcaatacaaaagcaatgtagtaattttataaaatgtcatccgtgcattattcaaaatttgcattacgaatcattaactatttctaaatcactataaatatttttatacatttttttcttccttatatacatttgctttgataaacagcatgccct

SEQ ID NO: 4761 - DNA, 1042 bp, Zea mays; identical to SEQ ID NO: 4760
  Zm_smallRNAprecursor_250

SEQ ID NO: 4762 - DNA, 1043 bp, Zea mays
  Zm_smallRNAprecursor_251
gcacgtgcgttccccggcccggccgccgctggccacaccggagtcgtatgtggtcccgccgatcgatcgagctagcgatcccggccggcggcgaagtcgcactactacttgcgcacggttagcagctggtcgcgcgcgcgcgtgcgtccaagggagttggtggccgtgcgggccgacgaccgcgcgctacgctccttgccgcgcggatacacgctggcagtcgcgcaggtctcactacagcttgcactttccagtgtgtgtgctgtgctggctagagagggcacgccacggccggccataatatagcagcggacggagtacgtacgtacgtacactagcgcttagtagagtgcagagtgcacgtttgtattttagcccttaaacagaagtaaaatcacgtttagacctaaaaaaattttaaatgcagttttggaccctttgctcggcgccataggctatggcgccgagctaacacagctcggcgctataggctatggcgccgaggtcgtgttgcgttggcacaacccagacgcgtggcgtcgacgtggaaccgagctcggcgccacagatcttggcgccgagctcggttgtgttattaaaatatttgttgcagacatgagcataaagcccatctagcccacttggtagagcacaaggcttctaaccatgtggttgtgggttcaaaccccatagtttgcatttttttttgtttttttttgtttatgtcgttggtgtgtccgcttaaatttatttctcgcctagattttttttatgttgttgtgcctagtgttgccttccatacttgcactgcatgcgcgcgcatttcaatctacagtttccgaatttaaaatgcgcgtaaataatcgactagctcaaatcatgcatgtgcaatacaaaagcaatgtagtaattttataaaatgtcatccgtgcattattcaaaatttgcattacgaatcattaactatttctaaatcactataaatatttttatacatttttttcttccttatatacatttgctttgataaacagcatgcccta

SEQ ID NO: 4763 - DNA, 1043 bp, Zea mays; identical to SEQ ID NO: 4762
  Zm_smallRNAprecursor_252

SEQ ID NO: 4764 - DNA, 1072 bp, Zea mays
  Zm_smallRNAprecursor_253
gccactcgtcctcgccgaagcacctcctccgctggatacgctccatgccaggaggaggatggagcgttcgacgacgaggtcgaacctccatcgtccaacgctctcctcatcaccggtctccacatgcatccggcgactgtgtcccgtgggccgaatgaaccttcagtcgacttctcgttgaaggggggtggaagccctttaacacttaaggttcactaatccctctctcacgcccagacatcctggtgtctgggaccctcggttctagaacctttttcaggctgatctttataattcagtcatcatgactaagaagcacccagttgttagacatcgttttattgactgggaggggtgtgagaatatgggagatgctgacatgatgtcaactctccgcaacttagagagaaaggggttgaaaaacataatgactatggaatacccctggaacgacaaagtggtggctcagttctatgccactctctaggtgaagaaagttgatgaagaagctgatgggtatgactacccagtcatgtacttctttatccagggggtttggcataaagttagctaccgtcgttttgcccatatcttgggcttctctgatgcagacattcagggcagcaacatgaaagtagatgacattaggctgcccatgcgggaagagactgaatttattcatatctctatggagcgagaatttcggaccaatgccaacatgcataggtactataggtaccttaactcattgtccaggatgaccgttctcccgaagggcggaaatcaaatgaatgtccttggggagagtcggttttccttcttctccttgctccaaatagtcttgctcgcatcaacgtgtttgacatgatctgggaagagatccttcgtgcttcctagtctccactcaaggggtgtctccatgcaccctttattatgaagatgatcaaagtggtcactcagactcgcttcgaaaagcctgtcaaacactcccgctatgtaccctactggggttgattctagcaacccagctgctcgtacaaagtgggctcccttagggtctggcggccctacc

SEQ ID NO: 4765 - DNA, 1073 bp, Zea mays
  Zm_smallRNAprecursor_254
gcgccactcgtcctcgccgaagcacctcctccgctggatacgctccatgccaggaggaggatggagcgttcgacgacaaggtcgaacctccgtcgtgcgacactctcctcatcaccgatctccacattcatccggcgaccatgtcccgtgggccgaatgaaccttcggccgacttctcgttgaagggggtggaagcccttcaacacttaaggttcactaatccctctctcatgcccagacatcctggtgtccaggaccctcggttctagaacctttttcaggctgatttttataattcagtcatcatgactaagaagcacccagtcgttagacatcgttttattgactgggaggggtgtgagaatataagagatgctgacacgacgtcagctcttcgaaacttagagagaaaggggttgaaaaacataatgactatggaatacccctggaacgacgaagtggtggtcagttctatgccactctctgggtgaagaaagttgatgaagaagctgatgggtatgactacccagtcatgtacttcttttatccagggggtctggcataaagttagctaccgtcgttttgcccatatcttgggcttctctaatgcagacattcagggcagcaacatgaaagtccatgacattaggctgccaatgcggagattgaatttattcatatctctatggtgcgagaattttggaccactgccaacatgcataggtattataggtaccttaactcattgtccaggatgatcgttctcccgaagggcggaaaacaaatgaatgtccttgtggagagtcgggttttccttcttctccttgctccaaatagtcttgccggcatcaacgtatttgacatgatctgggaagagatccttcgtgcttcctggtctccactcaaggggtgtctccatgcaccctttattatgaagatgatcgaagtggtcactcagacttgcttcaaaaagcctgtcaaacactcccactatgtaccctactgggttgattccagcaacccagctgctcgtacaaagcgggctcccttagggtctggcggccctgcctctt

SEQ ID NO: 4766 - DNA, 1126 bp, Zea mays
  Zm_smallRNAprecursor_255
tcctttttcagatcagtacccgtagggttaaacaagccaaaactgcgaggacgaagtggtggaaactcaaaggggagatattcgaagtttttagggaaagagtttttgtgcagggcgcttggtccgaagaagaagatgcaaacaacatgtgggtgaagatggcaacttgtattaggaaggtggcgtcagaggtgtttggagtgaccaaagggagcattggtgaatctaaggatacttggtggtggaccgaggatgttcaaaaggcaataaaagagaagaaataatgttacaggagcttgttccatgacaggagcgtggtcaacatagagaggtataaggtggcaaagaagactgcaaagcgagctgtgactgaggcaaagggtcgagcctatgatgatctttaccgaagactaagtacaaaagaaagggagaaagatgtctataagatagctaggattcgagaaaggaagacgagggagctcaaccaagttaaatgcattaaggatgagatggatcaactcttggtgaaaggacaagacatcaaagagaggtgccagaggtattttgacaatcttttcaatggtgagaatgagactatggacatctaattggatgactcctttgatgatttaaatagatgctttgtacacaagatctaagaatcagaggtcaaaaaagctttaaagaggatgaaaggggggcaaggcggtgggtctggatggtatcccaatagaggtgtgaaaatgcattggggatattgctatcatttggctaaccaagttgttcaaccatatttttcgattaaacaagatgcccgatgagtggaggagtacattagtaccaatcttcaagaacaagggagatattcaaagttgtaccaactatcgagggattaagccccatgagccacactatgaagctatgggagagagttattgagcatcgtctgagagaaatgaccaccatgaaccaatttggatttatgcatggaaggtcaaccatggaagcaattttcttaatgaggcaggtcatggagcgatataaggagcagaaaaaggacttgcatagggtttttatcgacttggaaaatgcctatgataatgataaagtacctaggaatctcatg

SEQ ID NO: 4767 - DNA, 1096 bp, Zea mays
  Zm_smallRNAprecursor_256
gagtgagagtagggttggtgaacctcaggcgctgaagggtgtctattcccttcagagtgaaatcgacgggagattcatgcggaccgcggctgacgttcgccggatgcatgtgcagtccggtgacgtagagagcatcaggcgccggaaggtcgacgaagtcgtcgaaagccccatcctcctcctggcagggagcatacccagaggaagacgtggtacgacgaggacgagaggcgccaaccttttggcgtctcccgcgagtcggctgcgagggcatggaagagccctcgccatccatccgaccagagccacgtcctctcttagagagggagcgacgaggcggaggagaggggacgggagattcctccagaatctcgtccgagtcgctgctaaactcaatcactgaagggttgcgacgacgcaccatgattgaaaaggtggtgaaactgtgaaccggttgaggtgtgtaaaagagaggctctaaaggttgtgaagcgactaaggcgagagtgaatgaagtgggagaagagaaggggaatgtcaaatatatataggcagttgagctggtcctcaggaccggttcaaccgcccccatgggccagttcagctggttctgaccagtgtggtcagagagccagaaacagcagagggaagatgccaaaaatttaaatttctgacgcagaattctaaaaagtgtactgcagagattccatgcgccaaaaaaaaatcaaaaccaagtgtctgcgcagatgagaccggacagcaaaagaaaaagaactgcgcaaaagaaaagttctgcgcgccctgtatccctcacactgctgcacggaagtgacaaaaaaaaagtttccttgctgcgcgggtgtcacagcgactggtcacaagagcaaaaggctgcgcacacggcagtagagtggggctgtgacaaaaaaactgtgcgcgcagctgctggaagcgactggataggaaaaaaaaactggcgcccctgacacgcatgcatggctgtgaggaggagagaaaaaaatctgcagcatggcgtgcgggctgagcagaagcgtccaaaaaaaactgtgcgcgcccagcagaggagaagtgaccg

SEQ ID NO: 4768 - DNA, 1102 bp, Zea mays
  Zm_smallRNAprecursor_257
caaagattggatcagacattcagatggaaacctcagtttcctcgggttcataaaactactgcatggagtttcttcacgcgcaatcaccaaagtataagataaccatttgcatcgagcaatccctgatctctggctagtgcatgccatggctggttgtagaagttgcatgaaaccaatacaaagattaacagatcatcttagcgcaataggtactctcagtaggtgtatatttgccctgcttttcgcaacatggatcgacattgtcctcaagatgttgagaggaatgtacagatttgatttgggaagaatggaaaccctgaaggatttgaggctgttattttgtttgttagttccagtaatgcaggcattgccttcatttgtgttgtgcacctatgccgcttaatgctccatttacatatgctattgttgcatttattatataaatattctagaatgagaggtaatgtgcatcttgagtcaccgagttaccatattagggcttgtttgggagcaagtggaatgaagggtattgataggactataatcccttactatctaaaattgaatagtggaggattatatgccctccaatccactccattacctttactcccaaacaagcccttatagattggaagcagcctctcggtatttgcggaaggaaggtatccctcaggtttattattttattatagatacgaagcagcttctcggtatttgcggaaggaaggtatgcatcaggtttattatttcttcaaaccctacttatacatgaactaatggtattggatctactttaatgagttaatgtacagctttgtaactttggaatccttaagcacaagaaggattatgcggcctctactaaggcctgttgatcttcatctctagcgatccttaaattatatcccacttaaatctcgaacatctcaggaaacagatttcctgaatagaaatccagctgtgacattgtcctgttaggtttgcttcggattgctttagtcgcctgcacttgaaggacaatcattgttttggtgaaattcggatactactaaattatcgccaaattgttaaaagagcgcaaaaagagtagccaaattcc

SEQ ID NO: 4769 - DNA, 1070 bp, Zea mays
  Zm_smallRNAprecursor_258
catgctctcccctctacaacccatgcatatttgttagtgagagtaagaatctatccaacatcatggatattgcgggtggctagttcctcgagcatcatgtcatcccccaaaccctattggaaggcaactgttgggggccttcatcttacgaaggtcctcaaaaacacgactaatatgttttccaagtataatatactcacagggaccttcgaccttgggatgaaggtgtacacgatatgaaaagcgcagtctaagtataatatactcacagagaccttcggccttgggatgaaggtgtacacgatatgaaaagcgcagtctgggagggagatgaaccagttccgaagatatatatggagaagtttcagcttagcggtggagaatgaaaccgacttaaaggggaaaaggttgtctagtcctcaatagattaccccttagtcaatagtaaatgttagggttttttaaattggtgccctcagttttagtggtgtgctcacatatacccttagtcgtgttttttgctcagtcgtgcccttctgttctatagcactggaagggcacagctaagcaaaaaacacgactaagggtatagatgagcacaccaccaaaactgagggcaccaattttaaaaaccctaaatgttaagggtatggatgtaattttacacaggctgcgtcatgtgcctataaatagatgaacagtagcaccgtactgttcacgctgacttgtattcagtcgcacgtcacacttggattctcaccttctgtcaagtcgaaggtataaatgtaattcaatattgttgatgtttattcatgattatataatgagaatataaatagtctaatgatatcatatgattatacatttttatatgtcatatgatcctacttttcattatgtattgagatgatgaaggtatgcccttcatgaccttcgtctgaagatcattatatcctaagggagataatgcttcgaagtatgaaggtatttaatcattaacatttgtgttgtcttgttcttaattcatagcatttgagaacaagtccccaacaacaacgacaatgaaagga

SEQ ID NO: 4770 - DNA, 1061 bp, Zea mays
  Zm_smallRNAprecursor_259
agtttttacactggactactcccttatagtggcggatccaagcatttctaaatcatcgggccaaatttattacagcaaaagcacatacataatctcgtgagtttagttgtcatgatccaatagattatgcttgatgagaacgatggtgtacaagtgtgtaaacaagcctcttaagtctttagatcatgatccaaccacagatgcaactatagttgaatggattcgatcaccttacattcataatatagtggtcttacctcccctcttcgctttgttggcattctattgaatacttgcatcataattcggtgaaagcatctaggcccatggttggttttagtgattaatgacaacgtaatattatatgtgactgacgtatgttttgcagagacaaatggtaagttaggtcgcatgacagcgacggctaaaacgacgaaacaaaaggtgaaggtctacggagtccgagtgtcaaggagatgtggacactcgcggtttagggctgaaaccgacgggaataagccttaaaccgacgggaattacttattcccgtcggtttagggcttattcccgtcggtttcaggccgacaggcgtcccttgtcggggataagtttatccccgtcggcggctgacgggaataagtaattcccgtcggctatactgtggccgacgggaattaaggctaatgcccgtcggttctgctggccgacgggagttattaattaattcccgtcggttccccaggccgacgggagttattaattaattcccgtcggccttacgtggccgacgggaattaactgggccgacgggagttattacttaattcccgtcggttcgaccatagccgacgggaattaactgggccgacgggaattactctatactgctacaaaaacagcactaaattatgtcactatttctgcacacataacatatatcaaacataatatataaatcacatataacagccacattacaaacaaatatagagatacgacatccacaaacacatgcatttagacataaacacttgcatttataattaaaacatccaccaacg

SEQ ID NO: 4771 - DNA, 1171 bp, Zea mays
  Zm_smallRNAprecursor_260
tttcttttgccgtccggtctcatctgcgcagacacttggttttgttttttttgcatggaatctctgtagtacactttttcagaatcctgcgtcagaaatttgaatttttggcatcttccctctgctgtttctggctctctgaccacactggtcagaaccagctgaactggcccatgggggcggttgaaccggtcctgaggaccagctcaactgcctatatatatttgacactccccttctcttctcccacttcattcactctcgccttagtcgcttcacaacctttagagcctctctttcacacacctcaaccggttcacagtttcaccaccttttcaatcatggtgcgtcgtcgcaacccttcagtgattgagtttagcagcaactcggacgagattcaggaggaatctcccgtcccctctcctccgcctcgtcgctccctctctaagagaggacgtggctctggtcggatggatggcgagggctcttccatgccctcgcagccgactcgcgggagacgccaaaaggttggcgcctctcgtcctcgtcgtagcacgtcttcctctgggtatgctccttgccaggaggaggatggggctttcgacgacttcgtcgaccttccggcgcctgatgctctctacctcatcggactgcacatgcatccgacgaacgtcagccgcggtccgcatgaatctcccgtcgacttcactctgaagggaatagacacccttcagcgcctgaggttcaccaaccctactctcactcctcgtcatcctggtgtccaggaccctcggttctggaatcttttccaggctgacttctacaattctgtcattctttccaagaaacacccagtcgttagacataggtttattgactgggagggttgtgagaatatgggagatgctgacatgacgtcaactctcgtaaacttagagagaaaggggttacgaaacattatgaccatggaatacccctggaacgacgaggtggtagctcagttctatgccaccctctggataaagaaagtagatgaggaagccgatgggtatgattacccagtaatgtatttcttcatccagggtaactggcacaaagtcagttatcgtcgttttgcccatattctgggcttctctgatgcagatattcagggcaacaacatgcgagtgca

SEQ ID NO: 4772 - DNA, 1058 bp, Zea mays
  Zm_smallRNAprecursor_261
acacccttcagcgcctgaggttcaccaaccctactctcactcctcgtcatcctggtgtccaggaccctcggttctggaatcttttccaggctgacttctacaattctgtcattctttccaagaaacacccagtcgttagacataggtttattgactgggagggttgtgagaatatgggagatgctgacatgacgtcaactctcgtaaacttagagagaaaggggttacgaaacattatgaccatggaatacccctggaacgacgaggtggtagctcagttctatgccaccctctggataaagaaagtagatgaggaagccgatgggtatgattacccagtaatgtatttcttcatccagggtaactggcacaaagtcagttatcgtcgttttgcccatattctgggcttctctgatgcagatattcagggcaacaacatgcgagtgcatgacattcggctgcccatgcgggaagagacggaattcattcatgtctctactgagcgggagttctggacaaccgctaacatgcataggtactacaggtaccttaattctttgtcccggatgaccgttctcccgaagggcggaaatcaaatgaacgtccttggggagagtcgcgtcttcctcctcctccttgctccaaacagtcttgcccatatcaatgtgtttgacatgatctgggaagagatcgtccgtgcttcctggtctcctctcagagggtgtcttcatgcaccctttatcatgaagatgatcgaagtggtcacccagacccacttcgaaaaacccatcaaacactcccgctacgtaccctactgggttgattcctccaacccagctgctcgtacgaagcgggctccctcacgatctggaggccctgcctcctccactgagccacctcgccagcctccccatcatccatcctcctctccccccgttgctgcctcgcgtccctctcctggccgcagatctcccatgccacgtgctcgtggtcgtggtcgaggtcgtggccgcgggatgggtgctcgcttggtccatgggtttgcggcatttttctcc

SEQ ID NO: 4773 - DNA, 1057 bp, Zea mays
  Zm_smallRNAprecursor_262
cacccttcagcgcctgaggttcaccaaccctactctcactcctcgtcatcctggtgtccaggaccctcggttctggaatcttttccaggctgacttctacaattctgtcattctttccaagaaacacccagtcgttagacataggtttattgactgggagggttgtgagaatatgggagatgctgacatgacgtcaactctcgtaaacttagagagaaaggggttacgaaacattatgaccatggaatacccctggaacgacgaggtggtagctcagttctatgccaccctctggataaagaaagtagatgaggaagccgatgggtatgattacccagtaatgtatttcttcatccagggtaactggcacaaagtcagttatcgtcgttttgcccatattctgggcttctctgatgcagatattcagggcaacaacatgcgagtgcatgacattcggctgcccatgcgggaagagacggaattcattcatgtctctactgagcgggagttctggacaaccgctaacatgcataggtactacaggtaccttaattctttgtcccggatgaccgttctcccgaagggcggaaatcaaatgaacgtccttggggagagtcgcgtcttcctcctcctccttgctccaaacagtcttgcccatatcaatgtgtttgacatgatctgggaagagatcgtccgtgcttcctggtctcctctcagagggtgtcttcatgcaccctttatcatgaagatgatcgaagtggtcacccagacccacttcgaaaaacccatcaaacactcccgctacgtaccctactgggttgattcctccaacccagctgctcgtacgaagcgggctccctcacgatctggaggccctgcctcctccactgagccacctcgccagcctccccatcatccatcctcctctccccccgttgctgcctcgcgtccctctcctggccgcagatctcccatgccacgtgctcgtggtcgtggtcgaggtcgtggccgcgggatgggtgctcgcttggtccatgggtttgcggcatttttctcc

SEQ ID NO: 4774 - DNA, 1058 bp, Zea mays
  Zm_smallRNAprecursor_263
cacccttcagcgcctgaggttcaccaaccctactctcactcctcgtcatcctggtgtccaggaccctcggttctggaatcttttccaggctgacttctacaattctgtcattctttccaagaaacacccagtcgttagacataggtttattgactgggagggttgtgagaatatgggagatgctgacatgacgtcaactctcgtaaacttagagagaaaggggttacgaaacattatgaccatggaatacccctggaacgacgaggtggtagctcagttctatgccaccctctggataaagaaagtagatgaggaagccgatgggtatgattacccagtaatgtatttcttcatccagggtaactggcacaaagtcagttatcgtcgttttgcccatattctgggcttctctgatgcagatattcagggcaacaacatgcgagtgcatgacattcggctgcccatgcgggaagagacggaattcattcatgtctctactgagcgggagttctggacaaccgctaacatgcataggtactacaggtaccttaattctttgtcccggatgaccgttctcccgaagggcggaaatcaaatgaacgtccttggggagagtcgcgtcttcctcctcctccttgctccaaacagtcttgcccatatcaatgtgtttgacatgatctgggaagagatcgtccgtgcttcctggtctcctctcagagggtgtcttcatgcaccctttatcatgaagatgatcgaagtggtcacccagacccacttcgaaaaacccatcaaacactcccgctacgtaccctactgggttgattcctccaacccagctgctcgtacgaagcgggctccctcacgatctggaggccctgcctcctccactgagccacctcgccagcctccccatcatccatcctcctctccccccgttgctgcctcgcgtccctctcctggccgcagatctcccatgccacgtgctcgtggtcgtggtcgaggtcgtggccgcgggatgggtgctcgcttggtccatgggtttgcggcatttttctcca

SEQ ID NO: 4775 - DNA, 1134 bp, Zea mays
  Zm_smallRNAprecursor_264
aagatggactatgataagaagctaaagaagctcgcccccacgaagaaaatccaaaagaagaccaggaaccaaggaggccaagctgagcggaggaagaaggctctcccagcaccagctcccgccaggatagagaatttgtccgacatcaaggatatgtccctagctagccttgatgaccttctcaacgaatttggggacactttagagaaagagttcggtagtacctcagagaacgctcgcgtgtagtatgacttgtagtagccatatgcttgtaatgtattggtgtaatgaataaaatgacttggttgaaaacaattggcatgttcataatagtgactctctccccctggcagatggcttcggataaaaccatgcctaccgcctccgggattggagcagggtttcccctgagagctgaaagggaagccggtagagaggaaagtgagacccacctccccacacctccagaactacccttagatctagcccaagttcttgccaaccaaacccgactcatcgaggtcctcactcgaagtctggaaaatcaacgtccgaatggtggaagaccgcaagacaggatgggggatttcctgaggctcaagcgtcccacgtttgctggatctagcaatcccctcgatgctgacgattggctgcgcacgattaaaagaaagctggaagccatcggatgcccagaaaattagcgtgttcaactggctgctcatcaactttccgggatggccttagcccggtgggataccttcaatgtcaccatcagagatgctacctgggcggagtttgaatcagctttctgggagcaccatgtgcccctaagggatcgttcagctcaaggaagacgaattccgggaactgactcaagacagaagatctgtcagtgaatatgtgcacaagttcacggaattggcccgctacgcgccagatgacgtcagtaccgaagtcaagaagatggcccgcttcctgaaggggctcagaccagaactcaagaccatcctggctagccaagacttcatcagtttctctcacctctccaacaaagccatgcaagtggaaagggcaaaggacgaagaaaaaggccatctcaagaggaaattccaagtcctccgggctcagcagcaa

SEQ ID NO: 4776 - DNA, 1040 bp, Zea mays
  Zm_smallRNAprecursor_265
ttggtgattgatgccaaaacaattaaggtcaaaaaggtatacatttgcaatagaaaatttcttttgaatgattgtatgtagatggctgcccctaaatgtgtgcacgattgtgaatccaatgatttgacataatatgtcatgtgagcaacacatttagagatagtgacaaaaaccatactgaatacaaccatccgaggggtgcaagagtgtcataacaggagttgtgatgcacatgactatctctaaatacacatcatttttacttcatagcaaagtaatcattacaaactgataggacaaaagatgatggccagaagaccatcatattactttgaataacaacccaacagttttatttcatacaatggtaagaggatacaagccacaacagtggccaaaacaaaaataatccaaaagcaaaccgaaagaaccacaaactagaggttggattttctccccctttttggcaacaagtaccaaaaacgaagagagagacatggatacatgaatcaatatcctccaggaggaggataggacggaggatatgatggagggtatgaagtgtagtcagggaagagggtcctcatcacgtcctcctcgaatgtggagtcccgaggtggctcatcagccacagaaaaaacagatgccgaagatgtacgatgatcagaaggaggtggagggtggtgatggtaaccagagccggatggcctagggtcaccaggaatgggtcccggacccgggtagggaggcggagggtgagaggattgttgacccggatccccatggtagggaggcggggcaaactgcccgcgatcatcaacataggcttcttcttcttcttcgtcgtctgctgacataaatggcaccccgtaggcctgctggtgccactcattgatctccgggggaggaggatggagaggcacgtcaggcgagcgaggggcaaagggcacacccaaagtggaagcttgacgacgaagattgtcgtcagtctcccgctgatgccttgccacctcatggacatcagcataaatgttgcggca

SEQ ID NO: 4777 - DNA, 1060 bp, Zea mays
  Zm_smallRNAprecursor_266
atttatcccttcctaatacacactgatacaccaatctaagatctcatcacctatttttatgggagctaattgggaaataaaccaatcaaaggataattgcgcaacggatgcgttggtgctgctggtaggtgatgctagtcataacaataccattattggtgttttactttttatttacctattaaaaatttttgatactgttcccacgcttttttctgacttgctaaaaaatgttcttcaggctcctcctatagagccactggatagtcaactgagcttagatgatctagacgttataaaagtgatcgggaaaggtagcagcgaaaatgtgcaattggtccgtcataaatttactggccagttttttgctctgaaggtatttctgacgcaatcattctttgatgctgcttatttatggttctttacagtcaagactttaaaacgatctctgcattgtactccctccattcttttttatttgtcgcggtttagttcaaaaataaactagcggacgacaaatattcgacaacggaggtagtactacctccggtctcgaatatttgtcgtccgctagtttatttttgaactaaacgcgacaaataaaaaagaacagagggagtatcttctttgtgtaatcttcctaactgttgtaaatggtcctccttcatcgtctgccactgtgtttgcaggttattcaactaaatattgacgagagtatacgcaaacagattgccaaggagttgaagataaacttatcaacacagtgccaatatgttgttgtgttctatcagtgtttctatttcaatggcgccatttctattgttttggaatacatggatggtggctcccttgcagattttctcgccctttcagatttgagaacaacaaggaggaaaattaagtggtatgtcgtttatgtttcggagtgttgttaggattagcttcgatatgaatttttgatgaaatgactcctgttccagttgatcctattccagttgaccgatgatggctcctgttctccggcaaggcaaccacaacatgagctcctcaagtgaaggtc

SEQ ID NO: 4778 - DNA, 1047 bp, Zea mays
  Zm_smallRNAprecursor_267
gcaagtgatgcacaaatttagggggagatgtgctacaacttgaccctttgagactaactgtgtgcttgagtttgcttaatttagtctcaaaagaggattgaaagggaaaaggtgaacttggaccatgcaagacttccactgcactccgatgaacgagtaacttcttccaagttcatcttagtactcttattgcctttcactcttagttgaagatttttggtgaggcaatggggttaaagggccaaaattgatcccgttttagtgcttgatgccaaaggaggagaaaataaggccaaagcaataaatggatcgactaccacttgtgaattttgaaaataatagagttagagtttttgtttgtcaaaatactcttaattgctcttattgtcgaaagttggtctcctgtggggagaaggtttaattatggtaaaaagggggagtttttgaatccttgatcaatttttcgtgaaatatctctctttatgtttcggatgcgatcataccagcactaaagcaccggatcccatcagaactccgaagttaagcgtgcttgggcgagagtagtactaggatgggtgacctcctgggaagtcctcgtgttgtattccttttaactccgcctatgttgattggaagacttccttaagtcgtttcaacatagccggtcccaagcccggtaaaggaggagggttgtgttaggtccggcaaaccaacgtaaaaaccagccaaatcttatggagatgaaaccacaaagaaaatcattggggcgtaaccctcttagcgacgcgccatatcggaacccgggtatggtgttaaatgagcaagggccgggccgtcaccccttaagtgacgcgtcgtctcttgatctggagccggtgataaatgagcaaggatcgggtcgtcgcatccttagtggcgcgctacatcgacgcccgggtgtagtggaaaatgagcaaggttctttgcatcttcctcggtgggtgcgaagggtaaggaagttagtcgagccaactagggtccatgtaggtagttggaacgtaggttcct

SEQ ID NO: 4779 - DNA, 1053 bp, Zea mays
  Zm_smallRNAprecursor_268
caaatttagggggagatgtgctacaacttgaccctttgagactaactgtgtgcttgagtttgcttaatttagtctcaaaagaggattgaaagggaaaaggtgaacttggaccatgcaagacttccactgcactccgatgaacgagtaacttcttccaagttcatcttagtactcttattgcctttcactcttagttgaagatttttggtgaggcaatggggttaaagggccaaaattgatcccgttttagtgcttgatgccaaaggaggagaaaataaggccaaagcaataaatggatcgactaccacttgtgaattttgaaaataatagagttagagtttttgtttgtcaaaatactcttaattgctcttattgtcgaaagttggtctcctgtggggagaaggtttaattatggtaaaaagggggagtttttgaatccttgatcaatttttcgtgaaatatctctctttatgtttcggatgcgatcataccagcactaaagcaccggatcccatcagaactccgaagttaagcgtgcttgggcgagagtagtactaggatgggtgacctcctgggaagtcctcgtgttgtattccttttaactccgcctatgttgattggaagacttccttaagtcgtttcaacatagccggtcccaagcccggtaaaggaggagggttgtgttaggtccggcaaaccaacgtaaaaaccagccaaatcttatggagatgaaaccacaaagaaaatcattggggcgtaaccctcttagcgacgcgccatatcggaacccgggtatggtgttaaatgagcaagggccgggccgtcaccccttaagtgacgcgtcgtctcttgatctggagccggtgataaatgagcaaggatcgggtcgtcgcatccttagtggcgcgctacatcgacgcccgggtgtagtggaaaatgagcaaggttctttgcatcttcctcggtgggtgcgaagggtaaggaagttagtcgagccaactagggtccatgtaggtagttggaacgtaggttccttaacaggtaagttacgag

SEQ ID NO: 4780 - DNA, 1036 bp, Zea mays
  Zm_smallRNAprecursor_269
gggggagatgtgctacaacttgaccctttgagactaactgtgtgcttgagtttgcttaatttagtctcaaaagaggattgaaagggaaaaggtgaacttggaccatgcaagacttccactgcactccgatgaacgagtaacttcttccaagttcatcttagtactcttattgcctttcactcttagttgaagatttttggtgaggcaatggggttaaagggccaaaattgatcccgttttagtgcttgatgccaaaggaggagaaaataaggccaaagcaataaatggatcgactaccacttgtgaattttgaaaataatagagttagagtttttgtttgtcaaaatactcttaattgctcttattgtcgaaagttggtctcctgtggggagaaggtttaattatggtaaaaagggggagtttttgaatccttgatcaatttttcgtgaaatatctctctttatgtttcggatgcgatcataccagcactaaagcaccggatcccatcagaactccgaagttaagcgtgcttgggcgagagtagtactaggatgggtgacctcctgggaagtcctcgtgttgtattccttttaactccgcctatgttgattggaagacttccttaagtcgtttcaacatagccggtcccaagcccggtaaaggaggagggttgtgttaggtccggcaaaccaacgtaaaaaccagccaaatcttatggagatgaaaccacaaagaaaatcattggggcgtaaccctcttagcgacgcgccatatcggaacccgggtatggtgttaaatgagcaagggccgggccgtcaccccttaagtgacgcgtcgtctcttgatctggagccggtgataaatgagcaaggatcgggtcgtcgcatccttagtggcgcgctacatcgacgcccgggtgtagtggaaaatgagcaaggttctttgcatcttcctcggtgggtgcgaagggtaaggaagttagtcgagccaactagggtccatgtaggtagttggaacgtaggttccttaacaggta

SEQ ID NO: 4781 - DNA, 1102 bp, Zea mays
  Zm_smallRNAprecursor_270
gagaaaatacgtctgagttcctccatccctggttgtctaagtccaaaggtttccaagcaaagggtttaaagtgacgggtgaagatgcccttacaacaaactagcccttagagcaggaaataaaaaataagtttaactaagggctagttcaaagatgtattttcttattttatacctaagggctagttaagtgtttaagatcttctccatttcaccatatccaatgtttggatcattcctatgcaaaaacatataaaacagaaaaattagagagtaaataaaaaacaaaacatgggtagacattattttgggagtatgtaaaagataaccgaggggtgtggcatcattgctgcaatgacactcaacatatttactcaaaactttcggtaacacactcagagtgacacttactcaatacatctagtactcatgaatgaggaaggcatgagggagggctgcatttgtaggagagacccctagctagaaacttgtacttagggcttgtttgggagcaagtggaatgaagggtattgataggactataatcccttgctatctaaaattgaatagtggaggattatatgcccttcaatacactccattacctttactcccaaacaagcccttaatgcttaaattttagtacttgttttatacaaaaccgatgtttatctaattttggtaggaatcctaattgcaccgacgggaaatgaaaatatattttagtagcggttcttaccaaaaaatgacactagaggtgtctctagttttagagccaactgtgggatctttaataccgtttggtgtttgcaaccggtactaaagagttaagctttaatatcgattatttggtataagatataatgaatatttttataccggttcttctacaaagccgatactaaattacctaatatcatcatcgattgtgaaaagtaaccggtagtattatcttttacatggatctctacatttaaaaatgtcactgaagttagtctcaataccaattttaaatcaatcggaataaaagttgttggacctacgccctattctccagcagtgtccattagaccatggtgaagtctacgaagaaggtatgtgaa

SEQ ID NO: 4782 - DNA, 1152 bp, Zea mays
  Zm_smallRNAprecursor_271
gccgaaagtaaaaggcgaaaaaacttcaaagtcgttcctaagggaatgcagagcttacagcgaaaagtcaacgctgattccgccgaaagtaaaaggcgaagaagctccaaagtcgttcctaagggaatgcagagcttacagcgaaaagttagcactgatatgtgattgtttctaaggaaataatggctgtgattatggcttcggatatgtgtttggacattcatttgcacatcacattacatcatagcatttgcattcataaacattcatccaggcatatgtaggataatcatcatcatagcataagtggttgcttcggcaaaaagaaaaaaaaagagagaagagcttcttcgtgtacgaaaagaagagcttcggaagaaagggaaatgttatgttctatgcttcgctgtgtacgaaaagaagggaaggtgttttttcgccttcggctcaaaaaaaaagataatttcgtccacatcaaagcacctctcatacattaatggaaggataagagcatattacaaggtatgaacagaattcattaaagacaagtttagttacatttacaaaagttatctcaaaagtttcttgagtttgtctacagtctactcctatttaatcttcaagggacttcagcttcggcgtcattctttttaaccatcggcttcggcttcgtcatcctacatgaattaagttgttgtaagtaaaaatcgagcttgaaggaagaggtaagcacaaggtatgatttcttactggttcaagatgacttcaagcttcgtctccagccttttctcgcccgccttttgtccatatcatctttacaaatctattggaaatgcttcgggcgagatcaggaatgtcatctagaattgatggtgataaagtgaaattgggcctattgacaatctttccatgatcgcagccagcctttaggaaagctgcagcagtgccccgagaagctacccaggcgcagaagtcaccgtgcccggctataacttcgtcaagctcatcaatttcaccctcaatatgttcgaaggtctttgctaaatcttcagctgacggggtgaatttctcactgctagctccgactgaatggaaaatttttctcagtcgttgaatacatttgttgctaaattctaaacatttgtcttgaag

SEQ ID NO: 4783 - DNA, 1102 bp, Zea mays
  Zm_smallRNAprecursor_272
gttcagaatgtttacttgatctgcagttacttttctgtcaccagaaggctgaaatatgaaacttacaaaaaaacatatctactttctatgtgctgctgcctcttgaatcagctgtttagagattcaatgtactatcatagtgtgttacatttatctgaaccagaattggccaacataaatttctgctttgtgctttgcatgaactttgatttgaagcaacaaaaatacttgctaacggtttaccttggtcaataattcagggacataacaacaacattccctagctttgtgtttaactcggaagtcgacgatctcgtcacgtgaccaccactctctccgatgtatagttaataaggagttttttctcccctcaaccgcaaaaaggagaacctgtcgagggttacgagtggagatttccagctttctctggcaatgaatggagggtgcgtcaaattggctgccacaaatgtacgagacgacctgtagttttcactcagggcttgtttgggagcaagtggaatgaagggtattgataggactataatcccttgctatctaaaattgaatagtggaggattatatgccctccaattcactccattacctttactcccaaacaagccctcaatggtaatgatgatgcttttgtgttggtgatgattgagactgagttagtatgcagatgtgaacagtttccatttttaccagtgggaaggctgttttgtttgtgaaactgcgatgtgcttgtttgcacactgtactgatcaaacctgattcttgtcaaagtagtactgcattcttcttcaagtcccaaaacttgcatcgcatgtcatataggtctctgagttactaatgccccacttccatatctcttaacttacctctgcatcctaaaatataaagattttaaattgtcttaagttgaaactagtaaattgcttgtgctccgcccgagtttttgagcgatgtgtttatctctactactcaataagcctttaacgtaggcgttcacaatcgtgcgccatgttctgccgcacaatcctgtccctccgcttttcattgcacggccacgccggagccgctctcaatcgcctccccaccg

SEQ ID NO: 4784 - DNA, 1048 bp, Zea mays
  Zm_smallRNAprecursor_273
ttcatccatagcaactgagcacaacaagcaccagcagctatgtattcggcctcggcagtggaaagtgcaacacagttttcttcttagagctccaagacaccagggaccgcccaaggaattggcaagtccccgaggtgctttttcgatctactttacaaccggcatagtctgaatcagagtagccaaataaatcgaaaaaggagcccttaggataccagagacctagattttgggtgtgaactagatatctcaaaattctcttaacggccactaagtgacactcttttgggttagcttgaaaacgggcacacatgcacacactaagcatgatatctggcctagatgcacacaaatatagtagagatcctatcattagcttttgatctacagttttaccttcttcatttaagtcgagatgaccacttgaagccattggtgtcttgacgtgctttgccttttccatgccaaactttttgagcatgtcttgtgtgtacttggtttggcacagaaaggttccttccttgagttgtttaacttgaaaacccaggaagtacttgagctcacccatcatggacatctcaaacctatttgtcataaccctactaaattcctcacaaaaagtttcatcagtactgccaaatataatgtcgtcgacatatatttgacaaacaaataattgattgtcaactttgcgagtgaataaagtagagtctacttttcctatttcaaaaccattgttaagcaagaaatccttaaggcaatcataccaagctctaggggcttgtttaagcccgtagagtgccttgtgaagtaggtaaacatgatttggcttctttggatcttcaaagcccggtggttgctccacatagaccctctcttgtagtggtccatttagaaatgcgctcttgacatccatttgatatagcttgaaatcattgttagtagcataggcaattaatattctaattgactctaaccttgctaccggcacatatgtttcaccaaaatcaagtccttccacttgagtgtagccttgggcaaccaacct

SEQ ID NO: 4785 - DNA, 1088 bp, Zea mays
  Zm_smallRNAprecursor_274
aaggttgattctgtaattacacatgcatcatgctaagaactatactaataaaatttttccccttagaaagatgccgtcgcgcacaaggaaaacgacgcgcaagtcaactggcccaatcggtgtgccccggcatcaacttgcccctcgacatgaggatagtagcagcgggagcaatgatccaataggggatcttgaagcgcgagtaaatcaacttcaaacggaattgcaacgcaggaccaacatatgggttgcggatggagatagaataaatgaattaagaagcgacatccgccgcctgcgggatcagcttgctgatcgggacttggcgctcgactgggtagttcagtcccgtttgcttgcttgtgctaaagaggcaagggctcaagcccgagtcaaggaacttagctcagctatcgacaacctgcaggtctattgcaatactttatatgaggaagtccatgtactgtattcgcaattacaccctagtgcacctgcgcaccctgttgagtcggaagccggaccctcgcatgttgcgggacacgcgcttggtggtgagttagacctttttcagccccctccttccatgaggctggtcgacgaatggtctcccacacccgacgacgaggccgccaaaagcaatgggaagcaggactagtggtgtagtagaagtagcagtagtgtattgtaggttgtactattgtataataggtagtgtaattgtataataggtagtgtatttgtataataggtaatgtatcctattgtaaaagttcgagtctgtacattactctttttggtaatgtaaaatggatggttttctttggcatatcatattgttttcaactgttgttgccacagatgccttccaagactcgagcacaggacggaactggtacctcccgggggagggaggctaccccaaatccacctcctgttcctcccacactggccgaggcgattgccgccttagtgaatgcgactgcggacaatacccgctttctgagagaaatggtgggccaacagttccagcagcatggtgggcggggttatcaacagggcccccgcgaaacttcttatctggacttctc

SEQ ID NO: 4786 - DNA, 1152 bp, Zea mays
  Zm_smallRNAprecursor_275
ttacagcgaaaagtcaacgctgattccgccgaaagtaaaaggcgaagaagctccaaagtcgttcctaagggaatgcagagcttacagcgaaaagtcaatgctgattttgccgaaagtaaaaggcgaagaagctccaaagtcgttcctaagggaatgcagagctgatgtgtgattgtttctaaggaaataatggctgtgagtatggcttcggatatgtgtttggacattcatttgcacatcacattacatcatagcatttgcattcataaacattcatccaggcatatgtaggataatcatcatcatggcataactggttgcttcggcaaaaagaaaaaaaaaagaagaccttcttcgtgtacaaaaaagagagcttcggaagaaagggaaatgttgttttctatgcttcgctgtgtacgaaaagaagggaaggtgttttttcgccttcggctcaaaaagataatttcgtccacatcaaagcacctctcatacattaatggaaggataagagcatattacaaggtatgaacaaaattcattatagacaagtttagttacatttacaaaagttatctcaaaagtttcttgagtctgtctacagtctactcctatttaatcttcaagggacttcagcttcggcgtcattctttttaaccatcggcttcggcttcgtcatcctacatgaattaagttgttgtaagtaaaaatcgagcttgaaggaagaggtaagcacaaggtatgacttcttactggttcaagatgactccgagctttgtctccagccttttctcgcccgccttttgtccatatcatctttacaaatctattggaaatacttcgggcgagatcaggaatgtcatctaggattgatggtgataaagtgaaattgggcctattaacaatctttccatgatcgcagccagcttttaggaaagctgcagcagtgccccgagaagctacccaggcacagaagtcaccgtgcccggctataacttcgtcaagctcatcgatttcaccctcaatatgttcgaaggtctttggtaaatcttcagctgacggggtaaatttctcactgctggctccaactgagtggaaaaaaatttttagtcgttgaatacatttgttgctaaattccaaacatttttcttgaag

SEQ ID NO: 4787 - DNA, 1088 bp, Zea mays
  Zm_smallRNAprecursor_276
aaggttgattctgtaattacacatgcatcatgctaagaattatactaataaaatttttccccttagaaagatgccgccgcgcacaaggaaaacggcgcgcaagtcaactggcccaatcggtgtgccccggcatcaacttgcccctcgacatgaggatagtagcagcgggagcaatgatccaataggggatcttgaagcacgagtaaatcaacatcaagcggaattgcaacacaggaccaacatatgggttgcggatggagatagaataaatgaattaagaagcgacatccgccacctgcgggatcagcttgttgatcgggacttggcgctcgactaggcagttcagtcccgtttgcttgcttgtgctaaagaggcaagggctcaagcccgagtcaaggaacttagctcagctatcgacaacctgcaggtctattgcaatacgttacatgaggaagtccatgtactgtattcgcaattacaccctagtgcacctgcgcaccctgttgagtcggaagccggaccctcgcatgttgcgggacacgcgcttggtggtgagttagacctttttcagccccctccttccatgaggctggtcgacgaatggtctcccacacccgacgacgaggccgccaaaagcaatgggaagcaggactagtggtgtagtagaagtagaagtagtgtagtgtattgtaggttgtactagtgtataataggtagtgctattgtatactaggtaatgtatcctgttgtaagagtctgagtctgtaacattacttttggtaatgtaaaatggatggtttttcattggcatatcatattgttttcaaatgttgttgccacagatgccttccaagactcgagcacagggcggagctggtacctcccgggggagggaatctacaccaaatccacctcctgttcctcccacactggctgaggcgattgccgccttagtaaacgcgactgctgacaatacccgctttctgagagaaatggcgggccaacagttccagcagcaaggtgcgcggggctatcaatagggcccccgcgaaacttcttatctggacttctcggagacacgtccgccc

SEQ ID NO: 4788 - DNA, 1190 bp, Zea mays
  Zm_smallRNAprecursor_277
accagagccggatggcctagggtcaccaggaatgggtcccggacccgggtaaggaggcggagggtgggaggaggattgacccggatccccatggtagggaggcggggcaaactcctcgcgatcatcaacatagacttcttcatcttcatcgtctgcagacataaaaggcaccccgtaggcctgctggtgccactcattgatctccgggggaggaggatggagaggcacatcaggcgaacgagggacaaaaggcatgcccatggaggaagcttgacgacgaagattgtcgtcagtctcccgctgacgccgtgccacctcatggacatcagcagaaatgttgcggcacatggagaaaaatgtcgcaagcccatggaccaagcgagcacccatcccgcggccacgaccacgaccacgaccacgagcacgtggcatgggagagccgcggccaggagagggacgcgaggcagcagcggggggagaggaggaaggatggtggggaggctggcgaggtggctcagaggaggaggcagggcctccagaccgtgagggaacccgcttcgtacgagcagctgggttggaggaatcaacccagtagggtacgtagcgggagtgtttgacgggtttttcgaagtgggtctgggtgaccacttcgatcatcttcatgataaagggtgcatgaagacaccctctgtgaggagaccaggaagcacggacgatctcctcccagatcatgtcaaacacattgatgcgggcgagactgtttggagcaaggaggaggaggaggactcgactctccccaaggacgttcatttgattaccgccctttgggagaacggtcatccgggacaaggaattaaggtacctgtagtacctatgcatgttagcggttgtccagaactcccgctcagtagagacatgaatgaattccgtctcttcccgcatgggcagccgaatgccatgcactcgcatgttgctgccctgaatgtctgcatcagagaagcccagaatatgggcaaaacgacgataactgactttgtgccagttaccctggatgaagaaatacatgactgggtaatcatacccatcggcttcctcatctactttctttatccagagggtggcatagaactgagctaccacctcatcgttccaggggtattccatggtcataatgttacgtaacccctttc

SEQ ID NO: 4789 - DNA, 1148 bp, Zea mays
  Zm_smallRNAprecursor_278
atacccatcggcttcctcatctactttctttatccagagggtggcatagaactgagctaccacctcatcgttccaggggtattccatggtcataatgttacgtaacccctttctctctaagtttacgagagctgacgacatgtcagcatctcccatattctcacaaccctcccagtcaataaatctatgtcggacgactgagtgtttcttggtaagaatgacagaattgtagaagtcagcctggaaaagattccagaaccgagggtcctggacaccaggatgacgaggagtgagagtagggttggtaaacctcagacgctgaagggtttctattcccttctgagtgaagtcgacgggagattcatgcggaccgcggctgacgttcgccggatgcatgtgcagtccggtgacgtagtgagcatcaggcgccggaaggtcgacgaagtcgtcgaaagccccatcctcctcttggcagggagcataccctgaggaagacgtgctacgacgaggacgagaggcgccaaccttttggcgtctcccgcgagtcggctgcgagggcatggaagagccctcgctagccatccgaccagagccacgtcctctcttagagagggagcgacgaggcggaggagaggggacgggagattcctcctgaatctcgtcggagtcgctgctaaactcgaccacagaggggttgcgacgacgcaccatgatttgaaaaggtggtgaaactgtgaagcggatgaagtgtgtgaaggagaggctctaaaggttgtgaagcgaccaaggcgagagtgaatgaagtgggagaagagaaggggagagtgaagtatatataggcagttgagctggtcctcaggaccagttcaaccgcccccatgggccagttcagctggttctgaccagtgtggtcagagaaccagtaacaacagagggaagaaagaaaaaattcaaatttgcgcacagctgctggaagtgactggacaggaaaaaaatgggcgcccctgacacgcatgcacggctagtgcgcgggcagagcagaaatgtccaagaaaatctgcacgcgcagagcagagaagaggtgaccggacaaaacaaataaaaaaatctgcatgcgcacccctgctgttgaccaaataaaagattct

SEQ ID NO: 4790 - DNA, 1096 bp, Zea mays
  Zm_smallRNAprecursor_279
agtgagagtagggttggtaaacctcagacgctgaagggtttctattcccttctgagtgaagtcgacgggagattcatgcggaccgcggctgacgttcgccggatgcatgtgcagtccggtgacgtagtgagcatcaggcgccggaaggtcgacgaagtcgtcgaaagccccatcctcctcttggcagggagcataccctgaggaagacgtgctacgacgaggacgagaggcgccaaccttttggcgtctcccgcgagtcggctgcgagggcatggaagagccctcgctagccatccgaccagagccacgtcctctcttagagagggagcgacgaggcggaggagaggggacgggagattcctcctgaatctcgtcggagtcgctgctaaactcgaccacagaggggttgcgacgacgcaccatgatttgaaaaggtggtgaaactgtgaagcggatgaagtgtgtgaaggagaggctctaaaggttgtgaagcgaccaaggcgagagtgaatgaagtgggagaagagaaggggagagtgaagtatatataggcagttgagctggtcctcaggaccagttcaaccgcccccatgggccagttcagctggttctgaccagtgtggtcagagaaccagtaacaacagagggaagaaagaaaaaattcaaatttgcgcacagctgctggaagtgactggacaggaaaaaaatgggcgcccctgacacgcatgcacggctagtgcgcgggcagagcagaaatgtccaagaaaatctgcacgcgcagagcagagaagaggtgaccggacaaaacaaataaaaaaatctgcatgcgcacccctgctgttgaccaaataaaagattctccactcgcatgtcttcatgcaaagccaaaaggacaagaaatctgcgcgcgccgcagggaaaagatcggacagggcaaaggtggcgcgcttctgcatgcacagccaaaaaaaattctgcgcgcgcggcaggggggaagtgactgcacaggggaaaagtggaaaagcctctgcatgcacagccaaaaaaaaatataactgtgcgccagggaagtgaccggacgctgctgtctgcatgc

SEQ ID NO: 4791 - DNA, 1190 bp, Zea mays
  Zm_smallRNAprecursor_280
ttccgcatttcgtggtaaagtttccacgtttgggttatgaactccacttggatggcttctttcacagttcaggggccggagttcagttatgaacttcacttgccactgttcttttggtatttatgcggttagtcaacagggtgcttgtctatctttcaggagcaattcatgtgtctctctactcgcagtagtttgttcttaattaaagttttttatgcttgaactatagtatggctgcatgtgtaaagggcagggatctcatcggatctgcaaaaaacaagatatgcgagagaactgctagtccattatattagttactttagtttatggttactgttttttttcctggacagctatgattagatgctttttcttgcaactttccagggttgcttgtcataattgtttcattgatgagaatctacatagttgtgcaagatggtattacctcatacatcttatgttgtgcattcaagaaaatttccttccctcatacatcttatgttgtgcaagatggtattacctcttgttttctagagtggggattggttggggatttgtttactctgacattggataatgctagtgtaaacagatcttcaattctattgttcaagcattgggtcttgaaagtaaatcagggctgatttttgatgttccacatcgttggaatgcaacctatgatatgttaaatgaagcactaaaatataaggatgctcttaataggtatgtaacagagcaacatcatgaatgtcccactgaagaagattggtcaaagacagaagctcttcatggttttctacaagagtttagtgatgcaaccaaagcattctcagcggatagacatcccacagctcatctttttctcaagatgttgctggttatccgaggtgtgctacttgatgtgacttggaactcaaatgaactcattaatgagatggcaaatgttatgtatgctaagttccaaaaatattgggaaaatcctaatattgtgttgctcatagctgctgttctagatccatcaatgaagaccgaatttgtcaagttctatttctacacaattggtgataatgttgatgtgaagatgagggagctcaaaaggtacttgaaaaaatattacctagagtatgagaaaatcatgaggagtcatagtttgcctgtctttattcctcatgagaatcagatgagaa

SEQ ID NO: 4792 - DNA, 1108 bp, Zea mays
  Zm_smallRNAprecursor_281
aaaaactagactttctcaatttagagacttaagagcagaagaaaaaatgggaaaattccactatctcccaaaaagagatgcggcaatcttaaagagaaaattatctaccttgcaaagatatctcgacgggatcaaatatatgacgaggttgcctgacattgtgatcgtccttgatcagcaaaaagagtatatagctcttcaggaatgtgccattttggggattcctactatttctttagtcgatacaaattgtgacccagatcttgtgaatatatcgattcctgccaacgatgacactatgacttcaattcgattaattcttaacaaattagtatttgcaatttttgagggccgttctctctatataagaaatcgttgattaagaagaatagttaattcttgagcaactgcgtagatttataggattaataactatttttttgttttgcatagataaaagaaggggaatattgatatataatagagggtattgctatatattatgatctgatgtgatttcttggtatattaaatataagattaatacttcaagttgctaagttgcgaaagagatgttgaatcaaaagaattccttttttgaagttcaatttttatcagaggacaataagaatattacaccatgttccattaaaacacgtaaggggttatatgatatatcgagtgtacaagtagggcaacacttctattggcaaataggatgtttccaaattcatgcccaagtactaatcacttcttgggtcataattactattttgctaggttcagttatcatagctgttcggaatccacaaatcattccgatcgacggtcagagtttctttgaatatgtccttgagtttattcgagacttgagcaaaactcagattggagaagaatatggtccctaggttccctttattggaactatgttcctttttatttttgtttcgaattggtcaggtgctcttttaccttggaaaattatagagttaccccatggggaattagcaacgcccatgaatgatataaatactattgggggccttcggcttccgaaggtcctcaaaaacatgatttaacaatgtttctggagtataatacatgaaca

SEQ ID NO: 4793 - DNA, 1149 bp, Zea mays
  Zm_smallRNAprecursor_282
cttacagcgaaaagtcaacgctgattccgccgaaaagtaaaaggcgaagaagctccaaagtcgttcctaagggaatgcagagcttacagcgaaaagtcaacgctgatttcgccaaaagtaaaaggcgaagaagctccaaagtcgttcctaagggaatgcagagctgatgtgtgattgtttctaaggaaatattggctgtgagtatggctttggatatgtgtttggacattcatttgcacatcacattacatcatagcatttgcattcataaacattcatccaggcatatgtaggataatcatcatcatggcataagtggttgcttcggcaaaaagaaaaaaaaagagcttcttcgtgtacaaaaaggagagcttcgaaagaaagggaaatgttgttttctatgcttcgctgtgtacgaaaagaagggaaggtgttttttttcgccttcggctcaaaaagataatttcgtccacatcaaagcacctctcatacattaatggaaggataagagcatattacaaggtatgaacaaaattcattaaagacaagtttagttacatttacaaaagttatctcaaaagtttcttgagtctgtctacagtctactcctatttaatcttcaagggacttcagcttcggcgtcattcttaaccatcggcttcggcttcgtcatcctacatgaattaagttgttgtaagtaaaaatcaagcttgaaggaagaggtaagcacaaggtatgacttcttactggttcaagatgactccgagcttcgtctccagctttttctcgcccgccttttgtccatatcatctttacaaatctattggaaatacttcgggcaagatcaggaatgtcatctaggattgatggtgataaagtaaaattgggcctattgacaatctttccatgatcgcagccagcttttaggaaagctgcagcagtgccccgagaagctacccaggcacagaagtcaccgtgcccggctataacttcgtcaagctcatcaatttcaccctcaatatgttcgaaggtcattggtaaatcttcagctgacggggtgaatttatcactgctggctccaactgagtgaaaaaattttcttagccgttgaatacatttgttgctaaattccaaacatttttcttgaag

SEQ ID NO: 4794 - DNA, 1154 bp, Zea mays
  Zm_smallRNAprecursor_283
cagagtagccaaataaatcgaaaaaagagcccttaggataccagagacctagattttgggtgtgaactagatatctcaaaattctcttaacggccactaagtgacactcttttgggttagcttgaaaacgggcacacatgcacatattaagcatgatatctggcctagatgcacataaatatagtagagatcctatcattgatctataaagcttttgatctacagttttaccttcttcatttaagtcgagatgaccacttgaagccattggtgtcttggcgtgctttgccttttccatgccaaactttttgagcatgtcttgtgtgtacttggtttggcacagaaaggttccttccttgagttgtttaacttgaaaacccaggaaatacttgagctcacccatcatggacatctcaaacctatttgtcataaccctactaaattcctcacaaaaagtttcatcagtactgccaaatataatgtcgtcgacatatatttgacaaacaaataattgattgtcaactttgcgagtgaacaaagtagagtctacttttcctatttcaaaaccatttttaagcaagaaatctttaaggcaatcataccaagctctaggggcttgtttaagcccgtagagtgccttgtgaagtaggtaaacatggtttggcttctttggatcttcaaagcccggtggttgctccacatagaccctctcttgtagtggtccatttaaaatgcgctcttgacatccatttgatataacttgaaatcatggttagtagcataggcaattaatattctaattgactctaaccttgctaccggcgcatatgtttcaccaaaatcaagtccttccacttgagcgtagccttgggcaaccaaccgtgctttgtttcttgtaaccacgccatgttcatcttgtttgttcctaaagacccattttgtcccaatcacattttgtttgggtctttggactaaggaccaaacttcattccgggtgaagttgttcaactcctcttgcatggcaattatccaatccggatcacccaatgcttcttcaaccttaagtggctcaagagaggaaacaaacgagtaaaattcacaaaaattagctaaacgagatcgagttgttacccctctcctgatgctacccagat

SEQ ID NO: 4795 - DNA, 1033 bp, Zea mays
  Zm_smallRNAprecursor_284
aaatcctcaagcagccggtcagtcctgcgacggcgcacagactcctcgaccgcccgggtgcggcacatggcgaagacgccaagaaggcccttggccagacgaataaaaaatccccgacctcgaccccgtccctagctcggaccacctcctctcccgttgtggtccattggacgtgaggcagcagcggcgcgagacgaggatgggtgatgtggaggctgaggatgtggctcatcagaagaagcagggcctccagaccctgagggagcccgctttgtacgagcagttgggttggtggaatcaacccagtaaggtacatagcgggagtgtttgacaggtttttggaagtaagtctgggtgaccacttcgatcatcttcataagaaagggtgcatgaagacaccccttgagaggagaccaggaagcacgaaggatctcttcccagatcatgtcaaacacattgatgcgagcgagactgttgggagcaaggaggagaaggaagacccgactctccccaaggacgttcatttgattcccgccctttgggagaacggtcatcctggacaaagagttaaggtacctgtagtacctatgcatgttggcgatggtccagaactcccgatccatagagacatgaataaattcagtctcttcccgcatgggcagcctaatgtcatgaactctcatgttgctgccctgaatatcagcatcagagaagcccaaaatatgggcaaaacgacggtagctgactttgtgccatttccccgggataaagaaatacatgactgggtaatcatacccttcagcttcttcatctactttcttgacccagagggtggcatagaactgagctaccacctcgtcgttccaggggtattccattgtcataatattttttaacccctttatctccaagttacggagagctgacgtcatgtcagcatctcccatattctcacatccttcccagtcaataaacctgtaacaccccaggtgttacccaaggccctagccgaatgagcacacttttggcatct

SEQ ID NO: 4796 - DNA, 1148 bp, Zea mays
  Zm_smallRNAprecursor_285
atacccatcagcttcctcatctactttctttatccagagggtggcatagaactgagctaccacctcgtcgttccaggggtattccatggtcataatgtttcgtaacccctttctctctaagtttatgagagctaacgtcatgtcagcatctcccatattctcacaaccctcccagtcaataaacctatgtctgacgactgggtgtttcttggaaagaatgacaaaattgtagaagtcagcctggaaaagattccagaaccgagggtcctggacaccaggatgacgaggagtgagagtagggttggtgaacctcaggcactgaagggtgtctattcccttcagagtgaagtcgacgggaggttcatgcggaccgcggctgacgttcgccggatgcatgtgcagtccggtgacgtagagagcatcaggcgccggaaggttgacgaagtcgtcgaaagccccatcctcctcctggcagggagcatacccagaggaagacgtgctacgacgaggacgagaggcgccaaccttgtggcgtctcccgcgagtcggctgcgagggcatggaagagccctcaccatccatccgaccagagccacgtcctctcttagagagggagcgacgaggcggaggagaggggacgggagattcctcctgaatctcgtcggagtcgctgctaaactcaatcactaaaggattgcgacgacgcaccatgattgaaaaagtggtgaaacggtgaactggttgaggtgtgtgaaagagaggctctaaatgttgtgaagcgactaaggcgagagtggatgaagtgggagaagagaaggggagtgtcaaatatatataggcagttgagctggtcctcaggaccggttcaaccgcccccatgggccagttcaactggttctgaccagtgtggtcagagagccagaaacagcagagggaatacgccaaaaattcaaatttctgacgcaggattctgaaaaagtgtactgcagagattccatgcgcccaacaaaaatcaaaaccaagtgtctgcgcagatgagaccggacggcaaaagaaaaagaaatgcgcaaaagaaaagttctgcgcgccctgtatccctcacactgctgcacggaagtgacaaaaaaatagtttccttgctgcgcggg

SEQ ID NO: 4797 - DNA, 1068 bp, Zea mays
  Zm_smallRNAprecursor_286
agcgggagaggaagtggtccaggccagggtcagggccgaggccagggacttttcattcgtctggccaagggcctttcttggcgtcttcgccatgtgccgcactcgggcggtcgaggagtctgtgcgccgttgcaggaccgaccgactgcatgaggatcttcgtcgttatgcagccgagactggtcatcctctccctcctgggtcccctccacctccagcccctaccttccccgcagaccttaatgagtggcaccaacaggagtttggtgtgccattcattaccccggaggatgaggtcgaggactatgatgaccctttctacacctcagaccctcctcatcctcctccctactcgggtcacggacccactcctggtgaccctaggccgtccggctctggtcactatcctccttctccctacccgggtccgggacccattcctggtgacccacggcctttcggctctggttaccatcaccaccctcctcctccacctcctcctcatcatcgtacatcttcggcatccgttttttctgcgggtgatgagccccctagggactcctcactcgaggaagacatgatgaggactttcttccccgagtacacatcatatcctccgtcctatcctcctcctggaggatattgattcatgtgtcctcttctccctctctctttgtttttggtacttgttgccaaaaagggggagaaaatccaaaaaatctagtcattctgtttgtggttctttcagttatgtatttctttttttattattgttttttggttttggccactgttgtggcttgtatcctcttatcattgtatgaaataaaacggttgggttattattcaatgtgatgatggtcttctggccatcatcttttgtcccatcagtttgtaatgattgctttgctatgaagtaaaaatgatgtgtaattagagatgactatctctaaatacacatcatttttacttcatagcaaagcaatcattaatatgcatcacaactcctgttatgacactcttgcacccctcggatggttgtatttagtatggtttttgtcactatct

SEQ ID NO: 4798 - DNA, 1069 bp, Zea mays
  Zm_smallRNAprecursor_287
agcgggagaggaagtggtccaggccagggtcagggccgaggccagggacttttcattcgtctggccaagggcctttcttggcgtcttcgccatgtgccgcactcgggcggtcgaggagtctgtgcgccgttgcaggaccgaccgactgcatgaggatcttcgtcgttatgcagccgagactggtcatcctctccctcctgggtcccctccacctccagcccctaccttccccgcagaccttaatgagtggcaccaacaggagtttggtgtgccattcattaccccggaggatgaggtcgaggactatgatgaccctttctacacctcagaccctcctcatcctcctccctactcgggtcacggacccactcctggtgaccctaggccgtccggctctggtcactatcctccttctccctacccgggtccgggacccattcctggtgacccacggcctttcggctctggttaccatcaccaccctcctcctccacctcctcctcatcatcgtacatcttcggcatccgttttttctgcgggtgatgagccccctagggactcctcactcgaggaagacatgatgaggactttcttccccgagtacacatcatatcctccgtcctatcctcctcctggaggatattgattcatgtgtcctcttctccctctctctttgtttttggtacttgttgccaaaaagggggagaaaatccaaaaaatctagtcattctgtttgtggttctttcagttatgtatttctttttttattattgttttttggttttggccactgttgtggcttgtatcctcttatcattgtatgaaataaaacggttgggttattattcaatgtgatgatggtcttctggccatcatcttttgtcccatcagtttgtaatgattgctttgctatgaagtaaaaatgatgtgtaattagagatgactatctctaaatacacatcatttttacttcatagcaaagcaatcattaatatgcatcacaactcctgttatgacactcttgcacccctcggatggttgtatttagtatggtttttgtcactatctc

SEQ ID NO: 4799 - DNA, 1196 bp, Zea mays
  Zm_smallRNAprecursor_288
ataggagtacaaggattgtcatcactagaactatcctccccactcccttcaccggagctgctcgttgtctgccattcaagtttggtcgcgtcttcatcaactttgttagacgcaccggtgcagaccacatccatactaggctgctcgttgtctgccattcaagctggttccatcaataaagggatatactgttagtctgatatactggttccatcaataagggaacttggagaaaaggtgattcaaaagaaatcgagcccaaacccccctacggggcaggatcgggtcgggaagcaagctcgcagatagaagggcactttccaatgcagttagacagagaaggcatggctgtgatgttataatgctgaaggaccccaagaagagattatgccctatagtctaccacctctcgttatttgtgggcttcaccgagggcgggaaacatttggtgacatcaaacgaccttcgggctggggacgtctgcgagcttgttaaggggccagacgatgttgaaccggtgtactctatccggatgtgtggtcacaaaattaaaaaccgccccagctgcatgtgtgtgcttctcttctattaggtggggtgctaagtgatcttagtagccgacataagagaagagaagcgcacagatgaagccggggcggcttttaattttgtgaccacacatccggacatagtacaccggctcaacatcgtctggccccttaacaagctcgcagacgtcttcagcccgaaggtcgtttgctatcaccaaatgtttccagccatcggtgaagcccacaaataacgggaggtggtagactacaggacttaatctcttcttggggtccttcagcattataacatcacagccatgccttctctgtctaactgcattggaaagtgcacttctatctgcgagcttgcttcccgacccgattcaggcattctccatataagtcccaaacagataatagggatgaggtagtcaagattgtaggcgctagtgctcaactactagcatctatagatatggacacaagtccaaatttggtgctactcggcaccatcgatatcactagaaaaaaatacatcaaagagatccacttcccaatagtactcgaagatagttcattgacttgacactctctaagaggttcatacaaaatacattatctctaagagtgaaacctacgatactc

SEQ ID NO: 4800 - DNA, 1196 bp, Zea mays; identical to SEQ ID NO: 4799
  Zm_smallRNAprecursor_289

SEQ ID NO: 4801 - DNA, 1197 bp, Zea mays
  Zm_smallRNAprecursor_290
ataggagtacaaggattgtcatcactagaactatcctccccactcccttcaccggagctgctcgttgtctgccattcaagtttggtcgcgtcttcatcaactttgttagacgcaccggtgcagaccacatccatactaggctgctcgttgtctgccattcaagctggttccatcaataaagggatatactgttagtctgatatactggttccatcaataagggaacttggagaaaaggtgattcaaaagaaatcgagcccaaacccccctacggggcaggatcgggtcgggaagcaagctcgcagatagaagggcactttccaatgcagttagacagagaaggcatggctgtgatgttataatgctgaaggaccccaagaagagattatgccctatagtctaccacctctcgttatttgtgggcttcaccgagggcgggaaacatttggtgacatcaaacgaccttcgggctggggacgtctgcgagcttgttaaggggccagacgatgttgaaccggtgtactctatccggatgtgtggtcacaaaattaaaaaccgccccagctgcatgtgtgtgcttctcttctattaggtggggtgctaagtgatcttagtagccgacataagagaagagaagcgcacagatgaagccggggcggcttttaattttgtgaccacacatccggacatagtacaccggctcaacatcgtctggccccttaacaagctcgcagacgtcttcagcccgaaggtcgtttgctatcaccaaatgtttccagccatcggtgaagcccacaaataacgggaggtggtagactacaggacttaatctcttcttggggtccttcagcattataacatcacagccatgccttctctgtctaactgcattggaaagtgcacttctatctgcgagcttgcttcccgacccgattcaggcattctccatataagtcccaaacagataatagggatgaggtagtcaagattgtaggcgctagtgctcaactactagcatctatagatatggacacaagtccaaatttggtgctactcggcaccatcgatatcactagaaaaaaatacatcaaagagatccacttcccaatagtactcgaagatagttcattgacttgacactctctaagaggttcatacaaaatacattatctctaagagtgaaacctacgatactca

SEQ ID NO: 4802 - DNA, 1057 bp, Zea mays
  Zm_smallRNAprecursor_291
tataccaatcccttcaatgccatcagattttatagcttcccttcaatgccatcaaatttaaattctaatcccttaaatgccattaccgttagtttcaagttaacgccgttagttatatttaaagcaaatccctccaatgccatcaaaatctataccgatcccttcaatgccactagaaattggttcgatctattcgggttttaaaattttcagaatagaaaattttttgaacccaaaaaaattgaaacgcaaatataccacattgattttaaaatttatctccatctgttatcattagtgttttgttgttagtttgaaaaaaatattaggaatcaaatagaccgaacagatatagcggagtaatttttggtgtttacaaaaaaatatgtactaaagtttttaaaaagtgtggaattggtccatatttttttattctagaatttttaaaatccaaatagatcaaaccaatttctagtggcattgaagggattgatatagattttgatggcattgaagagatttgttttaaatagaactaacggcgttaacctgaaactaacggcaatggcatttaagggattagaatttaaatttgatggcattgaagggaagctataaaatctgatggcattgaagagattagtataagtttggatggcattgaagagattttctcaaaaaaatctctgtgtccgggctccaatttccccaccgacacgcgggccagcctggcggtggggccagcgcgatgccgcctgccgaccgctgtgttgcgctcgcgcagcaggggcacatcacatcaggcgtcacgcacggaattccctccttgtccgtgccgtgggtgtcgccgctggccggtccagatgcgggttggtggctggctggctgctgtgacctggtaggcaagctagctagctactcccgcgacgtggctggccgtccttctagacgtgcggtttggtgagggaggaacagagataggattggcgggcaggtttggaccggacctggcgggagacgggaccccgcggcggacgcggactgggcgggaggaggc

SEQ ID NO: 4803 - DNA, 1152 bp, Zea mays
  Zm_smallRNAprecursor_292
cgccgaaagtaaaaggcgaagaagctccaaagtcgttcctaagggaatgcagagcttacagcgaaaagtcaacgctgattccgccgaaagtaaaaggcgaagaagctccaaagtcgttcctaagggaatgcagagcttacggcgaaaagttagcactgatatgtgattgtttctaaggaaataatggctgtaactatggcttcggatatgtgtttggacattcatttgcacatcacattacatcatagcatttgcattcataaacattcatccaggcatatgtaggataatcatcatcatagcataagtggttgcttcggcaaaaaagaaaaaaaaaagagagaagagcttcttcgtgtacgaaaataagagcttcggaagaaagggaaatgttatgttctatgctccgctgtgtacgaaaagaagggaaggtgttttttcgccttcggctcaaaaaagataatttcgtccacatcaaagcacctctcatacattaatggaaggataagagcatattacaaggtatgagcagaattcattaaagacaagtttagttacatttacagaagttatctcaaaagtttcttgagtctgtctacagtctactcctatttaatcttcaagggacttcagcttcggcgtcattctttttaaccatcggcttcggcttcgtcatcctacatgaattaagttgttgtaagtcaaaatcgagcttgaaggaagaggtaagcacaaggtatgatttcttactggttcaagatgacttcgagcttcgtctccagccttttctcgcccgccttttgtccatatcatctttacaaatctattggaaatgcttcggggcgagatcaggaatgtcatctagaattgatggtgataaagtgaaattgggcctattgacaatctttccatgatcgcagccagcttttaggaaagctacagcactgccccgagaagctacccaggcgcagaagtcaccgtgcccggctataacttcgtcaagctcatcgatttcaccctcaatatgttcgaaggtctttgctaaatcttcagctgatggggtgaatttctcactgctagctccgactgaatggaaaatttttctcagtcgttgaatacatttgttgctaaattctaaacatttgtcttgaa

SEQ ID NO: 4804 - DNA, 1097 bp, Zea mays
  Zm_smallRNAprecursor_293
acactgtccatcgctctcctcgtgtacaaaacaagagaaaggaattagataaaaatgaattgaaggaaaggaggaagaggttaaggttgaaagtccccttgtctcctattcaagatgaagaaagtgatgatgaacaagacccagagtttgctcctgccggcgatggttctggcgacgacaatgttgttattgttggtgacgatgagaataagggtaaaactaagacgcgagctatacgatgctcaattgggaagttcataaagcttgtgaatgctctctccgatgaattgaaaggtgaagtagttgccaaggggtttggcggcttgctgagattcaagccgcacttattgtctagaaaattgctcagctggctgatgcggaatcttaacccagagacgatgaaattagagattggtggtggaaaagagattccaatcactgagcacagtgtttggtgtgttttgcagttaccaaacgttggccgtgacccgccccccatgtctgatgcagatgctcgtgccttgcgggacgagctgggagagcaaatttgtggcaactcttatagacgcagatctggtatcaatctatatgttatcactgatcgactgcagaagaggattctcactggggagctgagcctttttcatggctgcatttcagtgtctgctattctccaacactgacactcgcatcaggattgatgatgtaaagtatactcaggacatctagaacatggccaacaagaactggtggaaagcggtagttgacaggctcagcatagcttctcgtctttataaaaaggattttgcggagaaaggcatcaacgcacccattagtggatgcgggatcttcgtagctgtaagctcaacacacacatccattttttgcccttgcaacttactcttccaattacacaagtagtaattgttttatgtttactgttacaactatcatatgttacaagttgcaatttgatttacttttttgatttttttatgatagcttagttcacattcacatgtattttgtaatttatgttgtatacaaattagcaataattttagtattttctattgcaactggcttattgcacctgt

SEQ ID NO: 4805 - DNA, 1043 bp, Zea mays
  Zm_smallRNAprecursor_294
ggtttgggttctacaactactgtcttaaatgtcataaggttgccaaagaagatcacctcgggcattaggatgttattatccctattgcgtggcacaagggaaagttggtagcatgggtgactggcaaaaagacttggtctaacatatttcataatattcaggtaattctatactttagacactaagtagtagtaaaacaagacaccataaaagtgaatttaattgtttttacatgcttacctgtgatgcacacttgcagggtcttatgagtttccgtttttctatcggtcgtccaatcctcccgcaccaaccaaaaggttgtagatgcacatcatgcaaggatttgatgtctactgaacaactttatggttgcttaatctcctattgctcaattaactgctgggtgagctggctgttctgtttgcaacattacgataatgcttagtaatgtttaaatttctgctaactgatacactacgataatgcttgcaagatgaagggagagggcggtgaatttgctgaggtgcaggtcgctgagacactgctgacaacggacttcgaatgttctacatatgttgtctgcctcacttgcagcaacactttctcaagctctgagaattcagtgtgtcaagtgagacagacaacatatgtagaacattcgaagtccgttgccagcagtgtctcagcgacccgcacctcagcaaattcaccgccccctccctccatcttgcaagcattaccgtagtgtatcacatagcagaaatttaaacataactaagcattatcgtaatgttgcaaacagaacagctagctcacccaacagttaattgagtagtaggagattaagcaaccataaagctgtttagtagacatcaaatccttgcatgatgtgcatctacaatcttttggctggtgcaggaggaatgagcgatcgatagaagaacggaaactcataagaccctacaagtgtgcatcacaggtaagcatgtaaaaacaattgaatcctcttttatggtgccttgttttactaatacttagtgtct

SEQ ID NO: 4806 - DNA, 1200 bp, Zea mays
  Zm_smallRNAprecursor_295
ggtttgggttctacaactactgtcttaaatgtcataaggttgccaaagaagatcacctcgggcattaggatgttattatccctattgcgtggcacaagggaaagttggtagcatgggtgactggcaaaaagacttggtctaacatatttcataatattcaggtaattctatactttagacactaagtagtagtaaaacaagacaccataaaagtgaatttaattgtttttacatgcttacctgtgatgcacacttgcagggtcttatgagtttccgtttttctatcggtcgtccaatcctcccgcaccaaccaaaaggttgtagatgcacatcatgcaaggatttgatgtctactgaacaactttatggttgcttaatctcctattgctcaattaactgctgggtgagctggctgttctgtttgcaacattacgataatgcttagtaatgtttaaatttctgctaactgatacactacgataatgcttgcaagatgaagggagagggcggtgaatttgctgaggtgcaggtcgctgagacactgctgacaacggacttcgaatgttctacatatgttgtctgcctcacttgcagcaacactttctcaagctctgagaattcagtgtgtcaagtgagacagacaacatatgtagaacattcgaagtccgttgccagcagtgtctcagcgacccgcacctcagcaaattcaccgccccctccctccatcttgcaagcattaccgtagtgtatcacatagcagaaatttaaacataactaagcattatcgtaatgttgcaaacagaacagctagctcacccaacagttaattgagtagtaggagattaagcaaccataaagctgtttagtagacatcaaatccttgcatgatgtgcatctacaatcttttggctggtgcaggaggaatgagcgatcgatagaagaacggaaactcataagaccctacaagtgtgcatcacaggtaagcatgtaaaaacaattgaatcctcttttatggtgccttgttttactaatacttagtgtctaaagtatatgattacctgaatatcatgaaagctgctagaccaagtctctttgccaatcacccatgctaccaactttcccttgtgccacgcaaaagggataataacatcttgatgcctaaggtgctcttctttggcaaccttatgacacttaaggcag

SEQ ID NO: 4807 - DNA, 1162 bp, Zea mays
  Zm_smallRNAprecursor_296
ctgtcttaaatgtcataaggttgccaaagaagatcacctcgggcattaggatgttattatccctattgcgtggcacaagggaaagttggtagcatgggtgactggcaaaaagacttggtctaacatatttcataatattcaggtaattctatactttagacactaagtagtagtaaaacaagacaccataaaagtgaatttaattgtttttacatgcttacctgtgatgcacacttgcagggtcttatgagtttccgtttttctatcggtcgtccaatcctcccgcaccaaccaaaaggttgtagatgcacatcatgcaaggatttgatgtctactgaacaactttatggttgcttaatctcctattgctcaattaactgctgggtgagctggctgttctgtttgcaacattacgataatgcttagtaatgtttaaatttctgctaactgatacactacgataatgcttgcaagatgaagggagagggcggtgaatttgctgaggtgcaggtcgctgagacactgctgacaacggacttcgaatgttctacatatgttgtctgcctcacttgcagcaacactttctcaagctctgagaattcagtgtgtcaagtgagacagacaacatatgtagaacattcgaagtccgttgccagcagtgtctcagcgacccgcacctcagcaaattcaccgccccctccctccatcttgcaagcattaccgtagtgtatcacatagcagaaatttaaacataactaagcattatcgtaatgttgcaaacagaacagctagctcacccaacagttaattgagtagtaggagattaagcaaccataaagctgtttagtagacatcaaatccttgcatgatgtgcatctacaatcttttggctggtgcaggaggaatgagcgatcgatagaagaacggaaactcataagaccctacaagtgtgcatcacaggtaagcatgtaaaaacaattgaatcctcttttatggtgccttgttttactaatacttagtgtctaaagtatatgattacctgaatatcatgaaagctgctagaccaagtctctttgccaatcacccatgctaccaactttcccttgtgccacgcaaaagggataataacatcttgatgcctaaggtgctcttctttggcaac

SEQ ID NO: 4808 - DNA, 1124 bp, Zea mays
  Zm_smallRNAprecursor_297
gttgccaaagaagatcacctcgggcattaggatgttattatccctattgcgtggcacaagggaaagttggtagcatgggtgactggcaaaaagacttggtctaacatatttcataatattcaggtaattctatactttagacactaagtagtagtaaaacaagacaccataaaagtgaatttaattgtttttacatgcttacctgtgatgcacacttgcagggtcttatgagtttccgtttttctatcggtcgtccaatcctcccgcaccaaccaaaaggttgtagatgcacatcatgcaaggatttgatgtctactgaacaactttatggttgcttaatctcctattgctcaattaactgctgggtgagctggctgttctgtttgcaacattacgataatgcttagtaatgtttaaatttctgctaactgatacactacgataatgcttgcaagatgaagggagagggcggtgaatttgctgaggtgcaggtcgctgagacactgctgacaacggacttcgaatgttctacatatgttgtctgcctcacttgcagcaacactttctcaagctctgagaattcagtgtgtcaagtgagacagacaacatatgtagaacattcgaagtccgttgccagcagtgtctcagcgacccgcacctcagcaaattcaccgccccctccctccatcttgcaagcattaccgtagtgtatcacatagcagaaatttaaacataactaagcattatcgtaatgttgcaaacagaacagctagctcacccaacagttaattgagtagtaggagattaagcaaccataaagctgtttagtagacatcaaatccttgcatgatgtgcatctacaatcttttggctggtgcaggaggaatgagcgatcgatagaagaacggaaactcataagaccctacaagtgtgcatcacaggtaagcatgtaaaaacaattgaatcctcttttatggtgccttgttttactaatacttagtgtctaaagtatatgattacctgaatatcatgaaagctgctagaccaagtctctttgccaatcacccatgctaccaactttcccttgtgccacgcaaaagggataataacatcttgatgcctaa

SEQ ID NO: 4809 - DNA, 1117 bp, Zea mays
  Zm_smallRNAprecursor_298
ccaaagaagatcacctcgggcattaggatgttattatccctattgcgtggcacaagggaaagttggtagcatgggtgactggcaaaaagacttggtctaacatatttcataatattcaggtaattctatactttagacactaagtagtagtaaaacaagacaccataaaagtgaatttaattgtttttacatgcttacctgtgatgcacacttgcagggtcttatgagtttccgtttttctatcggtcgtccaatcctcccgcaccaaccaaaaggttgtagatgcacatcatgcaaggatttgatgtctactgaacaactttatggttgcttaatctcctattgctcaattaactgctgggtgagctggctgttctgtttgcaacattacgataatgcttagtaatgtttaaatttctgctaactgatacactacgataatgcttgcaagatgaagggagagggcggtgaatttgctgaggtgcaggtcgctgagacactgctgacaacggacttcgaatgttctacatatgttgtctgcctcacttgcagcaacactttctcaagctctgagaattcagtgtgtcaagtgagacagacaacatatgtagaacattcgaagtccgttgccagcagtgtctcagcgacccgcacctcagcaaattcaccgccccctccctccatcttgcaagcattaccgtagtgtatcacatagcagaaatttaaacataactaagcattatcgtaatgttgcaaacagaacagctagctcacccaacagttaattgagtagtaggagattaagcaaccataaagctgtttagtagacatcaaatccttgcatgatgtgcatctacaatcttttggctggtgcaggaggaatgagcgatcgatagaagaacggaaactcataagaccctacaagtgtgcatcacaggtaagcatgtaaaaacaattgaatcctcttttatggtgccttgttttactaatacttagtgtctaaagtatatgattacctgaatatcatgaaagctgctagaccaagtctctttgccaatcacccatgctaccaactttcccttgtgccacgcaaaagggataataacatcttgatgcc

SEQ ID NO: 4810 - DNA, 1171 bp, Zea mays
  Zm_smallRNAprecursor_299
atcaagcttggattgatttatgttgaataaattcaagagacttcatttaccatgtttgagtgatcaaatctatttggattggcttgaaattcagtgtacttgctctatgcatatgatagcaaagtctgtgcaaatttcataatcattggataagtgaaacttcttgattaagtcaatcttgtcagcacaaacacaacagttttcagcatatacctattatgggagatgttatggctggcagcacatatgaagtcaaatgagtctcaactttttacagctgttagcagacttattgaagcacatctccaccaattttcgtggtcatagcatctgtacatcaaaatttatgaatgattctttggagtatacagaatctgtcataagtgacaagtatttgaaatattgaaagtcactttgattggaaggctctcatataggataaatcacataagttgtttgagagaccatagtttggttttgaattgatctataatcatggaaagtgaaggggtacaaggatatttgttaagaaaaattttggcacttatcttgctactccaagttgaagatcaagaccaaagatgatcaaaattgaggttatcatataacagattgcataatcttctttcttacatatggcagtccaaatacttaaattggttgtaagtatttcttggcacatttcaatttgattactctattattgccatgatctagacataaaagagaaaaaccccgtgttcgtgaatgaataaggtgctaagtaagaaattcaaattcttaagcacttatcaaaaagggaattctctatatgactagagttgtgaaactaatgtttttacctaagtgatctatgtagtttcacaacatgagaatgagtttctcaatggactatgcaattaaacgtataaagaagagcaatccaaaactatgtgatgtattctctcttgtacatttggatttatttcttctacattaaatactcaccatgatatgatttaaaattagcctttgaacttaatcaatttatcatgcatgtttaatttgttaaaattaagcattgaagattaagagaaatttagttcatataataagatttccttgttttagtaactgccaactttatatattcaaagtgctataaaagggaaattggtgcttgtattactaa

SEQ ID NO: 4811 - DNA, 1112 bp, Zea mays
  Zm_smallRNAprecursor_300
ttcgggtccgattggacattgaaaggaggtttactggttcatgatctggtggtgttcgagatcagggtttatgaaaccggttctagggctaaaaccggccaccaccgataaccgatttatcgcgataaactggcgaaaaccgagatgtgcctgactgctcagcagttgcaatcctgttatgtgattgaaattatctggactgcagatatatgcccgcccaacaatttttctgttctgactgggattatatagtattcggattattgcttatcacattaaaatggctatcattttttatatatgatcatacgcttcgagaatttttttttatccgctaaagatcgagttctggcatgggtggacaaggtttgacagcttcaccacacaccgagccgtggagacgatgagatgtgctcgctgctgcttccaccatggcggccggttcatcctgcaccctctatttccctcccacccactcgtcgtcttgctccgtcctcggctcgccaggtctcgacgcgcgcacagactccgcctcggcgtgccgctgccgtgccccgtctaagagctgccgctccggacgccacggaagcggcggcggccctcatggtcgcgcgcgccgaggccggggacttcgcggaggcccggtccctctgggcgcagctcctgcacagctccgccgcgccgtgcctgcccgccgcggcgccgcgcctactgccggcgtacgcgcgcctgggccgcttcgacgagatcctccacgcagtgcgcgagctctcggcgcgggaccgcggcgcggcacgcgcgctctacccgctcgccgtctcctgcctcggcgccgcgggcgagctggcgcgcatggaggacgccgtcctagaaatgggccgccttggcctccgcgtcgactccgcgaccggggacgccttcgtccgggcctacgcggccgccggaaccatcccgcagatggaggcggcctaccgccggcacaggaagtccgggctgctcatcacccgtggcgccatccgcgccgtcgcgtccgcgtacatctcccggcagaagtactacaggctcggcgcgttcgcggcggacgccggcctccgccggcgcgacgtcggcaa

SEQ ID NO: 4812 - DNA, 1047 bp, Zea mays
  Zm_smallRNAprecursor_301
ccctttacgagcatccataactacagtcatgcagctagacaaaagaaacaaacttaaattccgcaagaccatgatcatgtcttacctttcagctttcaagaagaaagtagttcttagagaatacctaaaacctccacctcccatgtatgccctttttcgctgaaaaataagcacataatgagttcaaaaaacaccagaaggaaagagagagggaaacaaaaagacatgtgagtttaaaggcacaagaaaagagggaaatgaagagtcaggaagagggtcgacgaaaacagtacgtaccaaaagtattgataatatttaaagttcttttgttattggttattttgaacattgtgcatcctttcagattagatgaccatctttgattgaccattttgattgaagcgggtgagtcgctgtatgccattttaagaaaatgatctgacaaaaacatcaattctcttggtctctgaactgtcacgaacttagtaaactttgtattcattgatctcagaagaaagcaaacaccatgatatgaatcagccatcttgatggtttgtgaatcaattaaaacaccacaggctctaaagctgtcattccacacctttacgaaagaaaagttttcatcctcacacctcattaaaagagttaacatagatagaacttcagcgatctggttatcattacaaggcacatcttcgtatatctcatacactgatcatttgcttatctttccaaatgatacatgctagcttcactatacccttcttattgagtctaacagcttgcatctgctcatcaaacaaagcgtcgcactcgcctcgaacaaatcctttgttgtcatgaagatcatagttgagtaactcaatgttaccataagtgttcctccagtcgtccgcaactacaactctacgttggcagatgtgcttgatgaataactctctattcatacttgtctataacaaagccggtttaaaatgcccttcgtcgcggtgtccatgtcgctctttagatttgtagccattcgatcgattgtcaacggacgtagtc

SEQ ID NO: 4813 - DNA, 1198 bp, Zea mays
  Zm_smallRNAprecursor_302
gtatgccctttttcgctgaaaaataagcacataatgagttcaaaaaacaccagaaggaaagagagagggaaacaaaaagacatgtgagtttaaaggcacaagaaaagagggaaatgaagagtcaggaagagggtcgacgaaaacagtacgtaccaaaagtattgataatatttaaagttcttttgttattggttattttgaacattgtgcatcctttcagattagatgaccatctttgattgaccattttgattgaagcgggtgagtcgctgtatgccattttaagaaaatgatctgacaaaaacatcaattctcttggtctctgaactgtcacgaacttagtaaactttgtattcattgatctcagaagaaagcaaacaccatgatatgaatcagccatcttgatggtttgtgaatcaattaaaacaccacaggctctaaagctgtcattccacacctttacgaaagaaaagttttcatcctcacacctcattaaaagagttaacatagatagaacttcagcgatctggttatcattacaaggcacatcttcgtatatctcatacactgatcatttgcttatctttccaaatgatacatgctagcttcactatacccttcttattgagtctaacagcttgcatctgctcatcaaacaaagcgtcgcactcgcctcgaacaaatcctttgttgtcatgaagatcatagttgagtaactcaatgttaccataagtgttcctccagtcgtccgcaactacaactctacgttggcagatgtgcttgatgaataactctctattcatacttgtctataacaaagccggtttaaaatgcccttcgtcgcggtgtccatgtcgctctttagatttgtagccattcgatcgattgtcaacggacgtagtcgtttctgtaaatcctccctgccaacgccacctcgctgcttcgtccgccgcagaagctcctccctatgaagcgagtccatggcgctaggatcgccacccgacatggtcacgccgctactcgtgtcccaccctgaggtacgagaactagctaccccttcctgtgtgctctactcttgttgttttatgcacgtcccttgctccccactcctcctgacgccatgggtatcttctagaaagaggacacacaatcaacacgggtagagggaagaaagcattgtggtctccgtcggcgagag

SEQ ID NO: 4814 - DNA, 1171 bp, Zea mays
  Zm_smallRNAprecursor_303
tgtacttgcagactgcagcgtcctgtcttttcccccgcgcagtttttttttcttttgcatgcagtctgctgcgtcaggtcacttccccctgcgctgcgcgcaaattagaattttttcctctgttgtttctggttctctgaccacactggtcagtaccagctgagctggcccatgggggcggttgaactggttctgaggaccagctcaactgcctatatatacttcactcttcctcatctcttttcccacttcattcactctcgccttggtcgcttcacaacctttagagcctttccttcacacacttcaaccgcttcacagtttcaccaccgttttcaatcatggtgcgtcgccgcaacccctctgtggttgagtttagcagcgactccgacgagattcaggaggaatctcccatcccctctcctccgcctcgtcgctccctctctaagagaggacgtggctctggtcggatgcctggcgagggctcttccttgccctcgcagccgactcgcgggagacgccaaaaggttggcgcctctcgtcctcgtcgtagcacgtcttcctcagggtatgctccctgccaagaggaggatggggctttcgacgacttcgtcgaccttccggcgcctgatgctctctacgtcaccggactgcacatgcatccggcgaacgtcagccgcggtccgcatgaatctcccatcgacttcactcagaagggaatagaaacccttcagcgtctgaggttttccaaccctactctcactcctcgtcatcctggtgtccaggaccctcggttctggaatcttttccaggctgacttctacaattctgtcattcttaccaagaaacacccagtcgtccgacatagatttattgactgggagggttgtgagaatatgggagatgttgacatgtcgtcagctctcgttcacttagagagaaagggattacgtaacattatgaccatggaatacccctggaacgatgaggtggtagctcagttctatgccaccctctggataaagaaagtagatgaggaagccgatgggtatgattacccagttatgtatttcttcatccagggtaactggcacaaagtcagttatcgtcgttttgcccatattctgggcttctctgatgcagacattcagggcagcaacatgcgagtgca

SEQ ID NO: 4815 - DNA, 1058 bp, Zea mays
  Zm_smallRNAprecursor_304
aaacccttcagcgtctgaggttttccaaccctactctcactcctcgtcatcctggtgtccaggaccctcggttctggaatcttttccaggctgacttctacaattctgtcattcttaccaagaaacacccagtcgtccgacatagatttattgactgggagggttgtgagaatatgggagatgttgacatgtcgtcagctctcgttcacttagagagaaagggattacgtaacattatgaccatggaatacccctggaacgatgaggtggtagctcagttctatgccaccctctggataaagaaagtagatgaggaagccgatgggtatgattacccagttatgtatttcttcatccagggtaactggcacaaagtcagttatcgtcgttttgcccatattctgggcttctctgatgcagacattcagggcagcaacatgcgagtgcatggcattcggctgcccatgcgggaagagacggaattcattcatgtctctactgagcgggagttctggacaaccgctaacatgcataggtactacaggtaccttaattccttgtcccggatgaccgttctcccaaagggcggtaatcaaatgaacgtccttggggagagtcgagtcctcctcctcctcctagctccaaacagtctcgcccgcatcaatgtgtttgacatgatctgggaggagatcgttcgtgcctcctggtctcctcacagagggtgtcttcatgcaccctttatcatgaagatgatcgaagtggtcacccagacccacttcgaaaaacccgtcaaacactcccgctatgtaccctactgggttgattcctccaacccagctgctcgtacgaagcgggttccctcacggtctggaggccctgcctcctcctctgagccacctcgccagcctccccaccatccttcctcctcccccccccccccgctgctgcctcgcgtccctctcctggccgcggctctcccatgccacgtgctcgtggtcgtggtcgtggtcgtggccgtgggatgggtgctcgctttgtccatgggtttgtggcatttt

SEQ ID NO: 4816 - DNA, 1141 bp, Zea mays
  Zm_smallRNAprecursor_305
aaacccttcagcgtctgaggttttccaaccctactctcactcctcgtcatcctggtgtccaggaccctcggttctggaatcttttccaggctgacttctacaattctgtcattcttaccaagaaacacccagtcgtccgacatagatttattgactgggagggttgtgagaatatgggagatgttgacatgtcgtcagctctcgttcacttagagagaaagggattacgtaacattatgaccatggaatacccctggaacgatgaggtggtagctcagttctatgccaccctctggataaagaaagtagatgaggaagccgatgggtatgattacccagttatgtatttcttcatccagggtaactggcacaaagtcagttatcgtcgttttgcccatattctgggcttctctgatgcagacattcagggcagcaacatgcgagtgcatggcattcggctgcccatgcgggaagagacggaattcattcatgtctctactgagcgggagttctggacaaccgctaacatgcataggtactacaggtaccttaattccttgtcccggatgaccgttctcccaaagggcggtaatcaaatgaacgtccttggggagagtcgagtcctcctcctcctcctagctccaaacagtctcgcccgcatcaatgtgtttgacatgatctgggaggagatcgttcgtgcctcctggtctcctcacagagggtgtcttcatgcaccctttatcatgaagatgatcgaagtggtcacccagacccacttcgaaaaacccgtcaaacactcccgctatgtaccctactgggttgattcctccaacccagctgctcgtacgaagcgggttccctcacggtctggaggccctgcctcctcctctgagccacctcgccagcctccccaccatccttcctcctcccccccccccccgctgctgcctcgcgtccctctcctggccgcggctctcccatgccacgtgctcgtggtcgtggtcgtggtcgtggccgtgggatgggtgctcgctttgtccatgggtttgtggcatttttctccatgtgccgcaacgttgctgctgacgtccatgaggtggcacggcgtcagcgggagactgacgacaatcttcgtcgtcag

SEQ ID NO: 4817 - DNA, 1057 bp, Zea mays
  Zm_smallRNAprecursor_306
aacccttcagcgtctgaggttttccaaccctactctcactcctcgtcatcctggtgtccaggaccctcggttctggaatcttttccaggctgacttctacaattctgtcattcttaccaagaaacacccagtcgtccgacatagatttattgactgggagggttgtgagaatatgggagatgttgacatgtcgtcagctctcgttcacttagagagaaagggattacgtaacattatgaccatggaatacccctggaacgatgaggtggtagctcagttctatgccaccctctggataaagaaagtagatgaggaagccgatgggtatgattacccagttatgtatttcttcatccagggtaactggcacaaagtcagttatcgtcgttttgcccatattctgggcttctctgatgcagacattcagggcagcaacatgcgagtgcatggcattcggctgcccatgcgggaagagacggaattcattcatgtctctactgagcgggagttctggacaaccgctaacatgcataggtactacaggtaccttaattccttgtcccggatgaccgttctcccaaagggcggtaatcaaatgaacgtccttggggagagtcgagtcctcctcctcctcctagctccaaacagtctcgcccgcatcaatgtgtttgacatgatctgggaggagatcgttcgtgcctcctggtctcctcacagagggtgtcttcatgcaccctttatcatgaagatgatcgaagtggtcacccagacccacttcgaaaaacccgtcaaacactcccgctatgtaccctactgggttgattcctccaacccagctgctcgtacgaagcgggttccctcacggtctggaggccctgcctcctcctctgagccacctcgccagcctccccaccatccttcctcctcccccccccccccgctgctgcctcgcgtccctctcctggccgcggctctcccatgccacgtgctcgtggtcgtggtcgtggtcgtggccgtgggatgggtgctcgctttgtccatgggtttgtggcatttt

SEQ ID NO: 4818 - DNA, 1058 bp, Zea mays
  Zm_smallRNAprecursor_307
aacccttcagcgtctgaggttttccaaccctactctcactcctcgtcatcctggtgtccaggaccctcggttctggaatcttttccaggctgacttctacaattctgtcattcttaccaagaaacacccagtcgtccgacatagatttattgactgggagggttgtgagaatatgggagatgttgacatgtcgtcagctctcgttcacttagagagaaagggattacgtaacattatgaccatggaatacccctggaacgatgaggtggtagctcagttctatgccaccctctggataaagaaagtagatgaggaagccgatgggtatgattacccagttatgtatttcttcatccagggtaactggcacaaagtcagttatcgtcgttttgcccatattctgggcttctctgatgcagacattcagggcagcaacatgcgagtgcatggcattcggctgcccatgcgggaagagacggaattcattcatgtctctactgagcgggagttctggacaaccgctaacatgcataggtactacaggtaccttaattccttgtcccggatgaccgttctcccaaagggcggtaatcaaatgaacgtccttggggagagtcgagtcctcctcctcctcctagctccaaacagtctcgcccgcatcaatgtgtttgacatgatctgggaggagatcgttcgtgcctcctggtctcctcacagagggtgtcttcatgcaccctttatcatgaagatgatcgaagtggtcacccagacccacttcgaaaaacccgtcaaacactcccgctatgtaccctactgggttgattcctccaacccagctgctcgtacgaagcgggttccctcacggtctggaggccctgcctcctcctctgagccacctcgccagcctccccaccatccttcctcctcccccccccccccgctgctgcctcgcgtccctctcctggccgcggctctcccatgccacgtgctcgtggtcgtggtcgtggtcgtggccgtgggatgggtgctcgctttgtccatgggtttgtggcattttt

SEQ ID NO: 4819 - DNA, 1064 bp, Zea mays
  Zm_smallRNAprecursor_308
cccggaaccacaagaatccttagaatgggattccaactcagcaccttttgttttgggattttgagaagagttgctctttggagagcacagtacgatgaaagttgtaagctgtgttcgggggggagttattgcctatcgttgtcctctatggtagaacccgtcggggaggcctgagaggcggtggtttaccctgtggcggatgtcagcggttcgagtccgcttatctccagcccgtgaacttagcggatactatgatagcaccgaaggttgccaattcgtcagttcgatctatgatttcgcattcatggacgttgataagatccttccatttagtagcaccttaggatggcatagccttaacgttaatggcgaggttcaaaagaggaaaggcttgcggtggatacctaggcacccagagacgaggaagggcgtagcaagcgacgaaatgcttcggggagttgaaaataagcatagatccggagattcccaaataggtcaaccttttgaactgcctgctgaatccatgagcaggcaagagacaacctggcgaactgaaacatcttagtagccagaggaaaagaaagcaaaagcgattcccgtagtagcggcgagcgaaatgggagcagcctaaaccgtgaaaacggggttgtgggagagcaatacaagcgttgtgctgctaggcgaagcggttgagtgccgcaccctagatggctaaagtccagtagccgaaagcatcactagcttacgctctgacccgagtagcatggggcacgtggaatcccgtgtgaatcagcaaggaccaccttgcaaggctaaatactcctgggtgaccgatagcgaagtagtaccgtgagggaaaggtggcctagggatatgaggttgtgctcacgtaacgacgggcaacgactgctatgcaagcagtccttctttataagcgtgcaaacaaatcatttaatgcattagattatgattcaatcatagatacaatcattgtttgttagggagttttttataaagattattgagctggtggtagaagggtttaagtgttaaatgtgatctac

SEQ ID NO: 4820 - DNA, 1038 bp, Zea mays
  Zm_smallRNAprecursor_309
atggtatcccaaaggctcccttttcgatttacttggctactctgactcagattatgccggttgcaaagtagatcgaaaaagtactactgggacttgccaattccttgggcgatccttagtatcgtggagttccaagaaacaaaattgtgttgcactttccactgcagaagctgagtacatagcagctggggcatgttgtgcacagttgttatggatgaagcaaacacttcgagattttggttgtgagtttaacaaaattccacttttgtgtgacaatgagagtgccataaaacttgcaaacaaccctgtgcaacactctagaactaaacatattgacatcagacaccatttcttgagaaatcacgaagccaaagtagatatcgaattgtttcatgtgagcaccgaaaatcaactagccgatatcttcacaaaacccctcgatgagactaggttttgctttcttaggagtgaattaaatatcttggattctcgtaacttaacttgaaaacggtcacaaaaattgtttgattcactatttttgattgatagttttaaagctatgtaatgatctttcaaaaacttggtgaaaatgttaaaatttgaatgcatttttgtgctaagatttttttgggctcaactggcttgaccagctgaactttctagttcagctggaggaggccagctgaacttagcagctgaacttcagctcagctgtttttaaccagtttttaccaggaccatcctggttaaaaccggttgaaccgacatagtggaccggttgaaccggtctctgaccggcctgtccgcgcaggtctgtcacctgcaattttttcagtcgcgcaacacctttttgaccggtcgcaggtctgtcacctgccttgtttttgtcgcgctgcacctttttcttttgtctcgcagcacttcttcttgaccggtcgcttcctcgtgcagatttttttctggtcgctttctgcagggcgcacaacacttttttttgaccggtcatttcctctgctaggcgcgcatatttttttcttt

SEQ ID NO: 4821 - DNA, 1099 bp, Zea mays
  Zm_smallRNAprecursor_310
tagtgctatacgatagcgtattaaacacctagcggcgagacgatgtactattttaaacggaaatactagttatcgacgtacgactaagcgcaataattacgcttctctaagttaaacgaacctaacgcaaacatcacgagcaacaaattatacacaagaaacacaatttgcctaatcaactcatcagctaattaatttaaattctaaatttatccctcgttttataattgatactacatcgttcacaaagtactattttaattttattttacttctcacatattttacattccacaattaatcaaacatttctttatgtcatttatttagtgcaattgacaatgacaaaattcatcaaatagctatatgaaatactaaatcatatctatcctttatattgccacctcgtttagatatccctaaattaatctacctttcgcattactaaacctatcgtacttcacttatttttgacactaccacaacgcgcctgtgctaaatatgaggattattacgactaataattctagttaatccaatcatcagataaacgtacaaaaattataaatcggctcaccagcaccaaacgcgacccaatactcgtacgaatgctgataaatcctggctcgagcttcctgtcgtgcacttgatgaacaccatgctgttggctccgtcttcatccgacgcttgggatttcacgacgagatcgtgtttggagcgagctggtgaggtgggggtcgagcagaggatgacagcttcaacgacgatataggagggtggcatatatagagctacattcccgacgcgacgaactaagtcgcgaggtcggccgacgagggatttcaaggaacacgacggtcagtcggcgagctagcaagttcgaatagggacgactgacgtgaggaccatgataaatatgaaatcgatgactgaccaagatacgattggcgagttgagcgactccgacgatttgacagtggcgacttgggcgagcacagcacggaacgatgccccgcctggccgaactgaaggaagcgcggaccagagacagagtggacaccaggggcgagttcacggcaacagacacgcctgacaacca

SEQ ID NO: 4822 - DNA, 1227 bp, Zea mays
  Zm_smallRNAprecursor_311
cgcaaacatcacgagcaacaaattatacacaagaaacacaatttgcctaatcaactcatcagctaattaatttaaattctaaatttatccctcgttttataattgatactacatcgttcacaaagtactattttaattttattttacttctcacatattttacattccacaattaatcaaacatttctttatgtcatttatttagtgcaattgacaatgacaaaattcatcaaatagctatatgaaatactaaatcatatctatcctttatattgccacctcgtttagatatccctaaattaatctacctttcgcattactaaacctatcgtacttcacttatttttgacactaccacaacgcgcctgtgctaaatatgaggattattacgactaataattctagttaatccaatcatcagataaacgtacaaaaattataaatcggctcaccagcaccaaacgcgacccaatactcgtacgaatgctgataaatcctggctcgagcttcctgtcgtgcacttgatgaacaccatgctgttggctccgtcttcatccgacgcttgggatttcacgacgagatcgtgtttggagcgagctggtgaggtgggggtcgagcagaggatgacagcttcaacgacgatataggagggtggcatatatagagctacattcccgacgcgacgaactaagtcgcgaggtcggccgacgagggatttcaaggaacacgacggtcagtcggcgagctagcaagttcgaatagggacgactgacgtgaggaccatgataaatatgaaatcgatgactgaccaagatacgattggcgagttgagcgactccgacgatttgacagtggcgacttgggcgagcacagcacggaacgatgccccgcctggccgaactgaaggaagcgcggaccagagacagagtggacaccaggggcgagttcacggcaacagacacgcctgacaaccacagacatggccgggataacttaaaatactacgacagccaagaatcggcttggagacgacgacaggcacgcacgagaggagctcgacgcggaaacttaacacgccgttgtgagcagagaattttcgtgcgcgcaatagaagaatgtgacacgcgcagcaggggcgagcagcaggcgccgagctgcgcgacaaagcgaaatctgagctggagctcgcgacaacagcgagctggggcgagcagaagtccgggcgcc

SEQ ID NO: 4823 - DNA, 1228 bp, Zea mays
  Zm_smallRNAprecursor_312
cgcaaacatcacgagcaacaaattatacacaagaaacacaatttgcctaatcaactcatcagctaattaatttaaattctaaatttatccctcgttttataattgatactacatcgttcacaaagtactattttaattttattttacttctcacatattttacattccacaattaatcaaacatttctttatgtcatttatttagtgcaattgacaatgacaaaattcatcaaatagctatatgaaatactaaatcatatctatcctttatattgccacctcgtttagatatccctaaattaatctacctttcgcattactaaacctatcgtacttcacttatttttgacactaccacaacgcgcctgtgctaaatatgaggattattacgactaataattctagttaatccaatcatcagataaacgtacaaaaattataaatcggctcaccagcaccaaacgcgacccaatactcgtacgaatgctgataaatcctggctcgagcttcctgtcgtgcacttgatgaacaccatgctgttggctccgtcttcatccgacgcttgggatttcacgacgagatcgtgtttggagcgagctggtgaggtgggggtcgagcagaggatgacagcttcaacgacgatataggagggtggcatatatagagctacattcccgacgcgacgaactaagtcgcgaggtcggccgacgagggatttcaaggaacacgacggtcagtcggcgagctagcaagttcgaatagggacgactgacgtgaggaccatgataaatatgaaatcgatgactgaccaagatacgattggcgagttgagcgactccgacgatttgacagtggcgacttgggcgagcacagcacggaacgatgccccgcctggccgaactgaaggaagcgcggaccagagacagagtggacaccaggggcgagttcacggcaacagacacgcctgacaaccacagacatggccgggataacttaaaatactacgacagccaagaatcggcttggagacgacgacaggcacgcacgagaggagctcgacgcggaaacttaacacgccgttgtgagcagagaattttcgtgcgcgcaatagaagaatgtgacacgcgcagcaggggcgagcagcaggcgccgagctgcgcgacaaagcgaaatctgagctggagctcgcgacaacagcgagctggggcgagcagaagtccgggcgcca

SEQ ID NO: 4824 - DNA, 1147 bp, Zea mays
  Zm_smallRNAprecursor_313
tccctcgttttataattgatactacatcgttcacaaagtactattttaattttattttacttctcacatattttacattccacaattaatcaaacatttctttatgtcatttatttagtgcaattgacaatgacaaaattcatcaaatagctatatgaaatactaaatcatatctatcctttatattgccacctcgtttagatatccctaaattaatctacctttcgcattactaaacctatcgtacttcacttatttttgacactaccacaacgcgcctgtgctaaatatgaggattattacgactaataattctagttaatccaatcatcagataaacgtacaaaaattataaatcggctcaccagcaccaaacgcgacccaatactcgtacgaatgctgataaatcctggctcgagcttcctgtcgtgcacttgatgaacaccatgctgttggctccgtcttcatccgacgcttgggatttcacgacgagatcgtgtttggagcgagctggtgaggtgggggtcgagcagaggatgacagcttcaacgacgatataggagggtggcatatatagagctacattcccgacgcgacgaactaagtcgcgaggtcggccgacgagggatttcaaggaacacgacggtcagtcggcgagctagcaagttcgaatagggacgactgacgtgaggaccatgataaatatgaaatcgatgactgaccaagatacgattggcgagttgagcgactccgacgatttgacagtggcgacttgggcgagcacagcacggaacgatgccccgcctggccgaactgaaggaagcgcggaccagagacagagtggacaccaggggcgagttcacggcaacagacacgcctgacaaccacagacatggccgggataacttaaaatactacgacagccaagaatcggcttggagacgacgacaggcacgcacgagaggagctcgacgcggaaacttaacacgccgttgtgagcagagaattttcgtgcgcgcaatagaagaatgtgacacgcgcagcaggggcgagcagcaggcgccgagctgcgcgacaaagcgaaatctgagctggagctcgcgacaacagcgagctggggcgagcagaagtccgggcgccatgggac

SEQ ID NO: 4825 - DNA, 1148 bp, Zea mays
  Zm_smallRNAprecursor_314
tccctcgttttataattgatactacatcgttcacaaagtactattttaattttattttacttctcacatattttacattccacaattaatcaaacatttctttatgtcatttatttagtgcaattgacaatgacaaaattcatcaaatagctatatgaaatactaaatcatatctatcctttatattgccacctcgtttagatatccctaaattaatctacctttcgcattactaaacctatcgtacttcacttatttttgacactaccacaacgcgcctgtgctaaatatgaggattattacgactaataattctagttaatccaatcatcagataaacgtacaaaaattataaatcggctcaccagcaccaaacgcgacccaatactcgtacgaatgctgataaatcctggctcgagcttcctgtcgtgcacttgatgaacaccatgctgttggctccgtcttcatccgacgcttgggatttcacgacgagatcgtgtttggagcgagctggtgaggtgggggtcgagcagaggatgacagcttcaacgacgatataggagggtggcatatatagagctacattcccgacgcgacgaactaagtcgcgaggtcggccgacgagggatttcaaggaacacgacggtcagtcggcgagctagcaagttcgaatagggacgactgacgtgaggaccatgataaatatgaaatcgatgactgaccaagatacgattggcgagttgagcgactccgacgatttgacagtggcgacttgggcgagcacagcacggaacgatgccccgcctggccgaactgaaggaagcgcggaccagagacagagtggacaccaggggcgagttcacggcaacagacacgcctgacaaccacagacatggccgggataacttaaaatactacgacagccaagaatcggcttggagacgacgacaggcacgcacgagaggagctcgacgcggaaacttaacacgccgttgtgagcagagaattttcgtgcgcgcaatagaagaatgtgacacgcgcagcaggggcgagcagcaggcgccgagctgcgcgacaaagcgaaatctgagctggagctcgcgacaacagcgagctggggcgagcagaagtccgggcgccatgggacg

SEQ ID NO: 4826 - DNA, 1100 bp, Zea mays
  Zm_smallRNAprecursor_315
catcaaatagctatatgaaatactaaatcatatctatcctttatattgccacctcgtttagatatccctaaattaatctacctttcgcattactaaacctatcgtacttcacttatttttgacactaccacaacgcgcctgtgctaaatatgaggattattacgactaataattctagttaatccaatcatcagataaacgtacaaaaattataaatcggctcaccagcaccaaacgcgacccaatactcgtacgaatgctgataaatcctggctcgagcttcctgtcgtgcacttgatgaacaccatgctgttggctccgtcttcatccgacgcttgggatttcacgacgagatcgtgtttggagcgagctggtgaggtgggggtcgagcagaggatgacagcttcaacgacgatataggagggtggcatatatagagctacattcccgacgcgacgaactaagtcgcgaggtcggccgacgagggatttcaaggaacacgacggtcagtcggcgagctagcaagttcgaatagggacgactgacgtgaggaccatgataaatatgaaatcgatgactgaccaagatacgattggcgagttgagcgactccgacgatttgacagtggcgacttgggcgagcacagcacggaacgatgccccgcctggccgaactgaaggaagcgcggaccagagacagagtggacaccaggggcgagttcacggcaacagacacgcctgacaaccacagacatggccgggataacttaaaatactacgacagccaagaatcggcttggagacgacgacaggcacgcacgagaggagctcgacgcggaaacttaacacgccgttgtgagcagagaattttcgtgcgcgcaatagaagaatgtgacacgcgcagcaggggcgagcagcaggcgccgagctgcgcgacaaagcgaaatctgagctggagctcgcgacaacagcgagctggggcgagcagaagtccgggcgccatgggacgaagaaaaagcagccggacacactacagcttggaatcgatcctagaaacggcgactggcacggatgggtggagttcgcggacaagaatgcccc

SEQ ID NO: 4827 - DNA, 1151 bp, Zea mays
  Zm_smallRNAprecursor_316
tagctatatgaaatactaaatcatatctatcctttatattgccacctcgtttagatatccctaaattaatctacctttcgcattactaaacctatcgtacttcacttatttttgacactaccacaacgcgcctgtgctaaatatgaggattattacgactaataattctagttaatccaatcatcagataaacgtacaaaaattataaatcggctcaccagcaccaaacgcgacccaatactcgtacgaatgctgataaatcctggctcgagcttcctgtcgtgcacttgatgaacaccatgctgttggctccgtcttcatccgacgcttgggatttcacgacgagatcgtgtttggagcgagctggtgaggtgggggtcgagcagaggatgacagcttcaacgacgatataggagggtggcatatatagagctacattcccgacgcgacgaactaagtcgcgaggtcggccgacgagggatttcaaggaacacgacggtcagtcggcgagctagcaagttcgaatagggacgactgacgtgaggaccatgataaatatgaaatcgatgactgaccaagatacgattggcgagttgagcgactccgacgatttgacagtggcgacttgggcgagcacagcacggaacgatgccccgcctggccgaactgaaggaagcgcggaccagagacagagtggacaccaggggcgagttcacggcaacagacacgcctgacaaccacagacatggccgggataacttaaaatactacgacagccaagaatcggcttggagacgacgacaggcacgcacgagaggagctcgacgcggaaacttaacacgccgttgtgagcagagaattttcgtgcgcgcaatagaagaatgtgacacgcgcagcaggggcgagcagcaggcgccgagctgcgcgacaaagcgaaatctgagctggagctcgcgacaacagcgagctggggcgagcagaagtccgggcgccatgggacgaagaaaaagcagccggacacactacagcttggaatcgatcctagaaacggcgactggcacggatgggtggagttcgcggacaagaatgccccagcaggcagagaggcaccgcggccaccatggggaacgagccggagctgcacgcgcacg

SEQ ID NO: 4828 - DNA, 1052 bp, Zea mays
  Zm_smallRNAprecursor_317
tattacgactaataattctagttaatccaatcatcagataaacgtacaaaaattataaatcggctcaccagcaccaaacgcgacccaatactcgtacgaatgctgataaatcctggctcgagcttcctgtcgtgcacttgatgaacaccatgctgttggctccgtcttcatccgacgcttgggatttcacgacgagatcgtgtttggagcgagctggtgaggtgggggtcgagcagaggatgacagcttcaacgacgatataggagggtggcatatatagagctacattcccgacgcgacgaactaagtcgcgaggtcggccgacgagggatttcaaggaacacgacggtcagtcggcgagctagcaagttcgaatagggacgactgacgtgaggaccatgataaatatgaaatcgatgactgaccaagatacgattggcgagttgagcgactccgacgatttgacagtggcgacttgggcgagcacagcacggaacgatgccccgcctggccgaactgaaggaagcgcggaccagagacagagtggacaccaggggcgagttcacggcaacagacacgcctgacaaccacagacatggccgggataacttaaaatactacgacagccaagaatcggcttggagacgacgacaggcacgcacgagaggagctcgacgcggaaacttaacacgccgttgtgagcagagaattttcgtgcgcgcaatagaagaatgtgacacgcgcagcaggggcgagcagcaggcgccgagctgcgcgacaaagcgaaatctgagctggagctcgcgacaacagcgagctggggcgagcagaagtccgggcgccatgggacgaagaaaaagcagccggacacactacagcttggaatcgatcctagaaacggcgactggcacggatgggtggagttcgcggacaagaatgccccagcaggcagagaggcaccgcggccaccatggggaacgagccggagctgcacgcgcacgtgaaaatcgctcggcagagaggacggacagggagctgtgcgcggtgagctg

SEQ ID NO: 4829 - DNA, 1067 bp, Zea mays
  Zm_smallRNAprecursor_318
tccccacatcaccattatattcatggttaatcttgatttgcttttggggatccttcctttgctcaactcgtggctttggttgaggcttcacttgtggcttcactaatttcttggttgggcacattgaggtgaggtgaccccaagtgtggtacttgaagcactcgtcatgctttagcctcctttcttccttcttcaacttgagcttccttttattggggcatgcctttgcaagatgacccatctcatggcatttatagcacatgaagtgagatagctcatttccttttaatttgaattgtctgcctttgatattgctcttgttgaaaccaaggccacccttgtcatcatatcttctttgatttttcaatataagatcatgagtgacttttgatttatgccatctctcaaacatgttgcttaaattcttcactttgtttttgagcttattattttccttcaaaaggttagtctcacaagacaaggaagaatagtaataatctatacttgaagaacatggcatagctaataaatcatcacaagaggtggatacatgcttcttgtcttcatcacatggattagcaacatttttcaattgatcatataattcatgggatgaattatcactagttttattttctttactagaaaactcgttagtgagaaaagcatgctcttgtatcaaattttcatgagcaacactaagttcctcatgactcaattttagctcctcatgtgaacaagtaacaacataaagtagatgcttttgttgttcacatgaatactttagaaatgagttttcattttccaagtttcttgttttatctttctcaatttctaaagcaatgttcatgcttgcaagtataccaacaagctcatcatatgaatatgaatgaagcaatgtgatgtaatggatgggcttgtagtagcgatatcattgtccgagcatgaacaatcaccataatcatcaagtatgcttgagatagaaccatcatttgcattacttgagttagagccaacacaatcattattatcaagtgaacttgtggtgtgtcttttcatcatcatca

SEQ ID NO: 4830 - DNA, 1061 bp, Zea mays
  Zm_smallRNAprecursor_319
tttcaatactatgtcgtacacgttggtggatgttttaattataaatgcaagtgtttatgtctaaatgcatgtgtttgtggatgtcgtatctctacatgtgtttgtaatgtggctgttatatgtgatttatgttatgtttgatatatgttatgtgtgcagaaatagtgacataatttagtgctgtttttgtagcagtatagggtaattcccgtcggcccagttaattcccgtcggctatggtcgaaccgacgggaattaactactaactcccgtcggcccagttaattcctgtcggccacgtaaggccgacgggaattaattaataattcccgtcggcctggggaaccgacgggaattaattaataactcccgtcggccagcaaaaccgacgggagttagccttaattcccgtcggccgctttctagccgacgggaattaattattcccgtcaaccgccgacggggataaccttatccccgacaagggacgcctgtcggcctgaaaccgacgggaataagccttaaaccgacgggaattacttattcccgtcggtttagggcttattcccgtcggtttcaggccgacgagaattaagtgaattcctgtagtgaacggtcagcagtaacggctatatcaacggctatagagaatttaatacgtcagatatcagataaagcagtcgcggacggtccggccgtgcaccccggacggtccgcgaggatgctaaaaatgaattttatggaatccgtcaccttcgggtttttctgggtttacaacgatcggacggtccgcgcttggtctggacggtgctcgcttcttcatcggacggtctgtagtgttaacttgtgtttttgcagtgttcctatctgaggctcactctggtgtcgcggacggtccgtcgcaagggcccggacggtccgcgcataggtgtttttccaaaaagcttctcctgtccggaataacctacggtaattccggacagtcgacttagaatagttgtagatgaacttatgcacctgagaaattatcaactaggcaaaccggttagtccacaaggttt

SEQ ID NO: 4831 - DNA, 1093 bp, Zea mays
  Zm_smallRNAprecursor_320
acattgaaaagaaagctgcgatgccatgagccaatcgtgctcccatctcgcgaccacgaccacgatcacgtggtgtgggagatccacgaccaggagagggacgagagggaccagcagcagcttgctcacgagagctggcagaggctttcctcaaccgccccgctggattatttgggtcaatccagaagggggtatatgagagatgtcttgtgcccttttcatatcgaaattgtgtcacaacttcaatcattttcaggatgaagggggcatgtagacataccttgagagggaagctggatgcatggatgatctcttgccaaatcatgtcaaaaacatttaatctttcagtgttgtttggcttcatgaaggaaagcaggactttactttctcccaggatattcatctgatttccccctttggggatgagagtcatcctgcagagagttgatgtacctgtagtacttgtgcagatttgtggatttctaatattcatcagactcagatatgtgtagattcttggcttcttccctggtaggagggcgaaagtcatggatcttaatcttatcgtcagagatatcctcatcagtaaatcccagaatgtgagcaaatcttctgtagctcactttataccagctcccttcaatgaagaaatttagataaggaaagttgtatggactttcctcatcagcatgtttaatccatagagtagaataaaactgagcaatgatttcatcattccaatcatattggaatgtcatgatagtcttcatcctcttttgctcacaggccctcaatgcctgtgtcatctcaggatctccaatagcttcacacccgctctagttaataaaacgctgatggaggatagactggtgcttctttggaaggataactgaattatagaaatcaacatggagagtccagaagcgattaccatcaatcctggcatcacgaacacagaaggtaggattctggaattgcatatcttgaagaagggcagaccctccgctggcactgaaatcaatgacctgttcgttggtggaacgacgggcccgcgctctgtgaagcactaacctctggataatgggggcatgag

SEQ ID NO: 4832 - DNA, 1086 bp, Zea mays
  Zm_smallRNAprecursor_321
actttctcccaggatattcatctgatttccccctttggggatgagagtcatcctgcagagagttgatgtacctgtagtacttgtgcagatttgtggatttctaatattcatcagactcagatatgtgtagattcttggcttcttccctggtaggagggcgaaagtcatggatcttaatcttatcgtcagagatatcctcatcagtaaatcccagaatgtgagcaaatcttctgtagctcactttataccagctcccttcaatgaagaaatttagataaggaaagttgtatggactttcctcatcagcatgtttaatccatagagtagaataaaactgagcaatgatttcatcattccaatcatattggaatgtcatgatagtcttcatcctcttttgctcacaggccctcaatgcctgtgtcatctcaggatctccaatagcttcacacccgctctagttaataaaacgctgatggaggatagactggtgcttctttggaaggataactgaattatagaaatcaacatggagagtccagaagcgattaccatcaatcctggcatcacgaacacagaaggtaggattctggaattgcatatcttgaagaagggcagaccctccgctggcactgaaatcaatgacctgttcgttggtggaacgacgggcccgcgctctgtgaagcactaacctctggataatgggggcatgagcaggagggagattaacatcatcatcctttcctccttcgtcatcactagtggtctcccaggcctgtggattcgttgcgggacgagaccgaccggaggggttcctagccgttcgtccgcgaggtccatgagacccagaggcctcaccacctggcatgacattgccagatccgcgcccgcgcttggatctagaccgaggaggagtgtcttcacgaatttctggggcatcgtcacttgaatcggattcaacaaccgatggatttctatgacgcaccatccttaagattaaacaaagaagaacatatggtgagagagatattgatgttcaaggagtttaacgaacacgtttaaggaaagacaaatataatattggacatg

SEQ ID NO: 4833 - DNA, 1082 bp, Zea mays
  Zm_smallRNAprecursor_322
ttagctacaatgaacaataccaacctacttaactcaaaacaatgttcgagacaatgataacagtttaagtgtgccatacacctaaactacacaatcttcttgaagaggtacttaagatcatcaagaactgtatggatcgagtcaaaaatagagaagatgaaacaatacctcgatcagtgaaaccgaccatgaaaatcccgaagatgagtggagagatggtgggggagtctgaggggatagaatctccaacaatctccatggagttttgatagtttttggagggatttgagtgtaggatgtgagagagggagagaggaatgagggtgtcggcggccaaaagaaatgagagagtgaaggtcaaactgaccaaaaccggttgaaccgatttctggaccagttgaaccggttttggtcagtttgaccaggatccttctggcagctatcctcccccagctaactctggggaagaaaactttgcagcaaatttggcgtcgcagttcttcgatccatcccctccttggtgttcgttaaactccttgaacatcaatatctctctcaccatatgttctttgtttaatcttaaggatggtgcgtcgtagaaatccatcggttgttgaatccgattcaagtgacgatgcaccagaaattcgtgaagacactcctcggtctagatccaagcgcgggcgtggatctggcaatgtcatgccaggtggtgaggcctctgggtctcatggacctcgcggacgaacggctaggaacccctccggtcggtctcgtcccgcgacgaatccacaggcctgggagaccactagtgatgacgaaggaggaaaggatgatgatgttaatctccctcctgctcatgcccccattatccaggggttagtgcttcacagagcgcagacccgtcgttccgccaatgaacatgtcattgatttcagtgccagcggagggtctgcccttcttcaagatatgcgattccagaatcctaccttccgtgttcatgatgccaggattgatggtaatcgcttctggactctccttcatgttgatttctataattcagttatccttccaaagaagca

SEQ ID NO: 4834 - DNA, 1137 bp, Zea mays
  Zm_smallRNAprecursor_323
caatcttcttgaagaggtacttaagatcatcaagaactgtatggatcgagtcaaaaatagagaagatgaaacaatacctcgatcagtgaaaccgaccatgaaaatcccgaagatgagtggagagatggtgggggagtctgaggggatagaatctccaacaatctccatggagttttgatagtttttggagggatttgagtgtaggatgtgagagagggagagaggaatgagggtgtcggcggccaaaagaaatgagagagtgaaggtcaaactgaccaaaaccggttgaaccgatttctggaccagttgaaccggttttggtcagtttgaccaggatccttctggcagctatcctcccccagctaactctggggaagaaaactttgcagcaaatttggcgtcgcagttcttcgatccatcccctccttggtgttcgttaaactccttgaacatcaatatctctctcaccatatgttctttgtttaatcttaaggatggtgcgtcgtagaaatccatcggttgttgaatccgattcaagtgacgatgcaccagaaattcgtgaagacactcctcggtctagatccaagcgcgggcgtggatctggcaatgtcatgccaggtggtgaggcctctgggtctcatggacctcgcggacgaacggctaggaacccctccggtcggtctcgtcccgcgacgaatccacaggcctgggagaccactagtgatgacgaaggaggaaaggatgatgatgttaatctccctcctgctcatgcccccattatccaggggttagtgcttcacagagcgcagacccgtcgttccgccaatgaacatgtcattgatttcagtgccagcggagggtctgcccttcttcaagatatgcgattccagaatcctaccttccgtgttcatgatgccaggattgatggtaatcgcttctggactctccttcatgttgatttctataattcagttatccttccaaagaagcaccagcctatcctccatcagcgttttattaactggagcgggtgcgaagctatcggagatcctgagatgacacagacattgagggcctgtgagcaaaagaggatgaaggctatcatgacattccaatatgattggaatgatgaaatca

SEQ ID NO: 4835 - DNA, 1061 bp, Zea mays
  Zm_smallRNAprecursor_324
tcagtgaaaccgaccatgaaaatcccgaagatgagtggagagatggtgggggagtctgaggggatagaatctccaacaatctccatggagttttgatagtttttggagggatttgagtgtaggatgtgagagagggagagaggaatgagggtgtcggcggccaaaagaaatgagagagtgaaggtcaaactgaccaaaaccggttgaaccgatttctggaccagttgaaccggttttggtcagtttgaccaggatccttctggcagctatcctcccccagctaactctggggaagaaaactttgcagcaaatttggcgtcgcagttcttcgatccatcccctccttggtgttcgttaaactccttgaacatcaatatctctctcaccatatgttctttgtttaatcttaaggatggtgcgtcgtagaaatccatcggttgttgaatccgattcaagtgacgatgcaccagaaattcgtgaagacactcctcggtctagatccaagcgcgggcgtggatctggcaatgtcatgccaggtggtgaggcctctgggtctcatggacctcgcggacgaacggctaggaacccctccggtcggtctcgtcccgcgacgaatccacaggcctgggagaccactagtgatgacgaaggaggaaaggatgatgatgttaatctccctcctgctcatgcccccattatccaggggttagtgcttcacagagcgcagacccgtcgttccgccaatgaacatgtcattgatttcagtgccagcggagggtctgcccttcttcaagatatgcgattccagaatcctaccttccgtgttcatgatgccaggattgatggtaatcgcttctggactctccttcatgttgatttctataattcagttatccttccaaagaagcaccagcctatcctccatcagcgttttattaactggagcgggtgcgaagctatcggagatcctgagatgacacagacattgagggcctgtgagcaaaagaggatgaaggctatcatgacattccaatatgattggaatgatgaaatcattgctc

SEQ ID NO: 4836 - DNA, 1121 bp, Zea mays
  Zm_smallRNAprecursor_325
tatttaatacatgtaattatcatttaaatattctcaagtgttattccaggttgaggtactgtctctgtattcctagtaaagtatcgcctattactaattagttgttcagagttaaaaaaagatgtttcattgcagttcaatttgacgtacagcgctgctctaataatgaataataaatgcgtttcgtgtgtgggcctggggggattgtgcgggcaaagtattttcgtcgaaagagaagcaacgaaaaagcccactgctccgagacaccgttccacgaaacctgtccgcactcatctcatcgtttagcaccacctcgccagtccgcagtcctctatacctgcttaaatattcgtccagaccgcccaccctcgccgagctctgtagcgagagcttgtaacccgagcgggggcattaaggtggtgcggattctttgcgatggctttctgggcccgggctcgctatgtgcctttggccggcctgcccgtcccaagttggtagtggctggcggaggctttagcggaagctttggtctctccagacctgaagtggcaggaatggcgtgaggctggcttcacagagcagcgatcactgcccgcttccaacggtgggaggataacgggccgctgcacttcgagcccaactcaggcccagagcctcactaagcagaccaccatctttttgtttttttttatagaccgtgtgttctgtcacgcgagcctgagcctctgctgctgcatcattttaacctctgctaacatgttttcgttttaacatctgttcctttccaggtttcacagatggtttatctttgttaagcttccctatggttgttgatactgtttgctggtgggagataagtgatgttggtgtataatgacgtcgaccccgagaggtctacgactacgaccctcatttaattttcacacgttgcggacgctccttgtcatcaccagctgcaggaggaggactgatcgagcgagcggtgcagccgatccaggacgggcagggatgaatgcgcgaaccacccatttctgtgctgcagcagggggcaaacagtagccgatccgatccgatcaggggaccggggcaaagaatgaatgtggctcgcgttgccatcaccc

SEQ ID NO: 4837 - DNA, 1159 bp, Zea mays
  Zm_smallRNAprecursor_326
tatttaatacatgtaattatcatttaaatattctcaagtgttattccaggttgaggtactgtctctgtattcctagtaaagtatcgcctattactaattagttgttcagagttaaaaaaagatgtttcattgcagttcaatttgacgtacagcgctgctctaataatgaataataaatgcgtttcgtgtgtgggcctggggggattgtgcgggcaaagtattttcgtcgaaagagaagcaacgaaaaagcccactgctccgagacaccgttccacgaaacctgtccgcactcatctcatcgtttagcaccacctcgccagtccgcagtcctctatacctgcttaaatattcgtccagaccgcccaccctcgccgagctctgtagcgagagcttgtaacccgagcgggggcattaaggtggtgcggattctttgcgatggctttctgggcccgggctcgctatgtgcctttggccggcctgcccgtcccaagttggtagtggctggcggaggctttagcggaagctttggtctctccagacctgaagtggcaggaatggcgtgaggctggcttcacagagcagcgatcactgcccgcttccaacggtgggaggataacgggccgctgcacttcgagcccaactcaggcccagagcctcactaagcagaccaccatctttttgtttttttttatagaccgtgtgttctgtcacgcgagcctgagcctctgctgctgcatcattttaacctctgctaacatgttttcgttttaacatctgttcctttccaggtttcacagatggtttatctttgttaagcttccctatggttgttgatactgtttgctggtgggagataagtgatgttggtgtataatgacgtcgaccccgagaggtctacgactacgaccctcatttaattttcacacgttgcggacgctccttgtcatcaccagctgcaggaggaggactgatcgagcgagcggtgcagccgatccaggacgggcagggatgaatgcgcgaaccacccatttctgtgctgcagcagggggcaaacagtagccgatccgatccgatcaggggaccggggcaaagaatgaatgtggctcgcgttgccatcacccgcagctcaagaagaaatgcacgtggttggtccggcgcc

SEQ ID NO: 4838 - DNA, 1118 bp, Zea mays
  Zm_smallRNAprecursor_327
ttaatacatgtaattatcatttaaatattctcaagtgttattccaggttgaggtactgtctctgtattcctagtaaagtatcgcctattactaattagttgttcagagttaaaaaaagatgtttcattgcagttcaatttgacgtacagcgctgctctaataatgaataataaatgcgtttcgtgtgtgggcctggggggattgtgcgggcaaagtattttcgtcgaaagagaagcaacgaaaaagcccactgctccgagacaccgttccacgaaacctgtccgcactcatctcatcgtttagcaccacctcgccagtccgcagtcctctatacctgcttaaatattcgtccagaccgcccaccctcgccgagctctgtagcgagagcttgtaacccgagcgggggcattaaggtggtgcggattctttgcgatggctttctgggcccgggctcgctatgtgcctttggccggcctgcccgtcccaagttggtagtggctggcggaggctttagcggaagctttggtctctccagacctgaagtggcaggaatggcgtgaggctggcttcacagagcagcgatcactgcccgcttccaacggtgggaggataacgggccgctgcacttcgagcccaactcaggcccagagcctcactaagcagaccaccatctttttgtttttttttatagaccgtgtgttctgtcacgcgagcctgagcctctgctgctgcatcattttaacctctgctaacatgttttcgttttaacatctgttcctttccaggtttcacagatggtttatctttgttaagcttccctatggttgttgatactgtttgctggtgggagataagtgatgttggtgtataatgacgtcgaccccgagaggtctacgactacgaccctcatttaattttcacacgttgcggacgctccttgtcatcaccagctgcaggaggaggactgatcgagcgagcggtgcagccgatccaggacgggcagggatgaatgcgcgaaccacccatttctgtgctgcagcagggggcaaacagtagccgatccgatccgatcaggggaccggggcaaagaatgaatgtggctcgcgttgccatcaccc

SEQ ID NO: 4839 - DNA, 1156 bp, Zea mays
  Zm_smallRNAprecursor_328
ttaatacatgtaattatcatttaaatattctcaagtgttattccaggttgaggtactgtctctgtattcctagtaaagtatcgcctattactaattagttgttcagagttaaaaaaagatgtttcattgcagttcaatttgacgtacagcgctgctctaataatgaataataaatgcgtttcgtgtgtgggcctggggggattgtgcgggcaaagtattttcgtcgaaagagaagcaacgaaaaagcccactgctccgagacaccgttccacgaaacctgtccgcactcatctcatcgtttagcaccacctcgccagtccgcagtcctctatacctgcttaaatattcgtccagaccgcccaccctcgccgagctctgtagcgagagcttgtaacccgagcgggggcattaaggtggtgcggattctttgcgatggctttctgggcccgggctcgctatgtgcctttggccggcctgcccgtcccaagttggtagtggctggcggaggctttagcggaagctttggtctctccagacctgaagtggcaggaatggcgtgaggctggcttcacagagcagcgatcactgcccgcttccaacggtgggaggataacgggccgctgcacttcgagcccaactcaggcccagagcctcactaagcagaccaccatctttttgtttttttttatagaccgtgtgttctgtcacgcgagcctgagcctctgctgctgcatcattttaacctctgctaacatgttttcgttttaacatctgttcctttccaggtttcacagatggtttatctttgttaagcttccctatggttgttgatactgtttgctggtgggagataagtgatgttggtgtataatgacgtcgaccccgagaggtctacgactacgaccctcatttaattttcacacgttgcggacgctccttgtcatcaccagctgcaggaggaggactgatcgagcgagcggtgcagccgatccaggacgggcagggatgaatgcgcgaaccacccatttctgtgctgcagcagggggcaaacagtagccgatccgatccgatcaggggaccggggcaaagaatgaatgtggctcgcgttgccatcacccgcagctcaagaagaaatgcacgtggttggtccggcgcc

SEQ ID NO: 4840 - DNA, 1114 bp, Zea mays
  Zm_smallRNAprecursor_329
ttcaaactgcattaagaggtcatggtttactattccatttaactgaagattcaccagttttagcagctgatagaagcaacgcagctgcaatcaagacttggcaaatcaatgatggcaaagtaatggctgcaatggtcaatagtactaaaccaactatgattatgagtctgtccaaattcaccactgctagggctatctggtctcatctgaaggatcggtttgttcaggacagtgggtctcttttacatactcttatgcagcaaactcatgtcattgagcaacaagatatgtccattgatgattactattcagcttttgatcgtcttatgagtgctttgacctccatggtgcctgattgtacagctgtgccttgcccagcccataagttcattgagaagttctttacctacagatttgttatgggcgttcgacctgaatttgattctcttcgtgcaaggttactacacacttctgatactctcaccatggctcaggcgttgtctgaattacttgctgaagagactcgccttaagtccatgtcttctattactggtgtcagttcgcacagtgtattggctactgctcagaagtccaggagcacctcctttccgccttgtgagcattgtaagaagaccactcatcggtctgagaactgctttactaagtatccagagaagctggctgattttcgtgtccgtcgtgctactcgtggtcgtggtacaggaccatctcctagaggctcagttgctgttgcttctacttcatctgctggtgctttgtcatctacttgggttcttgactctggagcttcatttcatgtgacatctgatcagtcacgcctggcttctactgcacctgtcaccgagggtacttctgttcagactgctgatggtacattatgtcatgtcacccacaagggttctctttccaattcaaactttactgtcccaaatattttctttgtacctgaattatccatggatcttttatcagttggtcaaattaccgatcacaattgctttgttggatttgatgactcgtcttgttttgtacaggatcgactcacaggggatgtgattgggactggccgtcgccgtaaatcttcgcctcgcct

SEQ ID NO: 4841 - DNA, 1094 bp, Zea mays
  Zm_smallRNAprecursor_330
cccactacatatgaagctgctatgagaagtgcaaatttatccaaatggttatcagccatggaagatgaattagaatccatgagaatgaacaaagtttgggacttagaagtcattccccatggagccaaaacagtaggctgtaaatgggtctacaagacaaagcgtggctccagagggaacatagaaagatataaggctagacttgtggccaaagggttcacacagagagaaggcattgactaccatgaaaccttctcacctgtctcaacaaaagattcattcaggatcataatggcactagttgctcattttgatctagagctccatcagatggatgtaaagacagcattcctaaatggagagttagaagaaaatgtgttcatggcacaaccaaagggttttgttgtgagcggtaaagaacacatgggatgtcacttgaggaggtccatttatggattaaaacaggcctccagacagtggtacatcaagtttgattagactataagaaagtttggtttcgaggaaaacaaggaagacaattgcatttatgcaaaatttagaaaaggaaagtatatcttccttgttctgtatgtcgatgacatactcttagctagtagtgataaggatctactagcggaaacaaaagggtttctttcctcgaattttgatatgaaagacatgggagaagcctcctatgttcttggaatagaaattcacagagacagacaaaagggagtattaggactctcacagaagtcatatatagaaaatgtactaaagaggtataatatgcacaagtgtaatgcctcgcctggtccaatagtcaagggtgataagtttggggaatatcagtgtcccaagaatcagtatgagaaaaacaagatgaagtcagtaccatatgcttcagctatcggaagcattatgtatgctcaagtatgtactcgccctgacttagcttttaccaccgggatggttggacgctatcagaagaatccaggcatagaacactggaaagcagtcaagaaggctctaaggtaccttcaaggtactaaaggtctcatgcttacgtacagaagatctaattccctacaaat

SEQ ID NO: 4842 - DNA, 1095 bp, Zea mays
  Zm_smallRNAprecursor_331
agcacctagtggccacggcggtaggtccggccgtccggctctctctgctgccgtgttctttgtcacgattcattcctgcctttatggttgtttaatgtcgtctgtttttttgccatgtggttctgccctgttgccatttgaatgcctagttttacgtgtccagtgtacttgacatgcggactccagccaaaattgaccccacatgtcagtgactggatttgataaacgaacgcatcgattgtgccagcatctttattttattattatattattttggtgacttaaaaattcagcagcagcagtaatcatttcacatatcatgaccttgcttgccgcctcctagaccacggtacctatgtgtgtgcgtgcgcgcgtgcgtctacaaatacatacccatgcatgctcctcacacaccttgccaagaaatagagatgagaggatgagaggggctcgatcgggagaaagaagggggaaagatatgaagctacttgcttctgagtggaatgttgtctggttcaaggtcttgctttccgatttgaggatgatccatgcttgcatgtgtagttttttttgttcctcagatctacaagatctcggaccaggcttcattcccctcaggaatagcttcaaaataataccgccggagagttattaggaggagctgctagtactacataaacttgtgttcttggtctttgattctgaaatattttcttggagttttcgtgagtttcctggttgttcttgtagtacagtggggagtactactgtgttttccactcctagctagctagatcttacttttccacacagtgcctttttttttgtttgcttgcttgctgcagagatcgaggtcgaggagcagcaagattggtgtaatgatggcctacttcctcttctctttcttctgtgtatctggcaggtgatgaaagttttcatcattacattttgattgggagaatcttcgctctctctctctctctctctctctctctcctctctatatagcacgttctctatctcttttcttcttcgtattcattgttcctcctctccatctctctactatgcctgcacggactgttgttacggtgc

SEQ ID NO: 4843 - DNA, 1092 bp, Zea mays
  Zm_smallRNAprecursor_332
gcacctagtggccacggcggtaggtccggccgtccggctctctctgctgccgtgttctttgtcacgattcattcctgcctttatggttgtttaatgtcgtctgtttttttgccatgtggttctgccctgttgccatttgaatgcctagttttacgtgtccagtgtacttgacatgcggactccagccaaaattgaccccacatgtcagtgactggatttgataaacgaacgcatcgattgtgccagcatctttattttattattatattattttggtgacttaaaaattcagcagcagcagtaatcatttcacatatcatgaccttgcttgccgcctcctagaccacggtacctatgtgtgtgcgtgcgcgcgtgcgtctacaaatacatacccatgcatgctcctcacacaccttgccaagaaatagagatgagaggatgagaggggctcgatcgggagaaagaagggggaaagatatgaagctacttgcttctgagtggaatgttgtctggttcaaggtcttgctttccgatttgaggatgatccatgcttgcatgtgtagttttttttgttcctcagatctacaagatctcggaccaggcttcattcccctcaggaatagcttcaaaataataccgccggagagttattaggaggagctgctagtactacataaacttgtgttcttggtctttgattctgaaatattttcttggagttttcgtgagtttcctggttgttcttgtagtacagtggggagtactactgtgttttccactcctagctagctagatcttacttttccacacagtgcctttttttttgtttgcttgcttgctgcagagatcgaggtcgaggagcagcaagattggtgtaatgatggcctacttcctcttctctttcttctgtgtatctggcaggtgatgaaagttttcatcattacattttgattgggagaatcttcgctctctctctctctctctctctctctctcctctctatatagcacgttctctatctcttttcttcttcgtattcattgttcctcctctccatctctctactatgcctgcacggactgttgttacggt

SEQ ID NO: 4844 - DNA, 1093 bp, Zea mays
  Zm_smallRNAprecursor_333
gcacctagtggccacggcggtaggtccggccgtccggctctctctgctgccgtgttctttgtcacgattcattcctgcctttatggttgtttaatgtcgtctgtttttttgccatgtggttctgccctgttgccatttgaatgcctagttttacgtgtccagtgtacttgacatgcggactccagccaaaattgaccccacatgtcagtgactggatttgataaacgaacgcatcgattgtgccagcatctttattttattattatattattttggtgacttaaaaattcagcagcagcagtaatcatttcacatatcatgaccttgcttgccgcctcctagaccacggtacctatgtgtgtgcgtgcgcgcgtgcgtctacaaatacatacccatgcatgctcctcacacaccttgccaagaaatagagatgagaggatgagaggggctcgatcgggagaaagaagggggaaagatatgaagctacttgcttctgagtggaatgttgtctggttcaaggtcttgctttccgatttgaggatgatccatgcttgcatgtgtagttttttttgttcctcagatctacaagatctcggaccaggcttcattcccctcaggaatagcttcaaaataataccgccggagagttattaggaggagctgctagtactacataaacttgtgttcttggtctttgattctgaaatattttcttggagttttcgtgagtttcctggttgttcttgtagtacagtggggagtactactgtgttttccactcctagctagctagatcttacttttccacacagtgcctttttttttgtttgcttgcttgctgcagagatcgaggtcgaggagcagcaagattggtgtaatgatggcctacttcctcttctctttcttctgtgtatctggcaggtgatgaaagttttcatcattacattttgattgggagaatcttcgctctctctctctctctctctctctctctcctctctatatagcacgttctctatctcttttcttcttcgtattcattgttcctcctctccatctctctactatgcctgcacggactgttgttacggtg

SEQ ID NO: 4845 - DNA, 1106 bp, Zea mays
  Zm_smallRNAprecursor_334
ctgtcgttcctttgccttcgagcagtgatgtcacgacgcacaccggtaggagctccttccttcgctcgtccccaccccctccttagacgcagctctgcgtcgtcgccgcatccatgcacgtcgccatctagccgcgcgtcgtgcccgcgtgactttgctgtgcacctacacccgccatgccacgatgtaaacaacacagcctcgccccgctccacctccagcttcgagtctcgcatggcaccggcctaccaagaaagcatcaccctcgtgttctcgcccgggtcggtcgactttctcttctgcttgcgtcgtaccacagccgtcgcatcgccctttacatcacatatattttctgcatctccaggcgctccttcagacctcgctatacctcgccggagcttggttctgatccgtggacaaaggggaaggcggtgaataatggaaagatagcgaaggagaagctcacgggcggcaattcccacgacaggaagctagcttaggccttgttcgtttctgtcggattgcacccggaatcgttccagctaatcaaaatttatataaattagagaagcaatccggttaggaatcgtttcgacccaccaatccggtacaaacgaacaaggccttacgtgatgtgcgggtcagacaggttcagaccactgacagccacaaccttgctaagcatgtgagttcatcgggtcgctaatcgtatgcttcctggcttaagccaagttgatgggaggctactcgcttgaatattcacttccattattctattcgataatgacagaaaactttattatattttatatatgttttaaactgttgctgtgacgatagaggtgcctagtaatctctctgtatcagtctgccccatatccgttttgtttttggctcatctcatactatacacaccatgtgtttgttcaaatgcctatgacgaaatcatgttgcagtacatggtaatagagtaatagttttttttttcaaatgttgttttgtcacagccttaaacttactacgtctttgatattcgtggtggcttagatcttgaatgttttcaaaatcaacgtgcataccaagcaattcgcaagggcaagtaagcc

SEQ ID NO: 4846 - DNA, 1070 bp, Zea mays
  Zm_smallRNAprecursor_335
ccttggggtaaagaacagtaccataataattttggctgctacagtttcatttctcgatccgggtcaagttgccccgtgccaacctttcggaagagatggcccagcgactggatgacagaatggttttatgtgaagaatgacctgacagtacaagaagatatcaaaggtataattatgcgccctatttggcaaagcttcggccttcggaggccgaaggttgaaatgaatgaagctgccgaagaatgccagagagccttcgacgttatctgttcttttattgggacgagagatttagtacaagagcatattgccttcagggtatggccgctcgcggagaaatgggaaatgccgcaagaaaccataaaagaaaccgacgaaggtggacttatgaggctgaaatatacttttaagttcggagataaattcgttgagccagatgacgactggttaaaaagtattgaaaatttagggccaattccctgtatgccactggaaaatatactcattccttgtatgccactggccccacatgtcatagacaccaaaaaatatacctatatgccactcagtggcacacaagggatgagtataaaatctgatggcataccaggaattttctcgaaaatttaagtgatgaattgcttggggcttattcgaaggccgaagatactgcactgtcagcagccttcggaggccgaaaaaagaagaggctgaatcgggtgtttgatgcaatcgggttcgtctaccctgactatcgttatcccattcgagggcaaaaaagaaaaaacacaacctctgcgaaagaagaagcggcaactgctcctagcgagcccgagccgaaaagaaagaggataaaggtccttacacatcggccgcgctatattgaaccagcttcggtgcctgagttcaccggagaaacttcttcggccaccgaagctgaaaagccaaccaaactgaccttgctgccagaagccgcagaaatggccgaaacgccaacaaggatagaattagaagaaccgaagattttgttaccagaaacaaaagagatggccgaagcgccatccacagaa

SEQ ID NO: 4847 - DNA, 1068 bp, Zea mays
  Zm_smallRNAprecursor_336
ccgcagcgggagaggaagtggtccgggccagggtaagggccgaggccggggactattcattcgtctggctaagggccttcttggtgtcttcgccatttgccgcacccgggcggtcgaggagtctgtgcgccgtcgcaggaccgaccggctgcatgaggatcttcgtcgttatgcagtcgcgactggtcatcctctccctcctgggtcccctccacctctagcccctaccatccccgcagaccttaatgagtggcaccaacaggagtttggtgtgccattcattaccccagaggatgaggtcgaggactatgatgacccattcttcacctcggaccctcctcatcctcctcctccctactcgggtcagggacccactcccggtgaccctaggcaatccggctctggtcactatcctcctcctccctacccgggtccgggacccattcctggtgacccgcggccatccggctctggttaccatcaccatcctccacctcctcctcatcatcgtacatcttcggcatctagtttttctgcgggtgatgagccccctagggactcctcactcgaggaagacgtgatgaggaccttcttccctgactacacatcataccctccatcatatcctccgtcctatcctcctcttggaggatattgattcatgtatacttggcgactccgctggggacgaaaaatcggatctatcaaattcgattcattagattagatctattaaattagacatatcagatcgatctaaaagtcgcctagatggggggtgaatagacggaatctgaaaattacaaacttaagcacacactacaagccggggttagcattagaaatgaatctgagtccgaaagataggggaaaacaaatcaagaacaaatcaagtggatgaacaccgtgatttgttttaccgaggttcggttctaaagaacctagtccccgttgagctggtcacaaagaccgggtctctttcaaccctgtccctctctcaaacggtcacctagaccgagtgagctttctccttaatcaaacgggtcacttagaccccgcaaggaccac

SEQ ID NO: 4848 - DNA, 1048 bp, Zea mays
  Zm_smallRNAprecursor_337
gcaactgagcacaacaagcaccagcagctatgtattcggcctcggcagtggaaagtgcaacacagttttgcttcttagagctccaagacaccagggaccgcccaaggaattggcaagtccccgaggtgctttttcgatctactttacaaccggcatagtctgaatcagagtagccaaataaatcgaaaaaggagcccttaggataccagagacctagattttgggtgtgaactagatatctcaaaattctcttaacggccactaagtgacactcttttgggttagcttgaaaacgggcacacatgcacacactaagcatgatgtctggcctagatgcacacaaatatagtagagatcctatcattgatctataaagcttttgatctacagatttaccttcttcatttaagtcgagatgaccacttgaagccattggtgtcttggcgtgctttgccttttccatgccaaactttttgagcatgtcttgtgtgtacttggtttggcacagaaaggttccttccttgagttgtttaacttgaaaacccaggaagtacttgagctcacccatcatggacatctcaaacctatttgtcataaccctactaaattcctcacaaaaagtttcatcagtactgccaaatataatgttgtcgacatatatttgacaaacaaataattgattgtcaactttgcgagtgaataaagtagagtctacttttcctatttcaaaaccattttaagcaagaaatccttaaggcaatcataccaagctctaggggcttgtttaagcccgtagagtgccttgtgaagtaggtaaacatgatttggcttctttggatcttcaaagcccagtggttgctccacatagaccttctcttgtagtggtccatttagaaatgcgctcttgacatccatttgatatagctttaaatcatagttagtagcataggcaattaatattctaattgactctaaccttgctatcgacgcataggtttcaccaaaatcaagtccttccacttgagtgtagccttgggcaaccaaccgt

SEQ ID NO: 4849 - DNA, 1097 bp, Zea mays
  Zm_smallRNAprecursor_338
gacactgtccgtcgctctcctcgtgtacaaaacaagagaaaggaattagataaaaatgaattgaaggaaaggaggaagaggttaaggttgaaagtccccttgtctcctattcaagatgaagaaagtgatgatgaacaagacccagagtttgctcctgccggcgatggttctggcgacgacaatgttgttattgttggtggcgatgagaataagggtaaaactaagacgcgagctatacgatgctcacctgggaagttcataaagcttgtgaatgctctcttcgatgaattgaaaggtgaagtagttgccaaggggtttggcggcctgctgagattcaagccgcacttattgtccagaaaattgctcagctggctgatgcggaagcttaacccggagacgatgaaattagagattggtggtggaaaagagattccaatcactgagcacagtgtttggtgtgttttgcagttaccaaacgttggccgtgacccgcccccatgtctgatgcagatgctcgtgccttgcgggacgagctgggagagcaaatttgtggcaactcttatagacgcagatctggtatcaatctatctgttatcactgatcgactgcagaagaggattctcactggggagctgggcctgagagccttttttatggctgcatttcagtgtctgctattctccaacactgacactcgcatcaggattgatgatgtatactcaggacatccataacatggccaacaagaactggtgcaaagcggtagttgacaggcatccagaacatggctaataagaactgatgtaaagtatactcaagacatccagaacatggccaacaagaactggtgcaaagcggtagttgacaggcatccagaacatggccaataagaactggtgcaaagcggtagttgacaggcgtcaactaccgctttgcaccagttcttgttggccatgttctgcctgtcaactaccgctttgcaccagttcttgttggccatgttctggatgtcttgagtatactttacatcatcaatcctgatgcgtgctgcctgtcaactaccgctttgcaccagttcttgttggtcatgttgtgga

SEQ ID NO: 4850 - DNA, 1208 bp, Zea mays
  Zm_smallRNAprecursor_339
ctatacgatgctcacctgggaagttcataaagcttgtgaatgctctcttcgatgaattgaaaggtgaagtagttgccaaggggtttggcggcctgctgagattcaagccgcacttattgtccagaaaattgctcagctggctgatgcggaagcttaacccggagacgatgaaattagagattggtggtggaaaagagattccaatcactgagcacagtgtttggtgtgttttgcagttaccaaacgttggccgtgacccgcccccatgtctgatgcagatgctcgtgccttgcgggacgagctgggagagcaaatttgtggcaactcttatagacgcagatctggtatcaatctatctgttatcactgatcgactgcagaagaggattctcactggggagctgggcctgagagccttttttatggctgcatttcagtgtctgctattctccaacactgacactcgcatcaggattgatgatgtatactcaggacatccataacatggccaacaagaactggtgcaaagcggtagttgacaggcatccagaacatggctaataagaactgatgtaaagtatactcaagacatccagaacatggccaacaagaactggtgcaaagcggtagttgacaggcatccagaacatggccaataagaactggtgcaaagcggtagttgacaggcgtcaactaccgctttgcaccagttcttgttggccatgttctgcctgtcaactaccgctttgcaccagttcttgttggccatgttctggatgtcttgagtatactttacatcatcaatcctgatgcgtgctgcctgtcaactaccgctttgcaccagttcttgttggtcatgttgtggatgtcctgagtatactttacatcatcaatcctgatgcgagtgtcagtgttggagaatagcagacactgaaatgcagccatgaaaaaggctctcaggcccagctccccagtgagaatcctcttctgcagtcgatcagtgataacaaatagattgataccagatctgtgtttataagagttgccacaaatttgctctcctagctcgtcccgcaaggcacgagcatctgcatcagacatggggggcgggtcacggccaacgtttggtaactgcaaaacacaccaaacactgtgctcagtgattggaatctcttttccaccaccaatctctaatttcatcgtctccgg

SEQ ID NO: 4851 - DNA, 1202 bp, Zea mays
  Zm_smallRNAprecursor_340
tacgatgctcacctgggaagttcataaagcttgtgaatgctctcttcgatgaattgaaaggtgaagtagttgccaaggggtttggcggcctgctgagattcaagccgcacttattgtccagaaaattgctcagctggctgatgcggaagcttaacccggagacgatgaaattagagattggtggtggaaaagagattccaatcactgagcacagtgtttggtgtgttttgcagttaccaaacgttggccgtgacccgcccccatgtctgatgcagatgctcgtgccttgcgggacgagctgggagagcaaatttgtggcaactcttatagacgcagatctggtatcaatctatctgttatcactgatcgactgcagaagaggattctcactggggagctgggcctgagagccttttttatggctgcatttcagtgtctgctattctccaacactgacactcgcatcaggattgatgatgtatactcaggacatccataacatggccaacaagaactggtgcaaagcggtagttgacaggcatccagaacatggctaataagaactgatgtaaagtatactcaagacatccagaacatggccaacaagaactggtgcaaagcggtagttgacaggcatccagaacatggccaataagaactggtgcaaagcggtagttgacaggcgtcaactaccgctttgcaccagttcttgttggccatgttctgcctgtcaactaccgctttgcaccagttcttgttggccatgttctggatgtcttgagtatactttacatcatcaatcctgatgcgtgctgcctgtcaactaccgctttgcaccagttcttgttggtcatgttgtggatgtcctgagtatactttacatcatcaatcctgatgcgagtgtcagtgttggagaatagcagacactgaaatgcagccatgaaaaaggctctcaggcccagctccccagtgagaatcctcttctgcagtcgatcagtgataacaaatagattgataccagatctgtgtttataagagttgccacaaatttgctctcctagctcgtcccgcaaggcacgagcatctgcatcagacatggggggcgggtcacggccaacgtttggtaactgcaaaacacaccaaacactgtgctcagtgattggaatctcttttccaccaccaatctctaatttcatcgtctc

SEQ ID NO: 4852 - DNA, 1247 bp, Zea mays
  Zm_smallRNAprecursor_341
tacgatgctcacctgggaagttcataaagcttgtgaatgctctcttcgatgaattgaaaggtgaagtagttgccaaggggtttggcggcctgctgagattcaagccgcacttattgtccagaaaattgctcagctggctgatgcggaagcttaacccggagacgatgaaattagagattggtggtggaaaagagattccaatcactgagcacagtgtttggtgtgttttgcagttaccaaacgttggccgtgacccgcccccatgtctgatgcagatgctcgtgccttgcgggacgagctgggagagcaaatttgtggcaactcttatagacgcagatctggtatcaatctatctgttatcactgatcgactgcagaagaggattctcactggggagctgggcctgagagccttttttatggctgcatttcagtgtctgctattctccaacactgacactcgcatcaggattgatgatgtatactcaggacatccataacatggccaacaagaactggtgcaaagcggtagttgacaggcatccagaacatggctaataagaactgatgtaaagtatactcaagacatccagaacatggccaacaagaactggtgcaaagcggtagttgacaggcatccagaacatggccaataagaactggtgcaaagcggtagttgacaggcgtcaactaccgctttgcaccagttcttgttggccatgttctgcctgtcaactaccgctttgcaccagttcttgttggccatgttctggatgtcttgagtatactttacatcatcaatcctgatgcgtgctgcctgtcaactaccgctttgcaccagttcttgttggtcatgttgtggatgtcctgagtatactttacatcatcaatcctgatgcgagtgtcagtgttggagaatagcagacactgaaatgcagccatgaaaaaggctctcaggcccagctccccagtgagaatcctcttctgcagtcgatcagtgataacaaatagattgataccagatctgtgtttataagagttgccacaaatttgctctcctagctcgtcccgcaaggcacgagcatctgcatcagacatggggggcgggtcacggccaacgtttggtaactgcaaaacacaccaaacactgtgctcagtgattggaatctcttttccaccaccaatctctaatttcatcgtctccgggttaagcttccgcatcagccagctgagcaattttctggacaa

SEQ ID NO: 4853 - DNA, 1113 bp, Zea mays
  Zm_smallRNAprecursor_342
ctgagattcaagccgcacttattgtccagaaaattgctcagctggctgatgcggaagcttaacccggagacgatgaaattagagattggtggtggaaaagagattccaatcactgagcacagtgtttggtgtgttttgcagttaccaaacgttggccgtgacccgcccccatgtctgatgcagatgctcgtgccttgcgggacgagctgggagagcaaatttgtggcaactcttatagacgcagatctggtatcaatctatctgttatcactgatcgactgcagaagaggattctcactggggagctgggcctgagagccttttttatggctgcatttcagtgtctgctattctccaacactgacactcgcatcaggattgatgatgtatactcaggacatccataacatggccaacaagaactggtgcaaagcggtagttgacaggcatccagaacatggctaataagaactgatgtaaagtatactcaagacatccagaacatggccaacaagaactggtgcaaagcggtagttgacaggcatccagaacatggccaataagaactggtgcaaagcggtagttgacaggcgtcaactaccgctttgcaccagttcttgttggccatgttctgcctgtcaactaccgctttgcaccagttcttgttggccatgttctggatgtcttgagtatactttacatcatcaatcctgatgcgtgctgcctgtcaactaccgctttgcaccagttcttgttggtcatgttgtggatgtcctgagtatactttacatcatcaatcctgatgcgagtgtcagtgttggagaatagcagacactgaaatgcagccatgaaaaaggctctcaggcccagctccccagtgagaatcctcttctgcagtcgatcagtgataacaaatagattgataccagatctgtgtttataagagttgccacaaatttgctctcctagctcgtcccgcaaggcacgagcatctgcatcagacatggggggcgggtcacggccaacgtttggtaactgcaaaacacaccaaacactgtgctcagtgattggaatctcttttccaccaccaatctctaatttcatcgtctccgg

SEQ ID NO: 4854 - DNA, 1158 bp, Zea mays
  Zm_smallRNAprecursor_343
ctgagattcaagccgcacttattgtccagaaaattgctcagctggctgatgcggaagcttaacccggagacgatgaaattagagattggtggtggaaaagagattccaatcactgagcacagtgtttggtgtgttttgcagttaccaaacgttggccgtgacccgcccccatgtctgatgcagatgctcgtgccttgcgggacgagctgggagagcaaatttgtggcaactcttatagacgcagatctggtatcaatctatctgttatcactgatcgactgcagaagaggattctcactggggagctgggcctgagagccttttttatggctgcatttcagtgtctgctattctccaacactgacactcgcatcaggattgatgatgtatactcaggacatccataacatggccaacaagaactggtgcaaagcggtagttgacaggcatccagaacatggctaataagaactgatgtaaagtatactcaagacatccagaacatggccaacaagaactggtgcaaagcggtagttgacaggcatccagaacatggccaataagaactggtgcaaagcggtagttgacaggcgtcaactaccgctttgcaccagttcttgttggccatgttctgcctgtcaactaccgctttgcaccagttcttgttggccatgttctggatgtcttgagtatactttacatcatcaatcctgatgcgtgctgcctgtcaactaccgctttgcaccagttcttgttggtcatgttgtggatgtcctgagtatactttacatcatcaatcctgatgcgagtgtcagtgttggagaatagcagacactgaaatgcagccatgaaaaaggctctcaggcccagctccccagtgagaatcctcttctgcagtcgatcagtgataacaaatagattgataccagatctgtgtttataagagttgccacaaatttgctctcctagctcgtcccgcaaggcacgagcatctgcatcagacatggggggcgggtcacggccaacgtttggtaactgcaaaacacaccaaacactgtgctcagtgattggaatctcttttccaccaccaatctctaatttcatcgtctccgggttaagcttccgcatcagccagctgagcaattttctggacaataa

SEQ ID NO: 4855 - DNA, 1107 bp, Zea mays
  Zm_smallRNAprecursor_344
agattcaagccgcacttattgtccagaaaattgctcagctggctgatgcggaagcttaacccggagacgatgaaattagagattggtggtggaaaagagattccaatcactgagcacagtgtttggtgtgttttgcagttaccaaacgttggccgtgacccgcccccatgtctgatgcagatgctcgtgccttgcgggacgagctgggagagcaaatttgtggcaactcttatagacgcagatctggtatcaatctatctgttatcactgatcgactgcagaagaggattctcactggggagctgggcctgagagccttttttatggctgcatttcagtgtctgctattctccaacactgacactcgcatcaggattgatgatgtatactcaggacatccataacatggccaacaagaactggtgcaaagcggtagttgacaggcatccagaacatggctaataagaactgatgtaaagtatactcaagacatccagaacatggccaacaagaactggtgcaaagcggtagttgacaggcatccagaacatggccaataagaactggtgcaaagcggtagttgacaggcgtcaactaccgctttgcaccagttcttgttggccatgttctgcctgtcaactaccgctttgcaccagttcttgttggccatgttctggatgtcttgagtatactttacatcatcaatcctgatgcgtgctgcctgtcaactaccgctttgcaccagttcttgttggtcatgttgtggatgtcctgagtatactttacatcatcaatcctgatgcgagtgtcagtgttggagaatagcagacactgaaatgcagccatgaaaaaggctctcaggcccagctccccagtgagaatcctcttctgcagtcgatcagtgataacaaatagattgataccagatctgtgtttataagagttgccacaaatttgctctcctagctcgtcccgcaaggcacgagcatctgcatcagacatggggggcgggtcacggccaacgtttggtaactgcaaaacacaccaaacactgtgctcagtgattggaatctcttttccaccaccaatctctaatttcatcgtctc

SEQ ID NO: 4856 - DNA, 1152 bp, Zea mays
  Zm_smallRNAprecursor_345
agattcaagccgcacttattgtccagaaaattgctcagctggctgatgcggaagcttaacccggagacgatgaaattagagattggtggtggaaaagagattccaatcactgagcacagtgtttggtgtgttttgcagttaccaaacgttggccgtgacccgcccccatgtctgatgcagatgctcgtgccttgcgggacgagctgggagagcaaatttgtggcaactcttatagacgcagatctggtatcaatctatctgttatcactgatcgactgcagaagaggattctcactggggagctgggcctgagagccttttttatggctgcatttcagtgtctgctattctccaacactgacactcgcatcaggattgatgatgtatactcaggacatccataacatggccaacaagaactggtgcaaagcggtagttgacaggcatccagaacatggctaataagaactgatgtaaagtatactcaagacatccagaacatggccaacaagaactggtgcaaagcggtagttgacaggcatccagaacatggccaataagaactggtgcaaagcggtagttgacaggcgtcaactaccgctttgcaccagttcttgttggccatgttctgcctgtcaactaccgctttgcaccagttcttgttggccatgttctggatgtcttgagtatactttacatcatcaatcctgatgcgtgctgcctgtcaactaccgctttgcaccagttcttgttggtcatgttgtggatgtcctgagtatactttacatcatcaatcctgatgcgagtgtcagtgttggagaatagcagacactgaaatgcagccatgaaaaaggctctcaggcccagctccccagtgagaatcctcttctgcagtcgatcagtgataacaaatagattgataccagatctgtgtttataagagttgccacaaatttgctctcctagctcgtcccgcaaggcacgagcatctgcatcagacatggggggcgggtcacggccaacgtttggtaactgcaaaacacaccaaacactgtgctcagtgattggaatctcttttccaccaccaatctctaatttcatcgtctccgggttaagcttccgcatcagccagctgagcaattttctggacaa

SEQ ID NO: 4857 - DNA, 1162 bp, Zea mays
  Zm_smallRNAprecursor_346
gccaataagaactggtgcaaagcggtagttgacaggcgtcaactaccgctttgcaccagttcttgttggccatgttctgcctgtcaactaccgctttgcaccagttcttgttggccatgttctggatgtcttgagtatactttacatcatcaatcctgatgcgtgctgcctgtcaactaccgctttgcaccagttcttgttggtcatgttgtggatgtcctgagtatactttacatcatcaatcctgatgcgagtgtcagtgttggagaatagcagacactgaaatgcagccatgaaaaaggctctcaggcccagctccccagtgagaatcctcttctgcagtcgatcagtgataacaaatagattgataccagatctgtgtttataagagttgccacaaatttgctctcctagctcgtcccgcaaggcacgagcatctgcatcagacatggggggcgggtcacggccaacgtttggtaactgcaaaacacaccaaacactgtgctcagtgattggaatctcttttccaccaccaatctctaatttcatcgtctccgggttaagcttccgcatcagccagctgagcaattttctggacaataagtgcggcttgaatctcagcaggccaccaaaccccttggcaactacttcacctttcaattcatcggagagagcattcacaagctttatgaacttcccaggtgagcatcgtatagctcgcgtcttagttttacccttattctcatcgccaccaacaataacaacattgtcgtcgccagaaccatcgccggcaggagcaaactctgggtcttgttcatcatcactttcttcatcttgaataggagacaaggggactttcaaccttaacctcttcctcctttccttcaattcatttttatctaattcctttctcttgttttgtacacgaggagagcgacggacagtgtcagcgccttgctggcctgtgacattctgttcttgatccattataaaaaccactgaaaaaatgggaatgaaaaaaacgtgagggcacaagcacatggtacagatcttataaccaaaaattgctaatcaacaaactaaaacacacagtacaaataggaacaaaaaatagttgcaatacacactaatgctgcaacacacattagtgtgtgtggttgaa

SEQ ID NO: 4858 - DNA, 1058 bp, Zea mays
  Zm_smallRNAprecursor_347
agataccctggtagtccatgccgtaaacgatgagtgttcgcccttggtctgtctacgctacgctacgcggatcaggggcccagctaacgcgtgaaacactccgcctggggagtacagtcgcaagaccgaaactcaaaggaattgacgggggcctgcacaagcggtggagcatgtggtttaattcgatacaacgcgcaaaaccttaccagcccttgacatatgaacaacaaaacctgtctttaacgggatggtacttactttcatacaggtactgcatggctgtcgtcagctcgtgtcgtgagatgtttggtcaagtcctataacgagcgaaaccctcgttttgtgttgctgagacatgcgcctaaggagaaatagccgaggagccgagtgacgtgccagcgctactacttgattgagtgccagcacgtagctgtgctttccgcaagaatttcaccattgggagcctcgaagcactttcacgtgtgaaccgaagtcgtcttgccgaactcaagacccacggagacctacctatagtgacgtcaaagtaccagtgaacatggaggtttggttaggcttggttacgacgacgtcgagttggcggcggaggaagactcggcatgaaggccagccgcccggtggtgtggtacgtagtggtaatagtacgcgccccgctccgaaacaaagaaaaaggtgcgtgccgcactcacgagggactgctagtgagatactggaggaaggtggggatgacgtcaagtccgcatggcccttatgggctgggccacacacgtgctacaatggcaatgacaatgggaagcaaggctgtaaggcggagcgaatccggaaagattgcctcagttcggattgttctctgcaactcgggaacatgaagtagaaatcgctagtaatcgcggatcagcatgccgcggtgaatatgtacccgggccctgtacacaccgcccgtcacaccctgggaattggtttcgcccgaagcatcggaccaatgatcacccatgacttctgtgtaccactagtgccacaaaggcctttggtggtcttat

SEQ ID NO: 4859 - DNA, 1128 bp, Zea mays
  Zm_smallRNAprecursor_348
atgtttacttccattgtgggtaacgtatttggtttcaaagccttacgcgctctacgtttggaggatctacgaattccccctgcttattcaaaaactttccaaggtccgcctcacggtatccaagttgaaagggataagttgaacaagtacggtcgtcctttattgggatgtactattaaacggattatccgcaaaaaattacggtagagcgtgttatgagtgtctacgcggtggacttgattttaccaaagatgatgaaaacgtaaactcacaaccatttatgcgctggagagaccgttttgtcttttgtgccgaagcaatttataaagcacaagccgaaaccggtgaaatcaaggggcattacttgaatgcgactgcaggtacatgcgaataaatgattaagagagctgtatttgcaagggaattaggggttcctattgtaatgcatgactacttaacaggaggtcgcaaatactactttgtctcattattgccgcgacaacggcctacttcttcacattcaccgagcaatgcatgcagttattgatagacagaaaaatcatggtatgcatttccgtgtattagctaaagcattgcgtatgtcggggggagatcatatccactccggtacagtagtaggtaagttagaaggggaacgcgaaataactttaggttttgttgatttattgcgcgatgattttattgaaaaagatcgttatcgcggtatctttttcactcaggactgggtatccatgccaggtgttataccggtggcttctgggggtattcatgtttggcatatgccagctctgaccgaaatctttggagatgattccgtattacaatttggtggaggaactttaggacatccttggggaaatgcacctggtgcagcagctaatcgtgtggctttagaagcctgtgtacaagctcgtaacgaagggcgcgatcttgctcgtgaaggtaatgaaattatcaaagcagcttgcaaatggagtgctgaactagccgcagcttgtgaaatatggaaggagatccaatttgatggtttcaaagcgatggataccatataaaataaaaaagaagcaaaatagaaagagaaaaaataagttaagaaatgcagtaatt

SEQ ID NO: 4860 - DNA, 1032 bp, Zea mays
  Zm_smallRNAprecursor_349
acgcgaaataactttaggttttgttgatttattgcgcgatgattttattgaaaaagatcgttatcgcggtatctttttcactcaggactgggtatccatgccaggtgttataccggtggcttctgggggtattcatgtttggcatatgccagctctgaccgaaatctttggagatgattccgtattacaatttggtggaggaactttaggacatccttggggaaatgcacctggtgcagcagctaatcgtgtggctttagaagcctgtgtacaagctcgtaacgaagggcgcgatcttgctcgtgaaggtaatgaaattatcaaagcagcttgcaaatggagtgctgaactagccgcagcttgtgaaatatggaaggagatccaatttgatggtttcaaagcgatggataccatataaaataaaaaagaagcaaaatagaaagagaaaaaataagttaagaaatgcagtaattcttctttattcctctaattgattgcaattcaattcggctcaatcttttctaaaaaaaaaagactgagccgaattgaaatagatcttgatacgatcatgagacttgacaaatcgagattcttctattctatatatctagaatatagaaaggtataatacaataaacaaatataaataaaaatatagtattatcgtacgataatggaatcaaatacgcagtatttacagaaaagagtcttcgtttattgggaaagaatcaatatacttttaatgtcgaatcgggattcactaagacagaaatcaagcattgggtcgaactcttctttggtgttaaggtagtagctgtgaatagccatcgactacccggaaagggtagaagaatgggacctattctgggacatacaatgcattacagacgtatgatcattacccttcaaccgggttattctattccacttctagatagagaaacgaactcaaggagaatacttaataatacggcgaaacatttatacaaaacacctatcccgagcacacgcaagggaaccgtagacaggcaa

SEQ ID NO: 4861 - DNA, 1032 bp, Zea mays; identical to SEQ ID NO: 4860
  Zm_smallRNAprecursor_350

SEQ ID NO: 4862 - DNA, 1033 bp, Zea mays
  Zm_smallRNAprecursor_351
acgcgaaataactttaggttttgttgatttattgcgcgatgattttattgaaaaagatcgttatcgcggtatctttttcactcaggactgggtatccatgccaggtgttataccggtggcttctgggggtattcatgtttggcatatgccagctctgaccgaaatctttggagatgattccgtattacaatttggtggaggaactttaggacatccttggggaaatgcacctggtgcagcagctaatcgtgtggctttagaagcctgtgtacaagctcgtaacgaagggcgcgatcttgctcgtgaaggtaatgaaattatcaaagcagcttgcaaatggagtgctgaactagccgcagcttgtgaaatatggaaggagatccaatttgatggtttcaaagcgatggataccatataaaataaaaaagaagcaaaatagaaagagaaaaaataagttaagaaatgcagtaattcttctttattcctctaattgattgcaattcaattcggctcaatcttttctaaaaaaaaaagactgagccgaattgaaatagatcttgatacgatcatgagacttgacaaatcgagattcttctattctatatatctagaatatagaaaggtataatacaataaacaaatataaataaaaatatagtattatcgtacgataatggaatcaaatacgcagtatttacagaaaagagtcttcgtttattgggaaagaatcaatatacttttaatgtcgaatcgggattcactaagacagaaatcaagcattgggtcgaactcttctttggtgttaaggtagtagctgtgaatagccatcgactacccggaaagggtagaagaatgggacctattctgggacatacaatgcattacagacgtatgatcattacccttcaaccgggttattctattccacttctagatagagaaacgaactcaaggagaatacttaataatacggcgaaacatttatacaaaacacctatcccgagcacacgcaagggaaccgtagacaggcaag

SEQ ID NO: 4863 - DNA, 1033 bp, Zea mays; identical to SEQ ID NO: 4862
  Zm_smallRNAprecursor_352

SEQ ID NO: 4864 - DNA, 1031 bp, Zea mays
  Zm_smallRNAprecursor_353
cgcgaaataactttaggttttgttgatttattgcgcgatgattttattgaaaaagatcgttatcgcggtatctttttcactcaggactgggtatccatgccaggtgttataccggtggcttctgggggtattcatgtttggcatatgccagctctgaccgaaatctttggagatgattccgtattacaatttggtggaggaactttaggacatccttggggaaatgcacctggtgcagcagctaatcgtgtggctttagaagcctgtgtacaagctcgtaacgaagggcgcgatcttgctcgtgaaggtaatgaaattatcaaagcagcttgcaaatggagtgctgaactagccgcagcttgtgaaatatggaaggagatccaatttgatggtttcaaagcgatggataccatataaaataaaaaagaagcaaaatagaaagagaaaaaataagttaagaaatgcagtaattcttctttattcctctaattgattgcaattcaattcggctcaatcttttctaaaaaaaaaagactgagccgaattgaaatagatcttgatacgatcatgagacttgacaaatcgagattcttctattctatatatctagaatatagaaaggtataatacaataaacaaatataaataaaaatatagtattatcgtacgataatggaatcaaatacgcagtatttacagaaaagagtcttcgtttattgggaaagaatcaatatacttttaatgtcgaatcgggattcactaagacagaaatcaagcattgggtcgaactcttctttggtgttaaggtagtagctgtgaatagccatcgactacccggaaagggtagaagaatgggacctattctgggacatacaatgcattacagacgtatgatcattacccttcaaccgggttattctattccacttctagatagagaaacgaactcaaggagaatacttaataatacggcgaaacatttatacaaaacacctatcccgagcacacgcaagggaaccgtagacaggcaa

SEQ ID NO: 4865 - DNA, 1031 bp, Zea mays; identical to SEQ ID NO: 4864
  Zm_smallRNAprecursor_354

SEQ ID NO: 4866 - DNA, 1031 bp, Zea mays; identical to SEQ ID NO: 4864
  Zm_smallRNAprecursor_355

SEQ ID NO: 4867 - DNA, 1031 bp, Zea mays; identical to SEQ ID NO: 4864
  Zm_smallRNAprecursor_356

SEQ ID NO: 4868 - DNA, 1032 bp, Zea mays
  Zm_smallRNAprecursor_357
cgcgaaataactttaggttttgttgatttattgcgcgatgattttattgaaaaagatcgttatcgcggtatctttttcactcaggactgggtatccatgccaggtgttataccggtggcttctgggggtattcatgtttggcatatgccagctctgaccgaaatctttggagatgattccgtattacaatttggtggaggaactttaggacatccttggggaaatgcacctggtgcagcagctaatcgtgtggctttagaagcctgtgtacaagctcgtaacgaagggcgcgatcttgctcgtgaaggtaatgaaattatcaaagcagcttgcaaatggagtgctgaactagccgcagcttgtgaaatatggaaggagatccaatttgatggtttcaaagcgatggataccatataaaataaaaaagaagcaaaatagaaagagaaaaaataagttaagaaatgcagtaattcttctttattcctctaattgattgcaattcaattcggctcaatcttttctaaaaaaaaaagactgagccgaattgaaatagatcttgatacgatcatgagacttgacaaatcgagattcttctattctatatatctagaatatagaaaggtataatacaataaacaaatataaataaaaatatagtattatcgtacgataatggaatcaaatacgcagtatttacagaaaagagtcttcgtttattgggaaagaatcaatatacttttaatgtcgaatcgggattcactaagacagaaatcaagcattgggtcgaactcttctttggtgttaaggtagtagctgtgaatagccatcgactacccggaaagggtagaagaatgggacctattctgggacatacaatgcattacagacgtatgatcattacccttcaaccgggttattctattccacttctagatagagaaacgaactcaaggagaatacttaataatacggcgaaacatttatacaaaacacctatcccgagcacacgcaagggaaccgtagacaggcaag

SEQ ID NO: 4869 - DNA, 1032 bp, Zea mays; identical to SEQ ID NO: 4868
  Zm_smallRNAprecursor_358

SEQ ID NO: 4870 - DNA, 1172 bp, Zea mays
  Zm_smallRNAprecursor_359
gtcagctcagaagcaagcatgagcacgctgtgacaaagaagtcctgttcctgttctatttgaagttgaaggtgctctggtgcaatccttaccgacagaaaaagattgcagtcgggttgataataatcgagtgccattacttcgtcggtccgaaccaaggaaaggaatccgttagaaatgttttgaaatggatattgttctctctttgattagggatgctatatgaaaagaagtggagtttgaaaaagggaacggaatggtcaaaccggaactgctagaggaacgaattttcaatagcataacttgggctcctagaatatgggtggggcccttgggacaatctatttgattgcagggacaggtacgctgaatatgactggggattttcctatgggtattggagcgggtccaagcagattaaagaggatgagttgtcagagactgctatttattcgaattatttatggtatatttatcataaaaagggggaggtgcaagagactgattcggacttcttgcagagtggaacaatgcagtaccagacacgagatatatctttcaaagaagaaggcttttttcgaataagccaattgatttgggaccttcggatccattctttttcctattcaaagataaggcctttgtctctgtgttttcacgtcgagaattctttgcagatgaagatgaagagatggcaaagcggcttagtaccagtacctggagaaaaaagcctcctaaacatatggctagcaactggttcaccaggagtacgcaagaaaggcaaaagcactacgaattattgatttaggaatgggaatgggctagaaccctgggctcttccttatataattaatggtcttttcattctaatactctatccgagagttctcagtatttagcaaagctgttcctatctaacggaaggctcctggatcaaatgacaaagacattgtttgtggagaaagaggtggcttttcccggatgaaatgaaacatttcatttgtgtaacaggagaaagatttcccactccttagccgtaaagatatgtggccatgaaaaagggaggggattcagtggaacaggattggccgggcggtagagtcgtggaaacacttgttgattcctattttggaccctagctccatggaacaatatgctactgcggaaacatgg

SEQ ID NO: 4871 - DNA, 1136 bp, Zea mays
  Zm_smallRNAprecursor_360
ctcaggatgaacgctggcggcatgcttaacacatgcaagtcgaacgggaagtggtgtttccagtggcgaacgggtgagtaacgcgtaagaacctgcccttgggaggggaacaacaactggaaacggttgctaataccccgtaggctgaggagcaaaaggagaaatccgcccaaggaggggctcgcgtctgattagctagttggtgaggcaatagcttaccaaggcgatgatcagtagctggtccgagaggatgatcagccacactgggactgagacacggcccagactcctacgggaggcagcagtggggaattttccgcaatgggcgaaagcctgacggagcaatgccgcgtggaggtggaaggcctacgggtcgtcaacttcttttctcggagaagaaacaatgacggtatctgaggaataagcatcggctaactctgtgccagcagccgcggtaagacagaggatgcaagcgttatccggaatgattgggcgtaaagcgtctgtaggtggcttttcaagtccgccgtcaaatcccagggctcaaccctggacaggcggtggaaactaccaagctggagtacggtaggggcagagggaatttccggtggagcggtgaaatgcattgagatcggaaagaacaccaacggcgaaagcactctgctgggccgacactgacactgagagacgaaagctaggggagcaaatgggattagagaccccagtagtcctagccgtaaacgatggatactaggtgctgtgcgactcgacccgtgcagtgctgtagctaacgcgttaagtatcccgcctggggagtacgttcgcaagaatgaaactcaaagggaattgacgggggcccgcacaagcggtggagcatgtggtttaattcgatgcaaagcgaagaaccttaccagggcttgacatgccgcgaatcctcttgaaagagaggggtgccctcgggaacgcggacacaggtggtgcatggctgtcgtcagctcgtgccgtaaggtgttgggttaagtctcgcaacgagcgcaaccctcgtgtttagttgccactatgagtttggaaccctgaacagaccgccggtgttaagccggaggaaggagaggatgaggccaagtcatcatgcccct

SEQ ID NO: 4872 - DNA, 1102 bp, Zea mays
  Zm_smallRNAprecursor_361
tcctgtcaccaggagcggaccgtccggcgtcggcgtagagaagaacccgctcctgccgcatgtcgtataccgtccaaccctagaccgcggatcgtccatgctatcgcagagagcaccgctgccgatacaccttgcagtggttgacgctcagatcaatgccaacaccatggataccgacaatccctgcttgagcaccaagctctatttgtatagactttcaaagctcatgcttttgtggcatgggcgctactaaaatctctatttggccagcacgttgatatgtgaccacaggccttttatatgaagacaacatgctgtataaacaagcaagaatccttataggcatgcatatgacacaatgtgtactaattactatttatgttttatcattatatcctacgtcgcttcttgacaagcacaagtgttcttacacgctgttcttttcgaagctgttcggactgttgtaactgtaacgtatataaacaaaacactataagggcttgtttgggagcaagtggaatgaagggtattgataggactataatcccttgctatctaaaattgaatagtggaggattatatgccctccaatccactccattacctttactcccaaacaagccctaaaagagtagaatccgatacatattaaagctaagcaaacaggcttagttgtgttcacaggcacgctgtaagaccaactccagcagtgtgcgactccgtatccctaaaacgcgcggccgacacattctctctcctctccgtatccggctccgtttccagcaacactccccatcccactccgcatgcagtctatgacacctggggcccgccagcaggcgcgcgcgcccgcgagagagctgcggagaggagagagaaagcgtggaaatggggagtctgggtacacgccgtgcgttttacggagccggatacggagcctgctggactgatgaatagtgtgctagactccgcaaaatacggatccggagccgcatgcggagtgctgctggagttggtctaagtgttcacaggcaggaatggcctcatacctgcgcactccatgtactggtacgtattaatagcactgtaattagcaattcgt

SEQ ID NO: 4873 - DNA, 1152 bp, Zea mays
  Zm_smallRNAprecursor_362
gattccgccgaaagtaaaaggcgaagaagctccaaagtcgttcctaagggaatgcagagcttacagcgaaaagtcaacgctgattccgccgaaagtaaaaggcgaagaagctccaaagtcattcctaagggaatgcagagcttacagcgaaaagttagcactgatatgtgactgtttctaaggaaataatggctgtgattatggcttcggatatgtgtttggacattcatttgcacatcacattacatcatagcatttgcattcataaacattcatccaggcatatgtaggataatcatcatcatagcataagtggttgcttcagcaaaaagaaaaaagagagaagagcttcttcgtgtacgaaaagaagagcttcggaagaaagggaaatgttatgttctatgcttcgctgtgtacgaaaagaagggaaggtgttttttcgcctttggctcaaaaaagataatttcatccacaacaaagcacttctcatacattaatggaaggataagagcatattacaaggtatgaacagaattcattaaagacaagtttagttacatttacaaaagttatctcaaaagtttcttgagtctgtctacagtctactcctatttaatcttcaagggacttcagcttcggcgtcattctttttaaccatcggcttcggcttcgtcatcctacatgaattaagttgttgtaagtaaaaatcgagcttgaaggaagaggtaagcacaaggtatgatttcttactggttcaagatgacttcgagcttcgtctccagccttttctcgcccgccttttgtccatatcatctttacaaatctattggaaatgcttcgggcgagatcaggaatgtcatctagaattgatggtgataaagtgaaattgggcctattgacaatctttccatgatcgcagccagcttttaggaaagctgcagcagtgccccgagaagctacccaggcgcagaagtcaccgtgcccggctataacttcgtcaagctcatcaatttcaccctcaatatgttcgaaggtctttgctaaatcttcagctgacggggtgaatttctcactgctagctccgactgaatggaaaatttttctcagtcgttgaatacatttgttgctaaattctaaacatttgtcttgaag

SEQ ID NO: 4874 - DNA, 1124 bp, Zea mays
  Zm_smallRNAprecursor_363
tactgttttcggatccgtacccatagggataaacaagccaaaattgcgaggacgaagtggtggaaactcaaagggagacattcgaagtttttagggaaagagtttttgtggagggcggcgcttggtccgaagaagaagatgcaaacatgtgggtgaagatggcaacttgcattaagatggtggcgtcagaggtgtttggagtgaccaaagggagcagaggtgaacataaggatacttggtggtggaccgaggacgttcaaaaggcaataaaggagaagaaagaatgttacaggagcttgttccatgacaggagcgcggtcaacatagagaggtataaggtgtcaaagaagactgcaaagcgagttgtgagtgaggcaaagcgtcgagcctgtgatgacatttaccgaagactaagtacaaaggaaggggagaaggatgtctataagatggctaggattcaggaaaggaagacgagggacctcaaccaagttaaatgcattaaggatgagatggatcaactctaggtgaaaggacaagatatcaaacagaggtggcagaggtattttgacaatcttttcaatggtgagaatgagactggacacccaattggatgactcctctgatgatttaaatagatgctttgtacgcaggatccaagaatcagaggtcaaagaatatttaaagaggatgaaagggggcaaggcgatgggcccagatggtatcccaatagaggtgtggaaatgcgttggggatattgctattgtttggctaaccaagttgttcaaccatatttttttgatcaaacaagatgcccgatgagtggagtacattattaccaaccttcaagaacaagggagatattcaaagttgtaccaactatcgagggattaagctcatgagccacactatgaagctatgggagagttattgagcatcgcctgagaggaatgacgcatatcaccatgaaccaatttagattcatgcctggaaggtcaaccatggaagcaattttcttaataaagacaggtcatggagtggtataaggagcagaaggacttgcacatgatttttatcgacttggaaaaaggcatgataaaattacctaggaatctcatgtggcggtc

SEQ ID NO: 4875 - DNA, 1071 bp, Zea mays
  Zm_smallRNAprecursor_364
gaaggttccccaagacccatcgcaaaacactatccatactttggcatctttatttgtttcttcatcctgagcccctggcgtccaatcggcgataaaatctgccaacgcttgggactggatcgaagatctatgcacataatcaatgcaaaattcattgagctctacggcccattttccaatccgcccagtagcttctctatttctcataatatccttcaacggctgcgaagaaggaacaataacattgtatgcttgaaagtaatgccgaagcttcctggatgccatcaaaatagcatataacaccttctctaattctgtatagtttttctttgatatactaagaacttcagatacaaaatacactgggacctgcttcttgacttggccgtcaagcttctcctggacaagtgctgcacttaccgctgagtgcgaagctgccacaaataataacaacggagcccctggcgttggtggagttaatgttgttaaatctatcaaatattgcttcaggtcctcgaaggctttttgttggcttggtccccattgaaagacttcgactgatttcagtacttcgaagaatggtagatttctttctgctgatctggatataaatctattaagagatgccagcctccctgtcaatctttgggcccccttttttgtagttggtggctccattcaaagtatagcttcaattttacttggattagcttcaattccctttgttgaaaccaagcatccaagaaatttccccttcttgactccgaagacacatttttctggattcaactttaggccagcttgcctaaaactggcgaaggtctcttgcaaatcagcaatgtgattttcctgcttcgtgctttttacaatgatatcatcaacataagttagcacatttctgcctatctgagattgaagaaccttcgtagtcattctgctgaaacttcctccagcgttcttgagcccctcaggcatccgaagataacaatatgttccactaggggttatgaaactggtctttggttcatcctccgtcttcatccaaatttgatgatagcctgaataacaatc

SEQ ID NO: 4876 - DNA, 1048 bp, Zea mays
  Zm_smallRNAprecursor_365
agcaactgagcacaacaagcaccagcagctatgtattcggcctcggcagtggaaagtgcaacacaattttgcttcttagagctccaagacaccagggaccgccaagaaattggcaagtccccgaggtgctttttcgatctactttgcaaccggcatagtctgaattagagtagccaaataaatcgaaaaaggagcccttaggataccagtgacctagattttgggtgtgaactaaatatctcaaaattctcttaacggccactaggtgacactctttcgggttagcttgaaaacaggcacacatgcacacactaagcatgatatctggcctagatgcacataaatacagtagagatcctatcattgatctataaagcttttgatcgacagttttaccttcttcatttaagtcgagataaccacttgaagccattggtgtcttggcgtgctttgcattttccatgccaaactttttgagcatgtcttgtgtgtacttggtttggcacagaaaggttccttccttaagttgtttaacttgaaaacccaggaagtacttgagctcacccatcatggacacctcaaacttatttgtctaaaccctactaaattcctcacagaaagtttcagggggggcaaatataatgtcatcgacatatatttgacaaataaaaaattgattgtcaactttgcgagtgaataaagtagagtctgcttttcctatttcaaaaccatttttaagcaagaaatctttaagacattcataccatgctctaggagcttgtttaagcccatagagcgctttgtgaagaaggtagacatggtttggcttcttaggatcttcaaaacccggtggttgctccacatagaccaactcttgtagtggtccatttaggaaagcacttttgacatccatttgatacaatttgaaattatggttagtagcataggcaattaatattcttatggactctaaccttgctactagtgcataggtttcaccaaaatcaagtcctttcacttgagtgaaaccctgagcaaccagccgtgc

SEQ ID NO: 4877 - DNA, 1136 bp, Zea mays
  Zm_smallRNAprecursor_366
tggataaatacctattgggtattactatcccatacacatacacacgatgaaaaatagtccaactcatatccactggttgatatggatttatcctcgggtcatccgtagctacaaagatttaacatttacattatacaaatgtcaattatattcatctaattaccattacaaaatttatagcatcaatcaatctattcaagaacatcatagataattggatacaatagcaacactaggatattaccacataacatattacacgtttccattacatggtcatcaaatagttgttaagacttttatgacattatcatcctaaaggttgttaaatagtaaaaaaagatggatgactaaagtctaaattcacattttttggctaagtttatatcgggtattatacatatggttaacgggtataaataagtgtggaacgttctaatactcatttattcatggcaacgactgttgtgcaagcagtctttccgtgcaagcgtgcaagcaaaccatctgatccgttagatcgtgatccaaccgtaggttatatttaacacttaaacccttccaccaccagcttaataatctgtataaaaaactctataacaaaccatggttgtatctgtagttggatcgtaatctaacggatcagatggtttgcttgcacgcttgcacagaaggactgcttgcacagcagtcgttgtctttattcattgagccaaggtttttgtccaattaaaaatctataaacattttattcatatacatatctattaaatacctagcaaggctctaaacgccgccgactcgccgtccaactagcgatgggaaccaccaccatgcaaatatgcaattcgccgccgctctaacaaaaaccccaacccgctacaccctcccggccgatggctcagtccacccctgatcccccggctttagtggcgatgacgttggcggagctagaggcagccatcgccgccctgcccggcaagtggggtgccctgcgggaggcgttcgatcgcctcgccgcctgctcaccctcgccgctccccttcgcctgggaggacctcgacggctacatctcctcgctccagtcgtcagtcgcgctgcggtttcgccaggtccgcgcactcgaggccgccggc

SEQ ID NO: 4878 - DNA, 1118 bp, Zea mays
  Zm_smallRNAprecursor_367
ataaaataaatccttcaatgcaaccaggcaatttgtttccgaacatgaaggaatttcgaattgttatgaggcagtatgccataaagcatgagtttgagcttgaatcgatgttacttcgactactagatatgttggctattgcaaaggtggtgattgcccttggaggatctatgcacgggaggaaaagaaaggattaccgaccattgtggtatgttatttcctttttttgattggaatcattatgtaattatgttttgttggttaataaatcgtgaaccgaaaatttgcaggttgttgtcttgcatgacgtgcatacttgcacatctagtggcaggaggaagacgacaacaccaagttgtggatgtgttgcatttcacgctactccactacttatgaagaaaccccaaatgggtgctaaggagttgcaagaaacactacaaggagttcataatgtcacgattggttacgacactgttttgaaggggaaggagaagacattgaaagagttgtttggtagttgggaggagagtttcaagctaattttttcttggagggaggcagtacttgctaaggcgcccgacagtattattgagattgatgttgttttagaggatggtaagtactatttcaaccgttttttgtgcccttggaccatgcatctcaggttttcgggacggttgcagaccttaccttagtgttgactcccctgcacttaacggtagatggaatgggcagcttgcttcagcaacgggtgtggatgggcataactggatgtttcctttagcgtttggttttttcccgcctgagactgttgagagctggacctggttcatgacacagttgaagaaggctgttggagatctttcagtactcgctatatgttcggacgctcagaaaggcttaatgcatgcagttacagagtgtttccctaatgctgagaagcgagagtgcttcagacatctaatgggcaactatgttaaaagccacgtcggttcggagcacatatatccagcagccagggcatataggagggaagtttttgagcaccatgttagccaagttagaagtgttactaagattgttgagtatttagaccaacatcacaaatttatttggta

SEQ ID NO: 4879 - DNA, 1041 bp, Zea mays
  Zm_smallRNAprecursor_368
taattttgagtaagcagaggattttagccgatctaatcttctccgattttgtggcttccaaactagccctaaagaagtctttaacacccccggtactaaaggcgcgtcatctctctcttgttgctatacgctgggcgtggaccagtgcatgtggcacgcacttaaatacgacgtacctgcctgatcgaccgagctagtgatagtggcgtactactacacctgcgaatgagtgtagtactccagtatatatgtagagagagagacgcacaaacacactgtacgtacgtacgtaggatccatatatttgccgacgtttgttggtcgttgcgcgcggatccatatatatatcgcggtcggtcgcagcagtagctagctagcggcacgatacgaccgaatttttttgtattttagcccttaaacaaaagtaaaatcacgtttagacctaaaaaatttttaaatgcagttttggaccctttgctcggcgccatagcctatggcgccgaggtcgtgttgcgttggcacaacccagacgcgtggcgtcgacgtggaaccgagctcggcgccacagatcttggcgccgagctcggttgtgttattaaaatatttgttgcagacatgagcacaaagcccatctagcccacttggtagagcacaaggcttctaaccatgtggtcgtgggttcaagccccatagtttgcatttttttgttttttttgtttatgtcgttggtgtgtccgcttaaatttatttctcgcctagattttttttatctttgttttgtcactgaagtcagttcagcttatataatttacctatacttacactgaagttttgctaaaaatttctagccatctgtcccttccaaggtgtaagggatcaagagcaaaagcccaatacagtacagctgaatgtcgcctcgcaacaccgtcgacatgcatgcatggtcactctttcagctgtacacacgtagctggcacgacgtgtgcagtgcgcgtaggtatatacgcccagatgtagcacaggacatacatgtcttattgg

SEQ ID NO: 4880 - DNA, 1041 bp, Zea mays; identical to SEQ ID NO: 4879
  Zm_smallRNAprecursor_369

SEQ ID NO: 4881 - DNA, 1042 bp, Zea mays
  Zm_smallRNAprecursor_370
taattttgagtaagcagaggattttagccgatctaatcttctccgattttgtggcttccaaactagccctaaagaagtctttaacacccccggtactaaaggcgcgtcatctctctcttgttgctatacgctgggcgtggaccagtgcatgtggcacgcacttaaatacgacgtacctgcctgatcgaccgagctagtgatagtggcgtactactacacctgcgaatgagtgtagtactccagtatatatgtagagagagagacgcacaaacacactgtacgtacgtacgtaggatccatatatttgccgacgtttgttggtcgttgcgcgcggatccatatatatatcgcggtcggtcgcagcagtagctagctagcggcacgatacgaccgaatttttttgtattttagcccttaaacaaaagtaaaatcacgtttagacctaaaaaatttttaaatgcagttttggaccctttgctcggcgccatagcctatggcgccgaggtcgtgttgcgttggcacaacccagacgcgtggcgtcgacgtggaaccgagctcggcgccacagatcttggcgccgagctcggttgtgttattaaaatatttgttgcagacatgagcacaaagcccatctagcccacttggtagagcacaaggcttctaaccatgtggtcgtgggttcaagccccatagtttgcatttttttgttttttttgtttatgtcgttggtgtgtccgcttaaatttatttctcgcctagattttttttatctttgttttgtcactgaagtcagttcagcttatataatttacctatacttacactgaagttttgctaaaaatttctagccatctgtcccttccaaggtgtaagggatcaagagcaaaagcccaatacagtacagctgaatgtcgcctcgcaacaccgtcgacatgcatgcatggtcactctttcagctgtacacacgtagctggcacgacgtgtgcagtgcgcgtaggtatatacgcccagatgtagcacaggacatacatgtcttattggc

SEQ ID NO: 4882 - DNA, 1042 bp, Zea mays; identical to SEQ ID NO: 4881
  Zm_smallRNAprecursor_371

SEQ ID NO: 4883 - DNA, 1043 bp, Zea mays
  Zm_smallRNAprecursor_372
taattttgagtaagcagaggattttagccgatctaatcttctccgattttgtggcttccaaactagccctaaagaagtctttaacacccccggtactaaaggcgcgtcatctctctcttgttgctatacgctgggcgtggaccagtgcatgtggcacgcacttaaatacgacgtacctgcctgatcgaccgagctagtgatagtggcgtactactacacctgcgaatgagtgtagtactccagtatatatgtagagagagagacgcacaaacacactgtacgtacgtacgtaggatccatatatttgccgacgtttgttggtcgttgcgcgcggatccatatatatatcgcggtcggtcgcagcagtagctagctagcggcacgatacgaccgaatttttttgtattttagcccttaaacaaaagtaaaatcacgtttagacctaaaaaatttttaaatgcagttttggaccctttgctcggcgccatagcctatggcgccgaggtcgtgttgcgttggcacaacccagacgcgtggcgtcgacgtggaaccgagctcggcgccacagatcttggcgccgagctcggttgtgttattaaaatatttgttgcagacatgagcacaaagcccatctagcccacttggtagagcacaaggcttctaaccatgtggtcgtgggttcaagccccatagtttgcatttttttgttttttttgtttatgtcgttggtgtgtccgcttaaatttatttctcgcctagattttttttatctttgttttgtcactgaagtcagttcagcttatataatttacctatacttacactgaagttttgctaaaaatttctagccatctgtcccttccaaggtgtaagggatcaagagcaaaagcccaatacagtacagctgaatgtcgcctcgcaacaccgtcgacatgcatgcatggtcactctttcagctgtacacacgtagctggcacgacgtgtgcagtgcgcgtaggtatatacgcccagatgtagcacaggacatacatgtcttattggca

SEQ ID NO: 4884 - DNA, 1043 bp, Zea mays; identical to SEQ ID NO: 4883
  Zm_smallRNAprecursor_373

SEQ ID NO: 4885 - DNA, 1041 bp, Zea mays
  Zm_smallRNAprecursor_374
ctttcagctgtacacacgtagctggcacgacgtgtgcagtgcgcgtaggtatatacgcccagatgtagcacaggacatacatgtcttattggcatgcatgcatcatctaggatggcagggatcgatcggaccattttgtaaattaagaaaacgttaacttggttgaaacctagattaatttgtatattcgtgccgagaatatatatggtttatcgtctcagctagagctaggaataatggcatgcagacgacataggttatggcgccgaggtacgtgatacgccgagataaaaaaaaatctaggcgagaaataaatttaagcggacacaccaacaacataaacaaaaaaaacaaaaaaaatgcaaactatggggcttgaacccacgaccacatggttagaagccttgtgctctaccaagtgggctagatggactttgtgctcatgtctgcaacaaatattttaataacacaaccgagctcggcgccaagatctgtggcgccgagctcggttccacgtcgacgccacgcgtctgggttgtgccaacgcaacacgacctcggcaccatagcctatggcgccgagctgtgttagctcggcgccataggctatggcgccgagcaaaggatccaaaactgcatttaaaatttttttaggtctaagcgtgattttacttctgtttaagggctaaaatacaaaaaaaaaatcggacgatacgacgactacatacagatacaatacagcaaaatgcgaggtgaaaggacgtatatatcacgcgtctgccgtccggggagggctcctaatcacgcgcacccacacatgcaccctggccccacgtgccaggcaatttggcactgtttcgtcggtgcagctgctagggcacctgccaaactcagaaggagcgacaagttcttgcacgcagatcgattgcgggaattctcctactggagaataatctctgcggctctgcctggccgagcgatcgatggaccgtctgtctgcgtctgcgtccggcggggccgatgagccgtcgccattgggggc

SEQ ID NO: 4886 - DNA, 1040 bp, Zea mays
  Zm_smallRNAprecursor_375
tttcagctgtacacacgtagctggcacgacgtgtgcagtgcgcgtaggtatatacgcccagatgtagcacaggacatacatgtcttattggcatgcatgcatcatctaggatggcagggatcgatcggaccattttgtaaattaagaaaacgttaacttggttgaaacctagattaatttgtatattcgtgccgagaatatatatggtttatcgtctcagctagagctaggaataatggcatgcagacgacataggttatggcgccgaggtacgtgatacgccgagataaaaaaaaatctaggcgagaaataaatttaagcggacacaccaacaacataaacaaaaaaaacaaaaaaaatgcaaactatggggcttgaacccacgaccacatggttagaagccttgtgctctaccaagtgggctagatggactttgtgctcatgtctgcaacaaatattttaataacacaaccgagctcggcgccaagatctgtggcgccgagctcggttccacgtcgacgccacgcgtctgggttgtgccaacgcaacacgacctcggcaccatagcctatggcgccgagctgtgttagctcggcgccataggctatggcgccgagcaaaggatccaaaactgcatttaaaatttttttaggtctaagcgtgattttacttctgtttaagggctaaaatacaaaaaaaaaatcggacgatacgacgactacatacagatacaatacagcaaaatgcgaggtgaaaggacgtatatatcacgcgtctgccgtccggggagggctcctaatcacgcgcacccacacatgcaccctggccccacgtgccaggcaatttggcactgtttcgtcggtgcagctgctagggcacctgccaaactcagaaggagcgacaagttcttgcacgcagatcgattgcgggaattctcctactggagaataatctctgcggctctgcctggccgagcgatcgatggaccgtctgtctgcgtctgcgtccggcggggccgatgagccgtcgccattgggggc

SEQ ID NO: 4887 - DNA, 1040 bp, Zea mays
  Zm_smallRNAprecursor_376
tgatgccaaaacaattaaggtcaaaaagatatacatttgcaattgaaaatttcttttgaatgattgtatgtagatggctccccctaaatgtgtgcacgattgtgaatccaatgttttgacataatatgtcatgtgagcaacacatttagagatagtgacaaaaaccatactgaatacaaccatccgaggggtgcaagagtgtcataacaggagttgtgatgcacatgactatctctaaatacacatcattttacttcatagcaaagtaatcattacaaactgataggacaaaagatgatggccagaagaccatcatatcactttgaataataacccagcagttttatttcatacaatgataagaggatacaagccacaacagtggccaaaacaaaaataatccaaaagaaaaccgaaagaaccgaaagaaccacaaactagaagttggattttctccccctttttggcaacaagtaccaaaaacgaagagagagacaaggatacatgaatcaatatcctccaggaggaggatatgacggaggatatgatggagggtatgaagtgtagtcagggaagagggtcctcatcacgtcctcctcaaatgtggagtcccgaggtggctcatcagccgcagaaaaaacagatgccgaagatgtacgatgatcaggaggaggtggagggtggtgatggtaaccagagccggatggcctagggtcaccaggaatgggtcccagacccgggtagggaggcggagggtgagaggatgattgacccggatccccatggtagggaggcggggcaaactgctcgcgatcatcaacataggcttcttcttcttcttcgtcgtctgctgacataaatggcaccccataggcctgctggtgccactcattgatctccgggggaggaggatggagaggcacgtcaggcgagcgaggggcaaagggcacacccatagtggaagcttgacaacgaatttgtcgttagtctcccgctgacgccttgccacctcatggacatcagcagaaatgttgcggcac

SEQ ID NO: 4888 - DNA, 1041 bp, Zea mays
  Zm_smallRNAprecursor_377
ggaaaacacggaagcaacatgacgcgtctaaatatcatctcgggttaaccatccataataatggcaaaaaaaagatgccgggggaggaagcctctcatggttgatgaataaccctattccggagctatgtgcacctcctattgcgagctcaaaaaggctcgtcgaatcgaccgaattttttgtattttagcacaaaagcggacacaagaaaatgagttctggcagcaaaaacccaagaaaaaaaatatacctaatgagttatttaaaaaatgagtagtgacaaagataaaaaaaatctaggcgagaaataaatttgagcggacacaccagcgacataaacaaaagaaaaacaaataaaaatgcaaactatggggcttgaacccacaaccacaaagttagaagccttgtgctctaccaagtgggctaactgggctttgtgctcatgtttgcaacaaatattttaataacacaaccgagctcggcgccaagatctgtggcgccgagctcggttccacgtcgacgccacgcgtccgtgttgtgccaacgcaacacgacctcggcgccatagcctatggcgccgagctgtgttacttcggcgccataggctatgtcgccgagcaaagggttaaaaatgacattaaatttttttaagatctaaacgtgaattttttttccgaaaaatggctaaaatacaaaaaattcggtttagccgacgcctgcgtcgtccactactccaacgtgtccttcttctccttcgccgacctgaacgtggcgttctacgtttggatcgacgcctacgttaccgacatggccagcatgaacgccacgcggtggagcctgatgacccggctcgcggaggaggctgccggcaacggcaactcgctgcgtctagcgaacgggaccttgaagcgtacatggattcgcagggcagctcacacgtggtgtacgggctggcacagtgcaccagggacctcaccgccaacgagtgcgccaggtgcctcgccaagttcgtcaacgagctgtcgatcgaactcgcgcccg

SEQ ID NO: 4889 - DNA, 1040 bp, Zea mays
  Zm_smallRNAprecursor_378
gaaaacacggaagcaacatgacgcgtctaaatatcatctcgggttaaccatccataataatggcaaaaaaaagatgccgggggaggaagcctctcatggttgatgaataaccctattccggagctatgtgcacctcctattgcgagctcaaaaaggctcgtcgaatcgaccgaattttttgtattttagcacaaaagcggacacaagaaaatgagttctggcagcaaaaacccaagaaaaaaaatatacctaatgagttatttaaaaaatgagtagtgacaaagataaaaaaaatctaggcgagaaataaatttgagcggacacaccagcgacataaacaaaagaaaaacaaataaaaatgcaaactatggggcttgaacccacaaccacaaagttagaagccttgtgctctaccaagtgggctaactgggctttgtgctcatgtttgcaacaaatattttaataacacaaccgagctcggcgccaagatctgtggcgccgagctcggttccacgtcgacgccacgcgtccgtgttgtgccaacgcaacacgacctcggcgccatagcctatggcgccgagctgtgttacttcggcgccataggctatgtcgccgagcaaagggttaaaaatgacattaaatttttttaagatctaaacgtgaattttttttccgaaaaatggctaaaatacaaaaaattcggtttagccgacgcctgcgtcgtccactactccaacgtgtccttcttctccttcgccgacctgaacgtggcgttctacgtttggatcgacgcctacgttaccgacatggccagcatgaacgccacgcggtggagcctgatgacccggctcgcggaggaggctgccggcaacggcaactcgctgcgtctagcgaacgggaccttgaagcgtacatggattcgcagggcagctcacacgtggtgtacgggctggcacagtgcaccagggacctcaccgccaacgagtgcgccaggtgcctcgccaagttcgtcaacgagctgtcgatcgaactcgcgcccg

SEQ ID NO: 4890 - DNA, 1086 bp, Zea mays
  Zm_smallRNAprecursor_379
aacatagaaactgtctaacagcaacattacactcttgaagagtagtgcaggctaacaacttctaccatttccatttcagcttacaacaaaaggcttctcaacctatgactgctcagttcaaaccttttaagtacgacaaagtgaatacaagcgacaatgggcacatcaatggatggcaaagccaccccaccacaagtgtagcttgtccagatgtgacacatgaccacacgcacatcagtttgaaagatgtcaatgcctaggtgatagacaggtcacaaaaaataggaagcacctgtcacggtaggaaggcatcaagcacaaagcaaacaggagaactaagcctagtatagctagggctaccaacttttttggattttagccctttttgggttttttttcacaactatgccctttgcagtttcatttcaaaaaatagaccccaacctcggcgccatcatcattggcgccgaggtaacgcacagcgacgccagtaccattggcgccaacttttcctacgtggcagccgatgtggcaagtcccagggggtcggcgccatagatcttggcgccgatccacatcgtctgccacgtaggaaaagttggcgccaattatgtcgacgccactatgcgttacctcggcgccaatgatgatggcgccgagtttgaggtccattttttgaaatgaaactgcaaagggcataattgtgcaaaaaaaccaaaagggctaaaatgcaaaaaagttgggctagggctacaaagtgcaggtgctgctgtgctgcaacctgtctatccaggatgtccgttgttcagcttggtcaggtcctaaaactcaatcaacaaaactctatattgttttctatgaggtgcggaattaccgcttccaatgtgttgagaaaaataagttacaacaccagtacaccctacatgggacaccaaaattacaatgtacaggaaccaatggcaaatgaatggttcctaagctatgaaatgcctatagcaatatagccttagcctcgtataccttcagctccaaccctctgctcactccatgctaggctccagttcaaataagttgatcggttaggtt

SEQ ID NO: 4891 - DNA, 1038 bp, Zea mays
  Zm_smallRNAprecursor_380
atggtatcccaaaggctcccttttcgatttacttggctattctgactcagattatgccggttgcaaagtagatcgaaaaagcactactgggacttgccaattccttgggcgatccttagtatcatggagttccaagaaacaaaattgtgttgcactttccactgcagaagctgagtacatagcagctggggcatgttgtgcacagttgttatggatgaagcaaacccttcgagattttggttgtgagtttaacaaaattccacttttgtgtgacaatgagagtgccataaaacttgcaaacaaccctgtgcaacactctagaactaaacatattgacatcagacaccatttcttgagagaccacgaagccaaaggagatatcgaattgtttcatgtgagcaccgaaaatcaactagccgatatcttcacagaacccctcgatgagactaggttttgctttcttaggagtgaattaaatatcttggattctcgtaacttaacttgaaaacggtcacaaaaattgtttgattcactgtttttgattgatagttttaaagctatgtgatgatctttcaaaaatttggtgaaaatgttaaaatttgaatgcattttagtgctaagatttttttttgggctcaactggcttgaccagctgaactttctagttcagctggaggaagccagctgaacttagcagttgaacttcagctcagctgtttttaaccagtttttaccaggaccatcctggttaaaaccggttgaaccggcatagtggaccggttgaaccggtctctgaccggcctgtccgcgcaggtctgtcacctacactttttttagtcgcgcagcacctttttgaccggtcgcaggtctgtcacctgcacttttttcagtcgcgctgcaccttttcttttgtctcgcagcactttttcttgaccggtcgcttcctcgtgcagattttttttctctgtcctgtcacttcccctggcgcgcagataaagtttttttcttttttgctgccgctcagcgcgccattttttt

SEQ ID NO: 4892 - DNA, 1171 bp, Zea mays
  Zm_smallRNAprecursor_381
ttggacgtttctgctctgcccgcgcactagccatgcatgcgtgtcaggggcgcaaatttttcctgaccagtcgctgtgtcacccgcgcagcaagaaatttgaatttttttggcatcttccctctgctgtttctggttctctgaccacactggtcagaacgagctgaactggcccatgggggcggttgaactggtcctgaggaccagctcaactgcctatatatacttgactctcctcttctcttctcccacttcattctctctcgccttagtcgcttcacaacctttagagcctctccttcacacacttcaaccggttcgcagtttcaccaccttttcaatcatgtgcgtcgtcgcaatccctctgtgattgagtttagcagcgacttcgacgagattcaggaggaatctcctgtcccctctcctccgcctcgtcgctccctctctaagagaggacgtggctctggtcggatggatggcgagggctcttccatgccctcgcagccgactcgcgggagacgccaaaaggttggcgcctctcgtcctcgtcgtagcacgtcttcctctaggtatgctccctgccaggaggaggatggggctttcgacgacttcgtcgaccttccggcgcctgatgctctctacgtcaccggactgcacatgcatccggcgaacgtcagccgcggtccgcatgaatctcccgtcgacttcactcagaagagaatagacacccttcagcgtctgaggtttaccaaccctactctcactcctcgtcatcctggtgtccaggaccctcggttctggaatcttttccaggctgacttctacaattctgtcattctttccaagaaacacccagtcgtccgacatagatttattgactgggagggttgtgagaatatgggagatgctgacatgtcgtcagctctcgtaaacttagagagaaaggggttacggaacattatgaccatggaatacccctggaacgatgaggtggtagctcagttctatgccaccctctggataaagaaagtagatgaggaagccgatgggtatgattacccagtcatgtatttcttcatccagggtaactggcacaaagtcagttatcgtcgttttgcccacattctgggcttctctgatgcagatatacagggcagcaacatgcgagtgca

SEQ ID NO: 4893 - DNA, 1058 bp, Zea mays
  Zm_smallRNAprecursor_382
acacccttcagcgtctgaggtttaccaaccctactctcactcctcgtcatcctggtgtccaggaccctcggttctggaatcttttccaggctgacttctacaattctgtcattctttccaagaaacacccagtcgtccgacatagatttattgactgggagggttgtgagaatatgggagatgctgacatgtcgtcagctctcgtaaacttagagagaaaggggttacggaacattatgaccatggaatacccctggaacgatgaggtggtagctcagttctatgccaccctctggataaagaaagtagatgaggaagccgatgggtatgattacccagtcatgtatttcttcatccagggtaactggcacaaagtcagttatcgtcgttttgcccacattctgggcttctctgatgcagatatacagggcagcaacatgcgagtgcatgacattcggctgcccatgcgggaagagacggaattcattcatgtctctactgagcgggagttctggacaaccgctaacatgcataggtactacaggtaccttaattctttgtcccggatgaccgttctcccgaagggcggtaatcaaatgaacgtccttggggagagtcgagtcttcctcctcctccttgctccaaacagtctcgcccgcatcaatgtgtttgacatgatctgggaagagatcgtctgtgcttcctggtctcctcacagagggtgtcttcatgcaccctttatcatgaagatgatcgaagtggtcacccagacccacttcgaaaaactcgtcaaacactcccgctacgtaccctactgggttgattcctccaacccagctgctcgtacgaagcgggctctctcacggtctggaggccctgcctcctccactgagccacctcgccagccaccccatcatccatcctcctctccccccgctgctgcctcgcgtccctctcttggccgcggctctcccatgccacgtgctcgtggtcgtggtcgaggtcgtggccgcgggatgggtgctcgcttggtccatgggcttgcggcatttttctcc

SEQ ID NO: 4894 - DNA, 1141 bp, Zea mays
  Zm_smallRNAprecursor_383
acacccttcagcgtctgaggtttaccaaccctactctcactcctcgtcatcctggtgtccaggaccctcggttctggaatcttttccaggctgacttctacaattctgtcattctttccaagaaacacccagtcgtccgacatagatttattgactgggagggttgtgagaatatgggagatgctgacatgtcgtcagctctcgtaaacttagagagaaaggggttacggaacattatgaccatggaatacccctggaacgatgaggtggtagctcagttctatgccaccctctggataaagaaagtagatgaggaagccgatgggtatgattacccagtcatgtatttcttcatccagggtaactggcacaaagtcagttatcgtcgttttgcccacattctgggcttctctgatgcagatatacagggcagcaacatgcgagtgcatgacattcggctgcccatgcgggaagagacggaattcattcatgtctctactgagcgggagttctggacaaccgctaacatgcataggtactacaggtaccttaattctttgtcccggatgaccgttctcccgaagggcggtaatcaaatgaacgtccttggggagagtcgagtcttcctcctcctccttgctccaaacagtctcgcccgcatcaatgtgtttgacatgatctgggaagagatcgtctgtgcttcctggtctcctcacagagggtgtcttcatgcaccctttatcatgaagatgatcgaagtggtcacccagacccacttcgaaaaactcgtcaaacactcccgctacgtaccctactgggttgattcctccaacccagctgctcgtacgaagcgggctctctcacggtctggaggccctgcctcctccactgagccacctcgccagccaccccatcatccatcctcctctccccccgctgctgcctcgcgtccctctcttggccgcggctctcccatgccacgtgctcgtggtcgtggtcgaggtcgtggccgcgggatgggtgctcgcttggtccatgggcttgcggcatttttctccatgtgccgcaacatttctgctgatgtccatgaggtggcacggcgtcagcgggagactgacgacaatcttcgtcgtcaagcttc

SEQ ID NO: 4895 - DNA, 1057 bp, Zea mays
  Zm_smallRNAprecursor_384
cacccttcagcgtctgaggtttaccaaccctactctcactcctcgtcatcctggtgtccaggaccctcggttctggaatcttttccaggctgacttctacaattctgtcattctttccaagaaacacccagtcgtccgacatagatttattgactgggagggttgtgagaatatgggagatgctgacatgtcgtcagctctcgtaaacttagagagaaaggggttacggaacattatgaccatggaatacccctggaacgatgaggtggtagctcagttctatgccaccctctggataaagaaagtagatgaggaagccgatgggtatgattacccagtcatgtatttcttcatccagggtaactggcacaaagtcagttatcgtcgttttgcccacattctgggcttctctgatgcagatatacagggcagcaacatgcgagtgcatgacattcggctgcccatgcgggaagagacggaattcattcatgtctctactgagcgggagttctggacaaccgctaacatgcataggtactacaggtaccttaattctttgtcccggatgaccgttctcccgaagggcggtaatcaaatgaacgtccttggggagagtcgagtcttcctcctcctccttgctccaaacagtctcgcccgcatcaatgtgtttgacatgatctgggaagagatcgtctgtgcttcctggtctcctcacagagggtgtcttcatgcaccctttatcatgaagatgatcgaagtggtcacccagacccacttcgaaaaactcgtcaaacactcccgctacgtaccctactgggttgattcctccaacccagctgctcgtacgaagcgggctctctcacggtctggaggccctgcctcctccactgagccacctcgccagccaccccatcatccatcctcctctccccccgctgctgcctcgcgtccctctcttggccgcggctctcccatgccacgtgctcgtggtcgtggtcgaggtcgtggccgcgggatgggtgctcgcttggtccatgggcttgcggcatttttctcc

SEQ ID NO: 4896 - DNA, 1058 bp, Zea mays
  Zm_smallRNAprecursor_385
cacccttcagcgtctgaggtttaccaaccctactctcactcctcgtcatcctggtgtccaggaccctcggttctggaatcttttccaggctgacttctacaattctgtcattctttccaagaaacacccagtcgtccgacatagatttattgactgggagggttgtgagaatatgggagatgctgacatgtcgtcagctctcgtaaacttagagagaaaggggttacggaacattatgaccatggaatacccctggaacgatgaggtggtagctcagttctatgccaccctctggataaagaaagtagatgaggaagccgatgggtatgattacccagtcatgtatttcttcatccagggtaactggcacaaagtcagttatcgtcgttttgcccacattctgggcttctctgatgcagatatacagggcagcaacatgcgagtgcatgacattcggctgcccatgcgggaagagacggaattcattcatgtctctactgagcgggagttctggacaaccgctaacatgcataggtactacaggtaccttaattctttgtcccggatgaccgttctcccgaagggcggtaatcaaatgaacgtccttggggagagtcgagtcttcctcctcctccttgctccaaacagtctcgcccgcatcaatgtgtttgacatgatctgggaagagatcgtctgtgcttcctggtctcctcacagagggtgtcttcatgcaccctttatcatgaagatgatcgaagtggtcacccagacccacttcgaaaaactcgtcaaacactcccgctacgtaccctactgggttgattcctccaacccagctgctcgtacgaagcgggctctctcacggtctggaggccctgcctcctccactgagccacctcgccagccaccccatcatccatcctcctctccccccgctgctgcctcgcgtccctctcttggccgcggctctcccatgccacgtgctcgtggtcgtggtcgaggtcgtggccgcgggatgggtgctcgcttggtccatgggcttgcggcatttttctcca

SEQ ID NO: 4897 - DNA, 1190 bp, Zea mays
  Zm_smallRNAprecursor_386
ttgattctgaactactggtggtgtaataaatcggtgcgtagcattttccaggcctatgaaaggataaagatttttttgcagttgagccatctgtaagtgcaaaggatcagttgaggcagcatagcgtttaacaaaacagtaccattcactttttttgcaaggcatttgatgttgaaaatatctaaccagattttcatgacgtttttcgcacagccgcaattcataaaaggaatcaagaacagttataacttctctcccaggttccaccacaactaaggaccagtgttgatcaataatgaaaggcacaaaaatctgcaaaaaaataaaaataaaaataaaagaaacaaccaaaatattgatggttatgtcatgcgcctaaatggtataacgggccaagtgggtcaactagcccacatcataagatgcatatacaatttctaaaaagctactgccatatctacaattcctaaacaggtatcatgcatgtaaaatcccaggttgtagcaggtagtaaaaggtttaggtgtatagcaggtaaaatcccaggttcaacttaaaacacatattttaccagcctggaacctagattttactagcatagttgttaccagcctgcaacctagattttactagcatatattttaccagcctggaacacatatcttaccatcttttaccatcctggatctatattttaccatcctgtaactttgattttagcaggtaaaatccaaggctacaggcaggtaaaaggtgtaggtaaaacttgagcgttcaaggaattctaagctaacacctattatatgaaagagccagatttaagaatacaaatagaattaaatagaattggaaaaggtacaaaccgtgtgctttttctctttgtcatagtctttaagttctctttcgagataatcttttctcttaccgagtatttgctcctaggaaaaaaagcatggtgaaattgctaaacaacataaattcattgaaagtagtagtaaaattgctaattggcacttactacagcaagaagtgaaagcataatcctgtcatcccatgatttattccatatgcgaatcagagtttcaatgatcgaagtatgcaagcgaccatatggtttgaaggtcttaacaaatacagcctctgaaatcgtcacatcttcaatatcaactacaagattcttctccatctgt

SEQ ID NO: 4898 - DNA, 1041 bp, Zea mays
  Zm_smallRNAprecursor_387
ttcatgacgtttttcgcacagccgcaattcataaaaggaatcaagaacagttataacttctctcccaggttccaccacaactaaggaccagtgttgatcaataatgaaaggcacaaaaatctgcaaaaaaataaaaataaaaataaaagaaacaaccaaaatattgatggttatgtcatgcgcctaaatggtataacgggccaagtgggtcaactagcccacatcataagatgcatatacaatttctaaaaagctactgccatatctacaattcctaaacaggtatcatgcatgtaaaatcccaggttgtagcaggtagtaaaaggtttaggtgtatagcaggtaaaatcccaggttcaacttaaaacacatattttaccagcctggaacctagattttactagcatagttgttaccagcctgcaacctagattttactagcatatattttaccagcctggaacacatatcttaccatcttttaccatcctggatctatattttaccatcctgtaactttgattttagcaggtaaaatccaaggctacaggcaggtaaaaggtgtaggtaaaacttgagcgttcaaggaattctaagctaacacctattatatgaaagagccagatttaagaatacaaatagaattaaatagaattggaaaaggtacaaaccgtgtgctttttctctttgtcatagtctttaagttctctttcgagataatcttttctcttaccgagtatttgctcctaggaaaaaaagcatggtgaaattgctaaacaacataaattcattgaaagtagtagtaaaattgctaattggcacttactacagcaagaagtgaaagcataatcctgtcatcccatgatttattccatatgcgaatcagagtttcaatgatcgaagtatgcaagcgaccatatggtttgaaggtcttaacaaatacagcctctgaaatcgtcacatcttcaatatcaactacaagattcttctccatctgttgtattctttctttgtctttaatttgggccctgtttttgatct

SEQ ID NO: 4899 - DNA, 1224 bp, Zea mays
  Zm_smallRNAprecursor_388
acccaacgcttaaaacgctcatgactggtccttccactcaaccaattaacgaaaagaagatatcgagggtcaaatttatcaggaccatcgatccactggaaaaagaaacacctctgatgtccctaaaataatggaaagatgcactattacatatctacaaaataatgaacgcgaacaaaattaagtgacaagtcataagctacgtacgtccaaagtgccacaaaggtagtagcagcgagcagccgtgtctggatgttgtgattgatgtacccaagccagtctaccacagtcacagttaggcacggggagttcaggaggaacaggagcatccttactagatacgtccggatataactgtcagggactgccggcccaaatggcccatgccggcccagatagttaaaggaaatactacaaaagcaccgtggaggttaccaggaagggcatcgaagaattattcagagaacacatctccttctccatttttgagagtgaggtgcacttataagggcgggcctccctcctctctcagcctaggttttgagagtgaggtgcccgtctgaataggctgcgcacgagcgcatgaacgtccgacgctggcgatggtgggctttaggcggactggcccagtgggtgcgttacaattggtatcggagcctacattgccgctgctgcctgggagagctttgggcctcttaggggggtgggatgtaagggaccggtatgcacgccctgggttagtaccacctcgcctagctaagggggccgtgttgcacttataagggcgggcctccctcctctctcagcctaggttttgagagtgaggtgcccgtctgaataggctgcgcacgagcgcatgaacgtccgatgctggcgatggtgggctttaggcggactggcccagtgggtgcgttacaattggtatcggagcctacattgccgctgctgcctgggagagctttgggcctcttaggggggtgggatgtaagggaccggtatgcacgccctgggttagtaccacctcgcctagctaagggggccgtgttgcacttataagggcgggcctccctcctctctcagcctaggttttgagagcgaggtgcccgtctgaataggctgcgcacgagcgcatgaacgtccgacgctggcgatggtgggctttaggcggactggcccagtgggtgcgttacaattggtatcggagcctacattgccgctgctgcc

SEQ ID NO: 4900 - DNA, 1052 bp, Zea mays
  Zm_smallRNAprecursor_389
aggtagtagcagcgagcagccgtgtctggatgttgtgattgatgtacccaagccagtctaccacagtcacagttaggcacggggagttcaggaggaacaggagcatccttactagatacgtccggatataactgtcagggactgccggcccaaatggcccatgccggcccagatagttaaaggaaatactacaaaagcaccgtggaggttaccaggaagggcatcgaagaattattcagagaacacatctccttctccatttttgagagtgaggtgcacttataagggcgggcctccctcctctctcagcctaggttttgagagtgaggtgcccgtctgaataggctgcgcacgagcgcatgaacgtccgacgctggcgatggtgggctttaggcggactggcccagtgggtgcgttacaattggtatcggagcctacattgccgctgctgcctgggagagctttgggcctcttaggggggtgggatgtaagggaccggtatgcacgccctgggttagtaccacctcgcctagctaagggggccgtgttgcacttataagggcgggcctccctcctctctcagcctaggttttgagagtgaggtgcccgtctgaataggctgcgcacgagcgcatgaacgtccgatgctggcgatggtgggctttaggcggactggcccagtgggtgcgttacaattggtatcggagcctacattgccgctgctgcctgggagagctttgggcctcttaggggggtgggatgtaagggaccggtatgcacgccctgggttagtaccacctcgcctagctaagggggccgtgttgcacttataagggcgggcctccctcctctctcagcctaggttttgagagcgaggtgcccgtctgaataggctgcgcacgagcgcatgaacgtccgacgctggcgatggtgggctttaggcggactggcccagtgggtgcgttacaattggtatcggagcctacattgccgctgctgcctgggagagctttgggcctcttaggggggtgggatgtgagagaccggtatgc

SEQ ID NO: 4901 - DNA, 1224 bp, Zea mays
  Zm_smallRNAprecursor_390
gccagtctaccacagtcacagttaggcacggggagttcaggaggaacaggagcatccttactagatacgtccggatataactgtcagggactgccggcccaaatggcccatgccggcccagatagttaaaggaaatactacaaaagcaccgtggaggttaccaggaagggcatcgaagaattattcagagaacacatctccttctccatttttgagagtgaggtgcacttataagggcgggcctccctcctctctcagcctaggttttgagagtgaggtgcccgtctgaataggctgcgcacgagcgcatgaacgtccgacgctggcgatggtgggctttaggcggactggcccagtgggtgcgttacaattggtatcggagcctacattgccgctgctgcctgggagagctttgggcctcttaggggggtgggatgtaagggaccggtatgcacgccctgggttagtaccacctcgcctagctaagggggccgtgttgcacttataagggcgggcctccctcctctctcagcctaggttttgagagtgaggtgcccgtctgaataggctgcgcacgagcgcatgaacgtccgatgctggcgatggtgggctttaggcggactggcccagtgggtgcgttacaattggtatcggagcctacattgccgctgctgcctgggagagctttgggcctcttaggggggtgggatgtaagggaccggtatgcacgccctgggttagtaccacctcgcctagctaagggggccgtgttgcacttataagggcgggcctccctcctctctcagcctaggttttgagagcgaggtgcccgtctgaataggctgcgcacgagcgcatgaacgtccgacgctggcgatggtgggctttaggcggactggcccagtgggtgcgttacaattggtatcggagcctacattgccgctgctgcctgggagagctttgggcctcttaggggggtgggatgtgagagaccggtatgcacgccctgggttagtaccacctcgtctagccaagggggccgtgttgcacttataagggcgggcctccctcctctctcagcctaggttttgagagtgaggtgcccgtctgaataggctgcgcacgagcgcatgaacgtccgacgctggcgatggtgggctttaggcggactggcccagtgggtgcgttacaagatgtcagcgtccaacccccggcccagcccac

SEQ ID NO: 4902 - DNA, 1052 bp, Zea mays
  Zm_smallRNAprecursor_391
tgcacttataagggcgggcctccctcctctctcagcctaggttttgagagtgaggtgcccgtctgaataggctgcgcacgagcgcatgaacgtccgacgctggcgatggtgggctttaggcggactggcccagtgggtgcgttacaattggtatcggagcctacattgccgctgctgcctgggagagctttgggcctcttaggggggtgggatgtaagggaccggtatgcacgccctgggttagtaccacctcgcctagctaagggggccgtgttgcacttataagggcgggcctccctcctctctcagcctaggttttgagagtgaggtgcccgtctgaataggctgcgcacgagcgcatgaacgtccgatgctggcgatggtgggctttaggcggactggcccagtgggtgcgttacaattggtatcggagcctacattgccgctgctgcctgggagagctttgggcctcttaggggggtgggatgtaagggaccggtatgcacgccctgggttagtaccacctcgcctagctaagggggccgtgttgcacttataagggcgggcctccctcctctctcagcctaggttttgagagcgaggtgcccgtctgaataggctgcgcacgagcgcatgaacgtccgacgctggcgatggtgggctttaggcggactggcccagtgggtgcgttacaattggtatcggagcctacattgccgctgctgcctgggagagctttgggcctcttaggggggtgggatgtgagagaccggtatgcacgccctgggttagtaccacctcgtctagccaagggggccgtgttgcacttataagggcgggcctccctcctctctcagcctaggttttgagagtgaggtgcccgtctgaataggctgcgcacgagcgcatgaacgtccgacgctggcgatggtgggctttaggcggactggcccagtgggtgcgttacaagatgtcagcgtccaacccccggcccagcccacactcgacagcttcgggcgttcatgcgctcgtgggccggcccagccaagaga

SEQ ID NO: 4903 - DNA, 1224 bp, Zea mays
  Zm_smallRNAprecursor_392
gaggtgcccgtctgaataggctgcgcacgagcgcatgaacgtccgacgctggcgatggtgggctttaggcggactggcccagtgggtgcgttacaattggtatcggagcctacattgccgctgctgcctgggagagctttgggcctcttaggggggtgggatgtaagggaccggtatgcacgccctgggttagtaccacctcgcctagctaagggggccgtgttgcacttataagggcgggcctccctcctctctcagcctaggttttgagagtgaggtgcccgtctgaataggctgcgcacgagcgcatgaacgtccgatgctggcgatggtgggctttaggcggactggcccagtgggtgcgttacaattggtatcggagcctacattgccgctgctgcctgggagagctttgggcctcttaggggggtgggatgtaagggaccggtatgcacgccctgggttagtaccacctcgcctagctaagggggccgtgttgcacttataagggcgggcctccctcctctctcagcctaggttttgagagcgaggtgcccgtctgaataggctgcgcacgagcgcatgaacgtccgacgctggcgatggtgggctttaggcggactggcccagtgggtgcgttacaattggtatcggagcctacattgccgctgctgcctgggagagctttgggcctcttaggggggtgggatgtgagagaccggtatgcacgccctgggttagtaccacctcgtctagccaagggggccgtgttgcacttataagggcgggcctccctcctctctcagcctaggttttgagagtgaggtgcccgtctgaataggctgcgcacgagcgcatgaacgtccgacgctggcgatggtgggctttaggcggactggcccagtgggtgcgttacaagatgtcagcgtccaacccccggcccagcccacactcgacagcttcgggcgttcatgcgctcgtgggccggcccagccaagagagcccaccactcacatcccaaaagccaggctgatgggaggagggagactctcccttataagctgcccacggcccccttggctagccgatgtgggactaaagccgaggcgctgactaccagcccctgacatcccaccccccttgggaagccccccaagtcaggcatgggccaaaccgggctccgataccagatgtcagcgtccaacccccggcccagcccacact

SEQ ID NO: 4904 - DNA, 1052 bp, Zea mays
  Zm_smallRNAprecursor_393
tgcacttataagggcgggcctccctcctctctcagcctaggttttgagagtgaggtgcccgtctgaataggctgcgcacgagcgcatgaacgtccgatgctggcgatggtgggctttaggcggactggcccagtgggtgcgttacaattggtatcggagcctacattgccgctgctgcctgggagagctttgggcctcttaggggggtgggatgtaagggaccggtatgcacgccctgggttagtaccacctcgcctagctaagggggccgtgttgcacttataagggcgggcctccctcctctctcagcctaggttttgagagcgaggtgcccgtctgaataggctgcgcacgagcgcatgaacgtccgacgctggcgatggtgggctttaggcggactggcccagtgggtgcgttacaattggtatcggagcctacattgccgctgctgcctgggagagctttgggcctcttaggggggtgggatgtgagagaccggtatgcacgccctgggttagtaccacctcgtctagccaagggggccgtgttgcacttataagggcgggcctccctcctctctcagcctaggttttgagagtgaggtgcccgtctgaataggctgcgcacgagcgcatgaacgtccgacgctggcgatggtgggctttaggcggactggcccagtgggtgcgttacaagatgtcagcgtccaacccccggcccagcccacactcgacagcttcgggcgttcatgcgctcgtgggccggcccagccaagagagcccaccactcacatcccaaaagccaggctgatgggaggagggagactctcccttataagctgcccacggcccccttggctagccgatgtgggactaaagccgaggcgctgactaccagcccctgacatcccaccccccttgggaagccccccaagtcaggcatgggccaaaccgggctccgataccagatgtcagcgtccaacccccggcccagcccacactcgacagcttcgggcgttcatgcgctcgtgggccagcccagccaagagagcc

SEQ ID NO: 4905 - DNA, 1041 bp, Zea mays
  Zm_smallRNAprecursor_394
gctgcagctgcaaacaattgctttctccagctcatcctccgttagcacaccgtattgtactcagggctaagctgagagctcctgcctactcaatcatcatttaggacatcatcaactactcgtaattaagtttaggtggaataaaaactcgtcgtagttcaatagccaggtgtaagaagcgcagtgcacgtagcatagataattcaggacgaggaccgacggggacggggccctgcctttccccggccggccgtacgggcacaccaggcacggggggcccttcctgccatccgggccccgcgccccataagccgctgcagggagcgcgcccccaccgggccagcgcgcgcacgttccgaattttttgtattttagcccttaaacagaagtaaaatcacgtttagatctaaaaaaattttaaatgcagttttggaccctttgctcggcgccatagcctatggcgccgagctaacacagctcggcgccataggctatggcgccgaggtcgtgttgcgttggcacaacccagacgcgtggcgtcgacgtggaaccgagctcggcgccacagatcttggcgccgagctcggttgtgttattaaaatagttgttgcaaacatgagcacaaagcccatctagcccacttggtagagcacaaagcttctaaccatgtggtcgtgggttcaaaccccatagtttgcatttttttgttttttttttgtttatgtcgatggtgtgtccgcttaaatttatttctcgcctagatttttttacatcaggcaacttggcttaattaattgggctctacccgttactggccaaatggctactactgtagtaaggtggctacttgacgtgtcttttttttttaaaaaaaaaggagggggaaaaacttttttgttaatataataggaaaagaagaagaatgaggaggaggaaaaagacgtatcgtcactcgagtctatatatgatctcgttcgacggtcaaatagacaaattgttggcaaaagtgctatgcatataaatgttcggctgacgtacctt

SEQ ID NO: 4906 - DNA, 1041 bp, Zea mays; identical to SEQ ID NO: 4905
  Zm_smallRNAprecursor_395

SEQ ID NO: 4907 - DNA, 1042 bp, Zea mays
  Zm_smallRNAprecursor_396
gctgcagctgcaaacaattgctttctccagctcatcctccgttagcacaccgtattgtactcagggctaagctgagagctcctgcctactcaatcatcatttaggacatcatcaactactcgtaattaagtttaggtggaataaaaactcgtcgtagttcaatagccaggtgtaagaagcgcagtgcacgtagcatagataattcaggacgaggaccgacggggacggggccctgcctttccccggccggccgtacgggcacaccaggcacggggggcccttcctgccatccgggccccgcgccccataagccgctgcagggagcgcgcccccaccgggccagcgcgcgcacgttccgaattttttgtattttagcccttaaacagaagtaaaatcacgtttagatctaaaaaaattttaaatgcagttttggaccctttgctcggcgccatagcctatggcgccgagctaacacagctcggcgccataggctatggcgccgaggtcgtgttgcgttggcacaacccagacgcgtggcgtcgacgtggaaccgagctcggcgccacagatcttggcgccgagctcggttgtgttattaaaatagttgttgcaaacatgagcacaaagcccatctagcccacttggtagagcacaaagcttctaaccatgtggtcgtgggttcaaaccccatagtttgcatttttttgttttttttttgtttatgtcgatggtgtgtccgcttaaatttatttctcgcctagatttttttacatcaggcaacttggcttaattaattgggctctacccgttactggccaaatggctactactgtagtaaggtggctacttgacgtgtcttttttttttaaaaaaaaaggagggggaaaaacttttttgttaatataataggaaaagaagaagaatgaggaggaggaaaaagacgtatcgtcactcgagtctatatatgatctcgttcgacggtcaaatagacaaattgttggcaaaagtgctatgcatataaatgttcggctgacgtaccttc

SEQ ID NO: 4908 - DNA, 1042 bp, Zea mays; identical to SEQ ID NO: 4907
  Zm_smallRNAprecursor_397

SEQ ID NO: 4909 - DNA, 1043 bp, Zea mays
  Zm_smallRNAprecursor_398
gctgcagctgcaaacaattgctttctccagctcatcctccgttagcacaccgtattgtactcagggctaagctgagagctcctgcctactcaatcatcatttaggacatcatcaactactcgtaattaagtttaggtggaataaaaactcgtcgtagttcaatagccaggtgtaagaagcgcagtgcacgtagcatagataattcaggacgaggaccgacggggacggggccctgcctttccccggccggccgtacgggcacaccaggcacggggggcccttcctgccatccgggccccgcgccccataagccgctgcagggagcgcgcccccaccgggccagcgcgcgcacgttccgaattttttgtattttagcccttaaacagaagtaaaatcacgtttagatctaaaaaaattttaaatgcagttttggaccctttgctcggcgccatagcctatggcgccgagctaacacagctcggcgccataggctatggcgccgaggtcgtgttgcgttggcacaacccagacgcgtggcgtcgacgtggaaccgagctcggcgccacagatcttggcgccgagctcggttgtgttattaaaatagttgttgcaaacatgagcacaaagcccatctagcccacttggtagagcacaaagcttctaaccatgtggtcgtgggttcaaaccccatagtttgcatttttttgttttttttttgtttatgtcgatggtgtgtccgcttaaatttatttctcgcctagatttttttacatcaggcaacttggcttaattaattgggctctacccgttactggccaaatggctactactgtagtaaggtggctacttgacgtgtcttttttttttaaaaaaaaaggagggggaaaaacttttttgttaatataataggaaaagaagaagaatgaggaggaggaaaaagacgtatcgtcactcgagtctatatatgatctcgttcgacggtcaaatagacaaattgttggcaaaagtgctatgcatataaatgttcggctgacgtaccttcg

SEQ ID NO: 4910 - DNA, 1043 bp, Zea mays; identical to SEQ ID NO: 4909
  Zm_smallRNAprecursor_399

SEQ ID NO: 4911 - DNA, 1137 bp, Zea mays
  Zm_smallRNAprecursor_400
ccgcttcagttgccgcacctggagatgggtctggtcaggacgacacaacacattcgtgggtgaacaatcttttcagcacgcatagtccaaccggaggaggtggcgatggatatgagtgataatgatgtaaaacacttgttgcaacctttcatgtgaaagcctatccgtcgaataatgttcattttggagtttggacaactatgtttatgtaaacacttgttgcaaccatttggaactatgtcgttatgttaaatttgtgaatgtgaatgcttatgtgattatatttgtgaatgtgtatacttatgtgagtatatttgtgaatgtgaatgtgtatatgtgtatgaaatctgttttgtatttgcaaatgtcagattttttaaatttcagatttttgtgcaatttctgaaaaatgttatgtccgacggcttagtgtaggccgtcggacataaggtatatgttatgtccgacggcttaaaaccgtcggacataagctatatgttatgtccgacggctttaaactgtcggacataacagtcgtgggcccaggcggcgggtaaaacggttacgacaccttatctccgacggttcgatggggccgtcggatataatgctatttctgacgcgttatcctcgacggcttaaaaccgtcggagataagttaatgccgtcggacatagcttatctccgacggtctaaatcttatgtccgacggttttagccgtcgaaaatttcttcgtttactgtagtgagaagccggaggcgataggtgctgatgtccgggtgcaacagccgggaccagaccaaggtgcgggatgtggagaggacagagagacgcgccgtgcaatgacgtgcagtctggtgcggcaaataggtgaagctcgaccaaagcaagggtgcggaagtggaggtccaacgttgaggcatgattgatgcacttcactggaaattttgtcgtatgggctgcgcatgcctggctgatggcaggagatgatggttggcgagtaaaagagctggaggtggcagcgccgaggcgtccgcaggctccggtgagtagggattatccctcgctgctcctcaatcggctaaattatgcccctagaatagagttccaacatgttgtttggaatagatggaacc

SEQ ID NO: 4912 - DNA, 1190 bp, Zea mays
  Zm_smallRNAprecursor_401
accagagccggatggcctagagtcaccaggaatgggtcccggacccgggtaaggaggcggagggtgggaggatgattgacccggatccccatggtagggaggcggggcaaactcctcgcgatcatcaacatagacttcttcatcttcatcgtctgcaggcataaaaggcaccccgtaggcctgctggtgccactcgttgatctccgggggaggaggatggagaggcacatcaggcgaacgagggacaaaaggcatgcccatggaggaagcttgacgacgaagattgtcgtcagtctcccgctgacgccgtgccacttcatggacatcagcagaaatgttgcggcacatggagaaaaatgccgcaaacccatggaccaagcgagcacccatcccgcggccacgaccttgaccacgaccacgagcacgtggcatgggagagccgcggccaggagagggacgcgaggcagcagcggggggagaggaggatggatgatggggaggctggcgaggtggctcagaggaggaggcagggcctccagaccgtgagggagcccgcttcgtacgagcagctgggttggaggaatcaacccagtagggtacgtagcgggagtgtttgacgggtttttcgaagtgggtctgggtgaccacttcgatcatcttcatgataaagggtgcatgaagacaccctctgtgaggagaccaggaagcacggacgatctcttcccagatcatgtcaaacacattgatgcgggcgagactatttggagcaaggaggaggaggaagactcgactctccccaaggacgttcatttgattaccgccctttgggagaacggtcatccgggacaaagaattaaggtacctgtagtacctatgcatgttagcggttgtccagaactcccgctcagtggagacatgaatgaattccgtctcttcccgcatgggcagccgaatgtcatgcactcgcatgttgctgccctgaatgtctgcatcagagaagcccagaatatgggcaaaacgacgataactgactttgtaccagttaccctggatgaagaaatacatgactgggtaatcatacccatcggcttcctcatctactttctttatccagagggtggcatagaactgagctaccacctcatcgttccaggggtattccatggtcataatgtttcgtaaccccgttc

SEQ ID NO: 4913 - DNA, 1148 bp, Zea mays
  Zm_smallRNAprecursor_402
tcggcttcctcatctactttctttatccagagggtggcatagaactgagctaccacctcatcgttccaggggtattccatggtcataatgtttcgtaaccccgttctctctaagtttacgagagccgacgacatgtcagcatctcccatattctcacaaccctcccagtcaataaatatatgtgggacgactgggtgttttcttggaaaagaatgacagaattgtagaaagtcagcctggaaaagattccagaacccgagggtccctggacaccaggatgacgaggagtgagagtagggttggtaaacctcagaacgctgaaggggtgtctattcccttctgagtaaagtcgacgggagattcatgcggaccgcggctgacgttcgccggatgcatgtgcagtccggtgacgaagagagcatcaggcgccggaaggtcgacgaagtcgtcgaacgccccatcctcctcctggcagggagcatacccagaggaagacgtgctacgacgaggacgagaggcgccaaccttttggcgtctcccgcgagtcggctgtgaaggcatagaagaaccctcgccatccttccgaccagagccacgtcctctcttagagagggagcgacgaggcggaggagaggggacgggagattcctcctgaatctcgtcggagtcgctgctaaactcaaccacagaggggttgcgacgacgcaccatgattgaaaaggtggtgaaactgtgaaccgtttgaagtgtgtaaaggagaggctctaaaggttgtgaagcgactaaggcgagagagaatgaagtgggagaagagaagaggagagtcaagtatatataggcagttgagctggtcctcaggaccagttcaaccgcccccatgggccagttcagctggttctgactagtgtggtcagagaaccagaaacagcagagggaagatgcaaaaaaaatcaaatttgcgcgcagctgctggaagcgactggacaggaaaaatgggtgcccctgacacgcatgcagggctagtgcgcgtgcagagcagaaatgtccaagaaaaatctgcgcgtgctcagcggaggagaagtgaccggacacagcatgcgcacccagaaaaaaagattctgcatgcacacccctgctgaccggactcc

SEQ ID NO: 4914 - DNA, 1043 bp, Zea mays
  Zm_smallRNAprecursor_403
aatcactacctgatcgagcaaagacgcatcgcggcgcgcgccgaggcaggtcattggctggtcgatctggcagatgatgcccaccccctctcctccgcctctttctccttgcgtcttgccttgtcctgctgtgcctgcgatttgtgtctgcattattttgcccccgtcgtgcgctgtgcctggtttcttgatgaggcggcttcggcgagacgccgacgtctcaaccattcctcttaatctttgcgattattattttctttctcggcttacgtacctgcgtccattcgtattgtatcgtcgttgccgcgcgcgcgcctattaattcagctgctgcttgcctcgcccgcccgcccgcccgcccgctcgctccattgccagccaagttaattacgtgatgagctgggagctcgggtgtctagtcgtccatggcgccgatcggtgcagaaggcttgcgagattgagaggtggtggcgttgaactggttggctgagagagtgcgatgttggcacggttcaatcaaatcgccggccgggttgacttgttgattgagccgtgccaatatcacaaccttctctagcctaggcggccgggctacagttttggatgctactatgcttcctcaaggtatacatggttttctgtgttgttcttgtcttcctgctataaaaaaagcctttgaaatttacttacgctttagtttttcatcgcgtgatgtatttcctttgtttgaaattataacttttttttgggtacatgtgtgtccagatatgcgttagattatatctagatacatatagcaaaatagatacaccaaaaatgtaaaacgaatttataatgtttagattggatagagcactatatattctttatttctagatatatattgtaaaatagatataaaaaataattcaactgttctctatttcttggaaacaaatacagtaccagcgggctaccaggccgcatacccatccacatccacatccaggcatccagcatccagtcgtcgtatagtggcccgcaggccgcagccaagcctgcgg

SEQ ID NO: 4915 - DNA, 1046 bp, Zea mays
  Zm_smallRNAprecursor_404
aatcactacctgatcgagcaaagacgcatcgcggcgcgcgccgaggcaggtcattggctggtcgatctggcagatgatgcccaccccctctcctccgcctctttctccttgcgtcttgccttgtcctgctgtgcctgcgatttgtgtctgcattattttgcccccgtcgtgcgctgtgcctggtttcttgatgaggcggcttcggcgagacgccgacgtctcaaccattcctcttaatctttgcgattattattttctttctcggcttacgtacctgcgtccattcgtattgtatcgtcgttgccgcgcgcgcgcctattaattcagctgctgcttgcctcgcccgcccgcccgcccgcccgctcgctccattgccagccaagttaattacgtgatgagctgggagctcgggtgtctagtcgtccatggcgccgatcggtgcagaaggcttgcgagattgagaggtggtggcgttgaactggttggctgagagagtgcgatgttggcacggttcaatcaaatcgccggccgggttgacttgttgattgagccgtgccaatatcacaaccttctctagcctaggcggccgggctacagttttggatgctactatgcttcctcaaggtatacatggttttctgtgttgttcttgtcttcctgctataaaaaaagcctttgaaatttacttacgctttagtttttcatcgcgtgatgtatttcctttgtttgaaattataacttttttttgggtacatgtgtgtccagatatgcgttagattatatctagatacatatagcaaaatagatacaccaaaaatgtaaaacgaatttataatgtttagattggatagagcactatatattctttatttctagatatatattgtaaaatagatataaaaaataattcaactgttctctatttcttggaaacaaatacagtaccagcgggctaccaggccgcatacccatccacatccacatccaggcatccagcatccagtcgtcgtatagtggcccgcaggccgcagccaagcctgcggcgg

SEQ ID NO: 4916 - DNA, 1171 bp, Zea mays
  Zm_smallRNAprecursor_405
tacttgcagactgcagcgtcctgtcttttcccccgcgcagttttttttttttttttgcatgcagtctgctgcgtcaggtcacttccccctgcgctgcgcgcaaattagaattttttcctctgttgtttctggttctctgaccacactggtcagtaccagctgagctggcccatgggggcggttgaactggttctgaggaccagctcaactgcctatatatacttcactcttcctcatctcttttcccacttcattcactctcgccttggtcgcttcacaacctttagagcctttccttcacacacttcaaccgcttcacagtttcaccaccgttttcaatcatggtgcgtcgccgcaacccctctgtggttgagtttagcagcgactccgacgagattcaggaggaatctcccatcccctctcctccgcctcgtcgctccctctctaagagaggacgtggctctggtcggatgcctggcgagggctcttccttgccctcgcagccgactcgcgggagacgccaaaaggttggcgcctctcgtcctcgtcgtagcacgtcttcctcagggtatgctccctgccaagaggaggatggggctttcgacgacttcgtcgaccttccggcgcctgatgctctctacgtcaccggactgcacatgcatccggcgaacgtcagccgcggtccgcatgaatctcccatcgacttcactcagaagggaatagaaacccttcagcgtctgaggttttccaaccctactctcactcctcgtcatcctggtgtccaggaccctcggttctggaatcttttccaggctgacttctacaattctgtcattcttaccaagaaacacccagtcgtccgacatagatttattgactgggagggttgtgagaatatgggagatgttgacatgtcgtcagctctcgttcactgagagagaaaggggttacgtaacattatgaccatggaatacccctggaacgatgaggtggtagctcagttctatgccaccctctggataaagaaagtagatgaggaagccgatgggtatgagtacccagtcatgtatttctttatccagggtaactggcacaaagtcagttatcgtcgttttgcccatattctgggcttctctgatacagacattcagggcagcaacatgcgagtgca

SEQ ID NO: 4917 - DNA, 1058 bp, Zea mays
  Zm_smallRNAprecursor_406
aaacccttcagcgtctgaggttttccaaccctactctcactcctcgtcatcctggtgtccaggaccctcggttctggaatcttttccaggctgacttctacaattctgtcattcttaccaagaaacacccagtcgtccgacatagatttattgactgggagggttgtgagaatatgggagatgttgacatgtcgtcagctctcgttcactgagagagaaaggggttacgtaacattatgaccatggaatacccctggaacgatgaggtggtagctcagttctatgccaccctctggataaagaaagtagatgaggaagccgatgggtatgagtacccagtcatgtatttctttatccagggtaactggcacaaagtcagttatcgtcgttttgcccatattctgggcttctctgatacagacattcagggcagcaacatgcgagtgcatggcattcggctgcccatgcgggaagagacggaattcattcatgtctctactgagcgggagttctggacaaccgctaacatgcataggtactacaggtaccttaattccttgtcccggatgaccgttctcccaaagggcggtaatcaaatgaacgtccttggggagagtcgagtcttcctcctcctccttgctcccaacagtctcgcccgcatcaatgtgtttgacatgatctgggaagagatcgtccgtgcttcctggtctcctctcagagggtgtcttcatgcaccctttatcatgaagttgatcgaagtggtcacccagacccacttcgaaaaacctgtcaaacactcccgctacgtaccctactgggttgattcctccaacccagctgctcgtacaaagcgggttccctcacggtctggaggccctgcctcctcctctgagccacctcgccagcctcctcaccatccttcctcctctccccccgctgctgcctcgcgtccctctcctggccgcggatctcccatgccacgtgctagtggtcgtggtcgaggtcgtggccgcgggatgggtgctcgcttgctccatgggcttgcggcatttttctcc

SEQ ID NO: 4918 - DNA, 1057 bp, Zea mays
  Zm_smallRNAprecursor_407
aacccttcagcgtctgaggttttccaaccctactctcactcctcgtcatcctggtgtccaggaccctcggttctggaatcttttccaggctgacttctacaattctgtcattcttaccaagaaacacccagtcgtccgacatagatttattgactgggagggttgtgagaatatgggagatgttgacatgtcgtcagctctcgttcactgagagagaaaggggttacgtaacattatgaccatggaatacccctggaacgatgaggtggtagctcagttctatgccaccctctggataaagaaagtagatgaggaagccgatgggtatgagtacccagtcatgtatttctttatccagggtaactggcacaaagtcagttatcgtcgttttgcccatattctgggcttctctgatacagacattcagggcagcaacatgcgagtgcatggcattcggctgcccatgcgggaagagacggaattcattcatgtctctactgagcgggagttctggacaaccgctaacatgcataggtactacaggtaccttaattccttgtcccggatgaccgttctcccaaagggcggtaatcaaatgaacgtccttggggagagtcgagtcttcctcctcctccttgctcccaacagtctcgcccgcatcaatgtgtttgacatgatctgggaagagatcgtccgtgcttcctggtctcctctcagagggtgtcttcatgcaccctttatcatgaagttgatcgaagtggtcacccagacccacttcgaaaaacctgtcaaacactcccgctacgtaccctactgggttgattcctccaacccagctgctcgtacaaagcgggttccctcacggtctggaggccctgcctcctcctctgagccacctcgccagcctcctcaccatccttcctcctctccccccgctgctgcctcgcgtccctctcctggccgcggatctcccatgccacgtgctagtggtcgtggtcgaggtcgtggccgcgggatgggtgctcgcttgctccatgggcttgcggcatttttctcc

SEQ ID NO: 4919 - DNA, 1058 bp, Zea mays
  Zm_smallRNAprecursor_408
aacccttcagcgtctgaggttttccaaccctactctcactcctcgtcatcctggtgtccaggaccctcggttctggaatcttttccaggctgacttctacaattctgtcattcttaccaagaaacacccagtcgtccgacatagatttattgactgggagggttgtgagaatatgggagatgttgacatgtcgtcagctctcgttcactgagagagaaaggggttacgtaacattatgaccatggaatacccctggaacgatgaggtggtagctcagttctatgccaccctctggataaagaaagtagatgaggaagccgatgggtatgagtacccagtcatgtatttctttatccagggtaactggcacaaagtcagttatcgtcgttttgcccatattctgggcttctctgatacagacattcagggcagcaacatgcgagtgcatggcattcggctgcccatgcgggaagagacggaattcattcatgtctctactgagcgggagttctggacaaccgctaacatgcataggtactacaggtaccttaattccttgtcccggatgaccgttctcccaaagggcggtaatcaaatgaacgtccttggggagagtcgagtcttcctcctcctccttgctcccaacagtctcgcccgcatcaatgtgtttgacatgatctgggaagagatcgtccgtgcttcctggtctcctctcagagggtgtcttcatgcaccctttatcatgaagttgatcgaagtggtcacccagacccacttcgaaaaacctgtcaaacactcccgctacgtaccctactgggttgattcctccaacccagctgctcgtacaaagcgggttccctcacggtctggaggccctgcctcctcctctgagccacctcgccagcctcctcaccatccttcctcctctccccccgctgctgcctcgcgtccctctcctggccgcggatctcccatgccacgtgctagtggtcgtggtcgaggtcgtggccgcgggatgggtgctcgcttgctccatgggcttgcggcatttttctccg

SEQ ID NO: 4920 - DNA, 1165 bp, Zea mays
  Zm_smallRNAprecursor_409
gtagagcacaaactaggatgcgtaaaatgagcattcagccttttaaactcacgaatttctctccttcgtaggtcaatatgtgcatcgccatatgctatctgctgtaaaactgtctcaggtagatagggtaaaataggggactggaactgtagattacactttttgtatagtttgaaatagatgatacaacaggagatatgctgtctgcatgcagtggttcgtgtaaaatatgggacgtagaattgtagaaactgtagatgacactatattatgtgcattcacatctgagtactgctggagcgcatcacatatcgagggcttttgctgttctacccattgaggcgctgtcgcaattttgtccggttttactttacggacacgaatccatcccagtcccaggtcttcgtggagtactccactgtcccaaaaggacttattgtatgaatgaatggatataaggtactccaccttaataagggggtgtttggttctgtggactaaagtttagtccgggtcacatcaagcgtttgactttcaaataggagtatgaaatatagacccaaccaactgtactagattcgtctcaatttttaatctttggctgagaaattagttttataatccgactacatttaatatcccgaacggaggttcaaacattcgatgtgataggggctaaattttagcagggacaaaccaaacaccccctaagtattttaactagattctaaaataatagtctttacagaataagtgtctgtctaaagtctaaactagttcctaaaataatggtttttagtaagaagtaaataatactgtcactatccccatcagtccatcaacacgaacctatgcaacgctctccctgtacgactacactgacgtcttatcctgcaggcagtgcccagtaggagtagaacggaacgaagagtgagccttcgaatacattcgtactgagattctgagaaagcaatgtgctgccaagtgagaatgatagtgttcttcctaaacgggttcttcctaaaccctaacttttctgtctgctggtaaaaacaaacgccacagaacatagaaatacgatgtgcacacgcacaccggcacacggacgtagcattagcaaacatactcgtctggatacaatagaatcctatgaggtgtttggttt

SEQ ID NO: 4921 - DNA, 1165 bp, Zea mays
  Zm_smallRNAprecursor_410
gggagcgttggcgtcgggctgcatggcagctcctagttccgcggaagccggaggggagggtgagttgctcttgctcctgctcccggtgctggttgattggcgcgcgagacgggggattagggtgggggctttgacgggggaaagctcccgcgtttttggatggttccgctgtgtgcgttatccggtggcctgtggctgcgggccgtcacggagtcgggaggcatgaggcggcgatggctcccggccccggctggctcatctcttttctccgccactgccggtgcggtatgatgcagtatgccgtgtgcgccgggcgtcgagcctcgttttcggcctcggtcgctgagcctgcacgggtgtctgtcgtcgggtccggaaggttggtttggtcggggaggagtgtcgatcttcgaatcaaccacaactttcgacagaccaactgtctaagacgtcatggcatgctcaattatctcttagggggtatttggttctgtggactaaagtttagtccgggtcacatcaagcgtttgactttcaaataggagtatgaaatatagacccaaccaactgtactagattcgtctcactttttaatcttcggctgagaaattagttttataatccgactacatttaataccccgaacggaggttcaaacattcgatgtgataggggctaaattttagcaggggcaaaccaaacaccccttaacctagctatgttaggctctacaactattgttatagctcatcatatgtactatatgccccctatccatacctggctactaattatggtacacaactttccttgttcacacaccacatgtggattggcggatttctaatagttggtgctgctgcacatgcagtcatttttatggtaaaagactatgatccaactactcgatacaacgctctattagatcacgtctttaggcattcgcagcggttctccttaatttttctctctatatcattttttacatcacatcaccaacattttatccttattttttttatctcccgcaacggttctctctatattctccccctataccccactacaactataaaatatcattgttcaaatctattcatcatatattactactaggtgagtactcgtgcgttgcgacggaaccatataataacacgataactta

SEQ ID NO: 4922 - DNA, 1162 bp, Zea mays
  Zm_smallRNAprecursor_411
cataaaacaattactacttgtgtaatttggaagagtaagttgcaagggcaaaaattgaatgtgtgtgttgagcttacagctacgaagatccccgcatccactgatgggtggcgttgatgccttttctccgcaaaatcctttttataaagacgagcagctatgctgagcctgtcaacttacggctttgcaccagttcttgttggccatgttctggatgtcctgagtatactttacatcatcaatcctgatgcgagtgtcagtgttggagaatagcagacactaaaatgcagccatgaaaaaggctctcaggcccagctccccagtgagaatcctcttctgcagtcgatcaatgataacagatatattaataccagatatgtgtctataagagttgccacaaatttgctcccccagctcgtcccgcaaggcacgagcatctgcatcagacatggggggcgggtcactgccaacgtttggtaactacaaaacacaccaaacactgtgctcagtgattggaatatcttttccaccaccaatctctaatttcatcatttctgggttgagcttccgcatcagccagctgagcaactttctggacaataagtgcggcttgaatctcagcaggccgccaaaccccttggcaactacttcacttttcaattcatcggagagagcattcacaagctttatgaacttcccaggtgagcatcgtatagctcgcgtcttagttttacccttattctcatcgccaccaacaataccaacattgtcatcaccagaaccatcgccggcaggagcaaactctgggtcttgttcatcatcactttcttcatcttgaataggagacaaggggactttcaaccttaacctcttcctcctttccttcaattcatttttatctaattgctttctcttgttttgtacacgaggagagcgacagacagtatcagtgccttgctggcctgtgacattctgttcttgatccattataaaaaccactgaaaaaatggtcatgaaaaaaacatgagggcacaaacacatggtacagatctcataaccaaaaattgctaatcaacaaactaaaacacacagtacaaataggaacaaaaaatagttgtaatacacactaatgctgcaacacacattagtactgggacagaat

SEQ ID NO: 4923 - DNA, 1135 bp, Zea mays
  Zm_smallRNAprecursor_412
cttgttgtagtggacaaaagcagtatagaccctttcactggtacagaaccatgacgttgcaacgagacgatggtcatgtttcacaagttatacattgtgtgatgttattaaccattcatgatcgttgttggactatggttctatagttttaaatctttcgctatagctacctcaaaatatagttgtttgtagagagcaaagctatttgctcctatgtacagtttaatcaatattggccactattgccaccgttgtaggcttaggtacaacgcttccacctctaccgcgcctgccgccgtgaatatgttcttatgtatttttcagtttttttttctttctaaaaaccgactttttcgcggtgtaaaactgaaagtacctctggatctgtttttagtggctctcgaatgaaactgtaaaaacatatatcgaagaacttttaacgtcttttagtggtggcaacgactgctgtgcaagcagtccttctgtataagcatgcaaacaaaccatctgatccgttagatcgtgatccaaccgtaggtcacatttaacacttaaatcctttcaccaccagctcaataatatttataaaaaaactctaacaaactatagttgtatctgtggttggatcacgatctaacggatcagatggtttgcttgcatgcttgcacagaaggactgcttgcacagcagtcgttgcctttagtgatttccaccaaacaatttttagctttttaacggctcgtagcccacaacagcttttttcacagttcacaacccacaatagctttttccacagcccaaccaaacagactcgttgcaagcccaaccaaacctgattggactctccacaccgtgtatagaagtacttcgccgtgaagccttgcttttaatttggtctgacatgtttatcctaaaagatttttttctcaaatatgcaggagagcttatattaagagagaaaaagggatccgatacagatgaccaacagtgtcgggctaatcgagccggcccggagcacggcacgacccgtagtgcctgggcacggtacgacacggttggaaccgggcccgtgccgtgcttgggccgagtaccgagcacgctgggccggcacgggcacgagcacggtccggttagc

SEQ ID NO: 4924 - DNA, 1197 bp, Zea mays
  Zm_smallRNAprecursor_413
aagagaaatgagtgtagactttctaaattacatttttaataaattcgagagaggaaagtgttggagtgatggctgagaattaagtgatatggaaatggaagttgaagcaagaagaaagtttgtcattaccaaggaggctgacgcagatcttactgttgaagatgacacacaaaatatatttgttcatcttggttttctggtaccgtattataaaaaaggaaactcaatccagcattttttgattccttcggaaaagatatattatacttttctgatcttaagaatttttcaataaaatggaaaaggtttgtcaaactcattagatcagcgttagctttgaaagcgcctttggtcagattaaccttaatctgtgagatgtctacaattatcgtattgcagctttaattatctaattctgcatattattaagtattataaaaaaatgtcaagattgacgtgcttcagtaaaatgggttatgccacacagacaggtctaccactacaggaacaatatctctttaaggtatttttatgataagtggtgttgtaacttatgacacgtaatgtggtatttaagaaacttcgttaagcatgtcctgacctacgtaaaagagtagaggaaatgctgaaggaagtttcttcaataccacattacgtgccataagttacaacaccacttatcataggaatacattaaagagatattgttcctgtagtggtagacctgtccgtgtggcataacccattttattgaagcacgccaatattgacattttttgataacacttgatgatatgcagaattagataatttaagctgcaatgcgataactgtggacatctcacagattaaggtcgatctgatcaaagacgcttttaaagctaacactgatctaatgagtttgacaaacattttccattttattagaaatttcttaaaatcatgaaagtataagatattttttctcaaggaataaaaaaatgctagaattgagttttctttcttataatacggtaccaggagaccaagataaacaaataaattttgtgtgccctcttcaacagtaagatctgcgtcagcctacttggtaatgacaaactttcttcctgcctcaatttctatttccatatcacttaattcccagccatcactccagcactttctttccttaaatttattaaaaatgtaatttagaaa

SEQ ID NO: 4925 - DNA, 1040 bp, Zea mays
  Zm_smallRNAprecursor_414
tggtgattgatgccaaaacaattaaggtcaaaaatatatacatttgcaatagaaaatttcttttgaatgattgtatgtagatggctccccctaaatgtgtgcacgattgtgaatccaatgttttgacataatatgtcatgtgagcaacacatttagagaaagtgacaaaaaccatactgaatacaaccatccgaggggtgcaagagtgtcataacaggagttgtgatgcacatgactatctctaaatacacatcattttttcttcatagcaaagtaatcattacaaactgataggacaaaagatgatggccagaagaccatcatattactttgaataacaacccaacagttttatttcatacaatggtaaaaggatacaagccacaacagtggccaaaacaaaaataatccaaaagaaaaactgaaagaaccacaaactagaagtaggattttctccccctttttggcaacaagtaccaaaaacgaagagagagacaaggatacatgaatcaatatcctccaggaggaggatatgacggaggatatgatggagggtatgaagtgtagtcagggaagagggtcctcatcacgtcctcctcaaatgtggagtcccgaggtggctcatcagccgcagaaaaaacagatgccgaagatgtacgatgatcgggaggaggtggagggtggtgatggtaaccagagccggatggcctagggtcaccaggaatgggtcccggacccgggtagggaggcgggggtgagaggatgattgacccggatccccatggtagggaggcggggcaaactgctcgcgatcatcaacataggcttcttcttcttcttcgtcgtctgcagacataaatggcaccccgtaggcctgttggtgccactcattgatctccgggggaggaggatggagaggcacgttaggcgagcgagggacaaatggcatacccatggtggaagcttgacgacgaagattgtcatcagtctcccgctgacgccgtgccacctcatggacatcagcagaaatgttgcgacac

SEQ ID NO: 4926 - DNA, 1159 bp, Zea mays
  Zm_smallRNAprecursor_415
atcttcgattaatttaatttcctcacattttgaatggtcattggttctaagatggaaagtgtcctctttagttgccacggataccactaactggacttcataaaaaactggacattaaggtcattcttgtttcgatctttcacaaaagatgatggagcaacaacaagtgtgttttgttctaaggttattgggttagtccaagacttgactaggacacaaccaaaacaaaactcactaggccttctgtccatcacagttacaacacatttcatagctcttactgcagtcattggtgtggttctcatggttgaagtcctccctaagggtttgttcggttatttgtgatccatatggattggaggggattgatatggattgagagggattttgacttactggggattgaaaccgactccatatggattggggttgaaccaaacaagccctaagtgaattagattggatcagtcaggactaggctttactttcgttaagatgaacggggactggggagaagaggtggagccgtacctgcagctgcaagacaccgccgcaccggagatggagattgggggggttgaatccagcaaacactgaaagaagtgaaccactcttatcagcattcaccattcagcagtctaaatctaaagttctaaagtctaaaccgagcagtgaccgtcttggtggaccagcactaagcgcgtgcaggattccaaaatgcggcactaagcgcacgcttgacgcttcagcgcactgaagcgctaagcggacgacgggtcactcttcgctttggggcataataagcgctcccaaagcggcgcgaccgtcttggtggagcagcggctgctggctcccgctgcccgcaggccgcgcgcggcgcagcaaccgggctccgtcgatgatccaacggaggcgggaggagaaagagaggcacgcacgcagggtcaccggccagtgtgcggaggaccgggaggcaagggcgcgaggcgggaggtgaagcagctgatgccgtcgctgagagcccgagcctgagcgccgccgccgtcgcctgcgtgctgagcgcgagtagggagggagcggaagatggagaagatggaagatgaagatgaagaaacggcggcggctgcgtgcctgtgaaaaggttaggctggctccaaca

SEQ ID NO: 4927 - DNA, 1141 bp, Zea mays
  Zm_smallRNAprecursor_416
tctactcaatgctatcactggaggggtcacctacatcagtgtgacatctgtttagctgtccctcaaactaaaatataactcttcagaaaaaatttagctatcccatgagaatatagtaatttatatcatatcatatatatgtaaggacttgggcatttgtggcatgctagtgcatctcgatcaatgtaacctggaggtggtagaaaaacaaatatgtacgccaataaaaagcttgttatttattatcttagtactaattggccaataaaagatgctgtaacagtaatcctcaagctctaaaattcccacattaatcagagaaaaataaagagtctacaccatgatagatgtagtaatgggttcgaattataatggttgagaagtttcataaaaaaattgataatggttgagaataattttgttcatacatcagtgtgctgggagtacagctctgatttaaggcaacgactgctatgtaagcagtaattctgtgcaagcgtgcaagcaaaccatctgatccattagattacgatccaaccacagatacaactatgatttgttaggggtattttataaagattattaagctggtggtggaagggtttaagtgttaaatgtgacctacggttggatcacgttctaatagatcagatggtttgcttgcacgtttgcacagactgcttgcatagtagtcgttgccctgatttaaaactgtttatatctcctatcttagaatggactataactgtaagcagactgacttgctgcaagatagcaatagttccaaaatctctttctttagtgcctctatggcacggctccaagaaccgctccagctccagcttcacgtgaagctgacccaaacgccttgttgaaaaacaactctcgtcctccttgggaccagtcacctttgggagctggttttgacccggccggcccggtggcacgctccccgtacgagcacgcaactacgcaaggccaccccgccggtctctccttccgccgccagatcctccgctccttcgcccacagccgccgcggccgcggccctcttccctggttcgttgttgcactgtagtaatggagtggaggtccggtcccacgtttgggcgttgactcgacaagcgccaaaccgagcacc

SEQ ID NO: 4928 - DNA, 1140 bp, Zea mays
  Zm_smallRNAprecursor_417
ctactcaatgctatcactggaggggtcacctacatcagtgtgacatctgtttagctgtccctcaaactaaaatataactcttcagaaaaaatttagctatcccatgagaatatagtaatttatatcatatcatatatatgtaaggacttgggcatttgtggcatgctagtgcatctcgatcaatgtaacctggaggtggtagaaaaacaaatatgtacgccaataaaaagcttgttatttattatcttagtactaattggccaataaaagatgctgtaacagtaatcctcaagctctaaaattcccacattaatcagagaaaaataaagagtctacaccatgatagatgtagtaatgggttcgaattataatggttgagaagtttcataaaaaaattgataatggttgagaataattttgttcatacatcagtgtgctgggagtacagctctgatttaaggcaacgactgctatgtaagcagtaattctgtgcaagcgtgcaagcaaaccatctgatccattagattacgatccaaccacagatacaactatgatttgttaggggtattttataaagattattaagctggtggtggaagggtttaagtgttaaatgtgacctacggttggatcacgttctaatagatcagatggtttgcttgcacgtttgcacagactgcttgcatagtagtcgttgccctgatttaaaactgtttatatctcctatcttagaatggactataactgtaagcagactgacttgctgcaagatagcaatagttccaaaatctctttctttagtgcctctatggcacggctccaagaaccgctccagctccagcttcacgtgaagctgacccaaacgccttgttgaaaaacaactctcgtcctccttgggaccagtcacctttgggagctggttttgacccggccggcccggtggcacgctccccgtacgagcacgcaactacgcaaggccaccccgccggtctctccttccgccgccagatcctccgctccttcgcccacagccgccgcggccgcggccctcttccctggttcgttgttgcactgtagtaatggagtggaggtccggtcccacgtttgggcgttgactcgacaagcgccaaaccgagcacc

SEQ ID NO: 4929 - DNA, 1061 bp, Zea mays
  Zm_smallRNAprecursor_418
gtattcagcaatattatttgtgcagctgaaatcaagctttactgcatagcatgttctgactttagaaggtgcaactaagacagcagccgcacctgccccgaaggttccccaggaaccgtcacagaacactgtccaagcttctgcatctttatttgcttcttcttcctgagcccctggcatccagtcagcgatgaagtctgctaacgcctgggactgaattgaggatctatgcacataatcaatgctgaatttgttgagttccgcagcccactttccaattcttccagtagcttgtttgttcctcatgatatccttcagaggctatgatgaaagaacaattatatggaatgcttgaaaataatgtcgaagcttcctggaggccattaagacagcatacaacaccttctccaattctgtataatttttatttgataagcttagaacttcggagacaaagtatactgggcttgcactacaggaattcacttaattcccgtcggcctgaaaccgacgggaataagccctaaaccgacgggaataagtaattctcgtcggtttaaggcttattcccgtcggtttcaggccgacaggcgtcccttgtcggggataaggttatccccgtcggcggctgacgggaataattaattcccgtcggctagaaagcggccgacgggaattaaggctaactcccgtcggttccccaggccgacgggagttattaattaattcccgtcggccttacgtggccgacgggaattaactaggccgacgggagttagtagttaattcccgtcggttcgaccatagccgacgggaattaactgggccgacgggaattaccctatactgccacaaaaacagcactaaattatgtcactatttctgcacacataacatatatcaaacataacataaatcacatatgacagccacattacaaacacatgtagagatacgacatccacaaacacatgcatttagacataaacacttgcatttataattaaaacatccaccaacgtgtacgacatagtattcaaacttaacattcaccaacatca

SEQ ID NO: 4930 - DNA, 1062 bp, Zea mays
  Zm_smallRNAprecursor_419
agttttgtggcattaagtttcaagtttttacaggatcacctattcaccccccctctaggtgctctcagttagtaagcacataggatgcatcaaaagtcttaaaaggaacattatgctcatttgatgcagcatgaattttctttctaggaattttaacatgagtggtatgcctagagctagaagccccatttttatacatgaatgcatgatgagaaacattgtgaggttccctagcacgaattttcctaattttgtgctcaggatagtttgcagggtataaaatgtagccctcattatcctaaaccatgggagccttgcccttaacaaaattagacaatcttttaggggcattaagctcggacgtccatagaaagattattgctaactgcccaaagtgagaagcaaaaatgttctgataaagacgttcctcagtaatatcatcatgactttcgaaatcatgtgcggtagcaataccaaaccaaatacgacgagtagtggggtcctgagctaagccttggctaaacctgggaaatcttaattccataatgcctttcaaatcctcctagccactatcctactgcaataattcttgctaagaagaatgcccatgttgtggcaattccaacattgctcctatgttggaaaccaatgtcatccttaatgccagggagtctcccattatagagcatgcttctagcaaatttaaacttttcattttcaagttcatgctcattaattttagtagttaatttagctatatgctcattttgttgtttaatcatggcaatgtgatcatcaatagcttcaatgttaacatctctacatctagtgcaaatggaaacatgatcaacagtagatgtagagggtttgcaagtattaaattcttctatcttagattttaatctagcattctcatctctaagacaggaaatagaatcatcgcaaacatttaaatctttgaccttagaaactaagctagcattttcatttctaaggctagaaattgaatcgtgacaaatgctaagctccttagataaattttcacagttctctacttcctaa

SEQ ID NO: 4931 - DNA, 1048 bp, Zea mays
  Zm_smallRNAprecursor_420
gtggttacaagaaacaaagcacggttggttgcccaaggctacactcaagtggaaggacttgattttggtgaaacatatgcgccggaagcaaggttagagtcaattagaatattaattgcctatgctactaaccatgatttcaagctatatcaaatggatgtcaagagcgcatttctaaatggaccactacaagagagggtctatgtggagcaaccaccgggctttgaagatccaaagaagccaaatcatgtttacctacttaacaaggcactatacgggcttaaacaagcccctagagcttggtatgattgccttaaggatttcttgcttaaaaatggttttgaaatagaaaaagtagactctactttattcactcgcaaagttgacaatcaattatttatttgtcaaatatatgtcgacgacattatatttggcagtactgatgaaactttttgtgaggaatttagtagggttatgacaaataggtttgagatgtccatgatgggtgagctcaagtacttcctgggctttcaagttaaacaactcaaggaaggaacctttctgtgccaaaccaagtacacacaagacatgctcaaaaagtttggcatggaaaaggcaaagcacgccaagacaccaatggcttcaagtggtcatctcgacttaaatgaagaaggtaatctgtagatcaaaagctttatagatcaatgataggatctctactatatttgtgtgcatctaggccggacatcatgcttagtgtttgcatgtgtgcccgttttcaagctaacccaaaagagtgtcacttagtggccgttaagagaattttgagatatctagttcacacccaaaatctaggtctctggtatcctaagggctcctttttcgatttatttggctactctgattcagactatgtcggttgtaaagtagatcgaaaaagcacctcggggacttgccaattccttgggtggtccctggtgtcttggagctctaagaagcaaaactgtgttgcactttccactgccgaggccgaatacatagctgctgg

SEQ ID NO: 4932 - DNA, 1040 bp, Zea mays
  Zm_smallRNAprecursor_421
ttgcggcatttttctctatgtgccgaaacatttctgctgacgtacatgagctggcaaggcgtcagcgggagagtgacgacaatcttcgtcgtcaagcttccactatgggtatgccctttgcccctcgctcgcctgacgtgcctctccatcctcctcccccggagatcaatgagtggcaccagcaggcctacggggtgctatttatgtcagcagacgacgaagaagaagaagaagcctacattgatgatcgcgagcagtttgccccgcctccctaccatggggatccaagtcaatcatcctctcaccctccgcctccctacccgggtccgggacccattcctggtgaccctaggccatccggctctggttaccatcaccaccctccacctcctcctgatcatcgtacatcttcggcatctgttttttctgcggctgatgagccacctagggactccacattcgaggaagatgtgatgaggaccctcttccctgactacacatcataccctccatcatatcctccgtcctatcctcctcctggaggatattgattcatgtatccatgtctctctcttcgtttttggtacttgtttccaaaaagggggagaaaatccaaaatttctagtcattctgtttgtggttctttcggttatgtatttcttttggattatttttgttttggccactgttgtggcttgtatcctcttatcattgtatgaaataaaactgctgggttattattcaaagtaatatgatggtcttctggccatcatcttttgtcccatcagtttgtaatgattgctttgctatgaagtaaacatgatgtgtatttagagatagtcatgtgcatcacaactcctgttatgacacacttgcaccccttagatggttgtattcagtatggtttttgtcactatctctaaatgtgttgctcacatgacatattatgtcaaaacattggattcacaatcgtgcacacatttagggggagccatctacatacaatcattcaaaagaaattttctattgcaaatgtttat

SEQ ID NO: 4933 - DNA, 1133 bp, Zea mays
  Zm_smallRNAprecursor_422
tcgagttctctggtgccaatcttgctgctgagcccggaggacttggaatttcctcttgagatggcctttttcttcctcctttgccctttccacttgcatggctttattggagaggtgagagaaactaaggaagtcttggctggccaggatggtcttaagttctggcctgagtcccttcaggaagcgggccatcttcttgacttcggtactgatgtcatctggcgcgtagagagccaactccgtgaacttgtgcacatattcactgacacatcttctgtcttgagtcagttcccgtaattcgtcttccttgagctgaacgatcccttggggcacatggtgctcccggaaagttgtttcaaactccgcccaggtagcatttctaatggtaacattgaaggtatcccaccaagctaaggccatcccggaaagttgatgagcagccagttgaacacgctgattttctgggcatccgatggcttccagctttcttttaatcgtgcgcagccaatcgtcagcatcgaggggattgctagacctgacaaacgtgggaggcttgagcctcaggaaatcccctatcctgtcttgcggtcttccaccattcggacgttgatttcccagactttgagtgaggacctcgatgagtcgggtttggttggctagaacttgggctagatctaagggtagttctagaggtgcggggaggtgggtctcactttcctctctaccggcgtggttttatctaaagccatctgccagggggagagagtcactattatgcacatgccaattgttttcaaccatgttatttattcattacaccaatacattacaagcatatggctactacaagttgtactacacgcgagcgttctctgaggtactaccgaagtctttttctatagtgtccccaaattccttgagaagatcatcaaggctagctagggacatatccttgatgttggacaaattctctatcctggcaggagctggtgctgggggagccttcttcctccgctcagcctggcctccttggttcctggtcttcttttggattttcttcgtgggggtgagcttctttagcttcttatcatagtccatctttaaggtttgataggcttcatgggtgttggcgt

SEQ ID NO: 4934 - DNA, 1084 bp, Zea mays
  Zm_smallRNAprecursor_423
tggttttcttcttctgctcggcgcatgctgtagtggttatagaccaaaaaaacatggatgtcacttaaacatatcaactttaatgaaacttacatgttctttatcagctcaaatgttagacttaccttcagcaagtctgccaacaatatttgctaccacagcagcttcaacaatatttttaagccctgtttattgttttcttcgaaaccaacttcaacatggatgaatgaataaggaccatacatatgaccatcgagataaatattgttatagtccttaacgttgagaccatctataatttttccttcataaaacttttgatttggaaacttgctgatggaagggtgcattctatattgaatatttagcatgtgctttgggaaatcaagtccacttaatctctcaaagaggcttcgcccaaacctgttctctttagcaatcttatcagtaaagagaaagtattagcagtctataaataattattggtaacacaaggaatcaaggatacattcaaatggtcttataagttataatgaatacacaccgtgctctttaccactgattgtagttgcttgtcatcccaacaagcaccacatgttttatcccactagttgcaaaagggattaatgattcacattcttttaagtatgctgcctcatcaataactaagatgtggaatttctgattttccaaccaactagacttatagagagtgcaaaacacaagtcttgcatcttttgttttgattgttttgaagaaacaattttgctcttaaatatttctgacatttttccattatcagctttcttcttcatgcggtcctcattaagtacattgtaaagcgtcgggatggtttgccccaactagctgaggctgtagctgtgatgcctgtgagctacaaaaaattaaaaaggaagaagtcatcggttaaatgcgtaaatttgtatctacaagatagaactgcaatcgatgaccgtttttggtcgaacgagcatatgaatctatataacaatatatatatatatagcgagaagcaatgtgctgacaataaatggatcaattgggaaaagatcagataaattcc

SEQ ID NO: 4935 - DNA, 1201 bp, Zea mays
  Zm_smallRNAprecursor_424
atggattttgtaacattctgccaaaaaaggtgagtgaattctgctacatagatgccgttctcaacctctttgaaacacgcatccacgaaaagtgtgtccaatacatcaggccgtgccatgtccaacggatccctccaacctaaaagggaaaaaaagatgcaaggagtttaaccatctgttctgaaagtattgtatggatttctgcaagcaaatcgtgtatcggtgttccagggtgatatgccatcccttgcgccctaacaattttaaacaatggtcagagaagtgaaacacaaaatagtacaactatttattggactgggcaattactgattatgtgctgagacaaagctgacactcgatacttctgtagcaagcaatcctattaagtgctctataatttaccactgtatttccaatattccacaagaaccttaggaccaagaaccctacttcgtggtcagcagatgcgaaggaagaggaggtacctggcaatcgactggaccgacaaggtgaagaccgagtcaaacgagaactgcaaccggcgatgcgacggctaaacctcaccaaagagccaccaccgatccagcaagaatatgggccgactatgcgtcggctgtattggtaagaaaatttgccggtaatgcgtcggctggatctccgcgcatggccactgccgtccgggcgcggaccagaggactcgcccttgcccttcatttgttgggggggggagagggagggggagaacttcaatgcgggcagtgaaggccagaaggggcacgcgggcggctgtagccagtgactcagagcaatggcgattagacaggctcgggggcagcgactcggaggcagaggactcggctggatctccgcgcatggccactgccgtcccggcccggaccagaggactcgcccttcatttgttgggggagagaatggaggttggagggaggggcagaacttcaatgcgggcagtgaaggccagaaggggcacgccggcggcgacggcggagaccgtggtgttctgtgcagtggctaaatttctatagtaaaagctgtgcaccatgctgtgcagggagtttgccacgtcacttctttcttctcagccgttggataccaaacggagtacacaaaattgtccacgtcgcctttcaatagagtccattggatgtgcagggagtttgccacgtcacttctttcttct

SEQ ID NO: 4936 - DNA, 1063 bp, Zea mays
  Zm_smallRNAprecursor_425
acttcagcgccgtagcgcctggtatgagcctcgtggagaagcaatggctagtccacggggctcatacttcagcgctgcagcgcttggtactcggacctcggctcgaggcattttctctaccccttcttaccctgaaaaagcagggtcaccttgtgtccttaaacctataaccatctttcggctaacctagcctcctccgtccctccgtaccaacaaggggtagtacaggaatattgacctgttgtccatcgactactcctttcggcctgatcttaggccctgactcaccctccgtggacgaaccttgcggaggaaaccttgggttttcggggcattggattctcaccaatgttttcgttactcaagccgacattctcgcttccgcttcgtcgacccccgctttcgcgtttgcttccctctaaggcggaacgctcccctaccgatgcattttgacatcccacagcttcggcagatcgcttagccccgttcatcttcagcgcaagggcgctcgatcagtgagctattacgcactctttaaagggtggctgcttctaggcaaacctcctggctgtctttgcacccccacctcctttatcactgagcggtcatttaggggccttagctggtgatccgggttgtttccctctcgacgatgaagcttatcccccatcgtctcactggccgaccttgacccctgttatttttgggtcatatctagtattcagagtttgcctcgatttggtaccgctcgcgcagcccgcaccgaaacagtgctttacccctagatatccagtcaactgctgcgcctcaatgcattttggggagaaccagctagctctgggttcgagtggcatttcacccctaaccacaactcatccgctgattcttcaacatcagtcggttcggacctctgcttagtttcatccaagcttcatcctggtcatggatagatcacccaggttcgggtccataagcagtgacaatcgccctatgaagactcgctttcgctacggcttcggtgggttccattcccttaaccaagccactgcctatgagtcgccgg

SEQ ID NO: 4937 - DNA, 1070 bp, Zea mays
  Zm_smallRNAprecursor_426
aatagacctagcagctaaaagagggtatcctgagcaattgcaagaatggggttcattgatattcctggtatagtagatgctatcacacatacagtcatactcaattcgatggaattgtttgatcttaaaggggatcttctataatttcgcacataaggggttatttcttggtttcgtccagtcattaataacttgattatttttagataatagtagatagaaagaacactcgtaaggagtcctattgaaaccaagaaatataggcctgcttgccatccacaccagaatagatagagtttttccgaaaaaaacctgctagtggaggaaggccttccttagggataagagacatagggctaaaagagagagccaaaaaaaggatcttttcgtgtataatcctgcataatctcgaatgttgtcagttcccggtacctaaccaaataatacaatgcaagcaaaagttcctagattcatggagatatagaacagcatataagttatcatgcttgcatatccatcatttgagtctccaacaattattccaataattacatatccgatttgccctatggacgaatatgcaagcatacgtttcatgcttgtttgagtaatagcaaggagattccccaatatcatgctaagaatagctaggatttccagaagaagatgccattcgtttgatgagaaataaaaaggaatatcgagaattcgcgtggctaaagctgaagcagctactttcgaagtaacagaaagaaaagcaacaactagagtgggggagtcagagtcgaaaagaggattcctcgcttctttctctcatgcaaaaccgtgcatgagactttcatctcgcacggctcctaagtgataaaagaaagaagaactcgtcttctttcttttttgattaccttcctcacatatgtataagaccgaatccattctttttcgaaatggatttcgaaaaagaactactaatacttaacttttcgaggaatccttcatcagtggttgtgaatgactgactttttcaatcctttcgaccttggttccgtaggagcaagtcagaaaggttgaga

SEQ ID NO: 4938 - DNA, 1126 bp, Zea mays
  Zm_smallRNAprecursor_427
ctccaacaattattccaataattacatatccgatttgccctatggacgaatatgcaagcatacgtttcatgcttgtttgagtaatagcaaggagattccccaatatcatgctaagaatagctaggatttccagaagaagatgccattcgtttgatgagaaataaaaaggaatatcgagaattcgcgtggctaaagctgaagcagctactttcgaagtaacagaaagaaaagcaacaactagagtgggggagtcagagtcgaaaagaggattcctcgcttctttctctcatgcaaaaccgtgcatgagactttcatctcgcacggctcctaagtgataaaagaaagaagaactcgtcttctttcttttttgattaccttcctcacatatgtataagaccgaatccattctttttcgaaatggatttcgaaaaagaactactaatacttaacttttcgaggaatccttcatcagtggttgtgaatgactgactttttcaatcctttcgaccttggttccgtaggagcaagtcagaaaggttgagaaatagaaccatctgatttgattcgttcccaatagccatgagatgatcatcttagggtgatccttttgtcaacggatgctcctattacactcgtagtctctgaaggatgagaacccactatgtagcatttacatcgataattcaagcattgtatacgtcattagtccgattctttgtaggaactacccgtaataacgagcttgcaaaatggatctgtttatcataaagagattcgttgttcctgaccctgcttcaccttaattgttatttcaacaaaaagatcacaataaacttttggtaaaagttctgtcttggtcggagtggggatagcatttctcttctgcatgtctatggagttttgcaaaacccaaacacctcagatagaggtaggaatttgtcgaacgaaccacactccttcgtagacgtcaggagtccattgatgaaaaggggctggggaaagcttgaacccaagtcctacagtgatgaatataagcgcaattgaaattcctggggagttatacatttgtgtattgataagaccattcacaatttcttgaagctcgacctcccccagatgaaccata

SEQ ID NO: 4939 - DNA, 1076 bp, Zea mays
  Zm_smallRNAprecursor_428
ttacgagacatttaaataagttattttgtttaatatttagattaaacatatttttaattatctaaatttatattataaactgcattgaagctggaacctggagtagtcttaaactctcataagtattgaaagatataaatataagtaatatattttaaaattttagttaaacataagagaaatttgtggaaaatttagacaccacttagaaaggacggaaggagtacgtaatttgagcttggccttaaattttattccaaacatagtggtagtataacaaagtatagtaaccacataattatttaatcatatatcatgtcatgctggtgcgtatgctatgtaaaagggtgttttaatgtattagagctaatggttagttggctaaaatattaatagtagaatttgctagatgactattagctaatttgttcaaattacctaatagccgaactatacactacagtaaactaacaaaaatccgacggtcaatttatctccgacggctgtctacgatgccgtcggacatagcgttatgtccgacggccaccaagcactctcggaaatatcgccttatctccgacggctaccctgacagccgtcggacataagcttatgtccgacggcctcgtacgtagccgtcggaggtaatgttttttaacacggcaagcccggcgcgcggttcattttcatgcgcgctcgctctctcctctctttctttctgcccgtagtcgccgccgccgtgctgtcaccgccggtcgccgccgccgccccgcccacccgccgcccgccccgtcaccgcccagcgccgtcaccgcccggcgccgtctccgcccggcgccgccgccgccccgtcaccgcccgtcgccgccgccgccccgctcgcccgccgtccacacccgccgcccgccccccgtcgacacccgctgccggccgccactgccctgcccactgctaagtaagtatttttatttttattttgtagttttcactgtttttattaaattattagtatgttaaataatgtttatcttattatatccgagggcctaaatttgattatatggcgaaatttggtt

SEQ ID NO: 4940 - DNA, 1136 bp, Zea mays
  Zm_smallRNAprecursor_429
ttgttaattagccggtgtatgcatgcatgtatcatgcatgaccctcgcgcgcgcgcgccatcgatcgagctggccttttccacctataatacaaataatcaacgacagatcatccatcctgtcacgatctacaacttgatcaatgaggtgtgaaaaagacacgtcgttgcgtacaataaaactacgaccaaccaacagctaccgtttctgtacccctttttttatgattaggtagctactagggcagttggtggtcaacttaatcggacagttgattaatcaacggatgttgcgttgcgcacgatgcaaacttaatgatcaattcaatcaacagggatatggtcatgggctcatggcacacatatagatgttgtttggttcagacgttgttaacgaaatagtaatagaatctattaccggcggtaatgattactagttataattgaattggatagtgacaacgactgctgtgcaagcaatccttctgtgcaagcgtgcaagcaaaccatctgatccgttagatcgtgatccaaccacagatacaaccatagtttgttaggggtttttttataaagattattgagccagtggtggaagggtttaagtgttaaatgtgacctacggttggatcacgatctaacggatcagatggtttgcttgcacgcttgcacagaaatactgcttgcacaacagtcgttgccttggatagtagtatctagtactactagaaatagcttaaccaaacaaaagtatcagtatccattaccccatgtaatccatttgtgttacatttcgacgaaccaaacaccaccataaatatagctgtgatatcctagtcgcggagataatgatatcctgacccaaggcttaataaaattaataaagtactcacatcaacaatgtacatcttcttttttagaaatctaccttgaaataacatcctggttaagtgtggttgacctagagcaatcttggaatgattgactgaccgaaaagtcttctcgggtgtacatgattgagaataaagtgtgcacaaaagactcgtatattggtctatggagatgctatatggtcctagaccggctcggaagtcgacagagtgttacaatatcccgtcgcgggcgtccaagtctctt

SEQ ID NO: 4941 - DNA, 1070 bp, Zea mays; identical to SEQ ID NO: 4645
  Zm_smallRNAprecursor_430

SEQ ID NO: 4942 - DNA, 1126 bp, Zea mays; identical to SEQ ID NO: 4646
  Zm_smallRNAprecursor_431

SEQ ID NO: 4943 - DNA, 1130 bp, Zea mays
  Zm_smallRNAprecursor_432
tgataagaccctcaaggatggagtggtggacgtcaaaatacagggagataggattatcctagtcaaactagttttgggggatgtagtcttgaacattataagtgcatatgcccctcaggttggtctcagcgagagcgagaagaagttctgggaagacttagatggcatgattagagcagtacccaccaatgagaagcttttcataggagatctcaatgttcatgcaggttcaacaaatgcagtttatgagctggctcatggaggtttcgggtatggtagtaggaatcaaggagaggatattttggactttgctatagcctacaacctagtgatagccaacactttcttcagaaagagagattctcatttggtgacttttagcagtggccatcgttcgagccagatcgacttcgtgctcactaggagagaagataaacaagcttgtttgtattgtaaggtgatacctggagagagtgttgtgccccaacataatcttgtggtggctgactttcgttttcggatcagtacccatagggataaacaagcaaaaattgcgaggacgaagtggtggaaactcaaaggggagacatccgaagtttttagggaaagagtttttgtggagggcgcttggtccgaagaagaagatgcaaacatgtgggtgaagatggcaacttgtattaggaaggtggcgtcagaggcgtttggagtgaccaaagggagtagcggtgaacctaaggatacttggtggtggaccgaggatgttcaaaaggcagcttactggatgaggaaagagtgatcacatctcatgagcaaaaacaagaggtgctgcataatttctactctaatttgttggggtatgcccccccagaggaggttaactctgaggttagaagagtgtcacagagctccaatagatttatctgctcttgagcttccctttacagaagaagaagtttgggatgctattgccagtcttccttcagataaagcgcctgggccagatggatacacagggagattctacaaaacttgttggcctatacttaaggcagatttgatggctgcccttgctgcccttcaccttgggaattctcagaatttggggcctctaaacacagcatatattactt

SEQ ID NO: 4944 - DNA, 1171 bp, Zea mays
  Zm_smallRNAprecursor_433
agctcaaaagagatgtcgttagtaatataagcaccaatgtcccttttataacactttgaatatataaagtaggcagttactaaaacaaggaaaccttattatataaactaaatttctcttaatcttcaatgcttaattttaacaaattaaacatgaatgattaattgattaagttcaaaggctaattttaaatcatatcatggtgagtatttaatgtagaagaaataaatccaaatgtacaagagagaatacatcacatagttttggattgttcttctttatacgtttaattgcatagtccatttgagaaactcattctcatgctgtgaaactacatagatcacttaggtaaaaacattagtttcacaactctacacatatagagaattccccttttgataagtgctttaagaatttgaatgtcttacttagcaccttattcattcatgaacacggggtttttctcttttatgtctagatcatggcaataatagagtaatcaaattgaaatgtgccaagaaatacttacaaccaatttaagcatttggattgccatatgtaagaacgaagattatgcaatctgttatatgataacctcaattttgatcatctttggtcttcatcttcaacttggagtaccaagataagtgccaaaatatttctcaacaaatatccttgtaccccttcacttttcatgattatagttcaattaaaaaccaaactatggtctctcaaacaacttatgtgatttatcctatatgagagccttccaatcaaagtgactttcaatatttccaatatttgtcacttatgacagattctgtatactctaaagaaacattcataaattttgatgtacagatcctatgaccacgaaaattggtggagatgtgctttaataagtctgctaacagctgtaaaaagttgatactcatttgacttcatatgtgctgccagccataatatctcccacagtaggtacatgctgaaaactgctgtgtttgtgctgacaagattgacttaatcaagaagtttcacttatccaatgattatgaaatttgcacagactttgctatcatatgtatagagcaagtaaactgaatttcaagccaatccaaatagatttgatcactcaaacatggttatgagcacagccttgtcagattttcaa

SEQ ID NO: 4945 - DNA, 1065 bp, Zea mays
  Zm_smallRNAprecursor_434
ctcaattttgatcatctttggtcttgatcttcaacttggagtaccaagataagtgccaaaatatttctcaacaaatatccttgtaccccttcactttccatgattataaatcaattaaaaaccaaactatggtctctcaaacaacttatgtgatttatcctatatgagagccttccaatcaaagtgactttcaatatttccaatatttgtcacttatgacagattctgtacactctaaagaaacattcataaattttgatgtacagatcctatgaccacgaaaattggtggagatgtgctttaataagtctgctaacagctgtaaaaagttgagactcatttgacttcatatgtgctgccagtcataatatctcccacagtaggtacatgctgaaaactgctgtgtttgtgctgacaagattgacttaatcaagaactttcacttatccaatgattatgaaatttgcacagactttgctatcatatgtatagagcaagtaaactgaatttcaagccaatctaaatagatttgatcactcaaacatggttatgagcacagccttgtcagattttcaatgttggccagatttcagtaaattgagttactcttcttcaagttgaatcaaatctgaaatgaactactttcaaaagacaaatatccattcaaaccacttactaaatgaagtctcttgaatttattcaacataaatcaatctaaacttgattatttagcaaattgtccattcaatcatcttatagcaagcaacatatgcatatatatccaattcaatcaactcatatgcattcaaatgaatttgatcaacaaatattatactttatatacctcatgatcatccaatagcaagtttgaacttaacttatttgcaatccattcataatttaaccaacttgaataaagcacttgtatttggtagaatttggacttcacttattattgacttggcattggaatagaattttattagtcttcaacacttaattcaatagatgatgattaaatgaatattattgaatcaagcctccaatgcccaaggtacctgttca

SEQ ID NO: 4946 - DNA, 1157 bp, Zea mays
  Zm_smallRNAprecursor_435
tatttgttttgtcattaaatcaccaaaaaccctcacttggggttgattgcacttacaatctccccctttttggtgattgatgccaaaacaattaaggtcaaaaagataaacatttgaaatataaaatttcttttgaatgattgtatgtagatggctccccctaaatgtgtgcacaagtgtgaatccaatgttttgacataatatgtcatgtgagcaacacatttagagatagtgaccaagaccatactaaatacaaccatccgagggggtgcaagagtttcataacaggagttgtgatgcatatgactatctctaaacacacatcattttcacttcatagcaaagcaatcattacaaactgatgggacaaaagatgatggtcagaagaccatcatatcacattgaataataacccaacagttttatttcatacaatgataagaggatacaagccacaacaatggacaaaacaaaaacaataataaaaaaagaaatacataaccgaaagaaccacaaacagaatgactagaagattttctccccctttttggcagcaagtaccaaaaacaaagagagagggagaagaggacacatgaatcaatatcctccaggaggaggataggacgtaggatatgatgtgtagtcgggaaagaaagtcctcatcatgtcttcctcgagtgaggagtccctagggggctcatcacccgcagaaaaaccggatgtagaagatgtacgatgaggaggaggtggtggaggaggagggtggtgatggtaaccagatccggaaggctgcgggtcaccaggaatgggtcccggacccgggtagggaggaggatagtgaccagagccggtcggcctggggtcatcgggagtgggtccctgacccgagtagggatgaggaggatctgaggtgtagaaagggtcatcatagtcctcgacctcatcctccggggtaatgaatggcacaccaaactcctgttggtgccactcattaaggtctgcggggaaggtaggggctggagatggaggggacccgggagggagaggatgaccagtctcggctgcataacaaagaaaatcctcatgcagccgatcggtcctgcgacggcgcacagactcctcgaccgcccgggtgcagcacatggcgaagacaccaa

SEQ ID NO: 4947 - DNA, 1157 bp, Zea mays; identical to SEQ ID NO: 4946
  Zm_smallRNAprecursor_436

SEQ ID NO: 4948 - DNA, 1073 bp, Zea mays
  Zm_smallRNAprecursor_437
ctatgaattcttcctacgataaaaaaacgagccttcttatatatggcacatctagcaaacgtcccctttatggagaaaaaagcatcaacctagactatgcgtggattaagacatgtcatattctcacagtgattgttcttattttctttaaactctatttatttcttcttactgcgccacatctagcattctcaatgtctaagtgtgtgatgaactctcaaatctagtaggcatcttctgctaagacgatcatagaagccaagcagcgcataaaaatggtagaaatgagaggcatcaagaaacatctcactaaattctcactttctgccgatggactagcgaactcgtcttttcctaatactgccattcctatggctcaaacagattcttttctttctctttttgactctcgtcattagcgcctctgtctaaatatgtgcattgggatattatttgaaatcaatgaagcaaaaggaagaggaaggagcacctaagaaccataggaatgagaggcatcaggaacacgacagtgcacatgtcctccgtgcgagacgagaaattcagagcactcgcgttccttcatgttctcatccctactgcccttaggacctctctttcttcctcttccgtgctcacaaattctcaatggcgaggagctcttgccatggaaccaccctcatcatcaggtgtgcatatatatagcgacctttggagtgcctggctttgtgagtaatggaagcacgccaaacaatagggtggtgtactgtacgggcaatgaagaacatatgcaacgaatcatagtggggccctgtaaactatagcaattggttaatgtcctgtatggacaatgaagagttgatgcacggagcccagatgctaaacttcaggctgtgccatatctgatggcactatggcagacatgcatgttggccaattaaagtgagatttgtttttgataagttttgacctgagttgttgaattcacaaaaatggagtggggagaaaaaggagccttcaacttcaattgcatttacttggattcatcaataaagagagcatgaacgattccaaca

SEQ ID NO: 4949 - DNA, 1067 bp, Zea mays
  Zm_smallRNAprecursor_438
ggttaatagtaagcctagtcacaaatctgtttgaagatagatccgttggatgatatcattggcttgtgattgattgatcaggttcttaacaagtttagaaagatgcaatcggtgcatatctgattgtggcttcagcacatttgatctctgtaatctttgcatggtatgataatacgtaccgtcagggatgcctcgctgttgttccttgtcagtcagattctccctctcgccctttaacaagtcaaacaattttgtaaacccttaaaacatggtttagagtgttagctagttcttggagaaataaaactagaattcattttaagtctatattttatttgtggagcatgttccctattaaataaatatgatataaaagttcaaatttatgcatcatgttggagattttgactgtacatttaatttacatcggaaatactctttgaaaatatttgaatataaagcaactcttgataaaagacatgggtctgttgggtccgtggctaactgtgccacactttgcctaaggttagtcgttcaaactgaggaactaaccttagacagaaaagttaggcaaagtgtgacaagttagacaacaaaccaaacatgccttatatgttccaaactaaataagtagtgaatgctgaatctctaatgaactatataattaactacatccctaaaatgatgatttgcacctattctagttttgaattggtatcttatttgaatctgaaattaatttgaaaatagaattgaaaacaaaatcaaaaatagaaataagaaaaggaaaagagacatacctgctagcctgagtcaagcccccgcatctggcctagttccatttctttttcctcacccacatgggtcgcttcccgacccagctaacctgccgccccaatctcacaatagaggactcattgtcgaggactcatatgtgtgcagccattgtcagggacttattgtcgggtccgacaatggcaccacgtcttctagatcgtgctcggtgtcttcacgggcggaggaacaccctagtgcgcggtgaattcctcaacagagttgcgaagccg

SEQ ID NO: 4950 - DNA, 1067 bp, Zea mays
  Zm_smallRNAprecursor_439
agttcacttgataataatgattgtgttggctctaactcaagtaatgcaaatgatggttctatctcaagcatacttgatgattatggtgattgttcatgctcggacaatgatatcgctactacaagcccatccattacatcacattgcttcatgtcacaaggtaatacgaaggtatataatgctaatgtgactaatcattcatattcatatgatgagcttgttggtatacttgcaagcatgaacatcgctttagaaattgagaaagataaaacaagaaacttggaaaatgaaaactcatttctaaagtattcatgtgaacaacaaaagcatctactttatgttgttacttgttcacatgaggagctaaaattgagtcatgaggaacttagtgttgctcatgaaaatttgatacaagagcatgcttttctcactaacgagttttctagtaaagaaaataaaactagtgataattcatcccatgaattatatgatcaattgaaaaatgttgctaatccatgtgatgaagacaagaagcatgtatccacctcttgtgatgatttattagctatgccatgttcttcaagtatagattattactattcttccttgtcttgtgagactaaccttttgaaggaaaataataagctcaaaaacaaagtgaagaatttaagcaacatgtttgagagatgacataaatcaaaagtcactcatgatcttatattgaaaaatcaaagaagatatgatgacaagagtggccttggtttcaacaagagcaatatcaaaggcatacaattcaaattaaaaggaaatgagctatctcacttcatgtgctataaatgccatgagatgggtcatcttgcaaaggcatgccccaataaaaggaagctcaagttgaagaaggaagaaaggaggctaaagcatgacaagtgcttcaagtgccacacttggggtcacctcacctcaatgtgcccaaccaagaaattagtgaagccacaagtgaagcctcaaccaaagccacgagttgagcaaaggaaggatccccaaaagcaaatcaagattaaccatga

SEQ ID NO: 4951 - DNA, 1098 bp, Zea mays
  Zm_smallRNAprecursor_440
ctttatataaacagtgttaccggacttcgtattctgtatattttttataactggcgcacaggaaaaggtctcgtcacagtattaaaatacgacctatactaattctagaatacgatttttttatatcgaacacacagaaaaagtttgttcgcgtgtctcaaaaaataaaatactatacatattacgttattcgttatttagccaacatcactcattcttattttatacacaacccttaccagaccatgtattttacaaatgtttcgaatcggacatatgaaaaataagtaaatgatcaaccgtatttgccgataataaaagtggtatgtattgtccgtctcgtccaaatgtctctatcctctgtcctgtcgcgggagcgagctatcacgcctttaggctatccgcactcatactactctaaatttctaccctaaaaagaatattctgtcatggtcagcaaaattctttactctatatcacaatcctctgcactcatgtttactctataccatatattctattatttctctctcctggtgccccgcctcgggtcccacaacctttgctgtctccggccccgcctctctcctggtgcacggagcagacgtatgcagtagacgttgctgcaactctacatttaaagtttccgatttgcttgcttgccttagcgtaccagtcccagtacacggctgcagcactcgcgttaactctatccgcgtagcgtaccggttctagtcattcactgcggctagccttagaacctggctcctctttgccattttaagaaggcgttgtagggatcacatttaagcatcaccgtcaatggcattatcatcattatagcgatgctgcatacactgtactgggaccagggagcttccttcatggctttatgactcgtcggagctgctactgtgccgtcatcctggcctgcccagtgctgatcttcgcttggtgcgcgcgctcgctgcaatgtttcaggtgggacggcaacacgtcggcggtggttccggcggcgccggacggggtgatgtacgtcttcagcgtgctccggtcgacggacccggcgcggtgcggccgcgcctgcgtggaggggat

SEQ ID NO: 4952 - DNA, 1171 bp, Zea mays
  Zm_smallRNAprecursor_441
gctcaaaagagatgtcgttagtaaagcaagtaccaaattctcttttataacactttgaatacataaagtaggcagatacttaaacaagaaaaccttattatatgaactaaaattctcttagtcttcaatgcttaattttaacaaattaaacatacatgataaattgattaagttcaaaggctaattttaaatcatatcatggtgagtatttaatgtagaagaaataaatccaaatgaacaagagagaatacatcacatagttttggattgttcttctttatacgtttaattgcatagtccatttgagaaactcattctcatgctgtgaaactacatagatcacttaggtaaaaaaagttagtttcacaactctagtcatatagagaattcccctttagataagtgctttaagaatttgaatttcttacttagcaccttattcattcacgaacacgggttttttctctttaatgtctagatcatggcaataatagagtaatcaaattgaaatgtgccaagaaatacttacaaccaatttaagcatttggattgccatatgtaagaaagaagattatgcaatcggttatatgataacctcaactttgatcatctttggtcttgatcttcaacttggagtaccaagataagtgtcaaaatatttctcaacaaatatccttgtaccccttcactttccatgattatagatcaattcaaaaccaaactatggtctctcaaacaacttatgtgatttatcctatatgagagccttccaatcaaagtgactttcaatatttcaaatacttgtcacttatgacagattctgtatactccaaagaaacatccataaattttgatgtacagatcctatgaccacgaaaattggtggagatgtgctttaataagtctgctaacagctgtaaaaagttgagactcatttgacttcatatgtgctgccagccacaacatctcccacaataggtacatgctgaaaactgctgtgtttgtgctgacaagattgacttaatcaagaagtttcacttatccaatgattatgaaatttgcacagactttgctatcatatgcatagagcaagtaaactgaatttcaagccaatccaaatagatttgatcactcaaacatggttatgagcacagccttgtcagattttcaa

SEQ ID NO: 4953 - DNA, 1191 bp, Zea mays
  Zm_smallRNAprecursor_442
tttcaacacacaatcattgcagttcaggggacagtctagggaaaggacaaatggatctactcttggggcaataacaatttttgttcgagcaaagtctactctttaaactttcagctcatctgctcacctgcctcgttcaagtggatttggaaaccaaaggttctcaagaaaatcaaagtattcatttggcttgtcttaacaaacaaaatcaacacccgaaacctgcttaaaaaggtgtatagtccataacaaatgactacaattgtgtgatatgtgatcttaatagtgaagagaccacctatcatctactgtttgactactcttttagtattgtctgatggccgagactatgtctggattcattgggatcattcatttagaaagaaattcttcatgaagattttggcaatcacggcgtgggaaatatggaaacaacgaaactttgcattattcgggaatgatgacccatctctatcttcttggaggcaacgactgctatgcaagcagtccttctgtgcaagcgtgcaagcaaaccatctgatccattagatcatgatccaaccgtaggtcacatttaacacttaaacccttccaccaccagctcaataatctttataaaaaaaacccctaacaaaccatggttgtatctgtggttggatcgtaatctaatggatcagatggtttgcttgcacgcttgcacagaaggactgcttgcataacagtcattgcccttcttggaaggcttgcttcaatgacacgctgaaattgtatctgattagattgagcccggatcttaatctccttatatctagttggttcttggctttgtaatatggattgtctttccctttttttcccttatcccttttctttcatttttccttcctttcttgtttaccccttttctgtttttgtacaatcgtttacatatcttaaataaaattatactatagaggaccaccctacaattttcccctaaaaatccaaaacgatccaaaaccgtgtcactatctcaagctgttcttagcatcttgaattacagtttttgaatgcaaaaaaatgatctaaacagattctgattgagctgaaattatgcacataactttataagtgatttactaaggtgtccacaaaacttgagctcaaatggatctaaatttcaatagcagatcaggaaactcaaacttgact

SEQ ID NO: 4954 - DNA, 1192 bp, Zea mays
  Zm_smallRNAprecursor_443
tttcaacacacaatcattgcagttcaggggacagtctagggaaaggacaaatggatctactcttggggcaataacaatttttgttcgagcaaagtctactctttaaactttcagctcatctgctcacctgcctcgttcaagtggatttggaaaccaaaggttctcaagaaaatcaaagtattcatttggcttgtcttaacaaacaaaatcaacacccgaaacctgcttaaaaaggtgtatagtccataacaaatgactacaattgtgtgatatgtgatcttaatagtgaagagaccacctatcatctactgtttgactactcttttagtattgtctgatggccgagactatgtctggattcattgggatcattcatttagaaagaaattcttcatgaagattttggcaatcacggcgtgggaaatatggaaacaacgaaactttgcattattcgggaatgatgacccatctctatcttcttggaggcaacgactgctatgcaagcagtccttctgtgcaagcgtgcaagcaaaccatctgatccattagatcatgatccaaccgtaggtcacatttaacacttaaacccttccaccaccagctcaataatctttataaaaaaaacccctaacaaaccatggttgtatctgtggttggatcgtaatctaatggatcagatggtttgcttgcacgcttgcacagaaggactgcttgcataacagtcattgcccttcttggaaggcttgcttcaatgacacgctgaaattgtatctgattagattgagcccggatcttaatctccttatatctagttggttcttggctttgtaatatggattgtctttccctttttttcccttatcccttttctttcatttttccttcctttcttgtttaccccttttctgtttttgtacaatcgtttacatatcttaaataaaattatactatagaggaccaccctacaattttcccctaaaaatccaaaacgatccaaaaccgtgtcactatctcaagctgttcttagcatcttgaattacagtttttgaatgcaaaaaaatgatctaaacagattctgattgagctgaaattatgcacataactttataagtgatttactaaggtgtccacaaaacttgagctcaaatggatctaaatttcaatagcagatcaggaaactcaaacttgactt

SEQ ID NO: 4955 - DNA, 1189 bp, Zea mays
  Zm_smallRNAprecursor_444
ttcaacacacaatcattgcagttcaggggacagtctagggaaaggacaaatggatctactcttggggcaataacaatttttgttcgagcaaagtctactctttaaactttcagctcatctgctcacctgcctcgttcaagtggatttggaaaccaaaggttctcaagaaaatcaaagtattcatttggcttgtcttaacaaacaaaatcaacacccgaaacctgcttaaaaaggtgtatagtccataacaaatgactacaattgtgtgatatgtgatcttaatagtgaagagaccacctatcatctactgtttgactactcttttagtattgtctgatggccgagactatgtctggattcattgggatcattcatttagaaagaaattcttcatgaagattttggcaatcacggcgtgggaaatatggaaacaacgaaactttgcattattcgggaatgatgacccatctctatcttcttggaggcaacgactgctatgcaagcagtccttctgtgcaagcgtgcaagcaaaccatctgatccattagatcatgatccaaccgtaggtcacatttaacacttaaacccttccaccaccagctcaataatctttataaaaaaaacccctaacaaaccatggttgtatctgtggttggatcgtaatctaatggatcagatggtttgcttgcacgcttgcacagaaggactgcttgcataacagtcattgcccttcttggaaggcttgcttcaatgacacgctgaaattgtatctgattagattgagcccggatcttaatctccttatatctagttggttcttggctttgtaatatggattgtctttccctttttttcccttatcccttttctttcatttttccttcctttcttgtttaccccttttctgtttttgtacaatcgtttacatatcttaaataaaattatactatagaggaccaccctacaattttcccctaaaaatccaaaacgatccaaaaccgtgtcactatctcaagctgttcttagcatcttgaattacagtttttgaatgcaaaaaaatgatctaaacagattctgattgagctgaaattatgcacataactttataagtgatttactaaggtgtccacaaaacttgagctcaaatggatctaaatttcaatagcagatcaggaaactcaaacttgac

SEQ ID NO: 4956 - DNA, 1190 bp, Zea mays
  Zm_smallRNAprecursor_445
ttcaacacacaatcattgcagttcaggggacagtctagggaaaggacaaatggatctactcttggggcaataacaatttttgttcgagcaaagtctactctttaaactttcagctcatctgctcacctgcctcgttcaagtggatttggaaaccaaaggttctcaagaaaatcaaagtattcatttggcttgtcttaacaaacaaaatcaacacccgaaacctgcttaaaaaggtgtatagtccataacaaatgactacaattgtgtgatatgtgatcttaatagtgaagagaccacctatcatctactgtttgactactcttttagtattgtctgatggccgagactatgtctggattcattgggatcattcatttagaaagaaattcttcatgaagattttggcaatcacggcgtgggaaatatggaaacaacgaaactttgcattattcgggaatgatgacccatctctatcttcttggaggcaacgactgctatgcaagcagtccttctgtgcaagcgtgcaagcaaaccatctgatccattagatcatgatccaaccgtaggtcacatttaacacttaaacccttccaccaccagctcaataatctttataaaaaaaacccctaacaaaccatggttgtatctgtggttggatcgtaatctaatggatcagatggtttgcttgcacgcttgcacagaaggactgcttgcataacagtcattgcccttcttggaaggcttgcttcaatgacacgctgaaattgtatctgattagattgagcccggatcttaatctccttatatctagttggttcttggctttgtaatatggattgtctttccctttttttcccttatcccttttctttcatttttccttcctttcttgtttaccccttttctgtttttgtacaatcgtttacatatcttaaataaaattatactatagaggaccaccctacaattttcccctaaaaatccaaaacgatccaaaaccgtgtcactatctcaagctgttcttagcatcttgaattacagtttttgaatgcaaaaaaatgatctaaacagattctgattgagctgaaattatgcacataactttataagtgatttactaaggtgtccacaaaacttgagctcaaatggatctaaatttcaatagcagatcaggaaactcaaacttgact

SEQ ID NO: 4957 - DNA, 1188 bp, Zea mays
  Zm_smallRNAprecursor_446
tcaacacacaatcattgcagttcaggggacagtctagggaaaggacaaatggatctactcttggggcaataacaatttttgttcgagcaaagtctactctttaaactttcagctcatctgctcacctgcctcgttcaagtggatttggaaaccaaaggttctcaagaaaatcaaagtattcatttggcttgtcttaacaaacaaaatcaacacccgaaacctgcttaaaaaggtgtatagtccataacaaatgactacaattgtgtgatatgtgatcttaatagtgaagagaccacctatcatctactgtttgactactcttttagtattgtctgatggccgagactatgtctggattcattgggatcattcatttagaaagaaattcttcatgaagattttggcaatcacggcgtgggaaatatggaaacaacgaaactttgcattattcgggaatgatgacccatctctatcttcttggaggcaacgactgctatgcaagcagtccttctgtgcaagcgtgcaagcaaaccatctgatccattagatcatgatccaaccgtaggtcacatttaacacttaaacccttccaccaccagctcaataatctttataaaaaaaacccctaacaaaccatggttgtatctgtggttggatcgtaatctaatggatcagatggtttgcttgcacgcttgcacagaaggactgcttgcataacagtcattgcccttcttggaaggcttgcttcaatgacacgctgaaattgtatctgattagattgagcccggatcttaatctccttatatctagttggttcttggctttgtaatatggattgtctttccctttttttcccttatcccttttctttcatttttccttcctttcttgtttaccccttttctgtttttgtacaatcgtttacatatcttaaataaaattatactatagaggaccaccctacaattttcccctaaaaatccaaaacgatccaaaaccgtgtcactatctcaagctgttcttagcatcttgaattacagtttttgaatgcaaaaaaatgatctaaacagattctgattgagctgaaattatgcacataactttataagtgatttactaaggtgtccacaaaacttgagctcaaatggatctaaatttcaatagcagatcaggaaactcaaacttgac

SEQ ID NO: 4958 - DNA, 1168 bp, Zea mays
  Zm_smallRNAprecursor_447
caggggacagtctagggaaaggacaaatggatctactcttggggcaataacaatttttgttcgagcaaagtctactctttaaactttcagctcatctgctcacctgcctcgttcaagtggatttggaaaccaaaggttctcaagaaaatcaaagtattcatttggcttgtcttaacaaacaaaatcaacacccgaaacctgcttaaaaaggtgtatagtccataacaaatgactacaattgtgtgatatgtgatcttaatagtgaagagaccacctatcatctactgtttgactactcttttagtattgtctgatggccgagactatgtctggattcattgggatcattcatttagaaagaaattcttcatgaagattttggcaatcacggcgtgggaaatatggaaacaacgaaactttgcattattcgggaatgatgacccatctctatcttcttggaggcaacgactgctatgcaagcagtccttctgtgcaagcgtgcaagcaaaccatctgatccattagatcatgatccaaccgtaggtcacatttaacacttaaacccttccaccaccagctcaataatctttataaaaaaaacccctaacaaaccatggttgtatctgtggttggatcgtaatctaatggatcagatggtttgcttgcacgcttgcacagaaggactgcttgcataacagtcattgcccttcttggaaggcttgcttcaatgacacgctgaaattgtatctgattagattgagcccggatcttaatctccttatatctagttggttcttggctttgtaatatggattgtctttccctttttttcccttatcccttttctttcatttttccttcctttcttgtttaccccttttctgtttttgtacaatcgtttacatatcttaaataaaattatactatagaggaccaccctacaattttcccctaaaaatccaaaacgatccaaaaccgtgtcactatctcaagctgttcttagcatcttgaattacagtttttgaatgcaaaaaaatgatctaaacagattctgattgagctgaaattatgcacataactttataagtgatttactaaggtgtccacaaaacttgagctcaaatggatctaaatttcaatagcagatcaggaaactcaaacttgactt

SEQ ID NO: 4959 - DNA, 1098 bp, Zea mays
  Zm_smallRNAprecursor_448
cccagcgccgtccctctgttttgttctgccgcgagcagctccctggtgctcagacccagcttcgcgcgcttcctgctcccatggcagcgcatcctcgcgctttggccaagttcgtcccatggcgcccggacttctgctcgccccagctccctgttgtcgcgagcttcagcccggatttctctttgtcacgcagctcggcgcctgctgctcgtccctgctgcgcgtgtcgcattcttctattgcgcgcacgaaaattctctgctcacaacgacgtgtcaagtttccgcgtcgaactcctctcgtgcgtgccggtcgtcgtctccaagccgattcttggctgtcgtagtatttttaagttatcccggacatgtctgtggttgtcaggcgtgtctgttgccgtgaactcgcccctggtatccactctgtctctggtccgcgcttccttcacttcggccaggcggggcatcgttccgtgtgctcgcccaagtcaccactgtcaaatcgtcggagtcgctcaactcaccaatcgtatcttggtcagtcatcgatttcatatttatcatggtcctcacgtcagtcgtccctatccgaacttgctagctcgccgactgaccgtcgtgttccttgaaatccctcgtcggccgaccttacgacttagttcgtcgcgtcgggtatgcagctctgtatatgccaccctcctatatcgtcgtcgaagctgtcatcccttgctcgaccccacctcaccagctcgctccaaacacgatctcgtcgtcgtttcgtgtgtcgtcaagaaatcccaagcgtcggatgaagacgtagccaacagcgcgatattccccaagcgctcgacaaattgcctggatcggaaaatcgctaccgatctcgcggattcgagtcagctgttgaaacggtaagctgataaattatttagaatagttcaatcgatgaataaataaatgtgctagtgcgatgctcattaaggtgctcgataaattgcgtaagtcacgaaactctcgtcgacttcgcagttcttgcgattatcgagccaggtttagttatagcgagttatctcgctattccgatcaattagttaattag

SEQ ID NO: 4960 - DNA, 1148 bp, Zea mays
  Zm_smallRNAprecursor_449
tcctcgcgctttggccaagttcgtcccatggcgcccggacttctgctcgccccagctccctgttgtcgcgagcttcagcccggatttctctttgtcacgcagctcggcgcctgctgctcgtccctgctgcgcgtgtcgcattcttctattgcgcgcacgaaaattctctgctcacaacgacgtgtcaagtttccgcgtcgaactcctctcgtgcgtgccggtcgtcgtctccaagccgattcttggctgtcgtagtatttttaagttatcccggacatgtctgtggttgtcaggcgtgtctgttgccgtgaactcgcccctggtatccactctgtctctggtccgcgcttccttcacttcggccaggcggggcatcgttccgtgtgctcgcccaagtcaccactgtcaaatcgtcggagtcgctcaactcaccaatcgtatcttggtcagtcatcgatttcatatttatcatggtcctcacgtcagtcgtccctatccgaacttgctagctcgccgactgaccgtcgtgttccttgaaatccctcgtcggccgaccttacgacttagttcgtcgcgtcgggtatgcagctctgtatatgccaccctcctatatcgtcgtcgaagctgtcatcccttgctcgaccccacctcaccagctcgctccaaacacgatctcgtcgtcgtttcgtgtgtcgtcaagaaatcccaagcgtcggatgaagacgtagccaacagcgcgatattccccaagcgctcgacaaattgcctggatcggaaaatcgctaccgatctcgcggattcgagtcagctgttgaaacggtaagctgataaattatttagaatagttcaatcgatgaataaataaatgtgctagtgcgatgctcattaaggtgctcgataaattgcgtaagtcacgaaactctcgtcgacttcgcagttcttgcgattatcgagccaggtttagttatagcgagttatctcgctattccgatcaattagttaattagtataccgggtagaatatcagtaggcctgtggggtgatggaatatttttatcacttataaagatgtagtataatttataaagcaagggattagttcataatttaattaattaactgataagttgtgtaggctaattgtattt

SEQ ID NO: 4961 - DNA, 1044 bp, Zea mays
  Zm_smallRNAprecursor_450
ctcccatagaccagatctttactcgtgttttgagctcttctagcctttacgcgaagatttgtccactatagatcggttcttctcgtgtgcacataactagaaaaaccagcgagtgatattttttaaccaacttgggctctcactgaaattcgaattggaggccctttcgaagagatgaataaatatgagtgctaacttttgcagtacaggtagaaatcctagattacaagcaatgctagtttagcttaatgaagtattatggctatcagccgttgagttgattttttactagagagatcgaataaacacagacgaccatgcagatcctctgcatgctgctacggtttcggaaaggccacaaaacacatcagaaagacgatctaaccttgttatatatgtactggcttcagatcaagaacccttgagcatgatcagaaactcttaccaatcccaagcctataaagcctctggatctttttttttcagaatgaagaatacatgagtgatattggttcggctcacatcacatccagtcaagaaggacatgagccgaaacaataccacgccatgtcgtcttcttcctcccgcaccatccctctcacccgccatagacctctgaaaccgtgttatctgctggtacccaagcagccgcggcatggctttttaatagggaatgggttggcgccggggtgaagccacgtatttgcgctcctttctactacgggcaaagtacagttgtagctcgtggatctgcttctatgcctctactgtgctagctagtaagagtacatgtctactccctccggttcctatcgattgtcgtttaggcaacgacacagtgtccaaaatataattttaactaatatttttttttaaaatataaataagttcttagtatagttatgtttttataaaagtacttttacgacaattgatgtatataaatattatgttttaaaattaaataaaaatatttatttatagttaaaattttataagtttgatttgaagcttgtccaaaaaaacaactaatatgacatcgga

SEQ ID NO: 4962 - DNA, 1166 bp, Zea mays
  Zm_smallRNAprecursor_451
aaggaagtggaatacacttcatacatggagggagggggaaccagtaaagctcaataaaaataatgcagtgatttgaactaacaagctcccagagaaattttcagtgatccagttcaataaaagcacaatttcttaacttcaagttgtcctcaccaaaaggcgctttggatctttgtgaaacataatggttgtcacaacgcccatatgacctctaagaaaatgggtgcaaaatccaccatccacatcccatacgcagaccttcttgtctgctccggcagttgcaagcaaaccaccagaagcatggcatgccatggccatgataggaccatcatgtccctgtaaagaataggttaaatacattagtttacctcacatggcagtatactagcatattattaacataatggcacgagcaaatttaattgtaaaaaatgttagcctgtagtggtaaatcagtcatggcaacgactgctatgcaagcagtccttctatgcaagcgtgcaagcaaaccatctgatccatttgatcgtgatccaaccgtaggtcacatttaacacttaaacccttccaccactagctcaataatatttataaaaaacccctaacaaaccatggttgtatctgtggttggattgtaatctaatgaatcaaatggtttgcttgcacgcttgcacagaaggactgcttgcataacagttgttgccatcagtcatatagtctctaagttaactaactaacacaacaattagtatggcaggattaagatcaaataatgaaaaaaatttgaaaagctgtgcacatgatctgtaagaaattagtgcatccaattgtaacatcacgttagttagtggaaataataatggtatcctttatctttgcgcaattaaccagaaaagataagatggtaacactaagacgttacaatacagcagccacaattccacgtttaattgaacttcacacaaatcacaatgagaacatatctggtgcacatgaatgtttagtgcacatggtgcatatattaaatcatcaccactcatcttagatctaacgtctctagttgcttggtatgttttgctaaggacgccctctaacgtggtggggtgtagtggtggaaggtgttatttgtaaattacaatgatcaaccagagacgttagatctaaga

SEQ ID NO: 4963 - DNA, 1043 bp, Zea mays
  Zm_smallRNAprecursor_452
ccagttcctccgtgcatactaaaagtcttgtttattctgagtcaggcagtcaggcccatgaggagccggagctgaggcaactcatgcttgcacgatgatttaccggtcttattgtcgccatgcatgattcatgccatgccacacacacatagcatgcacactcctgcacggacacgtcattcgagctaggcgatgcatctggatctagactggagagggaacccgtccaaaccccacccatctatcgcttacagttcgccgtcgtcgtagctatccttatcaccagcacgcataaaaaaaatctaggcgagaaataaatttaaacagacacaccaacgacataaacaaaaaaaaacaaaaaaaatgcaaaatatggggcttgaacccacgaccatatggttagaagccttgtgctctaccaagtgggctagatgggctttgtgctcatgtctgcaacaaatattttaataacacaaccgagctcggcgccaagatctgtggcgccgagctcggttccacgtcgacgccacgcgtctgggttgtgccaacgcaacacgacctcggcgccatagcctatggcgccgagctgtgttagctcggcgccataggctatggcgccgagcaaagggtccaaaactgcatttaaaatttttttaggtctaaacgtgattttatttctgtttaagggctaaaatacaaaaaattcggagcctgctacagcctgtacactggagcagcagaggcgagagtggaggcgagagctgacgtggcaggggcgagagagaggctgtgcactggactcagccttatcgcctgagaggccagaagtgcagaaccccgggagctcgctctcgctccctccacctccctccccccttgaccctcccagccgcaaaaccgcaggccgcatcccgcccgccgcccgccgcccacctgtggcaaccgccgcctacataaacgaccaatcgaccactcgccgaaccaagccacccacccaaaacccaatggcgtccaacctcctatccgcggtggcaatcgagaag

SEQ ID NO: 4964 - DNA, 1044 bp, Zea mays
  Zm_smallRNAprecursor_453
ccagttcctccgtgcatactaaaagtcttgtttattctgagtcaggcagtcaggcccatgaggagccggagctgaggcaactcatgcttgcacgatgatttaccggtcttattgtcgccatgcatgattcatgccatgccacacacacatagcatgcacactcctgcacggacacgtcattcgagctaggcgatgcatctggatctagactggagagggaacccgtccaaaccccacccatctatcgcttacagttcgccgtcgtcgtagctatccttatcaccagcacgcataaaaaaaatctaggcgagaaataaatttaaacagacacaccaacgacataaacaaaaaaaaacaaaaaaaatgcaaaatatggggcttgaacccacgaccatatggttagaagccttgtgctctaccaagtgggctagatgggctttgtgctcatgtctgcaacaaatattttaataacacaaccgagctcggcgccaagatctgtggcgccgagctcggttccacgtcgacgccacgcgtctgggttgtgccaacgcaacacgacctcggcgccatagcctatggcgccgagctgtgttagctcggcgccataggctatggcgccgagcaaagggtccaaaactgcatttaaaatttttttaggtctaaacgtgattttatttctgtttaagggctaaaatacaaaaaattcggagcctgctacagcctgtacactggagcagcagaggcgagagtggaggcgagagctgacgtggcaggggcgagagagaggctgtgcactggactcagccttatcgcctgagaggccagaagtgcagaaccccgggagctcgctctcgctccctccacctccctccccccttgaccctcccagccgcaaaaccgcaggccgcatcccgcccgccgcccgccgcccacctgtggcaaccgccgcctacataaacgaccaatcgaccactcgccgaaccaagccacccacccaaaacccaatggcgtccaacctcctatccgcggtggcaatcgagaagg

SEQ ID NO: 4965 - DNA, 1041 bp, Zea mays
  Zm_smallRNAprecursor_454
agttcctccgtgcatactaaaagtcttgtttattctgagtcaggcagtcaggcccatgaggagccggagctgaggcaactcatgcttgcacgatgatttaccggtcttattgtcgccatgcatgattcatgccatgccacacacacatagcatgcacactcctgcacggacacgtcattcgagctaggcgatgcatctggatctagactggagagggaacccgtccaaaccccacccatctatcgcttacagttcgccgtcgtcgtagctatccttatcaccagcacgcataaaaaaaatctaggcgagaaataaatttaaacagacacaccaacgacataaacaaaaaaaaacaaaaaaaatgcaaaatatggggcttgaacccacgaccatatggttagaagccttgtgctctaccaagtgggctagatgggctttgtgctcatgtctgcaacaaatattttaataacacaaccgagctcggcgccaagatctgtggcgccgagctcggttccacgtcgacgccacgcgtctgggttgtgccaacgcaacacgacctcggcgccatagcctatggcgccgagctgtgttagctcggcgccataggctatggcgccgagcaaagggtccaaaactgcatttaaaatttttttaggtctaaacgtgattttatttctgtttaagggctaaaatacaaaaaattcggagcctgctacagcctgtacactggagcagcagaggcgagagtggaggcgagagctgacgtggcaggggcgagagagaggctgtgcactggactcagccttatcgcctgagaggccagaagtgcagaaccccgggagctcgctctcgctccctccacctccctccccccttgaccctcccagccgcaaaaccgcaggccgcatcccgcccgccgcccgccgcccacctgtggcaaccgccgcctacataaacgaccaatcgaccactcgccgaaccaagccacccacccaaaacccaatggcgtccaacctcctatccgcggtggcaatcgagaag

SEQ ID NO: 4966 - DNA, 1042 bp, Zea mays
  Zm_smallRNAprecursor_455
agttcctccgtgcatactaaaagtcttgtttattctgagtcaggcagtcaggcccatgaggagccggagctgaggcaactcatgcttgcacgatgatttaccggtcttattgtcgccatgcatgattcatgccatgccacacacacatagcatgcacactcctgcacggacacgtcattcgagctaggcgatgcatctggatctagactggagagggaacccgtccaaaccccacccatctatcgcttacagttcgccgtcgtcgtagctatccttatcaccagcacgcataaaaaaaatctaggcgagaaataaatttaaacagacacaccaacgacataaacaaaaaaaaacaaaaaaaatgcaaaatatggggcttgaacccacgaccatatggttagaagccttgtgctctaccaagtgggctagatgggctttgtgctcatgtctgcaacaaatattttaataacacaaccgagctcggcgccaagatctgtggcgccgagctcggttccacgtcgacgccacgcgtctgggttgtgccaacgcaacacgacctcggcgccatagcctatggcgccgagctgtgttagctcggcgccataggctatggcgccgagcaaagggtccaaaactgcatttaaaatttttttaggtctaaacgtgattttatttctgtttaagggctaaaatacaaaaaattcggagcctgctacagcctgtacactggagcagcagaggcgagagtggaggcgagagctgacgtggcaggggcgagagagaggctgtgcactggactcagccttatcgcctgagaggccagaagtgcagaaccccgggagctcgctctcgctccctccacctccctccccccttgaccctcccagccgcaaaaccgcaggccgcatcccgcccgccgcccgccgcccacctgtggcaaccgccgcctacataaacgaccaatcgaccactcgccgaaccaagccacccacccaaaacccaatggcgtccaacctcctatccgcggtggcaatcgagaagg

SEQ ID NO: 4967 - DNA, 1100 bp, Zea mays
  Zm_smallRNAprecursor_456
aattctattagacaaagctggcctcttctgcacgttgttttgtaacacagttcacccttacggctgaagaattaacagatgccgaatatgccgcacgtccaaacaaaattcagacatatccagtagagtcagttatcaaaagatatttatgtaggatccctttcatagaagactatatcctgtagatcaagtagaaagaatcaggatgactcgacactaatgtgtcccacattgcagattcacatccagtcacagatcaagaagcaactttcaataagcaaactgtgaatggcgaaacaagcgagagatctgctcctttaaaattgtgagaagcgttgacagtagtttacaggctgcattgtcccttcaattgcagaacgagcaacgttgaaaaacacatgcagtacaggaaaaaagagcctgtcagacaacctgtaggccaccccagccaggcaagcctgagcaaggaacgatcctctacagcaaccagagcaagcagtagagctgaactcatagccgttaatcacgctctggcccacaggtcatgtctcatcaaccaggcttaagtgcttgcctccttattaatcaaggatgcaacggtacgatcctatagaacagatcctgttcaagtaaggtcgtgctaccggaccccagagctgaacttttaagctggcttctactaaatcgagcaaccgaggtggtactaattaattggtgggagttctggcaaatcgtgtggcctttcaggtcgagcccatctagatgattgtagttgacacttcgcagagctcaatctttggcccaagtgcaatgctggatcttgatacctatggaccatggttgcgttgccggtgatcctgattcctgacagggaaaagaaaatctatacgtccccgctgctgcaaatcctcctatttacagcccctcagtcatagtcgttctcgttcagcgggtcatagaagtcaggttctcctgcgtgcagccaacacatggtggctgcagacgattccccggttgtcagcagcaaccccgactcttgctactgcatcaaacccgtccgcctgtaaaaaggaaaaataaacctttccctcaattttctg

SEQ ID NO: 4968 - DNA, 1061 bp, Zea mays
  Zm_smallRNAprecursor_457
actgccttacgtacaaacagccaccaccgacagcttttttttagaaaccagattttaaaaaccgagataagaaaccagtttcttataaactaatctatcaaagaagaaacaaaacgtagcttgtgatttcaaacagagcctaagtagcttgtaataaacatacgatggcaatgcattatgcatgcatgcatctccttttctctctctagcaacctctatatactactactgctatgtgtctctaattttgcttctctatctaattgatatacatctcggtctcgtctgtgctgctcggttcttcgaaaacggcatgctacattgagtattgaactgtgtcgttgctgctgcactgttagctatatatgagtgtgtatatatatgcaaattaaaaaaaaacaaccccgccgacgcacaggatcgaaaaaagaagaagatgcatatgcagaacgagagaggatacgatgaggatgcatgggaaaataaagctggccgggacgtgatattggcacggctcaatcaaagagtggagcccctcgggcctggagcgcaagctttctgattgaaccgcgccaatatcccgtggctaggtcgtaggtttatagatagacagtggatcgttgctcgaactcgctagagagctagctgctgagggaaggaaggaacagcgtacgtacgtacgtacaatgtgaagagaagcagcaggcggcgcggcagcactcaccattttgtttgtttcgtgcggaggtagctaggtaggtgaacgacgaagaagagcgagagcacgcgcagtgcaaaagaagacgacgaggaggagggggaaggcacggcacggcacgggcttctttaaatagaccttaattgtgtgagatggccggccggccggccggagatgggctgggccggcggccggggagcatgttgaaagcagcactggtgtacgcgtgtgacgacgagtgacgtaccggatgcccgagggacagggaccgcggacgtacactgcaacgccgaattgaagcgcccacagtgtcttacatagaggaggcctgcgggcagaggta

SEQ ID NO: 4969 - DNA, 1109 bp, Zea mays
  Zm_smallRNAprecursor_458
gttcacttcaattgccaatttgcaggagaagaaatgcagcaagtgtgctcttgaagagcaggctggatccttctctcaatggttggatgaaaggaagaggtaagccatagcttttctccttagcaatggatgatatttgtagtttcccaactcgattagctaacatgcatccatatctttcattgctctttttgttgaaggcgtgatatggaagagcttgcaaggttcagaaggaagagctacgtgcacaatgtgctagttcttgctggtagtgttggctttgtggcattcacgttgtcatgcgttgctgatgttatagcagatgaaatgaactagggagaaggggaggggagcacggcggcagcaaatgctccatggttggttcttttggcacctatcaattacacaatataaaccaccttccaatcaattacaagagacacagtaacaaagatgaggtgatataacacatgtgactctaacttgcttttattttgtgaagctaacttgtgaatttgatgcatgtcaaactaaccacaggaaagtgaaacaaaggaaaattgtttcaaaatgtgaaacaaacttgtaagtaacacaggagaaaatgacacacaaaatgccccaagtagcatgtcaaacataaagggcaaaaattataacctagcacaccagccacaaaacttcaaaaatgctactgcaccacagctctagcaaaagtgccttaccatacacatctactgcacctaaccatgaagaaacgaaaaatcatcatcattctgagttctggccctgcagaagaaaacaggcagaattctacaaggactgaaactccaggccagagaacatcagcaggcaacaaatttcaactccagaattttcttacaagcagaagagtattcaccatatcacatagtggcagaagaattaaagttcaaagttccacctgacttgcacagaactaccgacgattaaattcagctgctcatttctctcagttttcttgaacaaagcatctcaatcactaagacaaaagaactcgagcaatgttgtcacgagcaccaaatcagaatgcctttcatccagacaggctctgcttgtttcacttccac

SEQ ID NO: 4970 - DNA, 1096 bp, Zea mays
  Zm_smallRNAprecursor_459
gcaatggatgatatttgtagtttcccaactcgattagctaacatgcatccatatctttcattgctctttttgttgaaggcgtgatatggaagagcttgcaaggttcagaaggaagagctacgtgcacaatgtgctagttcttgctggtagtgttggctttgtggcattcacgttgtcatgcgttgctgatgttatagcagatgaaatgaactagggagaaggggaggggagcacggcggcagcaaatgctccatggttggttcttttggcacctatcaattacacaatataaaccaccttccaatcaattacaagagacacagtaacaaagatgaggtgatataacacatgtgactctaacttgcttttattttgtgaagctaacttgtgaatttgatgcatgtcaaactaaccacaggaaagtgaaacaaaggaaaattgtttcaaaatgtgaaacaaacttgtaagtaacacaggagaaaatgacacacaaaatgccccaagtagcatgtcaaacataaagggcaaaaattataacctagcacaccagccacaaaacttcaaaaatgctactgcaccacagctctagcaaaagtgccttaccatacacatctactgcacctaaccatgaagaaacgaaaaatcatcatcattctgagttctggccctgcagaagaaaacaggcagaattctacaaggactgaaactccaggccagagaacatcagcaggcaacaaatttcaactccagaattttcttacaagcagaagagtattcaccatatcacatagtggcagaagaattaaagttcaaagttccacctgacttgcacagaactaccgacgattaaattcagctgctcatttctctcagttttcttgaacaaagcatctcaatcactaagacaaaagaactcgagcaatgttgtcacgagcaccaaatcagaatgcctttcatccagacaggctctgcttgtttcacttccacgcctccttccaccaccttggcaactccgaggcttgcactgacgctcttgccaatggagcgcaccttcctccaccctgtgttttcatcacaaacatcaccggcgaggcaa

SEQ ID NO: 4971 - DNA, 1098 bp, Zea mays
  Zm_smallRNAprecursor_460
gcaatggatgatatttgtagtttcccaactcgattagctaacatgcatccatatctttcattgctctttttgttgaaggcgtgatatggaagagcttgcaaggttcagaaggaagagctacgtgcacaatgtgctagttcttgctggtagtgttggctttgtggcattcacgttgtcatgcgttgctgatgttatagcagatgaaatgaactagggagaaggggaggggagcacggcggcagcaaatgctccatggttggttcttttggcacctatcaattacacaatataaaccaccttccaatcaattacaagagacacagtaacaaagatgaggtgatataacacatgtgactctaacttgcttttattttgtgaagctaacttgtgaatttgatgcatgtcaaactaaccacaggaaagtgaaacaaaggaaaattgtttcaaaatgtgaaacaaacttgtaagtaacacaggagaaaatgacacacaaaatgccccaagtagcatgtcaaacataaagggcaaaaattataacctagcacaccagccacaaaacttcaaaaatgctactgcaccacagctctagcaaaagtgccttaccatacacatctactgcacctaaccatgaagaaacgaaaaatcatcatcattctgagttctggccctgcagaagaaaacaggcagaattctacaaggactgaaactccaggccagagaacatcagcaggcaacaaatttcaactccagaattttcttacaagcagaagagtattcaccatatcacatagtggcagaagaattaaagttcaaagttccacctgacttgcacagaactaccgacgattaaattcagctgctcatttctctcagttttcttgaacaaagcatctcaatcactaagacaaaagaactcgagcaatgttgtcacgagcaccaaatcagaatgcctttcatccagacaggctctgcttgtttcacttccacgcctccttccaccaccttggcaactccgaggcttgcactgacgctcttgccaatggagcgcaccttcctccaccctgtgttttcatcacaaacatcaccggcgaggcaatc

SEQ ID NO: 4972 - DNA, 1095 bp, Zea mays
  Zm_smallRNAprecursor_461
caatggatgatatttgtagtttcccaactcgattagctaacatgcatccatatctttcattgctctttttgttgaaggcgtgatatggaagagcttgcaaggttcagaaggaagagctacgtgcacaatgtgctagttcttgctggtagtgttggctttgtggcattcacgttgtcatgcgttgctgatgttatagcagatgaaatgaactagggagaaggggaggggagcacggcggcagcaaatgctccatggttggttcttttggcacctatcaattacacaatataaaccaccttccaatcaattacaagagacacagtaacaaagatgaggtgatataacacatgtgactctaacttgcttttattttgtgaagctaacttgtgaatttgatgcatgtcaaactaaccacaggaaagtgaaacaaaggaaaattgtttcaaaatgtgaaacaaacttgtaagtaacacaggagaaaatgacacacaaaatgccccaagtagcatgtcaaacataaagggcaaaaattataacctagcacaccagccacaaaacttcaaaaatgctactgcaccacagctctagcaaaagtgccttaccatacacatctactgcacctaaccatgaagaaacgaaaaatcatcatcattctgagttctggccctgcagaagaaaacaggcagaattctacaaggactgaaactccaggccagagaacatcagcaggcaacaaatttcaactccagaattttcttacaagcagaagagtattcaccatatcacatagtggcagaagaattaaagttcaaagttccacctgacttgcacagaactaccgacgattaaattcagctgctcatttctctcagttttcttgaacaaagcatctcaatcactaagacaaaagaactcgagcaatgttgtcacgagcaccaaatcagaatgcctttcatccagacaggctctgcttgtttcacttccacgcctccttccaccaccttggcaactccgaggcttgcactgacgctcttgccaatggagcgcaccttcctccaccctgtgttttcatcacaaacatcaccggcgaggcaa

SEQ ID NO: 4973 - DNA, 1190 bp, Zea mays
  Zm_smallRNAprecursor_462
gcaaggttcagaaggaagagctacgtgcacaatgtgctagttcttgctggtagtgttggctttgtggcattcacgttgtcatgcgttgctgatgttatagcagatgaaatgaactagggagaaggggaggggagcacggcggcagcaaatgctccatggttggttcttttggcacctatcaattacacaatataaaccaccttccaatcaattacaagagacacagtaacaaagatgaggtgatataacacatgtgactctaacttgcttttattttgtgaagctaacttgtgaatttgatgcatgtcaaactaaccacaggaaagtgaaacaaaggaaaattgtttcaaaatgtgaaacaaacttgtaagtaacacaggagaaaatgacacacaaaatgccccaagtagcatgtcaaacataaagggcaaaaattataacctagcacaccagccacaaaacttcaaaaatgctactgcaccacagctctagcaaaagtgccttaccatacacatctactgcacctaaccatgaagaaacgaaaaatcatcatcattctgagttctggccctgcagaagaaaacaggcagaattctacaaggactgaaactccaggccagagaacatcagcaggcaacaaatttcaactccagaattttcttacaagcagaagagtattcaccatatcacatagtggcagaagaattaaagttcaaagttccacctgacttgcacagaactaccgacgattaaattcagctgctcatttctctcagttttcttgaacaaagcatctcaatcactaagacaaaagaactcgagcaatgttgtcacgagcaccaaatcagaatgcctttcatccagacaggctctgcttgtttcacttccacgcctccttccaccaccttggcaactccgaggcttgcactgacgctcttgccaatggagcgcaccttcctccaccctgtgttttcatcacaaacatcaccggcgaggcaatcaagtgaccaatataaccaaccccaatgctataaatactgtgcatgatctccttcgtcttctggtcacccgatatcgcgtgaaccttatcgcgagctttctctacggcgaactcgatgccgtacagaaagcccacgtacggcccctatagcgatgagctccaggaaaacgatagccacgattactatggt

SEQ ID NO: 4974 - DNA, 1184 bp, Zea mays
  Zm_smallRNAprecursor_463
ttcagaaggaagagctacgtgcacaatgtgctagttcttgctggtagtgttggctttgtggcattcacgttgtcatgcgttgctgatgttatagcagatgaaatgaactagggagaaggggaggggagcacggcggcagcaaatgctccatggttggttcttttggcacctatcaattacacaatataaaccaccttccaatcaattacaagagacacagtaacaaagatgaggtgatataacacatgtgactctaacttgcttttattttgtgaagctaacttgtgaatttgatgcatgtcaaactaaccacaggaaagtgaaacaaaggaaaattgtttcaaaatgtgaaacaaacttgtaagtaacacaggagaaaatgacacacaaaatgccccaagtagcatgtcaaacataaagggcaaaaattataacctagcacaccagccacaaaacttcaaaaatgctactgcaccacagctctagcaaaagtgccttaccatacacatctactgcacctaaccatgaagaaacgaaaaatcatcatcattctgagttctggccctgcagaagaaaacaggcagaattctacaaggactgaaactccaggccagagaacatcagcaggcaacaaatttcaactccagaattttcttacaagcagaagagtattcaccatatcacatagtggcagaagaattaaagttcaaagttccacctgacttgcacagaactaccgacgattaaattcagctgctcatttctctcagttttcttgaacaaagcatctcaatcactaagacaaaagaactcgagcaatgttgtcacgagcaccaaatcagaatgcctttcatccagacaggctctgcttgtttcacttccacgcctccttccaccaccttggcaactccgaggcttgcactgacgctcttgccaatggagcgcaccttcctccaccctgtgttttcatcacaaacatcaccggcgaggcaatcaagtgaccaatataaccaaccccaatgctataaatactgtgcatgatctccttcgtcttctggtcacccgatatcgcgtgaaccttatcgcgagctttctctacggcgaactcgatgccgtacagaaagcccacgtacggcccctatagcgatgagctccaggaaaacgatagccacgattactatggt

SEQ ID NO: 4975 - DNA, 1191 bp, Zea mays
  Zm_smallRNAprecursor_464
ttttggcacctatcaattacacaatataaaccaccttccaatcaattacaagagacacagtaacaaagatgaggtgatataacacatgtgactctaacttgcttttattttgtgaagctaacttgtgaatttgatgcatgtcaaactaaccacaggaaagtgaaacaaaggaaaattgtttcaaaatgtgaaacaaacttgtaagtaacacaggagaaaatgacacacaaaatgccccaagtagcatgtcaaacataaagggcaaaaattataacctagcacaccagccacaaaacttcaaaaatgctactgcaccacagctctagcaaaagtgccttaccatacacatctactgcacctaaccatgaagaaacgaaaaatcatcatcattctgagttctggccctgcagaagaaaacaggcagaattctacaaggactgaaactccaggccagagaacatcagcaggcaacaaatttcaactccagaattttcttacaagcagaagagtattcaccatatcacatagtggcagaagaattaaagttcaaagttccacctgacttgcacagaactaccgacgattaaattcagctgctcatttctctcagttttcttgaacaaagcatctcaatcactaagacaaaagaactcgagcaatgttgtcacgagcaccaaatcagaatgcctttcatccagacaggctctgcttgtttcacttccacgcctccttccaccaccttggcaactccgaggcttgcactgacgctcttgccaatggagcgcaccttcctccaccctgtgttttcatcacaaacatcaccggcgaggcaatcaagtgaccaatataaccaaccccaatgctataaatactgtgcatgatctccttcgtcttctggtcacccgatatcgcgtgaaccttatcgcgagctttctctacggcgaactcgatgccgtacagaaagcccacgtacggcccctatagcgatgagctccaggaaaacgatagccacgattactatggtttggtctcgacgatggattctggtgttatccatctggatggcactgcaacggcaaaacgaaacgggttactgttattgatcggctccattccttacatcagagaaatacagtttgaaaaggatctggtcagttaaatctggatcatcatctaatcatgtgctcctat

SEQ ID NO: 4976 - DNA, 1059 bp, Zea mays
  Zm_smallRNAprecursor_465
atataaaccaccttccaatcaattacaagagacacagtaacaaagatgaggtgatataacacatgtgactctaacttgcttttattttgtgaagctaacttgtgaatttgatgcatgtcaaactaaccacaggaaagtgaaacaaaggaaaattgtttcaaaatgtgaaacaaacttgtaagtaacacaggagaaaatgacacacaaaatgccccaagtagcatgtcaaacataaagggcaaaaattataacctagcacaccagccacaaaacttcaaaaatgctactgcaccacagctctagcaaaagtgccttaccatacacatctactgcacctaaccatgaagaaacgaaaaatcatcatcattctgagttctggccctgcagaagaaaacaggcagaattctacaaggactgaaactccaggccagagaacatcagcaggcaacaaatttcaactccagaattttcttacaagcagaagagtattcaccatatcacatagtggcagaagaattaaagttcaaagttccacctgacttgcacagaactaccgacgattaaattcagctgctcatttctctcagttttcttgaacaaagcatctcaatcactaagacaaaagaactcgagcaatgttgtcacgagcaccaaatcagaatgcctttcatccagacaggctctgcttgtttcacttccacgcctccttccaccaccttggcaactccgaggcttgcactgacgctcttgccaatggagcgcaccttcctccaccctgtgttttcatcacaaacatcaccggcgaggcaatcaagtgaccaatataaccaaccccaatgctataaatactgtgcatgatctccttcgtcttctggtcacccgatatcgcgtgaaccttatcgcgagctttctctacggcgaactcgatgccgtacagaaagcccacgtacggcccctatagcgatgagctccaggaaaacgatagccacgattactatggtttggtctcgacgatggattctggtgttatccatctggatggcactgcaacggcaaaac

SEQ ID NO: 4977 - DNA, 1048 bp, Zea mays
  Zm_smallRNAprecursor_466
aactaaccacaggaaagtgaaacaaaggaaaattgtttcaaaatgtgaaacaaacttgtaagtaacacaggagaaaatgacacacaaaatgccccaagtagcatgtcaaacataaagggcaaaaattataacctagcacaccagccacaaaacttcaaaaatgctactgcaccacagctctagcaaaagtgccttaccatacacatctactgcacctaaccatgaagaaacgaaaaatcatcatcattctgagttctggccctgcagaagaaaacaggcagaattctacaaggactgaaactccaggccagagaacatcagcaggcaacaaatttcaactccagaattttcttacaagcagaagagtattcaccatatcacatagtggcagaagaattaaagttcaaagttccacctgacttgcacagaactaccgacgattaaattcagctgctcatttctctcagttttcttgaacaaagcatctcaatcactaagacaaaagaactcgagcaatgttgtcacgagcaccaaatcagaatgcctttcatccagacaggctctgcttgtttcacttccacgcctccttccaccaccttggcaactccgaggcttgcactgacgctcttgccaatggagcgcaccttcctccaccctgtgttttcatcacaaacatcaccggcgaggcaatcaagtgaccaatataaccaaccccaatgctataaatactgtgcatgatctccttcgtcttctggtcacccgatatcgcgtgaaccttatcgcgagctttctctacggcgaactcgatgccgtacagaaagcccacgtacggcccctatagcgatgagctccaggaaaacgatagccacgattactatggtttggtctcgacgatggattctggtgttatccatctggatggcactgcaacggcaaaacgaaacgggttactgttattgatcggctccattccttacatcagagaaatacagtttgaaaaggatctggtcagttaaatctggatcatcatctaatcatgtgctcctat

SEQ ID NO: 4978 - DNA, 1051 bp, Zea mays
  Zm_smallRNAprecursor_467
aactaaccacaggaaagtgaaacaaaggaaaattgtttcaaaatgtgaaacaaacttgtaagtaacacaggagaaaatgacacacaaaatgccccaagtagcatgtcaaacataaagggcaaaaattataacctagcacaccagccacaaaacttcaaaaatgctactgcaccacagctctagcaaaagtgccttaccatacacatctactgcacctaaccatgaagaaacgaaaaatcatcatcattctgagttctggccctgcagaagaaaacaggcagaattctacaaggactgaaactccaggccagagaacatcagcaggcaacaaatttcaactccagaattttcttacaagcagaagagtattcaccatatcacatagtggcagaagaattaaagttcaaagttccacctgacttgcacagaactaccgacgattaaattcagctgctcatttctctcagttttcttgaacaaagcatctcaatcactaagacaaaagaactcgagcaatgttgtcacgagcaccaaatcagaatgcctttcatccagacaggctctgcttgtttcacttccacgcctccttccaccaccttggcaactccgaggcttgcactgacgctcttgccaatggagcgcaccttcctccaccctgtgttttcatcacaaacatcaccggcgaggcaatcaagtgaccaatataaccaaccccaatgctataaatactgtgcatgatctccttcgtcttctggtcacccgatatcgcgtgaaccttatcgcgagctttctctacggcgaactcgatgccgtacagaaagcccacgtacggcccctatagcgatgagctccaggaaaacgatagccacgattactatggtttggtctcgacgatggattctggtgttatccatctggatggcactgcaacggcaaaacgaaacgggttactgttattgatcggctccattccttacatcagagaaatacagtttgaaaaggatctggtcagttaaatctggatcatcatctaatcatgtgctcctatgca

SEQ ID NO: 4979 - DNA, 1193 bp, Zea mays
  Zm_smallRNAprecursor_468
cataaagggcaaaaattataacctagcacaccagccacaaaacttcaaaaatgctactgcaccacagctctagcaaaagtgccttaccatacacatctactgcacctaaccatgaagaaacgaaaaatcatcatcattctgagttctggccctgcagaagaaaacaggcagaattctacaaggactgaaactccaggccagagaacatcagcaggcaacaaatttcaactccagaattttcttacaagcagaagagtattcaccatatcacatagtggcagaagaattaaagttcaaagttccacctgacttgcacagaactaccgacgattaaattcagctgctcatttctctcagttttcttgaacaaagcatctcaatcactaagacaaaagaactcgagcaatgttgtcacgagcaccaaatcagaatgcctttcatccagacaggctctgcttgtttcacttccacgcctccttccaccaccttggcaactccgaggcttgcactgacgctcttgccaatggagcgcaccttcctccaccctgtgttttcatcacaaacatcaccggcgaggcaatcaagtgaccaatataaccaaccccaatgctataaatactgtgcatgatctccttcgtcttctggtcacccgatatcgcgtgaaccttatcgcgagctttctctacggcgaactcgatgccgtacagaaagcccacgtacggcccctatagcgatgagctccaggaaaacgatagccacgattactatggtttggtctcgacgatggattctggtgttatccatctggatggcactgcaacggcaaaacgaaacgggttactgttattgatcggctccattccttacatcagagaaatacagtttgaaaaggatctggtcagttaaatctggatcatcatctaatcatgtgctcctatgcattcatctaaccaggaattgtctcttttgtgctctaaccgaggctcaagcaattccagagtagctgaataacctctatatagttttgattgaaaataatatctatgactaggagcaagcaagtatcacacatggtttattccagtcttcactgcttatatcacaaagaggatgaaccactatttgcattgagaaaaactgaatgcaccagcaagtcaccaagtattacgtacctctggtgttggagaattaac

SEQ ID NO: 4980 - DNA, 1078 bp, Zea mays
  Zm_smallRNAprecursor_469
aacttcaaaaatgctactgcaccacagctctagcaaaagtgccttaccatacacatctactgcacctaaccatgaagaaacgaaaaatcatcatcattctgagttctggccctgcagaagaaaacaggcagaattctacaaggactgaaactccaggccagagaacatcagcaggcaacaaatttcaactccagaattttcttacaagcagaagagtattcaccatatcacatagtggcagaagaattaaagttcaaagttccacctgacttgcacagaactaccgacgattaaattcagctgctcatttctctcagttttcttgaacaaagcatctcaatcactaagacaaaagaactcgagcaatgttgtcacgagcaccaaatcagaatgcctttcatccagacaggctctgcttgtttcacttccacgcctccttccaccaccttggcaactccgaggcttgcactgacgctcttgccaatggagcgcaccttcctccaccctgtgttttcatcacaaacatcaccggcgaggcaatcaagtgaccaatataaccaaccccaatgctataaatactgtgcatgatctccttcgtcttctggtcacccgatatcgcgtgaaccttatcgcgagctttctctacggcgaactcgatgccgtacagaaagcccacgtacggcccctatagcgatgagctccaggaaaacgatagccacgattactatggtttggtctcgacgatggattctggtgttatccatctggatggcactgcaacggcaaaacgaaacgggttactgttattgatcggctccattccttacatcagagaaatacagtttgaaaaggatctggtcagttaaatctggatcatcatctaatcatgtgctcctatgcattcatctaaccaggaattgtctcttttgtgctctaaccgaggctcaagcaattccagagtagctgaataacctctatatagttttgattgaaaataatatctatgactaggagcaagcaagtatcacacatggtttattccagtcttcactgcttatatcacaaagaggatgaacca

SEQ ID NO: 4981 - DNA, 1071 bp, Zea mays
  Zm_smallRNAprecursor_470
gaaacgaaaaatcatcatcattctgagttctggccctgcagaagaaaacaggcagaattctacaaggactgaaactccaggccagagaacatcagcaggcaacaaatttcaactccagaattttcttacaagcagaagagtattcaccatatcacatagtggcagaagaattaaagttcaaagttccacctgacttgcacagaactaccgacgattaaattcagctgctcatttctctcagttttcttgaacaaagcatctcaatcactaagacaaaagaactcgagcaatgttgtcacgagcaccaaatcagaatgcctttcatccagacaggctctgcttgtttcacttccacgcctccttccaccaccttggcaactccgaggcttgcactgacgctcttgccaatggagcgcaccttcctccaccctgtgttttcatcacaaacatcaccggcgaggcaatcaagtgaccaatataaccaaccccaatgctataaatactgtgcatgatctccttcgtcttctggtcacccgatatcgcgtgaaccttatcgcgagctttctctacggcgaactcgatgccgtacagaaagcccacgtacggcccctatagcgatgagctccaggaaaacgatagccacgattactatggtttggtctcgacgatggattctggtgttatccatctggatggcactgcaacggcaaaacgaaacgggttactgttattgatcggctccattccttacatcagagaaatacagtttgaaaaggatctggtcagttaaatctggatcatcatctaatcatgtgctcctatgcattcatctaaccaggaattgtctcttttgtgctctaaccgaggctcaagcaattccagagtagctgaataacctctatatagttttgattgaaaataatatctatgactaggagcaagcaagtatcacacatggtttattccagtcttcactgcttatatcacaaagaggatgaaccactatttgcattgagaaaaactgaatgcaccagcaagtcaccaagtattacgtacctctggtgttggaga

SEQ ID NO: 4982 - DNA, 1084 bp, Zea mays
  Zm_smallRNAprecursor_471
aaacgaaaaatcatcatcattctgagttctggccctgcagaagaaaacaggcagaattctacaaggactgaaactccaggccagagaacatcagcaggcaacaaatttcaactccagaattttcttacaagcagaagagtattcaccatatcacatagtggcagaagaattaaagttcaaagttccacctgacttgcacagaactaccgacgattaaattcagctgctcatttctctcagttttcttgaacaaagcatctcaatcactaagacaaaagaactcgagcaatgttgtcacgagcaccaaatcagaatgcctttcatccagacaggctctgcttgtttcacttccacgcctccttccaccaccttggcaactccgaggcttgcactgacgctcttgccaatggagcgcaccttcctccaccctgtgttttcatcacaaacatcaccggcgaggcaatcaagtgaccaatataaccaaccccaatgctataaatactgtgcatgatctccttcgtcttctggtcacccgatatcgcgtgaaccttatcgcgagctttctctacggcgaactcgatgccgtacagaaagcccacgtacggcccctatagcgatgagctccaggaaaacgatagccacgattactatggtttggtctcgacgatggattctggtgttatccatctggatggcactgcaacggcaaaacgaaacgggttactgttattgatcggctccattccttacatcagagaaatacagtttgaaaaggatctggtcagttaaatctggatcatcatctaatcatgtgctcctatgcattcatctaaccaggaattgtctcttttgtgctctaaccgaggctcaagcaattccagagtagctgaataacctctatatagttttgattgaaaataatatctatgactaggagcaagcaagtatcacacatggtttattccagtcttcactgcttatatcacaaagaggatgaaccactatttgcattgagaaaaactgaatgcaccagcaagtcaccaagtattacgtacctctggtgttggagaattaacgcactgtc

SEQ ID NO: 4983 - DNA, 1138 bp, Zea mays
  Zm_smallRNAprecursor_472
ggactgaaactccaggccagagaacatcagcaggcaacaaatttcaactccagaattttcttacaagcagaagagtattcaccatatcacatagtggcagaagaattaaagttcaaagttccacctgacttgcacagaactaccgacgattaaattcagctgctcatttctctcagttttcttgaacaaagcatctcaatcactaagacaaaagaactcgagcaatgttgtcacgagcaccaaatcagaatgcctttcatccagacaggctctgcttgtttcacttccacgcctccttccaccaccttggcaactccgaggcttgcactgacgctcttgccaatggagcgcaccttcctccaccctgtgttttcatcacaaacatcaccggcgaggcaatcaagtgaccaatataaccaaccccaatgctataaatactgtgcatgatctccttcgtcttctggtcacccgatatcgcgtgaaccttatcgcgagctttctctacggcgaactcgatgccgtacagaaagcccacgtacggcccctatagcgatgagctccaggaaaacgatagccacgattactatggtttggtctcgacgatggattctggtgttatccatctggatggcactgcaacggcaaaacgaaacgggttactgttattgatcggctccattccttacatcagagaaatacagtttgaaaaggatctggtcagttaaatctggatcatcatctaatcatgtgctcctatgcattcatctaaccaggaattgtctcttttgtgctctaaccgaggctcaagcaattccagagtagctgaataacctctatatagttttgattgaaaataatatctatgactaggagcaagcaagtatcacacatggtttattccagtcttcactgcttatatcacaaagaggatgaaccactatttgcattgagaaaaactgaatgcaccagcaagtcaccaagtattacgtacctctggtgttggagaattaacgcactgtctaagaagcagcctcttcgcgacatgtccaagaagccggccgcctgttgttcggggttaccagcatcctcacgaacgtcgccaagcggctggttcttcgggtcctcgccggcggcgact

SEQ ID NO: 4984 - DNA, 1079 bp, Zea mays
  Zm_smallRNAprecursor_473
tccaggccagagaacatcagcaggcaacaaatttcaactccagaattttcttacaagcagaagagtattcaccatatcacatagtggcagaagaattaaagttcaaagttccacctgacttgcacagaactaccgacgattaaattcagctgctcatttctctcagttttcttgaacaaagcatctcaatcactaagacaaaagaactcgagcaatgttgtcacgagcaccaaatcagaatgcctttcatccagacaggctctgcttgtttcacttccacgcctccttccaccaccttggcaactccgaggcttgcactgacgctcttgccaatggagcgcaccttcctccaccctgtgttttcatcacaaacatcaccggcgaggcaatcaagtgaccaatataaccaaccccaatgctataaatactgtgcatgatctccttcgtcttctggtcacccgatatcgcgtgaaccttatcgcgagctttctctacggcgaactcgatgccgtacagaaagcccacgtacggcccctatagcgatgagctccaggaaaacgatagccacgattactatggtttggtctcgacgatggattctggtgttatccatctggatggcactgcaacggcaaaacgaaacgggttactgttattgatcggctccattccttacatcagagaaatacagtttgaaaaggatctggtcagttaaatctggatcatcatctaatcatgtgctcctatgcattcatctaaccaggaattgtctcttttgtgctctaaccgaggctcaagcaattccagagtagctgaataacctctatatagttttgattgaaaataatatctatgactaggagcaagcaagtatcacacatggtttattccagtcttcactgcttatatcacaaagaggatgaaccactatttgcattgagaaaaactgaatgcaccagcaagtcaccaagtattacgtacctctggtgttggagaattaacgcactgtctaagaagcagcctcttcgcgacatgtccaagaagccggccgcctgttgttcggggttaccagcatcctc

SEQ ID NO: 4985 - DNA, 1091 bp, Zea mays
  Zm_smallRNAprecursor_474
ttgtttcacttccacgcctccttccaccaccttggcaactccgaggcttgcactgacgctcttgccaatggagcgcaccttcctccaccctgtgttttcatcacaaacatcaccggcgaggcaatcaagtgaccaatataaccaaccccaatgctataaatactgtgcatgatctccttcgtcttctggtcacccgatatcgcgtgaaccttatcgcgagctttctctacggcgaactcgatgccgtacagaaagcccacgtacggcccctatagcgatgagctccaggaaaacgatagccacgattactatggtttggtctcgacgatggattctggtgttatccatctggatggcactgcaacggcaaaacgaaacgggttactgttattgatcggctccattccttacatcagagaaatacagtttgaaaaggatctggtcagttaaatctggatcatcatctaatcatgtgctcctatgcattcatctaaccaggaattgtctcttttgtgctctaaccgaggctcaagcaattccagagtagctgaataacctctatatagttttgattgaaaataatatctatgactaggagcaagcaagtatcacacatggtttattccagtcttcactgcttatatcacaaagaggatgaaccactatttgcattgagaaaaactgaatgcaccagcaagtcaccaagtattacgtacctctggtgttggagaattaacgcactgtctaagaagcagcctcttcgcgacatgtccaagaagccggccgcctgttgttcggggttaccagcatcctcacgaacgtcgccaagcggctggttcttcgggtcctcgccggcggcgacttccggcttcttggtgcccttgggcggcctcctccattttgtcgcctccgttgccaggcggctgcttctcggggatctcgccggcggcagggtcgtcgccggagaggtcggtcttcttgaggtcctcgctgccgccgccgccgccgccggcggcggccggcttcttggacatgtcgcgaggaggctgattcttagacatgtcgccggcgaggacctaccgctggtacgt

SEQ ID NO: 4986 - DNA, 1047 bp, Zea mays
  Zm_smallRNAprecursor_475
cttccggcttcttggtgcccttgggcggcctcctccattttgtcgcctccgttgccaggcggctgcttctcggggatctcgccggcggcagggtcgtcgccggagaggtcggtcttcttgaggtcctcgctgccgccgccgccgccgccggcggcggccggcttcttggacatgtcgcgaggaggctgattcttagacatgtcgccggcgaggacctaccgctggtacgtaatacttggtgacttgctggtgcattcagtttttctccatgcaaatagtggttcatcctctttgtgatataagcagtgaagactggaataaaccctgtgtgatacttgcttgctcctagtcatagatattattttcaatcaaaactatatagaggttattcagctactctggaattgcttgagcctcggttagagcacaaaagagacaattcctagttagatgaatgcataggagcacatgattagatgatgatccagatttaactgaccagatccttttcaaactgtatttctctgatgtaaggaatggagccgatcaataacagtaacccgtttcgttttgccgttgcagtgccatccagatggataacaccagaatccatcgtcgagaccaaaccatagtaatcgtggctatcgttttcctggagctcatcgctataggggccgtacgtgggctttctgtacggcatcgagttcgccgtagagaaagctcgcgataaggttcacgcgatgtcgggtgaccagaagacgaaggagatcatgcacagtatttatagcattggggttggttatattggtcacttgattgcctcgccggtgatgtttgtgatgaaaacacagggtggaggaaggtgcgctccattggcaagagcgtcagtgcaagcctcggagttgccaaggtggtggaaggaggcgtggaagtgaaacaagcagagcctgtctggatgaaaggcattctgatttggtgcccgtgacaacattgctcgagttcttttgtcttagtgattaagatgctttgttcaagaaaactgagaga

SEQ ID NO: 4987 - DNA, 1071 bp, Zea mays
  Zm_smallRNAprecursor_476
gattcttagacatgtcgccggcgaggacctaccgctggtacgtaatacttggtgacttgctggtgcattcagtttttctccatgcaaatagtggttcatcctctttgtgatataagcagtgaagactggaataaaccctgtgtgatacttgcttgctcctagtcatagatattattttcaatcaaaactatatagaggttattcagctactctggaattgcttgagcctcggttagagcacaaaagagacaattcctagttagatgaatgcataggagcacatgattagatgatgatccagatttaactgaccagatccttttcaaactgtatttctctgatgtaaggaatggagccgatcaataacagtaacccgtttcgttttgccgttgcagtgccatccagatggataacaccagaatccatcgtcgagaccaaaccatagtaatcgtggctatcgttttcctggagctcatcgctataggggccgtacgtgggctttctgtacggcatcgagttcgccgtagagaaagctcgcgataaggttcacgcgatgtcgggtgaccagaagacgaaggagatcatgcacagtatttatagcattggggttggttatattggtcacttgattgcctcgccggtgatgtttgtgatgaaaacacagggtggaggaaggtgcgctccattggcaagagcgtcagtgcaagcctcggagttgccaaggtggtggaaggaggcgtggaagtgaaacaagcagagcctgtctggatgaaaggcattctgatttggtgcccgtgacaacattgctcgagttcttttgtcttagtgattaagatgctttgttcaagaaaactgagagaaatgagcagctgaatttaatcgtcggtagttctgtgcaagtcaggtggaactttgaactttaattcttctgccactatgtgatatggtgaatactcttctgcttgtaagaaaattctggagttgaaatttgttgcctgctgatgttctctggcctggagtttcagtccttgtggaattctgcctgttttcttatgcagggccagaactcag

SEQ ID NO: 4988 - DNA, 1163 bp, Zea mays
  Zm_smallRNAprecursor_477
agcacaaaagagacaattcctagttagatgaatgcataggagcacatgattagatgatgatccagatttaactgaccagatccttttcaaactgtatttctctgatgtaaggaatggagccgatcaataacagtaacccgtttcgttttgccgttgcagtgccatccagatggataacaccagaatccatcgtcgagaccaaaccatagtaatcgtggctatcgttttcctggagctcatcgctataggggccgtacgtgggctttctgtacggcatcgagttcgccgtagagaaagctcgcgataaggttcacgcgatgtcgggtgaccagaagacgaaggagatcatgcacagtatttatagcattggggttggttatattggtcacttgattgcctcgccggtgatgtttgtgatgaaaacacagggtggaggaaggtgcgctccattggcaagagcgtcagtgcaagcctcggagttgccaaggtggtggaaggaggcgtggaagtgaaacaagcagagcctgtctggatgaaaggcattctgatttggtgcccgtgacaacattgctcgagttcttttgtcttagtgattaagatgctttgttcaagaaaactgagagaaatgagcagctgaatttaatcgtcggtagttctgtgcaagtcaggtggaactttgaactttaattcttctgccactatgtgatatggtgaatactcttctgcttgtaagaaaattctggagttgaaatttgttgcctgctgatgttctctggcctggagtttcagtccttgtggaattctgcctgttttcttatgcagggccagaactcagaatgatgatgatttttcgtttcttcatggttaggtgcagtagatgtgtatggtaaggcacttttgctagagctgtggtgcagtagcatttttgaagttttgtggctcgtgtgctaggttataatttttgccctttatgtttgacatgctacttggggcattttgtgtgccattttctcctgtgttacttacaattttgtttcacattttgaaacaattttcctttgtttcactttcctgtggttagtttgacatgcatcaaattcacaagttagcttcacaaaataaaagcaagttagagtcacatgtgttatatcacctcatctttg

SEQ ID NO: 4989 - DNA, 1180 bp, Zea mays
  Zm_smallRNAprecursor_478
agcacaaaagagacaattcctagttagatgaatgcataggagcacatgattagatgatgatccagatttaactgaccagatccttttcaaactgtatttctctgatgtaaggaatggagccgatcaataacagtaacccgtttcgttttgccgttgcagtgccatccagatggataacaccagaatccatcgtcgagaccaaaccatagtaatcgtggctatcgttttcctggagctcatcgctataggggccgtacgtgggctttctgtacggcatcgagttcgccgtagagaaagctcgcgataaggttcacgcgatgtcgggtgaccagaagacgaaggagatcatgcacagtatttatagcattggggttggttatattggtcacttgattgcctcgccggtgatgtttgtgatgaaaacacagggtggaggaaggtgcgctccattggcaagagcgtcagtgcaagcctcggagttgccaaggtggtggaaggaggcgtggaagtgaaacaagcagagcctgtctggatgaaaggcattctgatttggtgcccgtgacaacattgctcgagttcttttgtcttagtgattaagatgctttgttcaagaaaactgagagaaatgagcagctgaatttaatcgtcggtagttctgtgcaagtcaggtggaactttgaactttaattcttctgccactatgtgatatggtgaatactcttctgcttgtaagaaaattctggagttgaaatttgttgcctgctgatgttctctggcctggagtttcagtccttgtggaattctgcctgttttcttatgcagggccagaactcagaatgatgatgatttttcgtttcttcatggttaggtgcagtagatgtgtatggtaaggcacttttgctagagctgtggtgcagtagcatttttgaagttttgtggctcgtgtgctaggttataatttttgccctttatgtttgacatgctacttggggcattttgtgtgccattttctcctgtgttacttacaattttgtttcacattttgaaacaattttcctttgtttcactttcctgtggttagtttgacatgcatcaaattcacaagttagcttcacaaaataaaagcaagttagagtcacatgtgttatatcacctcatctttgttactgtgtctcttgta

SEQ ID NO: 4990 - DNA, 1067 bp, Zea mays
  Zm_smallRNAprecursor_479
catccagatggataacaccagaatccatcgtcgagaccaaaccatagtaatcgtggctatcgttttcctggagctcatcgctataggggccgtacgtgggctttctgtacggcatcgagttcgccgtagagaaagctcgcgataaggttcacgcgatgtcgggtgaccagaagacgaaggagatcatgcacagtatttatagcattggggttggttatattggtcacttgattgcctcgccggtgatgtttgtgatgaaaacacagggtggaggaaggtgcgctccattggcaagagcgtcagtgcaagcctcggagttgccaaggtggtggaaggaggcgtggaagtgaaacaagcagagcctgtctggatgaaaggcattctgatttggtgcccgtgacaacattgctcgagttcttttgtcttagtgattaagatgctttgttcaagaaaactgagagaaatgagcagctgaatttaatcgtcggtagttctgtgcaagtcaggtggaactttgaactttaattcttctgccactatgtgatatggtgaatactcttctgcttgtaagaaaattctggagttgaaatttgttgcctgctgatgttctctggcctggagtttcagtccttgtggaattctgcctgttttcttatgcagggccagaactcagaatgatgatgatttttcgtttcttcatggttaggtgcagtagatgtgtatggtaaggcacttttgctagagctgtggtgcagtagcatttttgaagttttgtggctcgtgtgctaggttataatttttgccctttatgtttgacatgctacttggggcattttgtgtgccattttctcctgtgttacttacaattttgtttcacattttgaaacaattttcctttgtttcactttcctgtggttagtttgacatgcatcaaattcacaagttagcttcacaaaataaaagcaagttagagtcacatgtgttatatcacctcatctttgttactgtgtctcttgtaattgattggaaggtggtttatattgtgtactaaagagggctgaagagtt

SEQ ID NO: 4991 - DNA, 1132 bp, Zea mays
  Zm_smallRNAprecursor_480
caagcctcggagttgccaaggtggtggaaggaggcgtggaagtgaaacaagcagagcctgtctggatgaaaggcattctgatttggtgcccgtgacaacattgctcgagttcttttgtcttagtgattaagatgctttgttcaagaaaactgagagaaatgagcagctgaatttaatcgtcggtagttctgtgcaagtcaggtggaactttgaactttaattcttctgccactatgtgatatggtgaatactcttctgcttgtaagaaaattctggagttgaaatttgttgcctgctgatgttctctggcctggagtttcagtccttgtggaattctgcctgttttcttatgcagggccagaactcagaatgatgatgatttttcgtttcttcatggttaggtgcagtagatgtgtatggtaaggcacttttgctagagctgtggtgcagtagcatttttgaagttttgtggctcgtgtgctaggttataatttttgccctttatgtttgacatgctacttggggcattttgtgtgccattttctcctgtgttacttacaattttgtttcacattttgaaacaattttcctttgtttcactttcctgtggttagtttgacatgcatcaaattcacaagttagcttcacaaaataaaagcaagttagagtcacatgtgttatatcacctcatctttgttactgtgtctcttgtaattgattggaaggtggtttatattgtgtactaaagagggctgaagagtttttgacagattggactggtagcttccccagggtcagaaaaaagaatgtgactcactgactgtaggggaatgccatggaagtgtagatgtgatgtttcttctcaattgtatatgccattggattgatgtttggaaattttacgtgtagtatgtctaagataagtccttttatgtactggttccgtgaacctataaaaatgcttcagctagttcttgagcattagttgtggtagtgtggaagagcaaagcacggttcagatttagcagggttttttttttcgaggaagttcagataaaaatgctttatatatataacaaataatatatccataagttggaatcacctctttctaaacatcatatttaaacca

SEQ ID NO: 4992 - DNA, 1134 bp, Zea mays
  Zm_smallRNAprecursor_481
caagcctcggagttgccaaggtggtggaaggaggcgtggaagtgaaacaagcagagcctgtctggatgaaaggcattctgatttggtgcccgtgacaacattgctcgagttcttttgtcttagtgattaagatgctttgttcaagaaaactgagagaaatgagcagctgaatttaatcgtcggtagttctgtgcaagtcaggtggaactttgaactttaattcttctgccactatgtgatatggtgaatactcttctgcttgtaagaaaattctggagttgaaatttgttgcctgctgatgttctctggcctggagtttcagtccttgtggaattctgcctgttttcttatgcagggccagaactcagaatgatgatgatttttcgtttcttcatggttaggtgcagtagatgtgtatggtaaggcacttttgctagagctgtggtgcagtagcatttttgaagttttgtggctcgtgtgctaggttataatttttgccctttatgtttgacatgctacttggggcattttgtgtgccattttctcctgtgttacttacaattttgtttcacattttgaaacaattttcctttgtttcactttcctgtggttagtttgacatgcatcaaattcacaagttagcttcacaaaataaaagcaagttagagtcacatgtgttatatcacctcatctttgttactgtgtctcttgtaattgattggaaggtggtttatattgtgtactaaagagggctgaagagtttttgacagattggactggtagcttccccagggtcagaaaaaagaatgtgactcactgactgtaggggaatgccatggaagtgtagatgtgatgtttcttctcaattgtatatgccattggattgatgtttggaaattttacgtgtagtatgtctaagataagtccttttatgtactggttccgtgaacctataaaaatgcttcagctagttcttgagcattagttgtggtagtgtggaagagcaaagcacggttcagatttagcagggttttttttttcgaggaagttcagataaaaatgctttatatatataacaaataatatatccataagttggaatcacctctttctaaacatcatatttaaaccatg

SEQ ID NO: 4993 - DNA, 1054 bp, Zea mays
  Zm_smallRNAprecursor_482
catagtcgtctcttacatgtttaaactcaattataagactttcaactttgttcaataaatcaacgttttgtttcgcagctttattttgcaatgactagaaggacagcagcataattaatacatcaggattttaattaaacagcaccaaataaatattgcattattcattaacaagcatctatcatccagcgtccagagttgaactggagaatgagcatatgtaagaaattaacatgcccagttcacatgaggtcacgcagaggaacacgtgagtcgtgagatgttatttgtctttttttctccttccaaaaaatggtatttatgcattcttacgagtttgaatcgacacatccacgaggatggtaacagaagatacgcaggcaacggtataatgttctaactgaagcacaacatctagggacgagttgaactgggcatgttaatttctgtcgtatacctattctctatttcaactctgtacgttaaatgatagatgatagataatgaacaatgcaatccttatttggtattgtttaattagaatattataatgtcttaattatgttattgtccttttagtctttgcaaaatgaagctgtgaaacgaaacgtcgatttattaaaaaagttgaaagtcttaaaattgagcttcaacatgtaagggacgaccgtgacagtttactgtcttatattggaacatgcaaaaaaaatggctgaaaaatatgtcattgaattagactgcgccatgaaaaatgtccctaccattaaggtatgactatatgtttagataacttgatcgttatctagataaattaaactggctaacacgttttcaatgacatcgaaaacatgttggtattagagaaagatcataaaaacattgcaaactaagcttgcaactgtaaaaatattaaatgtatgtacatacctattttttcattagtcattacatgtaatgaactaatgatgatctgttatatctcaataaacacaactcttgtaagaattctctaaaactcaaagatctagtgtatatatatatatatatgcttttc

SEQ ID NO: 4994 - DNA, 1055 bp, Zea mays
  Zm_smallRNAprecursor_483
catagtcgtctcttacatgtttaaactcaattataagactttcaactttgttcaataaatcaacgttttgtttcgcagctttattttgcaatgactagaaggacagcagcataattaatacatcaggattttaattaaacagcaccaaataaatattgcattattcattaacaagcatctatcatccagcgtccagagttgaactggagaatgagcatatgtaagaaattaacatgcccagttcacatgaggtcacgcagaggaacacgtgagtcgtgagatgttatttgtctttttttctccttccaaaaaatggtatttatgcattcttacgagtttgaatcgacacatccacgaggatggtaacagaagatacgcaggcaacggtataatgttctaactgaagcacaacatctagggacgagttgaactgggcatgttaatttctgtcgtatacctattctctatttcaactctgtacgttaaatgatagatgatagataatgaacaatgcaatccttatttggtattgtttaattagaatattataatgtcttaattatgttattgtccttttagtctttgcaaaatgaagctgtgaaacgaaacgtcgatttattaaaaaagttgaaagtcttaaaattgagcttcaacatgtaagggacgaccgtgacagtttactgtcttatattggaacatgcaaaaaaaatggctgaaaaatatgtcattgaattagactgcgccatgaaaaatgtccctaccattaaggtatgactatatgtttagataacttgatcgttatctagataaattaaactggctaacacgttttcaatgacatcgaaaacatgttggtattagagaaagatcataaaaacattgcaaactaagcttgcaactgtaaaaatattaaatgtatgtacatacctattttttcattagtcattacatgtaatgaactaatgatgatctgttatatctcaataaacacaactcttgtaagaattctctaaaactcaaagatctagtgtatatatatatatatatgcttttcg

SEQ ID NO: 4995 - DNA, 1087 bp, Zea mays
  Zm_smallRNAprecursor_484
aataaatcaacgttttgtttcgcagctttattttgcaatgactagaaggacagcagcataattaatacatcaggattttaattaaacagcaccaaataaatattgcattattcattaacaagcatctatcatccagcgtccagagttgaactggagaatgagcatatgtaagaaattaacatgcccagttcacatgaggtcacgcagaggaacacgtgagtcgtgagatgttatttgtctttttttctccttccaaaaaatggtatttatgcattcttacgagtttgaatcgacacatccacgaggatggtaacagaagatacgcaggcaacggtataatgttctaactgaagcacaacatctagggacgagttgaactgggcatgttaatttctgtcgtatacctattctctatttcaactctgtacgttaaatgatagatgatagataatgaacaatgcaatccttatttggtattgtttaattagaatattataatgtcttaattatgttattgtccttttagtctttgcaaaatgaagctgtgaaacgaaacgtcgatttattaaaaaagttgaaagtcttaaaattgagcttcaacatgtaagggacgaccgtgacagtttactgtcttatattggaacatgcaaaaaaaatggctgaaaaatatgtcattgaattagactgcgccatgaaaaatgtccctaccattaaggtatgactatatgtttagataacttgatcgttatctagataaattaaactggctaacacgttttcaatgacatcgaaaacatgttggtattagagaaagatcataaaaacattgcaaactaagcttgcaactgtaaaaatattaaatgtatgtacatacctattttttcattagtcattacatgtaatgaactaatgatgatctgttatatctcaataaacacaactcttgtaagaattctctaaaactcaaagatctagtgtatatatatatatatatgcttttcggctattactaatttttttgggaagagatgaagagaaacatcaaggtattctgtagagtaaggcatttactgccaaatgaaacatt

SEQ ID NO: 4996 - DNA, 1087 bp, Zea mays
  Zm_smallRNAprecursor_485
aataaatcaatgttttgtttcgcagctttattttgcaatgactagaaggacagcagcataattaatacatcaggattttaattaaacagcaccaaataaaaattgcattgttcattaacaaacatctatcatccagcgtctaaagttgaaccggagaatgagcatatgtaagaaattaacatgcccagttcacatgaggtcacgcagaggatcacgtgagtcgtgagatgttatttgtctttttttctccttccaaaaaatggtatttatgcattcttccgagtttgaatcgacacatccacgaggatggtaacagaagatacgcaggcaacggtataatgttctaactgaagcacaacatctagggacgagttgaactgggcatgttaatttctgtcgtatactcattctctatttcaactctatacgttaaatgatagatgacagataatgaaaaatgcaatccttatttggtattgtttaattagaatattataatgtcttaattatgttattgtccttttagtcttttcaaaatgaagctgtgaaacgaaacgtcgatttattaaaaaagttgaaagtcttaaaattgagcttcaacatgtaagggacgaccgtgacagtttactgtcttatattggaacatgcaaaaaaaataactgaaaaatatgtcattgaattagactgcgccatgaaaaatgtctctaccattaaggtatgactatatgtttagataacttgatcgttatctagataaattaaactggctaacacgtttaaatgacatcgaaaacatgttggtattagagaaagatcataagaacattggaaactaagcttataactgtgaaaatattaaatgtatgtacatacctattttttcattaatcattacatgtaatgaactaatgatgatctgttatatctcaataaacataagtttatctgtatgtttcttaacatatgatgtgttcacattgtgtaaaaaaaatttccataaatttttaatatcttcaaccttcttttacctgtacagatgtctaatatgatgtcatcagaaatcataactgagtataaggacatgaaa

SEQ ID NO: 4997 - DNA, 1075 bp, Zea mays
  Zm_smallRNAprecursor_486
ttgaaccacaagagcaaaaatatcaacattgtgttggcaatcttgtagtgataatcttattcatgaacaatgattaccttcttgccacgttggtatgcaagaagttgacatgtcggtacatagatcagttagtaaagaatttgctatttggctaacatatatgcttctctcgaatacttgagttaattggtaattgtttgacaacttgaatggtagtacaagcaatgaagaacttggcatgttggtccataagagtcctcaagatcgatgtaattggttgccatgttggtctgcacagctcctctcatgcatcggaccaatgtaaaaaaacccttaattatagcatacagtagaagccgatggatcgaaaggcgttgcaaacagagtagatagaccggcggcggcgaatcaaataaataataaaaaaaaaacaaacgaactaatttaaacgaaggaaacatggatggatcgaagcgaaacctggaggcgctaagtggagaattccaaagggattgcactgactgatctgcttgtcctcgggcacgtacgtacgtcggcgtcgatcggcaggttagatcaatgcgatccctttggagtcctccactagcttcctgctagtaggcggcataggggggacgacggcaggagagctagctatatagatgccatgccattgatgggacgacggggagagcgaggagaggtccatgccaatgccagctggttaattccggcgatggctgttgcttgctttgcgctctcgctttcgacgtacacgtgggcccgcccggtcccggggtggggtgtgggaggagagacacggcggccccaccacggagatgctgctcctccgatccgtctcaccgggccggccggtggtggagacgacgagctagccaacgccaagcctccgagtctccggaccagaccatgcacgccgcacgcattatcttctggcttgcatttgcctcctctgattcgccgacgcacgctgatctagatgcgtcgtacgatgtgctcgctaagccccgtgcaacgagtcttgccgcacagtgaaatggatgtgcgtgtctac

SEQ ID NO: 4998 - DNA, 1075 bp, Zea mays; identical to SEQ ID NO: 4997
  Zm_smallRNAprecursor_487

SEQ ID NO: 4999 - DNA, 1076 bp, Zea mays
  Zm_smallRNAprecursor_488
ttgaaccacaagagcaaaaatatcaacattgtgttggcaatcttgtagtgataatcttattcatgaacaatgattaccttcttgccacgttggtatgcaagaagttgacatgtcggtacatagatcagttagtaaagaatttgctatttggctaacatatatgcttctctcgaatacttgagttaattggtaattgtttgacaacttgaatggtagtacaagcaatgaagaacttggcatgttggtccataagagtcctcaagatcgatgtaattggttgccatgttggtctgcacagctcctctcatgcatcggaccaatgtaaaaaaacccttaattatagcatacagtagaagccgatggatcgaaaggcgttgcaaacagagtagatagaccggcggcggcgaatcaaataaataataaaaaaaaaacaaacgaactaatttaaacgaaggaaacatggatggatcgaagcgaaacctggaggcgctaagtggagaattccaaagggattgcactgactgatctgcttgtcctcgggcacgtacgtacgtcggcgtcgatcggcaggttagatcaatgcgatccctttggagtcctccactagcttcctgctagtaggcggcataggggggacgacggcaggagagctagctatatagatgccatgccattgatgggacgacggggagagcgaggagaggtccatgccaatgccagctggttaattccggcgatggctgttgcttgctttgcgctctcgctttcgacgtacacgtgggcccgcccggtcccggggtggggtgtgggaggagagacacggcggccccaccacggagatgctgctcctccgatccgtctcaccgggccggccggtggtggagacgacgagctagccaacgccaagcctccgagtctccggaccagaccatgcacgccgcacgcattatcttctggcttgcatttgcctcctctgattcgccgacgcacgctgatctagatgcgtcgtacgatgtgctcgctaagccccgtgcaacgagtcttgccgcacagtgaaatggatgtgcgtgtctact

SEQ ID NO: 5000 - DNA, 1076 bp, Zea mays; identical to SEQ ID NO: 4999
  Zm_smallRNAprecursor_489

SEQ ID NO: 5001 - DNA, 1077 bp, Zea mays
  Zm_smallRNAprecursor_490
ttgaaccacaagagcaaaaatatcaacattgtgttggcaatcttgtagtgataatcttattcatgaacaatgattaccttcttgccacgttggtatgcaagaagttgacatgtcggtacatagatcagttagtaaagaatttgctatttggctaacatatatgcttctctcgaatacttgagttaattggtaattgtttgacaacttgaatggtagtacaagcaatgaagaacttggcatgttggtccataagagtcctcaagatcgatgtaattggttgccatgttggtctgcacagctcctctcatgcatcggaccaatgtaaaaaaacccttaattatagcatacagtagaagccgatggatcgaaaggcgttgcaaacagagtagatagaccggcggcggcgaatcaaataaataataaaaaaaaaacaaacgaactaatttaaacgaaggaaacatggatggatcgaagcgaaacctggaggcgctaagtggagaattccaaagggattgcactgactgatctgcttgtcctcgggcacgtacgtacgtcggcgtcgatcggcaggttagatcaatgcgatccctttggagtcctccactagcttcctgctagtaggcggcataggggggacgacggcaggagagctagctatatagatgccatgccattgatgggacgacggggagagcgaggagaggtccatgccaatgccagctggttaattccggcgatggctgttgcttgctttgcgctctcgctttcgacgtacacgtgggcccgcccggtcccggggtggggtgtgggaggagagacacggcggccccaccacggagatgctgctcctccgatccgtctcaccgggccggccggtggtggagacgacgagctagccaacgccaagcctccgagtctccggaccagaccatgcacgccgcacgcattatcttctggcttgcatttgcctcctctgattcgccgacgcacgctgatctagatgcgtcgtacgatgtgctcgctaagccccgtgcaacgagtcttgccgcacagtgaaatggatgtgcgtgtctactt

SEQ ID NO: 5002 - DNA, 1174 bp, Zea mays
  Zm_smallRNAprecursor_491
acactcactcgtcggcccaagggaccccccggtctcggaacgccgacaaacatatatgttcatatagctgcagcacaaaagataaatgtaggcagtgcctattagtttactaatgttatgaagtagtggtttatgattgttgagtgattaatttggacatgattgatgaccatatttatgtgaaaaatatgatccagtaagtatataaatagtgaaatgcattacagtttatttgaataatatatagtagcacgaagtcatgagcagcacacttgtttccacatcaaaatatcaacccctacttcataaaggtatgtataattcacatcattgcatatatcttcacccacacaatttgagcatacaatgagtctaaaacaacaggtccgtgaacttttatcaaagctaaaggctctatgataaataactaaaccataatcgcacaagaacagtaagatcaatgaagaccgttggtgggcatgtaaaatacctatgggacgcggtggcggaggattgacagcagcggtcggctcgacgacactgtcaacggcggcaccgattagggttgagttcgcgcggagacaaatgaaggcgattcacactgccggaggggggaaggagattaggaagttgcattgtaaagcataaaattaaaaaatcaactcgagcaccttggaatccggacgacatagcgaccgcggacgtgagccaatgtgacgcggggcgcgcaagattgacaacggcagcggctcgacgatgctgtcaacggcggcggcgattaatgttgagggcgtgcggcggtggaggacgacgaaacacgctggcggcggcggatgaacaagaatcgcccaggcgaccgctgaagaaacgcggcgagtcggccaggatggttgaccgcgcgggggttagggtatagaaatgtttgaccgcgtgggaagtggggtagtgggcccattcctttatttctggaacgtgggtcggctgaagtaattatgctaaatcactattatgtataaacggaagaatggaatagcgtaaacatgtagggctcgcggctgttactctgtttacgctaaaatgggtttccgtttacgctaaatttgttcgcttgcgtaaaaagtgatcggacgtgggctggggctctctacagttatatatagagcccagggctctt

SEQ ID NO: 5003 - DNA, 1056 bp, Zea mays
  Zm_smallRNAprecursor_492
gggcggcagcggcagcgccccaacgaacgccacgaaggcgaggtcgtggttgccgcagaggaagacatggcgctgcgctgggtagcgcgtcgggagcgcgaggagaaagttgagaaccctgcgggtgtgcgggccgcggtcgttgtagtcgccgaggaagatgaccagcgcggtggccaaggcgtcggcggggagtgcggcctagaggttggaacagaggctctccagcttcgtgatgtagccgtggacgtcgcccacatagatcaccgcgaggggtggcggcggggcgctggatgcgagcaggtagcggcgggcgcgcggctggcagctagttgcgggcgctcgcggtatacagagggaaaaaagagagacgcgcggcggtgagagatttaggttttgggttaagttcgacggggctcacgtggccgacgaatttaatttaagaacatgggtaccgacgtttctaatacgataagttcgacggttttaccacgggcccacgaatttaatttaagaacgtgggtacccacgttcttatattaacccatgaacataacctaattaagaacgtcggtacccacgttcttaaattaacacacgaacatttattagtttcttgtagtggatgcctcgttggtggcccggaagacgtggtcgttggcggccatatgccaccgatctccgatctccaggtggtgacggccggctagcgtacgttctctcgtcgccggggacgatgcaggtgatggtttatcggctagctgcgcttaatagttttgcacggacaggcaggtagctagcgctagctagcgaggtgtttatatacaccttttccagataagtttgacaacagaattttgacctgtgaaacgatcgatctactatctatctacgtgaaaagataaataggtgatatatcttgaaatgctgattgatcagagtcgaatcttgcgtctacgtgaaaagatgccgacagaccatatgcatgtacgtattgtattgcccgctctgcgtgtacacgacgtggcgcagtttgtatttttgtttctttttctt

SEQ ID NO: 5004 - DNA, 1195 bp, Zea mays
  Zm_smallRNAprecursor_493
aggatgtcgttggtatgttctcctcgtgaaaccccgtcccacatcccgggcacattcctgggccgataggtagatgggcttccgtgacaggatggtggcaacctccgtgacccgtggacccagcgagagtaggccatggtttctccattgggtatcaagatttgagctgggtcagatctagagatggcaacgagtacttatccatcgggtattgcatactcatatttatacccataaaaacaaaatctacccgccataatatccatacccggccacgggtagaaagtatagccacacccgtacccgagtggatattgacacccgatgggtaacccataccagattagcacccgacaaagagtaacaaattacacatttaaatagtcacatatagacaagatataagctcaaatcgctcacaagccataatctaacatattcacatgagttcaaaagttacatgtttagttacagcctacatggccacatcagccttggggatattgctatcgtttggctaaccatgttgttcagccatatttttcgatcaaacaggatgcccgatgagtggagcagtacattagtatcaatcttcaagaagaagggagatattcaaagttgtaccaactatcaagtgattaagctcatgagccacactatgaaactatgggagagagttattgagcatcgcctgagaggaatgacgcatatcatcatgaacaaatttagattcacgtgtggaaggtcaaccatggaagcaattttcttaataaggcaggtcatggagccacataaggagcagaagaaggacttgcacatggtttttatcgacttggaaaaggcctatgataaaatacctaggaatctaatgaggcggacattggataagcataaagtccctattgtagttttagagaaataagtgacatgtttccaaaatatttaaataaattaaatattctaatttcgaataagacaagcatataactcagataaataacatgtgtaattataacagcaatgaacagtagcatttctaggacatgaaaacatgtaacatagctactcaagttcatttgaatattaaacatggcaagtagatgaagaaggcagattaaacacataaacatgattgtttatattaaaatattgctctcaaaatagcgggttgctgcactaaacagccctccaacgc

SEQ ID NO: 5005 - DNA, 1171 bp, Zea mays
  Zm_smallRNAprecursor_494
cagcttgattcgttctgcgcacaactttgtgactgatggggagcatggaatgaaggggacactttttcgaaatcctgcgtcagaaatttgaattttttgaatttttggcgttttccctctgccgtttctggctctctgaccgcactggtcagaaccagttgaactggcctatggggggcggttgaaccggtcctgaggaccagctcaactgcctatatatatttgacactccccttctcttctctcactcaaaccactctcgccttagtctcttcgcaacatttagagccttccctctcactcacctaaaccgcttcacagtttcaccaccgttttcaatcatggtgcgtcgccgcaacccctctgtggttgagtttagcagcgactccgacgagattcaggaggaatctcccatcccctctcctccgcctcgtcgctccctctctaagagaggacgtggctctggtcggatgcctggcgagggctcttccttgccctcgcagccgactcgcgggagacgccaaaaggttggcgcctctcgtcctcgtcgtagcacgtcttcctcagggtatgctccctgccaagaggaggatggggctttcgacgacttcgtcgaccttccggcgcctgatgctctctacgtcaccggactgcacatgcatccggcgaacgtcagccgcggtccgcatgaatctcccatcgacttcactcagaagggaatcgagacccttcagcgtcttaggtttaccaaccctactctcactcctcgtcatcctggtgtccaggaccctcggttctggaatcttttccaggctgacttctacaattctgttattcttaccaagaaacacccagtcgtctgacatagatttattgactgggagggttgtgagaatatgggagatgctgacatgacgtcagctctcgaaaaccttgagagaaaggggttacgtaacattatgaccatggaatacccctggaacgatgaggtggtagctcagttctatgccaccctctggataaagaaagtagatgaggaagccgataggtatgattacccagtcatttatttcttcatccagggtaactggcacaaagtcagttatcgtcgttttgcccatattctgggcttctctgatgcagacattcagggcagcaacatgcgagtgca

SEQ ID NO: 5006 - DNA, 1058 bp, Zea mays
  Zm_smallRNAprecursor_495
agacccttcagcgtcttaggtttaccaaccctactctcactcctcgtcatcctggtgtccaggaccctcggttctggaatcttttccaggctgacttctacaattctgttattcttaccaagaaacacccagtcgtctgacatagatttattgactgggagggttgtgagaatatgggagatgctgacatgacgtcagctctcgaaaaccttgagagaaaggggttacgtaacattatgaccatggaatacccctggaacgatgaggtggtagctcagttctatgccaccctctggataaagaaagtagatgaggaagccgataggtatgattacccagtcatttatttcttcatccagggtaactggcacaaagtcagttatcgtcgttttgcccatattctgggcttctctgatgcagacattcagggcagcaacatgcgagtgcatggcattcggctgcccaggcgggaagagacggaattcattcatgtctctactgagcgggagttctggacaaccgctaacatgcataggtactataggtaccttaattccttgtcccggatgaccgttctcccaaagggcggtaatcaaatgaacgtccttggggagagtcgagtcctcctcctcctccttgctccaaacagtctcgcccgcatcaatgtgtttgacatgatctgggaggagatcgtccgtgcttcctggtctcctcacagagggtgtcttcatgcaccctttatcatgaagatgatcgaagtggtcacccagacccacttcgaaaaacccgtcaaacactcccgctacgtaccctactgggttgattcctccaacccagctgctcgtacgaagcgggttccctcacggtctggaggccctgcctcctcctctgagccacctcgccagcctccccaccatccttcctcctctccccccgctgctgcctcgcgtccctctcctggccgcggatctcccatgccccgtgctcgtggtcgtggtcgaggtcgtggccgcgggatgggtgctcgcttggtcaatgggcttgcgacatttttctcc

SEQ ID NO: 5007 - DNA, 1141 bp, Zea mays
  Zm_smallRNAprecursor_496
agacccttcagcgtcttaggtttaccaaccctactctcactcctcgtcatcctggtgtccaggaccctcggttctggaatcttttccaggctgacttctacaattctgttattcttaccaagaaacacccagtcgtctgacatagatttattgactgggagggttgtgagaatatgggagatgctgacatgacgtcagctctcgaaaaccttgagagaaaggggttacgtaacattatgaccatggaatacccctggaacgatgaggtggtagctcagttctatgccaccctctggataaagaaagtagatgaggaagccgataggtatgattacccagtcatttatttcttcatccagggtaactggcacaaagtcagttatcgtcgttttgcccatattctgggcttctctgatgcagacattcagggcagcaacatgcgagtgcatggcattcggctgcccaggcgggaagagacggaattcattcatgtctctactgagcgggagttctggacaaccgctaacatgcataggtactataggtaccttaattccttgtcccggatgaccgttctcccaaagggcggtaatcaaatgaacgtccttggggagagtcgagtcctcctcctcctccttgctccaaacagtctcgcccgcatcaatgtgtttgacatgatctgggaggagatcgtccgtgcttcctggtctcctcacagagggtgtcttcatgcaccctttatcatgaagatgatcgaagtggtcacccagacccacttcgaaaaacccgtcaaacactcccgctacgtaccctactgggttgattcctccaacccagctgctcgtacgaagcgggttccctcacggtctggaggccctgcctcctcctctgagccacctcgccagcctccccaccatccttcctcctctccccccgctgctgcctcgcgtccctctcctggccgcggatctcccatgccccgtgctcgtggtcgtggtcgaggtcgtggccgcgggatgggtgctcgcttggtcaatgggcttgcgacatttttctccatgtgccgcaacatttctgctgatgtccatgaggtggcacggcgtcagcgggagactgacgacaatcttcgtcgtcaagcttc

SEQ ID NO: 5008 - DNA, 1057 bp, Zea mays
  Zm_smallRNAprecursor_497
gacccttcagcgtcttaggtttaccaaccctactctcactcctcgtcatcctggtgtccaggaccctcggttctggaatcttttccaggctgacttctacaattctgttattcttaccaagaaacacccagtcgtctgacatagatttattgactgggagggttgtgagaatatgggagatgctgacatgacgtcagctctcgaaaaccttgagagaaaggggttacgtaacattatgaccatggaatacccctggaacgatgaggtggtagctcagttctatgccaccctctggataaagaaagtagatgaggaagccgataggtatgattacccagtcatttatttcttcatccagggtaactggcacaaagtcagttatcgtcgttttgcccatattctgggcttctctgatgcagacattcagggcagcaacatgcgagtgcatggcattcggctgcccaggcgggaagagacggaattcattcatgtctctactgagcgggagttctggacaaccgctaacatgcataggtactataggtaccttaattccttgtcccggatgaccgttctcccaaagggcggtaatcaaatgaacgtccttggggagagtcgagtcctcctcctcctccttgctccaaacagtctcgcccgcatcaatgtgtttgacatgatctgggaggagatcgtccgtgcttcctggtctcctcacagagggtgtcttcatgcaccctttatcatgaagatgatcgaagtggtcacccagacccacttcgaaaaacccgtcaaacactcccgctacgtaccctactgggttgattcctccaacccagctgctcgtacgaagcgggttccctcacggtctggaggccctgcctcctcctctgagccacctcgccagcctccccaccatccttcctcctctccccccgctgctgcctcgcgtccctctcctggccgcggatctcccatgccccgtgctcgtggtcgtggtcgaggtcgtggccgcgggatgggtgctcgcttggtcaatgggcttgcgacatttttctcc

SEQ ID NO: 5009 - DNA, 1058 bp, Zea mays
  Zm_smallRNAprecursor_498
gacccttcagcgtcttaggtttaccaaccctactctcactcctcgtcatcctggtgtccaggaccctcggttctggaatcttttccaggctgacttctacaattctgttattcttaccaagaaacacccagtcgtctgacatagatttattgactgggagggttgtgagaatatgggagatgctgacatgacgtcagctctcgaaaaccttgagagaaaggggttacgtaacattatgaccatggaatacccctggaacgatgaggtggtagctcagttctatgccaccctctggataaagaaagtagatgaggaagccgataggtatgattacccagtcatttatttcttcatccagggtaactggcacaaagtcagttatcgtcgttttgcccatattctgggcttctctgatgcagacattcagggcagcaacatgcgagtgcatggcattcggctgcccaggcgggaagagacggaattcattcatgtctctactgagcgggagttctggacaaccgctaacatgcataggtactataggtaccttaattccttgtcccggatgaccgttctcccaaagggcggtaatcaaatgaacgtccttggggagagtcgagtcctcctcctcctccttgctccaaacagtctcgcccgcatcaatgtgtttgacatgatctgggaggagatcgtccgtgcttcctggtctcctcacagagggtgtcttcatgcaccctttatcatgaagatgatcgaagtggtcacccagacccacttcgaaaaacccgtcaaacactcccgctacgtaccctactgggttgattcctccaacccagctgctcgtacgaagcgggttccctcacggtctggaggccctgcctcctcctctgagccacctcgccagcctccccaccatccttcctcctctccccccgctgctgcctcgcgtccctctcctggccgcggatctcccatgccccgtgctcgtggtcgtggtcgaggtcgtggccgcgggatgggtgctcgcttggtcaatgggcttgcgacatttttctcca

SEQ ID NO: 5010 - DNA, 1061 bp, Zea mays
  Zm_smallRNAprecursor_499
attcagcaatattatttgtgcagctgaaatcaagctttactgcatagcatgttctgactttagaaggtgcaactaagacagcagccgcacctgccccgaaggttccccaggaaccgtcacagaacactgtccaagcttctgcatctttatttgcttcttcttcctgagcccctggcatccagtcagcgatgaagtctgctaacgcctgggactgaattgaggatctatgcacataatcaatgctgaatttgttgagttccgcagcccactttccaattcttccagtagcttgtttgttcctcatgatatccttcagaggctatgatgaaagaacaattatatggaatgcttgaaaataatgtcgaagcttcctggaggccattaagacagcatacaacaccttctccaattctgtataatttttatttgataagcttagaacttcggagacaaagtatactgggcttgcactacaggaattcacttaattcccgtcggcctgaaaccgacgggaataagccctaaaccgacgggaataagtaattctcgtcggtttaaggcttattcccgtcggtttcaggccgacaggcgtcccttgtcggggataaggttatccccgtcggcggctgacgggaataattaattcccgtcggctagaaagcggccgacgggaattaaggctaactcccgtcggttccccaggccgacgggagttattaattaattcccgtcggccttacgtggccgacgggaattaactaggccgacgggagttagtagttaattcccgtcggttcgaccatagccgacgggaattaactgggccgacgggaattaccctatactgccacaaaaacagcactaaattatgtcactatttctgcacacataacatatatcaaacataacataaatcacatatgacagccacattacaaacacatgtagagatacgacatccacaaacacatgcatttagacataaacacttgcatttataattaaaacatccaccaacgtgtacgacatagtattcaaacttaacattcaccaacatcaaa

SEQ ID NO: 5011 - DNA, 1097 bp, Zea mays
  Zm_smallRNAprecursor_500
gacactgtccgccctctcctcgtgtacaaaacaagagaaaggaattagataaaaatgaattgaaggaaaggaggaagaggttaaggttgaaagtccccttgtatcctattcaagatgaagaaagtgatgatgaacaagacctagagtttgctcctgccggcgatggttctcgcgacgacaatgttgttattgttggtggcgatgagaattagggtaaaactaagacgcgagctatactgtgctcacctgggaagttcataaagctcgtgaatgctctctctgatgaattgaaaggtgaagtagttgccaaggggtttggcggcctgttgagattcaagccgcactaattgtccagaaaattgctcagctggctgatgcggaagcttaacccagagacgatgaaattagagattggtggtggaaaagagattccaatcactgagcatagtgtttggtgtgttttgcaattaccaaacattggccgtgacccgccccccatgtctgatgcagatgctcgtgccttgcgggacgagctgggagagcaaatttgtggcaactcttatagacgcatatctggtatcaatctatctgttatcactgatcgactgcagaagaggattctcactggggagctgggcctgagagcctttttcatggctgcatttcagtgtctgctattctccaacactgacactcgcatcaggattgatgatgtaaagtatactcaggacatccagaacatggccaacaagaactggtgcaaagcggtagttgacaggctcaacatagctgctcgtctttataaaaaagattttgcggagaaaggcatcaacgcacccatcagtggatgcgggatcttcgtagctgtaagctcaacacacacattcaatttttgcccttgcaacttactcttccaattgcacaagtagtaattgttttatgtttactgttacaactgtcatttgttacaagttgcaatttgatttacttttttgatttttttatgatagcttagttcacacattcacatgtattttgtaatttatgttgtacacaaagtagcaataattttagtattttctattgcaactggctta

SEQ ID NO: 5012 - DNA, 1179 bp, Zea mays
  Zm_smallRNAprecursor_501
aatgtttgctgacctgaccatgtgtttcgtctactgcgcatgtcgtgttcttttttttttccaggttctgcatttcctgtctactactgatgagtgtctgaacgagcccgagaaatggaacattcccgacgacgaggtggacgacatggatgattgtacactgttctctgaatccttttccatgtaattgtagcctcatttttttcccatttccttttagtgtgtgctatgttggcatgccgttcttggcatggggatggaggcattgagctatgttttctggtctttttgtagtcttagaagactggtatttaatcatgtgttatatatataacggggattttgggatgtattcagtgctggtttggctttatcagctagacactacagtaaacgcagaaacgtccgacggccaaagccgtcggacgtaaggaataaaccgtcggaaatagattatttccgacggtaacgccttatctccgacggctttaagccgtcggagataactcgtcggaaatagtgctatgtccgacggctgccgtcggacataagttatctccgacggctgcctatgcccgtcagagataacaaatcccaaccgttttaacggtcgggacgtgggccccacagaattaattccgacggctcccactaggccgtcggacataagcatctcttatgtccgacggcattaactaccgtcggacataactcgttgttatgtccgacggctaccattaggccgtcggacataacaaattacagaatttacacaaaattctgttttttaaaaaatctgacatttacaaaacaaaaacagattcatgcacatatacaaattcacattcacaatcataaatatacacattctaataagtattcacaatcacaaatattctcacataaatattaacattcacaaatttaacatcaacatataggttcgacggttgttgcaaactgaaattgtgtctcacaaacaagtgttgcaaagtgtttcataaaaaaacatcacgacacatcaatcatatccatcgtctggatggttcgagtagccacctcctccggctggactctgcgtgttgaaaatggtgttcacccacgaatttgttgtgtcgtcctgaccagacccatctccaggtgcggcaactgaagcgggtggtgtctgaaatccctata

SEQ ID NO: 5013 - DNA, 1132 bp, Zea mays
  Zm_smallRNAprecursor_502
gttcgtactctccaaactacccgcatcaacaccagctacgcccctcagccccggcagatcctggtcctacccagtggtagtcgaggaagttgcggcggatctccctcccatccgagtggagaatgtagtcatcctggaggatagctcggaggagcagctaccgacgcccaccccgttggcagagtccctggccttcacagctaggtcatcgacgtcagcacagcctgcaccagccttccaagcacctgcacccgaaggcgacgacccctatgactccggagacgacgatggcgaggatgacgatgacgaagaaggtggagatgaacacgtccacgaggaagctgactacgcccagcaggactacttcatggggtttggtcctattgtcgaacattatacatcaatgttcgagacagggcacttccccaacctgctgtaagaagtgctgcacgtgctaggcacctacgtccgccccctgtacgaaacaaggtgagtgagcgagcctccccgggcttgctactacatcactcgcatccacgtcagggtgatggatacaggggacaagggattcaggactctgtctgctcatgagtccctgacaccactgtccacctacgctgcctcggtcagcgatgctgcccgtcggaccctgtggtcgctcagccacacctacgggcagtagctacagaacacgaggttcaggcatcttcctcagcgtctgcgtggaaaaagtcagaccagcatcgtcccaggtgaagctggtgaggatcgcctcaacaccctagctggtgtagtggccggtctcaacaccgacctggacagtcccaccctggatctctctagggtgcacttggagctggagaatgcccatgccaggattgcagccctggaagcccaactgcaaggactggatccgcccgaagctcaggtccccgccatggcgttgtctcctccccgcaagaggctgcgttatggagagcccggatccgtcactaggctgctttaggtgttttgagtcatgatgtaataagttatacttcgcgttagacgatgatactctctttaagttatcatattaataaataacaaccatgtgatggtgattggttgacatgcttgagttggatctttg

SEQ ID NO: 5014 - DNA, 1200 bp, Zea mays
  Zm_smallRNAprecursor_503
acgggaggatgtgagaggaaaaaaaagaaggcagagtacacaccgtttaaaaggcatccaatggactctattaaaaggcgacgtggacaattttgtgtactccgtttggtatccaacgactgagaagaagtgacgtggcaaactcactacacggcatggtgcatagcttttactatagaaatttagccactgcacagaacacctcggtctccgccgccgccgtcggcgtgccccttctggccttcactgtccgcattgaagttctgcccctctctccaacctccattctctcccctaacaaatgaagggcgagtcctctggtctgggcccggacggcagtggccatgcgcggagatccagccgagtcctctgcctccaagtcgctgcccccgagcctgtctaatcgcaattgctctgagtcactggctacagccgcccgcgtgccccttctggccttcactgtctgcattgaagttcttcccctccctccattctccccccaacaaatgaagggcaagggcgagtcctctggtccgcgtccggacggcagtggccatgcgcggagatccagccgacgcattgccggcaaattttcttacaaatatagccgacgcatagccgacccatattcttgctggatcggtggtggctctttggtgaggttcagccgtcgcatcgccggttgcagttctcgtttgactcggtcttcaccttgtcggtccagtcgattgccaggtacctcctcttccttcgcatctgctgaccacaaagtagggttcttgggtcctagggtttttagttcttgtggaatattggaattcagtggtaaattatagagcacttaataggattgcttgctacagaagtatcaagtgtcagctttgtctcagcacctaatcagtaattgcccagtccaataaatagttgtaatattttgtgtttcacttctctgaccattgtttaaaattgttgggggcgcaagggatgacatatcaccctggaacaccgatacacgattttcttgcagaaacccatacaatactttcataacagatggttaaactccttgcatcttttttcccttttaggttggagggatccgttggacatggcatggcctgatgtattggacacacttttcgtggatgcgtgtttcaaagaggttgagaacggcatctatgtaatagaattcactcacct

SEQ ID NO: 5015 - DNA, 1183 bp, Zea mays
  Zm_smallRNAprecursor_504
tttaaaattttgtatagccaataagttacttaaagactatcaaaatctgaccacgttctcccgtctgaaatctcttgaggaaaggattagtttcctggaaggaacctgaaattaaaatctgatggatcagtttcctaccagtaacctggaaattagaatctgatccctcttccttaaaggtaatccagtttgtttaggtcttctgtagtcatgtcagttatttatcttgttcctgtgtttttttgctagtctagtttggccttaaaatctaagaggccagctaaaagcaaatacatgtcatggagactgtgttcaaccttggtttctttctgtttacatgtttttctatcttctgaaagtaatgatgattgtatattgctttctttgtaatagactagcaaaaaaaggtgagtgaattacaatccgtctgaaatctctttctttgaagtatttaaacctattttgcagatacttaagtggaatagtcatattcgtttgttcattaatggattttgtaacattctgccaaaaaaggtgagtgaattctgctacatagatgccgttctcaacctctttgaaacacgcatccacgaaaagtgtgtccaatacatcaggccgtgccatgtccaacggatccctccaacctaaaagggaaaaaaagatgcaaggagtttaaccatctgttctgaaagtattgtatggatttctgcaagcaaatcgtgtatcggtgttccagggtgatatgccatcccttgcgccctaacaattttaaacaatggtcagagaagtgaaacacaaaatagtacaactatttattggactgggcaattactgattatgtgctgagacaaagctgacactcgatacttctgtagcaagcaatcctattaagtgctctataatttaccactgtatttccaatattccacaagaaccttaggaccaagaaccctacttcgtggtcagcagatgcgaaggaagaggaggtacctggcaatcgactggaccgacaaggtgaagaccgagtcaaacgagaactgcaaccggcgatgcgacggctaaacctcaccaaagagccaccaccgatccagcaagaatatgggccgactatgcgtcggctgtattggtaagaaaatttgccggtaatgcgtcggctggatctccgcgcatggccactgccgtc

SEQ ID NO: 5016 - DNA, 1118 bp, Zea mays
  Zm_smallRNAprecursor_505
attgtatggatttctgcaagcaaatcgtgtatcggtgttccagggtgatatgccatcccttgcgccctaacaattttaaacaatggtcagagaagtgaaacacaaaatagtacaactatttattggactgggcaattactgattatgtgctgagacaaagctgacactcgatacttctgtagcaagcaatcctattaagtgctctataatttaccactgtatttccaatattccacaagaaccttaggaccaagaaccctacttcgtggtcagcagatgcgaaggaagaggaggtacctggcaatcgactggaccgacaaggtgaagaccgagtcaaacgagaactgcaaccggcgatgcgacggctaaacctcaccaaagagccaccaccgatccagcaagaatatgggccgactatgcgtcggctgtattggtaagaaaatttgccggtaatgcgtcggctggatctccgcgcatggccactgccgtccgggcgcggaccagaggactcgcccttgcccttcatttgttgggggggggagagggagggggagaacttcaatgcgggcagtgaaggccagaaggggcacgcgggcggctgtagccagtgactcagagcaatggcgattagacaggctcgggggcagcgactcggaggcagaggactcggctggatctccgcgcatggccactgccgtcccggcccggaccagaggactcgcccttcatttgttgggggagagaatggaggttggagggaggggcagaacttcaatgcgggcagtgaaggccagaaggggcacgccggcggcgacggcggagaccgtggtgttctgtgcagtggctaaatttctatagtaaaagctgtgcaccatgctgtgcagggagtttgccacgtcacttctttcttctcagccgttggataccaaacggagtacacaaaattgtccacgtcgcctttcaatagagtccattggatgtgcagggagtttgccacgtcacttctttcttctcagccgttggataccaaacggagtacacaaaattgtccacgtcgcctttcaatagagtccattggatgccttttaaacggtgcgtactctgccttcttttttttc

SEQ ID NO: 5017 - DNA, 1085 bp, Zea mays
  Zm_smallRNAprecursor_506
ggagtagaactgtttgattgtttcttcatgccagttctgttttatagccatcaattcatgaagaccaatgtcatgacatgctttctcaatatctggcatctcaggaatttgtctgatcttttcccaattgatccatttattgtcagcacattacttcttgctatatatattgttgtatagattcatatgctcgttcgaccaaaaacggtcatcgcttgcagttctatcctgtagatacaaatttacgcataccttcccgacactttacagtgtacctaatgaggaccgcatgaagaagaaagttgagaatggaaaattgtcagaaatatttaaaagcaaaattgtttcttcaaaaaaatcaaaaacaaaagatgcaagacttgtgttttgcactccctataggtctagttggttggaaaatcagaaattccacatcttatttattgatgaggcagcatacttaaaagaatgtgaatcattgatccctcttgcaactagtgggataaaacatgtggtgcttgttggggatgacaaacaactacaatcagtggtaaagagcacgatatgtctttattataacttataagaccatttgaatgtatccttgattccttgtgttaccaatgattatttctagactgctaatactttctccttactggtaagattgctaaagagaacaggtttgggcgaagcctctttgagagattaagtggacttgatttcccaaagcacatgctaaatattcaatatagaatgcaccctttcatcagcaagtttccaaatcaaaaattttatgaaggaaaaattatagatggtctgaacgttaaggactataacaatatttatctcgatgtgcatatatatggtccttattcattcatccatgttgaagatggtttcgaagaaaacaataaacagggcttaaaaatattgttgaagctgctgtggtagccaatattgttggcagatttgcggaaggtatgtctaacatttgagctgataaagaacatgtaagtttcattaaagctgatatgtttaagtgtcatccatgtttttttggtctataaccactacagcatgcg

SEQ ID NO: 5018 - DNA, 1114 bp, Zea mays
  Zm_smallRNAprecursor_507
ttcaaactgcattaagaggtcatggtttactattccatttaactgaagattcaccagttttagcagctgatagaagcaacgcagctgcaatcaagacttggcaaatcaatgatggcaaagtaatggctgcaatggtcaatagtactaaaccaactatgattatgagtctgtccaaattcaccactgttagggctatctggtctcatctgaaggatcggtttgttcaggacagtggggctcttttacatactcttatgcagcaaactcatgtcattgagcaacatgatatgtccattgatgattactattcagcttttgatcgtcttatgagtgctttgacctccatggtgcctgcttgtacagttgtgccttgcccagcccataagttcattgagaagttctttacctacatatttgttatgggcgttcgacctgaatttgattctcttcgtgcaaggttactacacacttctgatactctcgccatggctcaggcattgtctgaattacttgctgaagagactcgccttaagtccatgtcttctattactggtgtgagttcgcacagtgtattggccactgctcagaagtccaagagcacctcttttcagccttgtgagcattgtaagaagaccactcatcggtctaagaactgctttactaagtatccagagaagctagctgattttcgtgtccgtcgtgctactcgtggtcgtggtacaggaccatcttctagaggctcagttgttgttgctgctacttcatctgccggtgctttgtcatctacttgggttcttgactctggagcttcatttcatgtgacatctgatcagtcacgcctgacttctactgcacctgtcgtcgagggtacttctgttcagactgctgatggtacattatgtcatgtcacccacaagggttctctttccaattcaaactttactgtcctaaatattttctttgtacctgaattatccatggatcttttatcagttggtcaaattaccgatcacaattgctttgttggatttgatgactcatcttattttgtacaggatcgactcacaggggatgtgattgggactggtcgtcgccgtaaatcttcccctcgcct

SEQ ID NO: 5019 - DNA, 1136 bp, Zea mays
  Zm_smallRNAprecursor_508
taagaggcttgtgggattgacgtgatagggtagggttggctatactgctggtggcgaactctaggctaataatctgaagcgcatggataaaagttatccttggaaggaaagacaaattccgaatccgctttgtctacgaataaggaagctataagtaatgcaactatgaatctcatggagagttcgatcctggctcaggatgaacgctggcgggcatgcttaacacatgcaaagtcgaacgggaaatggtgtttctaaatggcgaacggggtgagtaacgcgtaagaacctgcccttgggagggggaacaacaactggaaacggttgctaataccccgtaggatgaggagcaaaaggagaaatccgcccaaggaggggctcgcgtcttctcggagaagaaacaatgacggtatctgaggaataagcatcggctaactctgtgccagcagccgcggtaagacagaggatgcaagcgttatccggaatgattgggcgtaaagcgtctgtaggtggcttttcaagtccgccgtcaaatcccagggctcaaccctgaacaggtggtggaaactaccaagctggagtacggtaggggcagagggaatttccggtggagcggtgaaatgcattgagatcggaaagaacaccaacggcgaaagcactctcaaatgttctgcatgttcttcctcactctgagaatatataagaatgtcatcaataaataccaccacaaacttgtcgagataatccatgaatacactgttcatcagattcatgaagaaggctggtgcattcgttaggccaaaagacataatggtgaactcatacaacccatacttggtaatgaatgtcgtctttggaatgtctaaacatcaaaccctgagctggtgataacctgacctcagatctatctttgaaaacacgttggcccctctcagctggtcgaacagatcttctattctgggcaaggggcacttgttcttgatggtgacctcattcagggctcgataatcgatacacatccttctggtgccatctttcttctccacgaataggacaggggcggcccaaggtgatgtgcttggtctgatgtagcctttctctgacagctcatcgatctgcttcttgagttcaactat

SEQ ID NO: 5020 - DNA, 1136 bp, Zea mays
  Zm_smallRNAprecursor_509
aaaatcctaatttgatgattttggaagaattctcccaagattcagataaatttgttttgtaaataagagattgaaaagagatcatcatctgaattaaattactctttggcgggattatacattagttctctaaagatttaaactaaaatatcttctaatcaaggtttcacttttgaaaccatttacgtttacccaagataaataaatggtaaacacttttattgttcattcagtataaataaataggtgataaacattggtttttatttagcttttaattgactatacattcgaaatagtattttttcttaaaaagataactttttgtgtgtgtgcattacatacttaaattattggataaaatagttaatatgagcatgtacaataaatattgcatctcatgtcggagttttgtatgtgcgtttgatttgaagtttgaaacacaacttagatctaaatttaaaaattcaaagtgttatccgaaatgattgggcgtaaagcgtctgtaggtggcttttcaagtccgccgtcaaatcccagggctcaaccctggacaggcggtggaaactaccaagctggagtacggtaggggcagagggaatttccggtggagcggtgaaatgcattgagatcggaaagaacaccaacggcgaaagcactctgctgggccgacactgacactgagagacgaaagctaggggagcaaatgggattagagaccctagtagtcctagccgtaaacgatggatactaggtgttgtgcgactcgacccgtgtagtgtcgtagctaacgcgttaagtatcccgcctggggagtacgttcgcaagaatgaaactcaaaggaattgacgggggcccgcacaagcggtggagcatgtggtttaattcgatgcaaagcgaagaaccttactgttggaacttgctatcaatcgcaaggaggccaacaagggtgaacagtggtgacagaagggttacacgtgagatggcaaatagctctgttaaccaggcctctcacgggcactgtgcgggagtatttataggtacctgaacgcccagcgccttgtgttaaggacgcatgtgccctcagctacctagtttatccccagaatattcccataaagcagggttacagactg

SEQ ID NO: 5021 - DNA, 1069 bp, Zea mays
  Zm_smallRNAprecursor_510
agccaatggatctagcaggcaggctcccatgcggttgcgaccacacaagaacgttagcttaggcgtagccaatgatgagctacgggtagaacacgccatacacgaggaccgcaccgcaccggccggcggcgacaaccgaatttttttttcagtctttttttttaaacaaaattttgcgttcactctgatggcattactatcacgtttggatcacgagggtcggcacagtgatctataacaccgaggtgctgtatggttaggtgaaatataacatgatatgattacaacagtaactgattatactttatcgtgtttatttaagccacaacgtaatctgttaccatgtaatatcagatgcggacttatagaaaatgtcaaaatggagtgttattcaatacccatccaatcagagtgtgatggaatactaggatttaactgagctgaaccaaacaatctaagtattaatttggtgcccttagttttggtggtgtgctcacgtatacccttagtcgtgttttttgctcagctgtgcccttctgttctataacactggaagggcacaactgagaaaaaacacgactaagggtataggtgagcacaacaccaaaactaagggcaccaaattaaaaatacgatcatataacatttacgttaccgttcggaatcgacaaccaaacagcacccaaggtttaaagccttgacgctatatgtcatgacgctgaattatcacgctacaagtgtgtgtggacatcaccgttacgttgatctaacaatatctcgatacatgtcataggtcgtagtgctgagactgtgttcagctgttccccctaaatttctccccctatatcccactcacgtgccacgtcagcgttctctttccccctatatctccacgctctacagcggttccccctatatcaaacctctatacccactataactataaaatattattttctataactattcttcaccctttaccaattttctgtctactcaaaatcactatcgtgcacagcgttcgagggcagggggccggctaccgctcccctaaatctggtgtagcact

SEQ ID NO: 5022 - DNA, 1102 bp, Zea mays
  Zm_smallRNAprecursor_511
ctcctccaccgctctatggatcccatttaagccttgtttggatattatcgtattcaccccaatccacatgtattgaagtggattgggtgtaatttggtttaagttacacctcaatacacatggattgcggtgaatatgagagcatccaaacaaggccttaaggaagatctcttgcctccaaacgtcccctcatctatcctctcagttgagggtgggcatattctagtgtggtcgtgggcatggccctagcaacattcacgagcattgctatctctccatatatctttcccttatcttcccatattttggtaatggtcatgacataaacttttttgaccttctccattgtcgttgaccatctcaatatttaacacctacacatcgcaagataagagaatgttgcacatacaacaactcatataatggttaccaacaacactaagtgtcctcaaatgggccaatagatttgtttcagttaacagatcctagcctcttagggcttgtttgggagcaagtggaatgaagggtattgataggactataatcccttgctatctaaaattgaatagtagaggattatatgccctccaatctactccattacctttactcccaaacaagccctagggttttgtcttatgatgtctctctatgtatatcaatattcaaaggcgtgtatttttttactatctttttaaataaaatgaccaccttcataaattgattttgatagatgtgccacttttgaatatccccgtagataaaacatctgcctctataaacaactaattatttgggagacacctagggagtaaggggattggaggaggttgcctcttaacccaaagacaccctaaagtttttgactgaaaataaataatgtatgtctgaaaaaaaatcttggatagagttttttatagaaaataaaaaacaaaagatacgatagtcctatttctcaattatttcaaataacataagcaataatgcatgcagcaagtcgtagctttggaatcattgctctgtagtgataacaatactgtactaatagataagaccctgtagccagcatcaagccccactgaatgatgagctgcaaaattcc

SEQ ID NO: 5023 - DNA, 1126 bp, Zea mays
  Zm_smallRNAprecursor_512
taggccgtcgtctcccagtcaactttgggttgctggaccgttgtctccttattatgtaattatttatttattttgtatagaactcctattatatagtaaagttgtgaaatttgatcttgtgccatgattcatcatatgtgtgagacatggtcccagcacacctgatgattatgtttgcgcccgggtcttggtgcccctgaaatccgggtgtgacaataggtgaacctaaggatacttggtggtggaccgaggacgttcaagtagcaataaaggagaagaaataatgttacaggagcttgttccatgataggagcatggtcaacatagataggtataaggtagcaaagaagactgcaaggcaagctatgagtgaggcaaagggtcaagcctatgatgatctttaccaaagactaagtacaaaggaaggggagaaggatgtctataagatggctaggattcgggaaaggaagacgagggacctaaaccaagttaaatgcattaaggatgagatggatcaacccttggtgagaggacaagacatcaaacataggtggcagaggtattttgacaatcttttcaatggtgagaatgagactatggacacccaattggatgactcctttgatgatttaaatagatgctttgtacgcaggacccaagaatcagaggtcaaagaagctttaaagaggatgaaagggggcaaggcgatgggcccggatggtatcccaatagaggtgtggaaatgccttggggatattgctatagtttggctaaccatgttgttcaaccatatttttcgatcaaacaagatgcccgatgagtggaggaggagtacattagtaccaatcttcaagaacaagggcgatattcaaatttgtaccaactatagagggattaagctcatgatccacactatgaagctatgagagagagttattgagcatcacctgagaaggaattatgcatattaccatgaaccaatttggattcatgcctagaaggtcaatcatggaagtaattttcttaataagacaggtcatggagcgatataacgagcagaagaaagacttgcacatggtttttatcgacttggaaaaggcctatgataaaataccttatctcatgt

SEQ ID NO: 5024 - DNA, 1068 bp, Zea mays
  Zm_smallRNAprecursor_513
ccgcagcgggagaggaagtggtccgggccagggtcagggccgaggccgaggactgttcattcgtctggccaagggccttcttggtgtcttcgccatttgccgcacccgggcggtcgaggagtctgtgcgccgtcgcaggaccgactggctgcatgaggatcttcgtcgttatgcagccgtgactggtcatcctctccctcctgggtcccctccacctctagcccctaccatccccactgaccttaatgagtggcaccaacaggagtttggtgtggcattcattaccctggaggatgaggtcgaggactatgatgatccattcttcacctcggaccctcctcatcctcctcctccctactcgggtcagggacccactcccggtgaccctaggccattcggctctggtcactgtcctcctcctccctacccgggtccgggacccattcctggtgacccgcggccatccggctctggttaccatcaccaccctccacctcctcctcatcatcgtacatcttcggcatctggtttttctgcgggtgatgagccccctagggactcctcactcgaggaagacgtgatgaggaccttcttccctgactacacatcataccctccatcatatcctccgccctatcctcctcctggaggatattgattcatgtgtcctcttctctctctctctctctctctcttcgtttttggtacttattgccaaaaaggggcagaaaatccaaaatttctagtcattctgtttgtggttctttcgttatgtatttcttttggattatttttgttttggccactgttatggcttgtatcctcttatcattgtatgaaataaaactgttgggttattattcaaagtgatatgatggtcttctagccatcatcttttgtcccatcagtttgtaatgattgctttgctatgaagtaaaaatgatgtgtatttagagatagtcatatgcatcacaactcctattatgacactcttgcacccctcggatggttgtattcagtatggtttttgtcactatctctaaatgtgttgctcacatgacatattat

SEQ ID NO: 5025 - DNA, 1113 bp, Zea mays
  Zm_smallRNAprecursor_514
cggaggcggcgcttggacgcggcggcggcgctcgaggaggcagcgacgacgctccgagagacccggcggcgatgtgggcggtgtggggcacgacggagacgagcgagggcgggcacggccgcgacggacgggcgggcgcgcggcggggacgggcggccgagctcgcggcggcgctgacgggcgcgcggcggtggggcggctgggcgctcggcgccgcgagaggacgggcggcaccggggcacccgggtgcgcggcgtcgggctccgaggggtggcgtcgggcggcgtggacgggcggcgctccgatgggcggcgtcgggcggcgtggacgggcggcgcttcgaggggcggcgtcgggctcgaccgggaaggcatgccggcggggaggggcggcggcgcgacggcggttagaggcggcggcgagaatagggcaggcggcggtggcggctaggaagaaagacagagaagaaatgagcccgcgcgggcgaacccgtgctcataaaagcctaatccccgtcggcctgcgctctggccgacgggagttaagtaatccccgtcggcctattttctggctgacgggagttaagttaactcccgtcggcctactctctggccgacgggcgttacgttattcccgtcggcttcagtgtagccgacgggagttacgttatccccgtcggctttttccctggccgacgagaattatcctggccgacgggaatcattaggattcctgtagtgtcctaaccaacaagtgaattaggtgttgcgtgtctcggtccagatgggtgatgtaagaagacacaaggtttatcctggttcgggcaatagaagaccctacttctagcagagggggctgagacttatattatcttgcacctaagtgcttgcagtaaggggtataagctagtcgagagagggagtggatcccaagtctcttaggatgattgaggcaagtgccaatatcaatcgtggtgggcaaaactggtgaagtgttgttctccttttttcctgaaagccctggaatcctccttttatagccttaaggagggatcccaggagcgccaaggtttgtcgtaatggggagaggaggcgagcccgagcccctgtagaa

SEQ ID NO: 5026 - DNA, 1136 bp, Zea mays
  Zm_smallRNAprecursor_515
gttaattagccggtgtatgcatgcatgtatcatgcatgaccctcgcgcgcgcgcgccatcgatcgagctggccttttccacctataatacaaataatcaacgacagatcatccatcctgtcacgatctacaacttgatcaatgaggtgtgaaaaagacacgtcgttgcgtacaataaaactacgaccaaccaacagctaccgtttctgtacccctttttttatgattaggtagctactagggcagttggtggtcaacttaatcggacagttgattaatcaacggatgttgcgttgcgcacgatgcaaacttaatgatcaattcaatcaacagggatatggtcatgggctcatggcacacatatagatgttgtttggttcagacgttgttaacgaaatagtaatagaatctattaccggcggtaatgattactagttataattgaattggatagtgacaacgactgctgtgcaagcaatccttctgtgcaagcgtgcaagcaaaccatctgatccgttagatcgtgatccaaccacagatacaaccatagtttgttaggggtttttttataaagattattgagccagtggtggaagggtttaagtgttaaatgtgacctacggttggatcacgatctaacggatcagatggtttgcttgcacgcttgcacagaaatactgcttgcacaacagtcgttgccttggatagtagtatctagtactactagaaatagcttaaccaaacaaaagtatcagtatccattaccccatgtaatccatttgtgttacatttcgacgaaccaaacaccaccataaatatagctgtgatatcctagtcgcggagataatgatatcctgacccaaggcttaataaaattaataaagtactcacatcaacaatgtacatcttcttttttagaaatctaccttgaaataacatcctggttaagtgtggttgacctagagcaatcttggaatgattgactgaccgaaaagtcttctcgggtgtacatgattgagaataaagtgtgcacaaaagactcgtatattggtctatggagatgctatatggtcctagaccggctcggaagtcgacagagtgttacaatatcccgtcgcgggcgtccaagtctctttc

SEQ ID NO: 5027 - DNA, 1076 bp, Zea mays
  Zm_smallRNAprecursor_516
cttatgattataccaaaactgagtttggtttctgagcaaaatccatccatacctctcaggaacccacccaacgatttgccctttttttatcaacctgactgatgtagttgcgttatttactccacaatgccaacattattactgtgtttggattgtcctgtcctgtctcctggctcagctttcttctgcctccttttttggatcattcttgtcgtttttatttgcctccttttaggacggtatctaaaggggttaccaacttaccatttaagtgtgcctcttccaattatacaaagggtgaacatggttctgatcaaattcaaccatgcctctatgaacccatccaatgacttgacattttttttaccaacttgactgatgtagtttcctttttcaatttacaatgccaacattattatgatgttgggattggcttttcctgtctcctggtgcagcctctttctgtctctatttttttgatcatggttgttttttatatttgctatgaggactcctattaggacggtatcttaagggtatggcttagctcaacccttctgattacaccaaaactgaatatggtttctgagcaaatccaaaccgtgcctctgatgaacccagccaatgatttgcccttccttatcaacctgactgaattagttacgttcttcacttttcagtgccaacattattgtgatgttgggattgccatttcttgtctcttggtgcagccttctgtctatttttagatcattcttgttctttatatttgctatgaggactcctattaggacggtatcttaagggtatggcttagctcaacccttgtgattataccaaaactgaatatggtttctgagcaaatccaaccatgcctctgagaaaaccagctaaagattttcccttttttatcaacctgacacactcagttacgttcttcacttttcagtgccaacattattaagatgttgggattatcattttgtctcctggtgtagccttcttctgtctctattttcagatcatgcttgttctttatatttgctatgaggacttctattaggacggtatcttaa

SEQ ID NO: 5028 - DNA, 1036 bp, Zea mays
  Zm_smallRNAprecursor_517
ctgagtttggtttctgagcaaaatccatccatacctctcaggaacccacccaacgatttgccctttttttatcaacctgactgatgtagttgcgttatttactccacaatgccaacattattactgtgtttggattgtcctgtcctgtctcctggctcagctttcttctgcctccttttttggatcattcttgtcgtttttatttgcctccttttaggacggtatctaaaggggttaccaacttaccatttaagtgtgcctcttccaattatacaaagggtgaacatggttctgatcaaattcaaccatgcctctatgaacccatccaatgacttgacattttttttaccaacttgactgatgtagtttcctttttcaatttacaatgccaacattattatgatgttgggattggcttttcctgtctcctggtgcagcctctttctgtctctatttttttgatcatggttgttttttatatttgctatgaggactcctattaggacggtatcttaagggtatggcttagctcaacccttctgattacaccaaaactgaatatggtttctgagcaaatccaaaccgtgcctctgatgaacccagccaatgatttgcccttccttatcaacctgactgaattagttacgttcttcacttttcagtgccaacattattgtgatgttgggattgccatttcttgtctcttggtgcagccttctgtctatttttagatcattcttgttctttatatttgctatgaggactcctattaggacggtatcttaagggtatggcttagctcaacccttgtgattataccaaaactgaatatggtttctgagcaaatccaaccatgcctctgagaaaaccagctaaagattttcccttttttatcaacctgacacactcagttacgttcttcacttttcagtgccaacattattaagatgttgggattatcattttgtctcctggtgtagccttcttctgtctctattttcagatcatgcttgttctttatatttgctatgaggac

SEQ ID NO: 5029 - DNA, 1236 bp, Zea mays
  Zm_smallRNAprecursor_518
tctcaggaacccacccaacgatttgccctttttttatcaacctgactgatgtagttgcgttatttactccacaatgccaacattattactgtgtttggattgtcctgtcctgtctcctggctcagctttcttctgcctccttttttggatcattcttgtcgtttttatttgcctccttttaggacggtatctaaaggggttaccaacttaccatttaagtgtgcctcttccaattatacaaagggtgaacatggttctgatcaaattcaaccatgcctctatgaacccatccaatgacttgacattttttttaccaacttgactgatgtagtttcctttttcaatttacaatgccaacattattatgatgttgggattggcttttcctgtctcctggtgcagcctctttctgtctctatttttttgatcatggttgttttttatatttgctatgaggactcctattaggacggtatcttaagggtatggcttagctcaacccttctgattacaccaaaactgaatatggtttctgagcaaatccaaaccgtgcctctgatgaacccagccaatgatttgcccttccttatcaacctgactgaattagttacgttcttcacttttcagtgccaacattattgtgatgttgggattgccatttcttgtctcttggtgcagccttctgtctatttttagatcattcttgttctttatatttgctatgaggactcctattaggacggtatcttaagggtatggcttagctcaacccttgtgattataccaaaactgaatatggtttctgagcaaatccaaccatgcctctgagaaaaccagctaaagattttcccttttttatcaacctgacacactcagttacgttcttcacttttcagtgccaacattattaagatgttgggattatcattttgtctcctggtgtagccttcttctgtctctattttcagatcatgcttgttctttatatttgctatgaggacttctattaggacggtatcttaagggtatgatttagtttaacccttctgattatatcaaaactgaatttggtttctgagcaaatccaaccatcgccttgaggaacccatccaatgatttgcccttcttttatcaacttgactggtgcagtttcgttcttctctttttcatgtcaacattattatgatgttggtattgccatttcttgtctcctgtgcagccttcttctgtctccat

SEQ ID NO: 5030 - DNA, 1196 bp, Zea mays
  Zm_smallRNAprecursor_519
ttgccctttttttatcaacctgactgatgtagttgcgttatttactccacaatgccaacattattactgtgtttggattgtcctgtcctgtctcctggctcagctttcttctgcctccttttttggatcattcttgtcgtttttatttgcctccttttaggacggtatctaaaggggttaccaacttaccatttaagtgtgcctcttccaattatacaaagggtgaacatggttctgatcaaattcaaccatgcctctatgaacccatccaatgacttgacattttttttaccaacttgactgatgtagtttcctttttcaatttacaatgccaacattattatgatgttgggattggcttttcctgtctcctggtgcagcctctttctgtctctatttttttgatcatggttgttttttatatttgctatgaggactcctattaggacggtatcttaagggtatggcttagctcaacccttctgattacaccaaaactgaatatggtttctgagcaaatccaaaccgtgcctctgatgaacccagccaatgatttgcccttccttatcaacctgactgaattagttacgttcttcacttttcagtgccaacattattgtgatgttgggattgccatttcttgtctcttggtgcagccttctgtctatttttagatcattcttgttctttatatttgctatgaggactcctattaggacggtatcttaagggtatggcttagctcaacccttgtgattataccaaaactgaatatggtttctgagcaaatccaaccatgcctctgagaaaaccagctaaagattttcccttttttatcaacctgacacactcagttacgttcttcacttttcagtgccaacattattaagatgttgggattatcattttgtctcctggtgtagccttcttctgtctctattttcagatcatgcttgttctttatatttgctatgaggacttctattaggacggtatcttaagggtatgatttagtttaacccttctgattatatcaaaactgaatttggtttctgagcaaatccaaccatcgccttgaggaacccatccaatgatttgcccttcttttatcaacttgactggtgcagtttcgttcttctctttttcatgtcaacattattatgatgttggtattgccatttcttgtctcctgtgca

SEQ ID NO: 5031 - DNA, 1076 bp, Zea mays
  Zm_smallRNAprecursor_520
agtgtgcctcttccaattatacaaagggtgaacatggttctgatcaaattcaaccatgcctctatgaacccatccaatgacttgacattttttttaccaacttgactgatgtagtttcctttttcaatttacaatgccaacattattatgatgttgggattggcttttcctgtctcctggtgcagcctctttctgtctctatttttttgatcatggttgttttttatatttgctatgaggactcctattaggacggtatcttaagggtatggcttagctcaacccttctgattacaccaaaactgaatatggtttctgagcaaatccaaaccgtgcctctgatgaacccagccaatgatttgcccttccttatcaacctgactgaattagttacgttcttcacttttcagtgccaacattattgtgatgttgggattgccatttcttgtctcttggtgcagccttctgtctatttttagatcattcttgttctttatatttgctatgaggactcctattaggacggtatcttaagggtatggcttagctcaacccttgtgattataccaaaactgaatatggtttctgagcaaatccaaccatgcctctgagaaaaccagctaaagattttcccttttttatcaacctgacacactcagttacgttcttcacttttcagtgccaacattattaagatgttgggattatcattttgtctcctggtgtagccttcttctgtctctattttcagatcatgcttgttctttatatttgctatgaggacttctattaggacggtatcttaagggtatgatttagtttaacccttctgattatatcaaaactgaatttggtttctgagcaaatccaaccatcgccttgaggaacccatccaatgatttgcccttcttttatcaacttgactggtgcagtttcgttcttctctttttcatgtcaacattattatgatgttggtattgccatttcttgtctcctgtgcagccttcttctgtctccatttatgggatcatgcttgttttttatatttgctatgaggactcctattaggacggtat

SEQ ID NO: 5032 - DNA, 1076 bp, Zea mays
  Zm_smallRNAprecursor_521
ctcaacccttgtgattataccaaaactgaatatggtttctgagcaaatccaaccatgcctctgagaaaaccagctaaagattttcccttttttatcaacctgacacactcagttacgttcttcacttttcagtgccaacattattaagatgttgggattatcattttgtctcctggtgtagccttcttctgtctctattttcagatcatgcttgttctttatatttgctatgaggacttctattaggacggtatcttaagggtatgatttagtttaacccttctgattatatcaaaactgaatttggtttctgagcaaatccaaccatcgccttgaggaacccatccaatgatttgcccttcttttatcaacttgactggtgcagtttcgttcttctctttttcatgtcaacattattatgatgttggtattgccatttcttgtctcctgtgcagccttcttctgtctccatttatgggatcatgcttgttttttatatttgctatgaggactcctattaggacggtatcttaagggtatggcttagctcaacccttctgattacaccaaaactgaatatggtttctgagcaaatccaaaccatgcctctgacgaacccagccaatgatttatctttcctcatcaaccggactgaattagttacgttcttcacttttcagtgccaacattgttgtgatgttgggattgccatttctggtgcagccttctgtctatttttagattattcttgttctttatatttgctatgaggactcctattaggacggtatcttaagggtatggcttagctcaacccttgtgattataccaaaactgaatatagtttctgagcaaatccaaccatgcctctgagaaaaccagctaatgatttgcccttttttaaccacctgaaacactcagttacgttcttcacttttcagtgccaacattattaagatgttgggaattgggattatcattttctgtctcctggtgcagccttcttctgtctctatttttagatcatggttgttatttatatttgctatgaggactcctattaggacggtatctta

SEQ ID NO: 5033 - DNA, 1036 bp, Zea mays
  Zm_smallRNAprecursor_522
accaaaactgaatatggtttctgagcaaatccaaccatgcctctgagaaaaccagctaaagattttcccttttttatcaacctgacacactcagttacgttcttcacttttcagtgccaacattattaagatgttgggattatcattttgtctcctggtgtagccttcttctgtctctattttcagatcatgcttgttctttatatttgctatgaggacttctattaggacggtatcttaagggtatgatttagtttaacccttctgattatatcaaaactgaatttggtttctgagcaaatccaaccatcgccttgaggaacccatccaatgatttgcccttcttttatcaacttgactggtgcagtttcgttcttctctttttcatgtcaacattattatgatgttggtattgccatttcttgtctcctgtgcagccttcttctgtctccatttatgggatcatgcttgttttttatatttgctatgaggactcctattaggacggtatcttaagggtatggcttagctcaacccttctgattacaccaaaactgaatatggtttctgagcaaatccaaaccatgcctctgacgaacccagccaatgatttatctttcctcatcaaccggactgaattagttacgttcttcacttttcagtgccaacattgttgtgatgttgggattgccatttctggtgcagccttctgtctatttttagattattcttgttctttatatttgctatgaggactcctattaggacggtatcttaagggtatggcttagctcaacccttgtgattataccaaaactgaatatagtttctgagcaaatccaaccatgcctctgagaaaaccagctaatgatttgcccttttttaaccacctgaaacactcagttacgttcttcacttttcagtgccaacattattaagatgttgggaattgggattatcattttctgtctcctggtgcagccttcttctgtctctatttttagatcatggttgttatttatatttgctatgagga

SEQ ID NO: 5034 - DNA, 1228 bp, Zea mays
  Zm_smallRNAprecursor_523
catgcctctgagaaaaccagctaaagattttcccttttttatcaacctgacacactcagttacgttcttcacttttcagtgccaacattattaagatgttgggattatcattttgtctcctggtgtagccttcttctgtctctattttcagatcatgcttgttctttatatttgctatgaggacttctattaggacggtatcttaagggtatgatttagtttaacccttctgattatatcaaaactgaatttggtttctgagcaaatccaaccatcgccttgaggaacccatccaatgatttgcccttcttttatcaacttgactggtgcagtttcgttcttctctttttcatgtcaacattattatgatgttggtattgccatttcttgtctcctgtgcagccttcttctgtctccatttatgggatcatgcttgttttttatatttgctatgaggactcctattaggacggtatcttaagggtatggcttagctcaacccttctgattacaccaaaactgaatatggtttctgagcaaatccaaaccatgcctctgacgaacccagccaatgatttatctttcctcatcaaccggactgaattagttacgttcttcacttttcagtgccaacattgttgtgatgttgggattgccatttctggtgcagccttctgtctatttttagattattcttgttctttatatttgctatgaggactcctattaggacggtatcttaagggtatggcttagctcaacccttgtgattataccaaaactgaatatagtttctgagcaaatccaaccatgcctctgagaaaaccagctaatgatttgcccttttttaaccacctgaaacactcagttacgttcttcacttttcagtgccaacattattaagatgttgggaattgggattatcattttctgtctcctggtgcagccttcttctgtctctatttttagatcatggttgttatttatatttgctatgaggactcctattaggacggtatcttaagggtatggcttagttcaacccttctgattataccaaaactgaatttggtttctgagcaaatccaaccatgcctctgatgaacccagccaattttgccctttctatcaacttgacttatttagttttgttcttcactttacaatgccaacattattatgatgtagggattgccatttcctgtctcctgctgtagcttccttctgc

SEQ ID NO: 5035 - DNA, 1188 bp, Zea mays
  Zm_smallRNAprecursor_524
aaagattttcccttttttatcaacctgacacactcagttacgttcttcacttttcagtgccaacattattaagatgttgggattatcattttgtctcctggtgtagccttcttctgtctctattttcagatcatgcttgttctttatatttgctatgaggacttctattaggacggtatcttaagggtatgatttagtttaacccttctgattatatcaaaactgaatttggtttctgagcaaatccaaccatcgccttgaggaacccatccaatgatttgcccttcttttatcaacttgactggtgcagtttcgttcttctctttttcatgtcaacattattatgatgttggtattgccatttcttgtctcctgtgcagccttcttctgtctccatttatgggatcatgcttgttttttatatttgctatgaggactcctattaggacggtatcttaagggtatggcttagctcaacccttctgattacaccaaaactgaatatggtttctgagcaaatccaaaccatgcctctgacgaacccagccaatgatttatctttcctcatcaaccggactgaattagttacgttcttcacttttcagtgccaacattgttgtgatgttgggattgccatttctggtgcagccttctgtctatttttagattattcttgttctttatatttgctatgaggactcctattaggacggtatcttaagggtatggcttagctcaacccttgtgattataccaaaactgaatatagtttctgagcaaatccaaccatgcctctgagaaaaccagctaatgatttgcccttttttaaccacctgaaacactcagttacgttcttcacttttcagtgccaacattattaagatgttgggaattgggattatcattttctgtctcctggtgcagccttcttctgtctctatttttagatcatggttgttatttatatttgctatgaggactcctattaggacggtatcttaagggtatggcttagttcaacccttctgattataccaaaactgaatttggtttctgagcaaatccaaccatgcctctgatgaacccagccaattttgccctttctatcaacttgacttatttagttttgttcttcactttacaatgccaacattattatgatgtagggattgccatttcctgtctcct

SEQ ID NO: 5036 - DNA, 1080 bp, Zea mays
  Zm_smallRNAprecursor_525
ctaaggttgattctgtaattatacatgcatcatgctaagaactatactaatcaaatttcccccttagaaaatgtcgccgcgcacaaggagaacagcgcgcaaacatactggaccgattggtgtgccgagtcaccagctggccccaaggcatgataatagtagtagtggaagcaatgatcctataggggatctcgaagctgaagtgagtcggctctaagcggaactccgccgcaggacggctatatgggtcgtagatggcgaccgcataaatgagttgagaagagatgtccgccatctgcgagatcagctcgcggaccgggatttggcactcgactgggttgttcaatcccattcgcttgcatgggacaaggagcaaaaggctcaagctcgagtagccgagctcaacttggtcgttgaagacctgcagacatattgcaataccttacatgaagaggtccatgtattatattcgcaactgcatcccagtgagcctacgaatcctgttgagtcggaagccggaccctcgcatgttgcgggacacgcgcttggtggtgagttagacctttttcagccccctgaggctggtcgacgaatggtctcccacacccgacgacgaggccgccaaaagcaatgggaagcaggaatagtggtgtagtagtagaaatagaagtagtgtattgtataataggttgtactattgtataataggttgtactattgtataacatgtagtgcaattgtataataggtaatgtatcctgttgtaaaagtctgagtctgtaacattacttttggtaatgtaaaatggatggtttttctttggcatatcatattgtttccaaatgttgttgccacagatgccttccaagactcgagcacaggacgaagctagtacctcccgtgggagggagtctaccccaaatccacctcctgttcctcccacactggccgaggcgattgccgccttggtaaatgcgaccgtggataatacccgttttctgagagagatggcgggtcaacaatttccacagcaaggcgggcggggttatcaatagggtccccgtgaaacctcttacttgg

SEQ ID NO: 5037 - DNA, 1137 bp, Zea mays
  Zm_smallRNAprecursor_526
ccagttttggtgaagatgtttagtttctcatattcacctccctaatcccttgagcaaagatattttttctaccaaaaaggcgttcaaccaaagtctaaaattcatacaatttctagaacaatttcaatagataaatccatataagtttactcgaatcatcaataaagctcatacaatattttttctgttcactgagtgaggagtagaccccaaacattagaggaaaataagttacagtggtttgctagaaatgaccggaggattcaagatagggaagttaatggcttttacgttaattgttgataggcatcagacataaaatatttattattattctcactagacataggtaaattatgagcgtgatgaatgactcgctgaacaatagaaggagagagagatgtccgcctagatgaccgaattttttatattttgtccctttctttgaaaaaaattcacgtttggacttaaaaaaaatttaatgtcatttttggaccctttgctcggcgccataggctatggcgccgaggtacatgctgcgctggcacaacccagacaacatggcgccgacgtggcaccgagctcggcgccaagatctatggcgccgagctcggatatataacaacaaagcttgtctagcttagtcggtagagcacaagactcttaaccttgagattgtgggttcaagccccattgtggccgtcaaaaataagcggcataaacgaaaaaatctcgatgacaaaaaaaaacaaatcaacgaccacaatggcgccgaggtacgtgccaaaatgacattaaatttttttaaggtccaaacgtgaatttttttcagagaaagagacaaaatacaaaaaaatcggcctagatgactacgccatagatctagaaaggatttcgggaacaaaagcttcttggtgctggcgggggatagcatatcaatattatctataaaagatctcatcttgctcatgtatccagtaactgaatggttaattttttttggattgttgcaagcgctatacgtgtattcattgctcatgtaaaacaatgaaaccaattaagggtttgttcggttattgatattacatttttattagagtgtattgggtgggattgatatgtattttgacttgttat

SEQ ID NO: 5038 - DNA, 1048 bp, Zea mays
  Zm_smallRNAprecursor_527
gcaactgagcacaacaagcaccagcagctatgtattcggcctcggcagtggaaagtgcaacacagttttgcttcttagagctccaagacaccagggaccgcccaaggaattggcaagtccccgaggtgcttttttgatctactttacaaccggcatagtctgaatcagagtagccaaataaatcgaaaaaggagcccttgggatactagagacctagattttgggtgtgaactagatatctcaaaattctcttaacgaccactaagtgacactcttttgggttagcttgaaaacgggcacacatgcacacactaagcatgatatctggcctagatgcccataaatatagtagggatcctatcattgatctataaagcttttgatctacaattttaccttcttcatttaagtcgagatgaccacttgaagccattgttgtcttggcgtgctttgccttttccatgccaaactttttgagcatgtcttgtgtgtacttggtttggcacagaaaggttccttccttgagttgtttaacttgaaaacccaggaagtacttgagctcacccatcatggacatctcaaacctatttgtcataaccctactaaattcctcacaaaaagtttcatcagtactgccaaatataatgtcgtcaacatatatttgacaaacaaataaatgattgtcaactttgcgagtgaataaagtagagtctacttttcctatttcaaaaccatttttaagcaagaaatctttaagtcaatcataccaagctctaggggctcgtttaagcccgtagagtaccttgtgaagtaggtaaacatggtttggcttctttggatcttcaaagcccagtggttgctccacatagaccctctcttgtagtgatccatttagaaatgcgctcttgacatccatttgatataacttgaaatcatggttagtagcataggcaattaatattctaattggctctaaccttgctactggcgcatatgtttcaccaaaatcaagtccttccacttgagtgtagccttgggcaaccaaccg

SEQ ID NO: 5039 - DNA, 1173 bp, Zea mays
  Zm_smallRNAprecursor_528
agtgggtcgcttcttatggactcgctcagaatgattcttctctatctatagttcatggcctattagaagtagaaggtgctctggtgcaatccttaccgacagaaaaagattgcagtcgggttgataataatcgagtgccattacttcgtcggtccgaaccaaggaatccgttagaaatgttttgaaatggatattgttctctctttgattagggatgctatatgaaaagaagtggagtttgaaaaagggaacggaatggtcaaaaccgggaactgctagaggaacgaattttcaatagcataacttgggctcctagaatatggggcccttggggacaatctatttgattgcagggacaggtacgctgaaatatgactggggattttcctatgggtattggagcgggtccaagcagattaaagaggatgagtagtcagagactgctatttattcgaattatttctggtatatttatcataaaaagggggaggtgcaagagactgattcggacttcttgcagagtggaacaatgcagtaccagacacgagatatatctttcaaagaagaaggcttttttcgaataagccaattgatttgggaccttcggatccattctttttcctattcaaagatcaggccctttgtctctgtgttttcacgtcgtgaattctttgcagatgaagatgaagagatggcaaagcggctttagtaccagtacctggagaaaaaagcctcctaaacatatggctagcaactggttcaccaggagtacgcaagaaaggcaaaagcactacgaattattgatttaggaatgggaatgggctagaaccctgggctcttcccttatataattaatggtcttttcattctaatactctatccgagagttctcagtatttagcaaagctgttcctatctaacggaaggctcctggatcaaatgacaaagacattgtttgtggagagagaggtggcttttcccggatgaaatgaaacatttcatttgtgtaacgggagaaagatttcccactccttagccgtaaagatatgtggccatgaaaaagggaggggattcagtggaacaggattggccgggcggtagagtcgtggaaacacttgttgattcctattttggaccctagctccatggaacaatatgctactgcggaaacat

SEQ ID NO: 5040 - DNA, 1136 bp, Zea mays
  Zm_smallRNAprecursor_529
ctcaggatgaacgctggcggcatgcttaacacatgcaagtcgaacgggaagtggtgtttccagtggcgaacgggtgagtaacgcgtaagaacctgcccttgggaggggaacaacaactggaaacggttgctaataccccgtaggctgaggagcaaaaggagaaatccgcccaaggaggggctcgcgtctgattagctagttggtgaggcaatagcttaccaaggcgatgatcagtagctggtccgagaggatgatcagccacactgggactgagacacggcccagactcctacgggaggcagcagtggggaattttccgcaatgggcgaaagcctgacggagcaatgccgcgtggaggtggaaggcctacgggtcgtcaacttcttttctcggagaagaaacaatgacggtatctgaggaataagcatcggctaactctgtgccagcagccgcggtaagacagaggatgcaagcgttatccggaatgattgggcgtaaagcgtctgtaggtggcttttcaagtccgccgtcaaatcccagggctcaaccctggacaggcggtggaaactaccaagctggagtacggtaggggcagagggaatttccggtggagcggtgaaatgcattgagatcggaaagaacaccaacggcgaaagcactctgctgggccgacactgacactgagagacgaaagctaggggagcaaatgggattagagaccccagtagtcctagccgtaaacgatggatactaggtgctgtgcgactcgacccgtgcagtgctgtagctaacgcgttaagtatcccgcctggggagtacgttcgcaagaatgaaactcaaaggaattgacgggggcccgcacaagcggtggagcatgtggtttaattcgatgcaaagcgaagaaccttaccagggcttgacatgccgcgaatcctcttgaaagagaggggtgccctcgggaacgcggacacaggtggtgcatggctgtcgtcagctcgtgccgtaaggtgttgggttaagtctcgcaacgagcgcaaccctcgtgtttagttgccactatgagtttggaaccctgaacagaccgccggtgttaagccggaggaaggagaggatgaggccaagtcatcatgcccctt

SEQ ID NO: 5041 - DNA, 1064 bp, Zea mays; identical to SEQ ID NO: 4679
  Zm_smallRNAprecursor_530

SEQ ID NO: 5042 - DNA, 1063 bp, Zea mays; identical to SEQ ID NO: 4680
  Zm_smallRNAprecursor_531

SEQ ID NO: 5043 - DNA, 1113 bp, Zea mays
  Zm_smallRNAprecursor_532
tagttggttcggagatgcggtcgggggcggaggcggcgcttggacgcggcggcggcgctcgaggaggcagcgacgacgctctgagagacccggcggcgatgtgggcggtgtggggcacggcggagacgagcgagggcgggcacggccgcgacggacgggcgggcgcgcggcggggacgggcggccgggctcgcggcggcgctgacgggcgcgcggcggtggggcggctgggcgctcggcgccgcgagaggacgggcggcggacgggcggcgccggggcgcccgggtgcgcggcgtcgggctccgaggggcggcgtcgggcggcgtggacgggcggcgctccgaggggcggcgtcgggctcggccgggaaggcacgccggcggggaggggcggcggcgcggcggcggttagaggcagcggcgagaatagcgcaggcggcggcggcggctaggaagaaagacagagaagaaatgagcccgcgcgggcgaacccgcgctcataaaagcctaatccccgtcggcctgcgctctggccgacgggagttaagtaatccccgtcggcctattttctggctgacgggagttaagttaactcccgtcggcctactctctggccgacgggcgttacgttattcccgtcggcttcagtgtagccgacgggagttacgttatccccgtcggctttttccctggtcgacgggaattatcctggccgacgggaatcattaggattcctgtagtgcaaggttttggttgcttagtatcaacaaagggtatcgaagctaatccaagtaagatagaagccatactttgaatggagccaccgaagtcaaggaagggtgcccaaagattgacaaggaggctggcatcattgaacagatcatttcaaggtcagcacagaggaacttgccattcttggaagtgcttaagtcagccgaagtctttcaatggggactaaatcaacagaaagccttcgaagaactaaaacaatatttaatagagctgacaaccttaactccaccttcgtcaggaactccattgttgttgtatgtagttgcttcccatgctgcggttagtgtagcactggtgcaacagaagcagaaggaccaggcaag

SEQ ID NO: 5044 - DNA, 1205 bp, Zea mays
  Zm_smallRNAprecursor_533
ccatgaagatagttcattcatattgatatgccagctggcatatcagtttgacatattgagttttgttctgcaagttggacagccaatatttcttacgctgtaggtttttttcctcggtacccttagttttgccatcttcctcatttttacccttagttgtgtttttttgctcagttttgcccttctcctctatagcaccaggagggcaaaactgagcaaaaaaacacaacaaaggataaaaatgaggaagaagggcaaaactgagaaaaaaacacaactaagggtaaaaatgaggacaccaacaaaactgagggcaccagcttaaaaaacattttttgttcctcagtaagaatcctgctgatcatgtcaaagaaaagaatcttgctagtgataagttggaaaaggaccacacaggtggtacacaaaccatctcattacagaaagtggggtggataggttgaattatgtaccgcaatagaccggacgggcccttgggcttccttgtatgggtaactttctgcattgataatgccaccatttcttataatgtattctagggcctcagaggacgatccatgtatgcatctacagttcttgaggttgtttgcgtcgatcaggtgttgcttagaagttttattaactccttgttctatatgaagtgagctccctctttgagagcggtgataccaaatgcctagcatgaacctaaagaacaaattacaagctcagatctaatagtgtgcacttagcaactatgcatataagttacagtaagcacacatcagcaatgtcatacaataattagtgaattgttaataggtactgagaatgcatgcttaccagagtctccctcatcttgtattggtgtcatagttgtcggtgcttaggtcccgactacgcactacggggtaatccacgtgcaatgcttttgggagcacggagacgtcgatggtacgtgcaggagcacatcggaacacaagggaattatataggtttgggttgcctgagtgcgtaataccctacttcatgtttggtgttgagtattgagtttgcttggagtacacaaattacaaatgattcaaggatggcggtggatgagttctcctatttgtctactggtggacgtgatggtaaaagagagggatcttttttgtaggggtacctccgcagccttatatagccgactggggagatatctctttaca

SEQ ID NO: 5045 - DNA, 1126 bp, Zea mays
  Zm_smallRNAprecursor_534
ggagtcttcctcattacccaggattttcaggtgtttctcggatgagtacgtttgctgggtaatagcaggagctaaggagtttgggagcttgggcttagttgctgccctgggcgaggtcgggtcaagtttcagcaacaatctgtaatcaccttcgggtttataagggtttttgggagagttgctcagcaaaatctcctttattgtaatgttttcttttcctctctaatatataagatgcgcagttctcctgcgcgttctataaaaaaaggcaataaaggagaagaaagaatattacaggagcttattccatgacaagagcgcggtcaacatagaaaggtacaaggcaaagaagaccgcaaagcgagttgagtgaggcaaatggttgagcctattattgtcaaaaccgaagactaagtacaaaggaaggggagaaagatgtctataagatagctaggattcgggaaaggaagacgagagacctcaaccaagttaaatgcattaaggatgagatggatcaactcttggtgaaaggacaagacatcaaacagaggtggcagaggtattttgacattcttttcaatggtgagaatgagactatggacacccaattggatgactcctttgatgatttaaatagatgctttgtacgtaggatccaagaatcagaggtcaaagaagctttaaagaggatgaaagggggtagggcccggatggtatcccaatagaggtgtggaaatgccttgtggatattgctatcgtttgactaaccaagttgttcaaccatatttttcgatcaaacaagatgcctgaaaagtggaggaggagtacattagtaccaatcttcaagaacaagggagatattcaaagttgtaccaactattgtgggattaagctcatgagccacactatgaagctatgagagagagttattgagcatcgcctgagaggaatgacacatatgaccatgaaccaatttggattcatgcctagaaggtcaaccatgaagtaattttcttaataaggcaggtcatggagcgatataaggagcagaaggacttgcacatggtttttactaccctagagtcaaaaggtttttattgcacatggttttcttgtcgcatgagat

SEQ ID NO: 5046 - DNA, 1127 bp, Zea mays
  Zm_smallRNAprecursor_535
tgggagctttaccaggactcactagaaaaacgcctaaatccggaagtaatcagaaaaagaaattccattctaggaaaaaagagcaatatcgtattcgtcttcaagaaaaacagaaattgcgttttcattatggtctgacagaacgacaattacttagatatgtacatatcgctggaaaagcaaaaagatccacaggtcaggttttactacaattacttgaaatgcgtttggataatatcctttttcggctccatagacatgcagaagagaaatgctatccccactccgaccaagacagaacttttaccaaaagtttattgtgatctttttgttcaaataacaattaaggtgaagcagggtcaggaacaacgaatctctttatgataaacagatccattttgcaagctcgttattacgggtagttcctacaaagaatcagactaatgacgtatacaatgcttgaattatcgatgtaaatgctacatagtgggttctcatccttcagagactacgagtgtaataggagcatccgttgacaaaaggatcaccctaagatgatcatctcatggctattgggaacgaatcaaatcagatggttctatttctcaacctttctgacttgctcctacggaaccaaggtcgaaaggattgaaaaagtcagtcattcacaaccactgatgaaggattcctcgaaaagttaaggattagtagttctttttcgaaatccatttcgaaaaagaatggattcggtcttatacatacgcgaggaaggtaatcaaaaaagaaagaagacgagttcttctttcttttatcacttaggagccgtgcgagatgaaagtctcatgcacggttttgcatgatccaaaattgatgggttaatgtgagcttatccatgcggttaggcactcttcaaataggaatccattttctaactggctttcgtgctttggtgagtcgtccgagatcctttcgatgacctatgttgtgttgaagggatatctatatgatccgatcgattgcataagacccgcggtagcaatagaacagagaaagtatacagaaaagacagttctttttgatttcgattatctatatattagttcgtttctatttctagatatctattt

SEQ ID NO: 5047 - DNA, 1150 bp, Zea mays
  Zm_smallRNAprecursor_536
atgaccccttctcataataagaatgtgcacgatctggtccggtatggaatgaacttataatctgatgatcgagtcgattccatgattataagttcataaccctagcacccattcccattttgggcggaacatatctactaattcttttattccagttagtaagagggatcttgaactaagaaatagacctagcagctaaaagagggtatcctgagcaattgcaagaccagtagatattgatggtattcgtgagcctgtttctggttctttactttatggaaacaatattatctctggtgctattattcctacttctgcggcgatcggattgcatttttacccaatttgggaagctgcatctgttgatgaatggttatacaatggcggtccttatgagctaattgttctacacttcttacttggtgtagcttgttatatgggtcgtgagtgggaacttagtttccgtctgggtatgcgcccttggattgctgttgcatattcagctcctgttgcagctgctactgctgttttcttgatttaccctattggtcaaggaagtttctctgatggtatgcctttaggaatatctggtactttcaactttatgattgtattccaggcagagcacaacatccttatgcatccatttcacatgttaggtgtagctggtgtattcggcggttccctattcagtgctatgcatggttccttggtaacctctagtttgatcagggaaaccactgaaaatgagtctgctaatgagggttacaaatttggtcaggaagaagagacttataatattgtggctgctcacggttattttggtcgattaatcttccaatatgctagtttcaacaattctcgttctttacacttcttggctgcttggcctgtagtagggatctggttcactgctttaggtattagtactatggcattcaacctaaatggtttcaatttcaaccaatctgtagttgatagccaaggttgcgttattaatacttgggctgatatcatcaaccgtgctaatcttggtatggaggtaatgcacgaacgtaatgctcacaacttccctctagacctagctgctcttgaagttccttaccttaatggataaggtttttctcctaaacatataggaatttttgaa

SEQ ID NO: 5048 - DNA, 1195 bp, Zea mays
  Zm_smallRNAprecursor_537
atgaccccttctcataataagaatgtgcacgatctggtccggtatggaatgaacttataatctgatgatcgagtcgattccatgattataagttcataaccctagcacccattcccattttgggcggaacatatctactaattcttttattccagttagtaagagggatcttgaactaagaaatagacctagcagctaaaagagggtatcctgagcaattgcaagaccagtagatattgatggtattcgtgagcctgtttctggttctttactttatggaaacaatattatctctggtgctattattcctacttctgcggcgatcggattgcatttttacccaatttgggaagctgcatctgttgatgaatggttatacaatggcggtccttatgagctaattgttctacacttcttacttggtgtagcttgttatatgggtcgtgagtgggaacttagtttccgtctgggtatgcgcccttggattgctgttgcatattcagctcctgttgcagctgctactgctgttttcttgatttaccctattggtcaaggaagtttctctgatggtatgcctttaggaatatctggtactttcaactttatgattgtattccaggcagagcacaacatccttatgcatccatttcacatgttaggtgtagctggtgtattcggcggttccctattcagtgctatgcatggttccttggtaacctctagtttgatcagggaaaccactgaaaatgagtctgctaatgagggttacaaatttggtcaggaagaagagacttataatattgtggctgctcacggttattttggtcgattaatcttccaatatgctagtttcaacaattctcgttctttacacttcttggctgcttggcctgtagtagggatctggttcactgctttaggtattagtactatggcattcaacctaaatggtttcaatttcaaccaatctgtagttgatagccaaggttgcgttattaatacttgggctgatatcatcaaccgtgctaatcttggtatggaggtaatgcacgaacgtaatgctcacaacttccctctagacctagctgctcttgaagttccttaccttaatggataaggtttttctcctaaacatataggaatttttgaaggaaggaaagccggaaatacccaatatcttgttccaacaggatat

SEQ ID NO: 5049 - DNA, 1238 bp, Zea mays
  Zm_smallRNAprecursor_538
atgaccccttctcataataagaatgtgcacgatctggtccggtatggaatgaacttataatctgatgatcgagtcgattccatgattataagttcataaccctagcacccattcccattttgggcggaacatatctactaattcttttattccagttagtaagagggatcttgaactaagaaatagacctagcagctaaaagagggtatcctgagcaattgcaagaccagtagatattgatggtattcgtgagcctgtttctggttctttactttatggaaacaatattatctctggtgctattattcctacttctgcggcgatcggattgcatttttacccaatttgggaagctgcatctgttgatgaatggttatacaatggcggtccttatgagctaattgttctacacttcttacttggtgtagcttgttatatgggtcgtgagtgggaacttagtttccgtctgggtatgcgcccttggattgctgttgcatattcagctcctgttgcagctgctactgctgttttcttgatttaccctattggtcaaggaagtttctctgatggtatgcctttaggaatatctggtactttcaactttatgattgtattccaggcagagcacaacatccttatgcatccatttcacatgttaggtgtagctggtgtattcggcggttccctattcagtgctatgcatggttccttggtaacctctagtttgatcagggaaaccactgaaaatgagtctgctaatgagggttacaaatttggtcaggaagaagagacttataatattgtggctgctcacggttattttggtcgattaatcttccaatatgctagtttcaacaattctcgttctttacacttcttggctgcttggcctgtagtagggatctggttcactgctttaggtattagtactatggcattcaacctaaatggtttcaatttcaaccaatctgtagttgatagccaaggttgcgttattaatacttgggctgatatcatcaaccgtgctaatcttggtatggaggtaatgcacgaacgtaatgctcacaacttccctctagacctagctgctcttgaagttccttaccttaatggataaggtttttctcctaaacatataggaatttttgaaggaaggaaagccggaaatacccaatatcttgttccaacaggatattgggtatttctttgtttattctgaatctttctattctgaattc

SEQ ID NO: 5050 - DNA, 1239 bp, Zea mays
  Zm_smallRNAprecursor_539
atgaccccttctcataataagaatgtgcacgatctggtccggtatggaatgaacttataatctgatgatcgagtcgattccatgattataagttcataaccctagcacccattcccattttgggcggaacatatctactaattcttttattccagttagtaagagggatcttgaactaagaaatagacctagcagctaaaagagggtatcctgagcaattgcaagaccagtagatattgatggtattcgtgagcctgtttctggttctttactttatggaaacaatattatctctggtgctattattcctacttctgcggcgatcggattgcatttttacccaatttgggaagctgcatctgttgatgaatggttatacaatggcggtccttatgagctaattgttctacacttcttacttggtgtagcttgttatatgggtcgtgagtgggaacttagtttccgtctgggtatgcgcccttggattgctgttgcatattcagctcctgttgcagctgctactgctgttttcttgatttaccctattggtcaaggaagtttctctgatggtatgcctttaggaatatctggtactttcaactttatgattgtattccaggcagagcacaacatccttatgcatccatttcacatgttaggtgtagctggtgtattcggcggttccctattcagtgctatgcatggttccttggtaacctctagtttgatcagggaaaccactgaaaatgagtctgctaatgagggttacaaatttggtcaggaagaagagacttataatattgtggctgctcacggttattttggtcgattaatcttccaatatgctagtttcaacaattctcgttctttacacttcttggctgcttggcctgtagtagggatctggttcactgctttaggtattagtactatggcattcaacctaaatggtttcaatttcaaccaatctgtagttgatagccaaggttgcgttattaatacttgggctgatatcatcaaccgtgctaatcttggtatggaggtaatgcacgaacgtaatgctcacaacttccctctagacctagctgctcttgaagttccttaccttaatggataaggtttttctcctaaacatataggaatttttgaaggaaggaaagccggaaatacccaatatcttgttccaacaggatattgggtatttctttgtttattctgaatctttctattctgaattca

SEQ ID NO: 5051 - DNA, 1240 bp, Zea mays
  Zm_smallRNAprecursor_540
atgaccccttctcataataagaatgtgcacgatctggtccggtatggaatgaacttataatctgatgatcgagtcgattccatgattataagttcataaccctagcacccattcccattttgggcggaacatatctactaattcttttattccagttagtaagagggatcttgaactaagaaatagacctagcagctaaaagagggtatcctgagcaattgcaagaccagtagatattgatggtattcgtgagcctgtttctggttctttactttatggaaacaatattatctctggtgctattattcctacttctgcggcgatcggattgcatttttacccaatttgggaagctgcatctgttgatgaatggttatacaatggcggtccttatgagctaattgttctacacttcttacttggtgtagcttgttatatgggtcgtgagtgggaacttagtttccgtctgggtatgcgcccttggattgctgttgcatattcagctcctgttgcagctgctactgctgttttcttgatttaccctattggtcaaggaagtttctctgatggtatgcctttaggaatatctggtactttcaactttatgattgtattccaggcagagcacaacatccttatgcatccatttcacatgttaggtgtagctggtgtattcggcggttccctattcagtgctatgcatggttccttggtaacctctagtttgatcagggaaaccactgaaaatgagtctgctaatgagggttacaaatttggtcaggaagaagagacttataatattgtggctgctcacggttattttggtcgattaatcttccaatatgctagtttcaacaattctcgttctttacacttcttggctgcttggcctgtagtagggatctggttcactgctttaggtattagtactatggcattcaacctaaatggtttcaatttcaaccaatctgtagttgatagccaaggttgcgttattaatacttgggctgatatcatcaaccgtgctaatcttggtatggaggtaatgcacgaacgtaatgctcacaacttccctctagacctagctgctcttgaagttccttaccttaatggataaggtttttctcctaaacatataggaatttttgaaggaaggaaagccggaaatacccaatatcttgttccaacaggatattgggtatttctttgtttattctgaatctttctattctgaattcaa

SEQ ID NO: 5052 - DNA, 1193 bp, Zea mays
  Zm_smallRNAprecursor_541
tatggaatgaacttataatctgatgatcgagtcgattccatgattataagttcataaccctagcacccattcccattttgggcggaacatatctactaattcttttattccagttagtaagagggatcttgaactaagaaatagacctagcagctaaaagagggtatcctgagcaattgcaagaccagtagatattgatggtattcgtgagcctgtttctggttctttactttatggaaacaatattatctctggtgctattattcctacttctgcggcgatcggattgcatttttacccaatttgggaagctgcatctgttgatgaatggttatacaatggcggtccttatgagctaattgttctacacttcttacttggtgtagcttgttatatgggtcgtgagtgggaacttagtttccgtctgggtatgcgcccttggattgctgttgcatattcagctcctgttgcagctgctactgctgttttcttgatttaccctattggtcaaggaagtttctctgatggtatgcctttaggaatatctggtactttcaactttatgattgtattccaggcagagcacaacatccttatgcatccatttcacatgttaggtgtagctggtgtattcggcggttccctattcagtgctatgcatggttccttggtaacctctagtttgatcagggaaaccactgaaaatgagtctgctaatgagggttacaaatttggtcaggaagaagagacttataatattgtggctgctcacggttattttggtcgattaatcttccaatatgctagtttcaacaattctcgttctttacacttcttggctgcttggcctgtagtagggatctggttcactgctttaggtattagtactatggcattcaacctaaatggtttcaatttcaaccaatctgtagttgatagccaaggttgcgttattaatacttgggctgatatcatcaaccgtgctaatcttggtatggaggtaatgcacgaacgtaatgctcacaacttccctctagacctagctgctcttgaagttccttaccttaatggataaggtttttctcctaaacatataggaatttttgaaggaaggaaagccggaaatacccaatatcttgttccaacaggatattgggtatttctttgtttattctgaatctttctattctgaa

SEQ ID NO: 5053 - DNA, 1119 bp, Zea mays
  Zm_smallRNAprecursor_542
ctagcacccattcccattttgggcggaacatatctactaattcttttattccagttagtaagagggatcttgaactaagaaatagacctagcagctaaaagagggtatcctgagcaattgcaagaccagtagatattgatggtattcgtgagcctgtttctggttctttactttatggaaacaatattatctctggtgctattattcctacttctgcggcgatcggattgcatttttacccaatttgggaagctgcatctgttgatgaatggttatacaatggcggtccttatgagctaattgttctacacttcttacttggtgtagcttgttatatgggtcgtgagtgggaacttagtttccgtctgggtatgcgcccttggattgctgttgcatattcagctcctgttgcagctgctactgctgttttcttgatttaccctattggtcaaggaagtttctctgatggtatgcctttaggaatatctggtactttcaactttatgattgtattccaggcagagcacaacatccttatgcatccatttcacatgttaggtgtagctggtgtattcggcggttccctattcagtgctatgcatggttccttggtaacctctagtttgatcagggaaaccactgaaaatgagtctgctaatgagggttacaaatttggtcaggaagaagagacttataatattgtggctgctcacggttattttggtcgattaatcttccaatatgctagtttcaacaattctcgttctttacacttcttggctgcttggcctgtagtagggatctggttcactgctttaggtattagtactatggcattcaacctaaatggtttcaatttcaaccaatctgtagttgatagccaaggttgcgttattaatacttgggctgatatcatcaaccgtgctaatcttggtatggaggtaatgcacgaacgtaatgctcacaacttccctctagacctagctgctcttgaagttccttaccttaatggataaggtttttctcctaaacatataggaatttttgaaggaaggaaagccggaaatacccaatatcttgttccaacaggatattgggtatttctttgtttattctgaa

SEQ ID NO: 5054 - DNA, 1119 bp, Zea mays
  Zm_smallRNAprecursor_543
ttgggcggaacatatctactaattcttttattccagttagtaagagggatcttgaactaagaaatagacctagcagctaaaagagggtatcctgagcaattgcaagaccagtagatattgatggtattcgtgagcctgtttctggttctttactttatggaaacaatattatctctggtgctattattcctacttctgcggcgatcggattgcatttttacccaatttgggaagctgcatctgttgatgaatggttatacaatggcggtccttatgagctaattgttctacacttcttacttggtgtagcttgttatatgggtcgtgagtgggaacttagtttccgtctgggtatgcgcccttggattgctgttgcatattcagctcctgttgcagctgctactgctgttttcttgatttaccctattggtcaaggaagtttctctgatggtatgcctttaggaatatctggtactttcaactttatgattgtattccaggcagagcacaacatccttatgcatccatttcacatgttaggtgtagctggtgtattcggcggttccctattcagtgctatgcatggttccttggtaacctctagtttgatcagggaaaccactgaaaatgagtctgctaatgagggttacaaatttggtcaggaagaagagacttataatattgtggctgctcacggttattttggtcgattaatcttccaatatgctagtttcaacaattctcgttctttacacttcttggctgcttggcctgtagtagggatctggttcactgctttaggtattagtactatggcattcaacctaaatggtttcaatttcaaccaatctgtagttgatagccaaggttgcgttattaatacttgggctgatatcatcaaccgtgctaatcttggtatggaggtaatgcacgaacgtaatgctcacaacttccctctagacctagctgctcttgaagttccttaccttaatggataaggtttttctcctaaacatataggaatttttgaaggaaggaaagccggaaatacccaatatcttgttccaacaggatattgggtatttctttgtttattctgaatctttctattctgaattc

SEQ ID NO: 5055 - DNA, 1120 bp, Zea mays
  Zm_smallRNAprecursor_544
ttgggcggaacatatctactaattcttttattccagttagtaagagggatcttgaactaagaaatagacctagcagctaaaagagggtatcctgagcaattgcaagaccagtagatattgatggtattcgtgagcctgtttctggttctttactttatggaaacaatattatctctggtgctattattcctacttctgcggcgatcggattgcatttttacccaatttgggaagctgcatctgttgatgaatggttatacaatggcggtccttatgagctaattgttctacacttcttacttggtgtagcttgttatatgggtcgtgagtgggaacttagtttccgtctgggtatgcgcccttggattgctgttgcatattcagctcctgttgcagctgctactgctgttttcttgatttaccctattggtcaaggaagtttctctgatggtatgcctttaggaatatctggtactttcaactttatgattgtattccaggcagagcacaacatccttatgcatccatttcacatgttaggtgtagctggtgtattcggcggttccctattcagtgctatgcatggttccttggtaacctctagtttgatcagggaaaccactgaaaatgagtctgctaatgagggttacaaatttggtcaggaagaagagacttataatattgtggctgctcacggttattttggtcgattaatcttccaatatgctagtttcaacaattctcgttctttacacttcttggctgcttggcctgtagtagggatctggttcactgctttaggtattagtactatggcattcaacctaaatggtttcaatttcaaccaatctgtagttgatagccaaggttgcgttattaatacttgggctgatatcatcaaccgtgctaatcttggtatggaggtaatgcacgaacgtaatgctcacaacttccctctagacctagctgctcttgaagttccttaccttaatggataaggtttttctcctaaacatataggaatttttgaaggaaggaaagccggaaatacccaatatcttgttccaacaggatattgggtatttctttgtttattctgaatctttctattctgaattca

SEQ ID NO: 5056 - DNA, 1121 bp, Zea mays
  Zm_smallRNAprecursor_545
ttgggcggaacatatctactaattcttttattccagttagtaagagggatcttgaactaagaaatagacctagcagctaaaagagggtatcctgagcaattgcaagaccagtagatattgatggtattcgtgagcctgtttctggttctttactttatggaaacaatattatctctggtgctattattcctacttctgcggcgatcggattgcatttttacccaatttgggaagctgcatctgttgatgaatggttatacaatggcggtccttatgagctaattgttctacacttcttacttggtgtagcttgttatatgggtcgtgagtgggaacttagtttccgtctgggtatgcgcccttggattgctgttgcatattcagctcctgttgcagctgctactgctgttttcttgatttaccctattggtcaaggaagtttctctgatggtatgcctttaggaatatctggtactttcaactttatgattgtattccaggcagagcacaacatccttatgcatccatttcacatgttaggtgtagctggtgtattcggcggttccctattcagtgctatgcatggttccttggtaacctctagtttgatcagggaaaccactgaaaatgagtctgctaatgagggttacaaatttggtcaggaagaagagacttataatattgtggctgctcacggttattttggtcgattaatcttccaatatgctagtttcaacaattctcgttctttacacttcttggctgcttggcctgtagtagggatctggttcactgctttaggtattagtactatggcattcaacctaaatggtttcaatttcaaccaatctgtagttgatagccaaggttgcgttattaatacttgggctgatatcatcaaccgtgctaatcttggtatggaggtaatgcacgaacgtaatgctcacaacttccctctagacctagctgctcttgaagttccttaccttaatggataaggtttttctcctaaacatataggaatttttgaaggaaggaaagccggaaatacccaatatcttgttccaacaggatattgggtatttctttgtttattctgaatctttctattctgaattcaa

SEQ ID NO: 5057 - DNA, 1140 bp, Zea mays
  Zm_smallRNAprecursor_546
ttccagttagtaagagggatcttgaactaagaaatagacctagcagctaaaagagggtatcctgagcaattgcaagaccagtagatattgatggtattcgtgagcctgtttctggttctttactttatggaaacaatattatctctggtgctattattcctacttctgcggcgatcggattgcatttttacccaatttgggaagctgcatctgttgatgaatggttatacaatggcggtccttatgagctaattgttctacacttcttacttggtgtagcttgttatatgggtcgtgagtgggaacttagtttccgtctgggtatgcgcccttggattgctgttgcatattcagctcctgttgcagctgctactgctgttttcttgatttaccctattggtcaaggaagtttctctgatggtatgcctttaggaatatctggtactttcaactttatgattgtattccaggcagagcacaacatccttatgcatccatttcacatgttaggtgtagctggtgtattcggcggttccctattcagtgctatgcatggttccttggtaacctctagtttgatcagggaaaccactgaaaatgagtctgctaatgagggttacaaatttggtcaggaagaagagacttataatattgtggctgctcacggttattttggtcgattaatcttccaatatgctagtttcaacaattctcgttctttacacttcttggctgcttggcctgtagtagggatctggttcactgctttaggtattagtactatggcattcaacctaaatggtttcaatttcaaccaatctgtagttgatagccaaggttgcgttattaatacttgggctgatatcatcaaccgtgctaatcttggtatggaggtaatgcacgaacgtaatgctcacaacttccctctagacctagctgctcttgaagttccttaccttaatggataaggtttttctcctaaacatataggaatttttgaaggaaggaaagccggaaatacccaatatcttgttccaacaggatattgggtatttctttgtttattctgaatctttctattctgaattcaattaacgacgagatttagtatcctttcttgtactttcataactcgtgaaa

SEQ ID NO: 5058 - DNA, 1061 bp, Zea mays
  Zm_smallRNAprecursor_547
aagaaatagacctagcagctaaaagagggtatcctgagcaattgcaagaccagtagatattgatggtattcgtgagcctgtttctggttctttactttatggaaacaatattatctctggtgctattattcctacttctgcggcgatcggattgcatttttacccaatttgggaagctgcatctgttgatgaatggttatacaatggcggtccttatgagctaattgttctacacttcttacttggtgtagcttgttatatgggtcgtgagtgggaacttagtttccgtctgggtatgcgcccttggattgctgttgcatattcagctcctgttgcagctgctactgctgttttcttgatttaccctattggtcaaggaagtttctctgatggtatgcctttaggaatatctggtactttcaactttatgattgtattccaggcagagcacaacatccttatgcatccatttcacatgttaggtgtagctggtgtattcggcggttccctattcagtgctatgcatggttccttggtaacctctagtttgatcagggaaaccactgaaaatgagtctgctaatgagggttacaaatttggtcaggaagaagagacttataatattgtggctgctcacggttattttggtcgattaatcttccaatatgctagtttcaacaattctcgttctttacacttcttggctgcttggcctgtagtagggatctggttcactgctttaggtattagtactatggcattcaacctaaatggtttcaatttcaaccaatctgtagttgatagccaaggttgcgttattaatacttgggctgatatcatcaaccgtgctaatcttggtatggaggtaatgcacgaacgtaatgctcacaacttccctctagacctagctgctcttgaagttccttaccttaatggataaggtttttctcctaaacatataggaatttttgaaggaaggaaagccggaaatacccaatatcttgttccaacaggatattgggtatttctttgtttattctgaatctttctattctgaattc

SEQ ID NO: 5059 - DNA, 1062 bp, Zea mays
  Zm_smallRNAprecursor_548
aagaaatagacctagcagctaaaagagggtatcctgagcaattgcaagaccagtagatattgatggtattcgtgagcctgtttctggttctttactttatggaaacaatattatctctggtgctattattcctacttctgcggcgatcggattgcatttttacccaatttgggaagctgcatctgttgatgaatggttatacaatggcggtccttatgagctaattgttctacacttcttacttggtgtagcttgttatatgggtcgtgagtgggaacttagtttccgtctgggtatgcgcccttggattgctgttgcatattcagctcctgttgcagctgctactgctgttttcttgatttaccctattggtcaaggaagtttctctgatggtatgcctttaggaatatctggtactttcaactttatgattgtattccaggcagagcacaacatccttatgcatccatttcacatgttaggtgtagctggtgtattcggcggttccctattcagtgctatgcatggttccttggtaacctctagtttgatcagggaaaccactgaaaatgagtctgctaatgagggttacaaatttggtcaggaagaagagacttataatattgtggctgctcacggttattttggtcgattaatcttccaatatgctagtttcaacaattctcgttctttacacttcttggctgcttggcctgtagtagggatctggttcactgctttaggtattagtactatggcattcaacctaaatggtttcaatttcaaccaatctgtagttgatagccaaggttgcgttattaatacttgggctgatatcatcaaccgtgctaatcttggtatggaggtaatgcacgaacgtaatgctcacaacttccctctagacctagctgctcttgaagttccttaccttaatggataaggtttttctcctaaacatataggaatttttgaaggaaggaaagccggaaatacccaatatcttgttccaacaggatattgggtatttctttgtttattctgaatctttctattctgaattca

SEQ ID NO: 5060 - DNA, 1063 bp, Zea mays
  Zm_smallRNAprecursor_549
aagaaatagacctagcagctaaaagagggtatcctgagcaattgcaagaccagtagatattgatggtattcgtgagcctgtttctggttctttactttatggaaacaatattatctctggtgctattattcctacttctgcggcgatcggattgcatttttacccaatttgggaagctgcatctgttgatgaatggttatacaatggcggtccttatgagctaattgttctacacttcttacttggtgtagcttgttatatgggtcgtgagtgggaacttagtttccgtctgggtatgcgcccttggattgctgttgcatattcagctcctgttgcagctgctactgctgttttcttgatttaccctattggtcaaggaagtttctctgatggtatgcctttaggaatatctggtactttcaactttatgattgtattccaggcagagcacaacatccttatgcatccatttcacatgttaggtgtagctggtgtattcggcggttccctattcagtgctatgcatggttccttggtaacctctagtttgatcagggaaaccactgaaaatgagtctgctaatgagggttacaaatttggtcaggaagaagagacttataatattgtggctgctcacggttattttggtcgattaatcttccaatatgctagtttcaacaattctcgttctttacacttcttggctgcttggcctgtagtagggatctggttcactgctttaggtattagtactatggcattcaacctaaatggtttcaatttcaaccaatctgtagttgatagccaaggttgcgttattaatacttgggctgatatcatcaaccgtgctaatcttggtatggaggtaatgcacgaacgtaatgctcacaacttccctctagacctagctgctcttgaagttccttaccttaatggataaggtttttctcctaaacatataggaatttttgaaggaaggaaagccggaaatacccaatatcttgttccaacaggatattgggtatttctttgtttattctgaatctttctattctgaattcaa

SEQ ID NO: 5061 - DNA, 1044 bp, Zea mays
  Zm_smallRNAprecursor_550
gctaaaagagggtatcctgagcaattgcaagaccagtagatattgatggtattcgtgagcctgtttctggttctttactttatggaaacaatattatctctggtgctattattcctacttctgcggcgatcggattgcatttttacccaatttgggaagctgcatctgttgatgaatggttatacaatggcggtccttatgagctaattgttctacacttcttacttggtgtagcttgttatatgggtcgtgagtgggaacttagtttccgtctgggtatgcgcccttggattgctgttgcatattcagctcctgttgcagctgctactgctgttttcttgatttaccctattggtcaaggaagtttctctgatggtatgcctttaggaatatctggtactttcaactttatgattgtattccaggcagagcacaacatccttatgcatccatttcacatgttaggtgtagctggtgtattcggcggttccctattcagtgctatgcatggttccttggtaacctctagtttgatcagggaaaccactgaaaatgagtctgctaatgagggttacaaatttggtcaggaagaagagacttataatattgtggctgctcacggttattttggtcgattaatcttccaatatgctagtttcaacaattctcgttctttacacttcttggctgcttggcctgtagtagggatctggttcactgctttaggtattagtactatggcattcaacctaaatggtttcaatttcaaccaatctgtagttgatagccaaggttgcgttattaatacttgggctgatatcatcaaccgtgctaatcttggtatggaggtaatgcacgaacgtaatgctcacaacttccctctagacctagctgctcttgaagttccttaccttaatggataaggtttttctcctaaacatataggaatttttgaaggaaggaaagccggaaatacccaatatcttgttccaacaggatattgggtatttctttgtttattctgaatctttctattctgaattc

SEQ ID NO: 5062 - DNA, 1052 bp, Zea mays
  Zm_smallRNAprecursor_551
tgatggtattcgtgagcctgtttctggttctttactttatggaaacaatattatctctggtgctattattcctacttctgcggcgatcggattgcatttttacccaatttgggaagctgcatctgttgatgaatggttatacaatggcggtccttatgagctaattgttctacacttcttacttggtgtagcttgttatatgggtcgtgagtgggaacttagtttccgtctgggtatgcgcccttggattgctgttgcatattcagctcctgttgcagctgctactgctgttttcttgatttaccctattggtcaaggaagtttctctgatggtatgcctttaggaatatctggtactttcaactttatgattgtattccaggcagagcacaacatccttatgcatccatttcacatgttaggtgtagctggtgtattcggcggttccctattcagtgctatgcatggttccttggtaacctctagtttgatcagggaaaccactgaaaatgagtctgctaatgagggttacaaatttggtcaggaagaagagacttataatattgtggctgctcacggttattttggtcgattaatcttccaatatgctagtttcaacaattctcgttctttacacttcttggctgcttggcctgtagtagggatctggttcactgctttaggtattagtactatggcattcaacctaaatggtttcaatttcaaccaatctgtagttgatagccaaggttgcgttattaatacttgggctgatatcatcaaccgtgctaatcttggtatggaggtaatgcacgaacgtaatgctcacaacttccctctagacctagctgctcttgaagttccttaccttaatggataaggtttttctcctaaacatataggaatttttgaaggaaggaaagccggaaatacccaatatcttgttccaacaggatattgggtatttctttgtttattctgaatctttctattctgaattcaattaacgacgagatttagtatcctttcttgtactttcataactcgtgaaa

SEQ ID NO: 5063 - DNA, 1052 bp, Zea mays; identical to SEQ ID NO: 5062
  Zm_smallRNAprecursor_552

SEQ ID NO: 5064 - DNA, 1159 bp, Zea mays
  Zm_smallRNAprecursor_553
gatggtattcgtgagcctgtttctggttctttactttatggaaacaatattatctctggtgctattattcctacttctgcggcgatcggattgcatttttacccaatttgggaagctgcatctgttgatgaatggttatacaatggcggtccttatgagctaattgttctacacttcttacttggtgtagcttgttatatgggtcgtgagtgggaacttagtttccgtctgggtatgcgcccttggattgctgttgcatattcagctcctgttgcagctgctactgctgttttcttgatttaccctattggtcaaggaagtttctctgatggtatgcctttaggaatatctggtactttcaactttatgattgtattccaggcagagcacaacatccttatgcatccatttcacatgttaggtgtagctggtgtattcggcggttccctattcagtgctatgcatggttccttggtaacctctagtttgatcagggaaaccactgaaaatgagtctgctaatgagggttacaaatttggtcaggaagaagagacttataatattgtggctgctcacggttattttggtcgattaatcttccaatatgctagtttcaacaattctcgttctttacacttcttggctgcttggcctgtagtagggatctggttcactgctttaggtattagtactatggcattcaacctaaatggtttcaatttcaaccaatctgtagttgatagccaaggttgcgttattaatacttgggctgatatcatcaaccgtgctaatcttggtatggaggtaatgcacgaacgtaatgctcacaacttccctctagacctagctgctcttgaagttccttaccttaatggataaggtttttctcctaaacatataggaatttttgaaggaaggaaagccggaaatacccaatatcttgttccaacaggatattgggtatttctttgtttattctgaatctttctattctgaattcaattaacgacgagatttagtatcctttcttgtactttcataactcgtgaaatgccgagtaggcacgaattcccccaatttgcgacctaccataggatttgttatgtaaataggtatatgttcttttccattatgaatcgcgattgtatggccaaccatt

SEQ ID NO: 5065 - DNA, 1158 bp, Zea mays
  Zm_smallRNAprecursor_554
atggtattcgtgagcctgtttctggttctttactttatggaaacaatattatctctggtgctattattcctacttctgcggcgatcggattgcatttttacccaatttgggaagctgcatctgttgatgaatggttatacaatggcggtccttatgagctaattgttctacacttcttacttggtgtagcttgttatatgggtcgtgagtgggaacttagtttccgtctgggtatgcgcccttggattgctgttgcatattcagctcctgttgcagctgctactgctgttttcttgatttaccctattggtcaaggaagtttctctgatggtatgcctttaggaatatctggtactttcaactttatgattgtattccaggcagagcacaacatccttatgcatccatttcacatgttaggtgtagctggtgtattcggcggttccctattcagtgctatgcatggttccttggtaacctctagtttgatcagggaaaccactgaaaatgagtctgctaatgagggttacaaatttggtcaggaagaagagacttataatattgtggctgctcacggttattttggtcgattaatcttccaatatgctagtttcaacaattctcgttctttacacttcttggctgcttggcctgtagtagggatctggttcactgctttaggtattagtactatggcattcaacctaaatggtttcaatttcaaccaatctgtagttgatagccaaggttgcgttattaatacttgggctgatatcatcaaccgtgctaatcttggtatggaggtaatgcacgaacgtaatgctcacaacttccctctagacctagctgctcttgaagttccttaccttaatggataaggtttttctcctaaacatataggaatttttgaaggaaggaaagccggaaatacccaatatcttgttccaacaggatattgggtatttctttgtttattctgaatctttctattctgaattcaattaacgacgagatttagtatcctttcttgtactttcataactcgtgaaatgccgagtaggcacgaattcccccaatttgcgacctaccataggatttgttatgtaaataggtatatgttcttttccattatgaatcgcgattgtatggccaaccatt

SEQ ID NO: 5066 - DNA, 1119 bp, Zea mays
  Zm_smallRNAprecursor_555
gaaacaatattatctctggtgctattattcctacttctgcggcgatcggattgcatttttacccaatttgggaagctgcatctgttgatgaatggttatacaatggcggtccttatgagctaattgttctacacttcttacttggtgtagcttgttatatgggtcgtgagtgggaacttagtttccgtctgggtatgcgcccttggattgctgttgcatattcagctcctgttgcagctgctactgctgttttcttgatttaccctattggtcaaggaagtttctctgatggtatgcctttaggaatatctggtactttcaactttatgattgtattccaggcagagcacaacatccttatgcatccatttcacatgttaggtgtagctggtgtattcggcggttccctattcagtgctatgcatggttccttggtaacctctagtttgatcagggaaaccactgaaaatgagtctgctaatgagggttacaaatttggtcaggaagaagagacttataatattgtggctgctcacggttattttggtcgattaatcttccaatatgctagtttcaacaattctcgttctttacacttcttggctgcttggcctgtagtagggatctggttcactgctttaggtattagtactatggcattcaacctaaatggtttcaatttcaaccaatctgtagttgatagccaaggttgcgttattaatacttgggctgatatcatcaaccgtgctaatcttggtatggaggtaatgcacgaacgtaatgctcacaacttccctctagacctagctgctcttgaagttccttaccttaatggataaggtttttctcctaaacatataggaatttttgaaggaaggaaagccggaaatacccaatatcttgttccaacaggatattgggtatttctttgtttattctgaatctttctattctgaattcaattaacgacgagatttagtatcctttcttgtactttcataactcgtgaaatgccgagtaggcacgaattcccccaatttgcgacctaccataggatttgttatgtaaataggtatatgttcttttccattatgaatcgcgattgtatggccaaccatt

SEQ ID NO: 5067 - DNA, 1038 bp, Zea mays
  Zm_smallRNAprecursor_556
acaatattatctctggtgctattattcctacttctgcggcgatcggattgcatttttacccaatttgggaagctgcatctgttgatgaatggttatacaatggcggtccttatgagctaattgttctacacttcttacttggtgtagcttgttatatgggtcgtgagtgggaacttagtttccgtctgggtatgcgcccttggattgctgttgcatattcagctcctgttgcagctgctactgctgttttcttgatttaccctattggtcaaggaagtttctctgatggtatgcctttaggaatatctggtactttcaactttatgattgtattccaggcagagcacaacatccttatgcatccatttcacatgttaggtgtagctggtgtattcggcggttccctattcagtgctatgcatggttccttggtaacctctagtttgatcagggaaaccactgaaaatgagtctgctaatgagggttacaaatttggtcaggaagaagagacttataatattgtggctgctcacggttattttggtcgattaatcttccaatatgctagtttcaacaattctcgttctttacacttcttggctgcttggcctgtagtagggatctggttcactgctttaggtattagtactatggcattcaacctaaatggtttcaatttcaaccaatctgtagttgatagccaaggttgcgttattaatacttgggctgatatcatcaaccgtgctaatcttggtatggaggtaatgcacgaacgtaatgctcacaacttccctctagacctagctgctcttgaagttccttaccttaatggataaggtttttctcctaaacatataggaatttttgaaggaaggaaagccggaaatacccaatatcttgttccaacaggatattgggtatttctttgtttattctgaatctttctattctgaattcaattaacgacgagatttagtatcctttcttgtactttcataactcgtgaaatgccgagtaggcacgaattcccccaatttg

SEQ ID NO: 5068 - DNA, 1078 bp, Zea mays
  Zm_smallRNAprecursor_557
accgtctgcgcctgaccagagagcaccgccgcctcacgccaggtcacagaccgtccggccctgtgccgcggaccgttcgcgcctgaccagagagcaccgccgctggttcttttgaagtgattggcgcctccaaaaaggtgtcaacagaaagtctctaaacactggttaaccctttctatttgcccatcggattggggtgataagctaaagacgtgttgagtttagtatctgaaagtaaaaacagttgttgccaaaatgagcttgtaaatatccggtctctaccagaaataacaatagcaggcaatccttcgtctggtcattttgttaaatagacccgacttcttagaaataaactcgtcgtcctgttttctttcgcctgagcccctggtttcttatagagagacccctcaactttattttaatcacattaatgggtataaattagggtttttgaattgggtttttaagttgttgcccttatttttactggtgtcctcattttttacccttagtcgtgttttttcttagttttgcccttccagtgctatagaacagaagagcaaaactgagcaaaaaaaacacgactaagggtaaaaatgaggacaccagcaaaaccgatgtcaccagcttaaaaaaaccctttgaattctaaaacttccagaattcataactttgtcatatgaaatccaatttggatggtccaaattacaaaatattcattataatattttctatctgtttaaattatgttcatccattgtttccatgtctcaattttatagttggtctctaggttagggtaaggctatagaaactttattagaaacaaaataaaggtaaaatccctaatgaatgttcaagtgcctaacgttgtagacccaaccccatttaatgtatgatcctagccctgaaataaatttatttaagtaagcaactggctaatatagacctagttcgagaacaatataccacttggcatagtgacctaccccaaacctagaatgcacctatgtgtctttaactttctatgaaacctgtgtttactctgttgcatatgtttggtgtactgtttcttttg

SEQ ID NO: 5069 - DNA, 1134 bp, Zea mays
  Zm_smallRNAprecursor_558
agatgggttacaataagaagctaaagaagcttgcccccatgaagaaaatccaaaagaagaccaagaaccaaagaggccaggctgagcagaggaagaaagcccctccagcaccacctcccgctaggatagagaatttgtccgacgtcgaggatatgtccctagctagccttgatgaccttctcaaggaatttggggacactttagagaaagagttcggaagtacctcagagaacgctcgcgtgtagtacgacttgtagtagttgtatgcttgtaatgtattggtgtaatgaataaaataacttggctagaaaaaaattggcatatgcataatagtgactctctccccctggcagatggcttcagataaaaccacgcctaccgcctccgggattggagcagggtttcccctaagagctgaaagggaagccggtagagaaggaagtgagacccacctccccgcacctccaaaactacccttagatttagcccaagttctagccaaccaaacccgactcatcgaggtccccactaaaagtctagaaaatcaacgtccgaatggtggaaaaccacaagacaggatgggagatttcctgaggctgaagccttccacgtttgccggatctagcaatcccctcgatgctgacgattggctgcgcacgattaaacgaaagctggaagccatcagatgctcggaaaatcagcgtgttcaactagccgctcatcaactttccggaatggccttagcctggtgggataccttcaatgttgccatcagagatgctacctgggcagagtttgaaacggctttccgagagcaccatgtgccccaagggatcgttcagctcaaggaagatgaattccaggaactaactcaagacggaagatctgtcagtgagtacatgcacaaattcatagagttggcccgctacgcgtcggatgacgtcagcaccgaagtcaagaagatggcccactttttgaaggggcttagaccagaactcaagaccatcctagccagccaagacttcctcagcttctcgcacctctccaacaaagccatgcaagtggaaagggcaaaggaagaagaaaaaggtcatctcaagaggaaattccaagtcctccgagctcagcagcaag

SEQ ID NO: 5070 - DNA, 1043 bp, Zea mays
  Zm_smallRNAprecursor_559
tctttctttctcaaattttgcttcacatagtcttgcctcttctcatttgcttgagccttcttctcaagattgtcgggacaccttgaggcaaagtgacccatatcatcacacatgtagcacttgatttgagccaaaccatccttcttcttttgatttgtgctcatcatgttatcttgattatatattgaatgtcttcttcttgttttctttttcttccccacatcaccattatattcatggttaatcttgatttgcttttggggatccttcctttgctcaactcgtggctttggttgaggcttcacttgtggcttcactaatttcttggttgggcacattgaggtgaggtgaccccaagtgtggcacttgaagcacttgtcatgctttagcctcctttcttccttcttcaacttgagcttccttttattggggcatgcctttgcaagatgacccatctcatggcatttatagcacatgaagtgagatagctcatttccttttaatttgaattgtctgcctttgatattactcttgttgaaaccaaggccactcttgtcatcatatcttctttgatttttcaatataagatcatgagtgacttttgatttatgccatctctcaaacatgttgcttaaattcttcactttgtttttgagcttattattttccttcaaaaggttagtctcacaagacaaggaagaatagtaataatctatacttgaagaacatggcatagctaataaatcatcacaagaggtggatacatgcttcttgtcttcatcacatggattagcaacatttttcaattgatcatataattcatgggatgaattatcactagttttattttctttactagaaaactcgttagtgagaaaaacatgctcttgtatcaaattttcatgagcaacactaagttcctcatgactcaattttagctcctcatgtgaacaagtaacaacataaagtagatgcttttgttgttcacatgaatactttagaaatgagttttcattttccaagtttcttgttttatctttctc

SEQ ID NO: 5071 - DNA, 1067 bp, Zea mays
  Zm_smallRNAprecursor_560
tccccacatcaccattatattcatggttaatcttgatttgcttttggggatccttcctttgctcaactcgtggctttggttgaggcttcacttgtggcttcactaatttcttggttgggcacattgaggtgaggtgaccccaagtgtggcacttgaagcacttgtcatgctttagcctcctttcttccttcttcaacttgagcttccttttattggggcatgcctttgcaagatgacccatctcatggcatttatagcacatgaagtgagatagctcatttccttttaatttgaattgtctgcctttgatattactcttgttgaaaccaaggccactcttgtcatcatatcttctttgatttttcaatataagatcatgagtgacttttgatttatgccatctctcaaacatgttgcttaaattcttcactttgtttttgagcttattattttccttcaaaaggttagtctcacaagacaaggaagaatagtaataatctatacttgaagaacatggcatagctaataaatcatcacaagaggtggatacatgcttcttgtcttcatcacatggattagcaacatttttcaattgatcatataattcatgggatgaattatcactagttttattttctttactagaaaactcgttagtgagaaaaacatgctcttgtatcaaattttcatgagcaacactaagttcctcatgactcaattttagctcctcatgtgaacaagtaacaacataaagtagatgcttttgttgttcacatgaatactttagaaatgagttttcattttccaagtttcttgttttatctttctcaatttctaaagcaatgttcatgcttgcaagtataccaacaagctcatcatatgaatatgaatgattagtcacattagcattatataccttcgtattaccttgtgacatgaagcaatgtgatgtaatggatgggcttgtagtagcgatatcattgtccgagcatgaacaatcaccataatcatcaagtatgcttgagatagaaccataatttgcattacttgagttagagccaacacaa

SEQ ID NO: 5072 - DNA, 1051 bp, Zea mays
  Zm_smallRNAprecursor_561
caaaaactaacatgtgcatgtatgactttgttgagagagcaattatgataatcatagaccattatctatcaagatgatggtgcttgtattgcttggtcgtgaataggttatgtgagtacaaatcaatatattgtccacaaaatggtttatcccaatgactgtaataccattgaggagtaattagactgtaaattaaacatgcaaatactttgcaaatttattcacgaagtttccacctactcttacacttcaaaagtgtttgtaaatttgatatgcaacgactttgagatttgcaaaattcagggggagtcttctcctaaattataacctatttatgcattatattttactcttttctttttatgagtttttatctcaaggtttattaaataaaagtttttaatgaggtaatatacactaccggacacggcttctttgtcgagtgtcacactcagcaaatatccttcggtgaacttgatgtcgaaaaaggtctctttgccgagtactttctgtcgggcactcgacaaagtctttgccgagtaaccaaaggtacttgacaaaaagtcgtcgtgacagcctttgccaagtgctcggctcataggcactcggcaaagacaggaccagtgggcccccatgcacaatttttgtgccaagtgtgtgggtagacactcggcaaagatgacctctttgtcaagtgctgctttcgagacactcgacaaagagagcactcgtagccccccttgcacagcttctctgtcgtgtgtctggtctggcactcggcaaaggtgtatactttatcgagtgccttggccatagcactcagcaaattagctttctcagttaccaagtgtgctttctttgatgagtgctatgacactcggcatagataacagtcgtcagctatcgtcggtggctgacgctgctttgctaagcacgatgttgtatcgagagccagaaactcggtaaagatgtatttgccgagtgtattttgttgccgagtgtttggctctcggtaaagattatatttgtcgagtgttcttgtttgccgagt

SEQ ID NO: 5073 - DNA, 1088 bp, Zea mays
  Zm_smallRNAprecursor_562
agtaatgaaaaatagggcatgggcgcatggtagcctgatgatctgccactgcctacaagtgcatgtcctgttcgataagtccactggatatctccattccctcttttctttgtccaacactgtcacctctgcctcaagcggtctgcgcttgatgaaagacattttcaaacctctggtcttttcatgcaatgtcttcatcacaactaggattatcatgtggccatgaaacctcttaagtgcaattctttgacgcaactcaaaccttaccataagcatttgttgaatcttatctagcaactccaccaaatgaagcccctttgtttttctgatccatgcattgaatgactccgccaagttattgttcacatagtccaccttgcacccttcaccaaatttgcttctagcccatagatatttgtgatgactttcaatgtatatttttaacctagagtttgtgtacagttgattcacatgatagttatgctttttaaggctatatgtcaatgatgttggccataagttgtcatcaatcaactttcccttgaatgatttgcccaagtttgaagcaaaatgcctcatgcattccctatgctctactccaggaaacacataatccacttcagtttctaaacccttgcaagcgtctatgtgtatagtcaatccatgtggaaaccctataacctgacgcaaattctgtaggaaccatgtccaactttctgttgactctacctcgaggactccataagccactagaaagagccaattatgtgcatcaatggcacaagcagctactaactagcctctaaacctcccataaagagttgttgcatccactgctaaataaggcctacaactagctaagaacccactccaacatgctttgaatgaaacgaacacccttctaaaacaatctttgttcaaaatcttgcctctcactttataatccactgtatgatggacaatctcaacaacactacctgggcacgccttctccactttagctttgaaagtgaataataagttaaagctttccttccatgggccataaatcttgtcaagagccatttccttgccataatacactctca

SEQ ID NO: 5074 - DNA, 1048 bp, Zea mays
  Zm_smallRNAprecursor_563
gcaactgagcacaacaagcaccagcagctatgtattcagcctcggcagtggaaagtacaacacagttttgcttcttaaagctccaagacaccagggaccgcctaaggaattggcaagtccccaaggtgctttttcgatctactttacaactggcatagcctgaatcagagtagccaaataaatcaaaaaaggagcccttaggataccagagacctagattttgggtgtgaactagatatctcaaaattatcttaacggccactaagtgacactcttttgggttagcttgaaaacgggcatacatgcacacactaagcatgatatctggcctagatgcacataaatatagtagagatcctatcattgatctataaagcttttgatctacagttttaccttcttcatttaagtcgagatgaccacttgaagccattggtgtcttggcgtgctttgccttttccatgctaaactttttgagcatgtcttgtgtgtacttggtttggcacagaaaggttccttccttgagttgtttaacttgaaaacccaggaagtacttgagctcacccatcatggacatctcaaacctatttgtcataaccctactaaattcctcacaaaaagtttcatcagtactgccaaatataatgtcgtcgacatatatttgacaaacaaataattgattgtcaactttgcgagtgaataaagtagagtctacttttcctatttcaaaaccattgttaagcaagaaatccttaaggcaatcataccaagctctaggggcttgtttaagcccgtagagtgccttgtgaagtaggtaaacatgatttggcttctttggatcttcaaagcccggtggttgctccacatagaccctctcttgtagtggtccatttagaaatgcgctcttgacatccatttgatatagcttgaaatcatggttagtagcataggcaattaatattctaattgactctaaccttgctaccggcgcatatgtttcaccaaaatcaagtccttccacttgagtgtagccttgggcaaccaaccg

SEQ ID NO: 5075 - DNA, 1123 bp, Zea mays
  Zm_smallRNAprecursor_564
taatgatggccaggctgtctccacccgagactcagtgaaattgaactcgctgtgaagatgcagtgtacccgcggcaagacggaaagaccccgtgaacctttactatagcttgacactgaacattgagccttgatgtgtaggataggtgggaggctttgaagtgtggacgccagtctgcatggagccgaccttgaaataccaccctttaatgtttgatgttctaacgttgacccgtaatccgggttgcggacagtgtctggtgggtagtttgactggggcggtctcctcctaaagagtaacggaggagcacgaaggttggctaatcctggtcggacatcaggaggttagtgcaatggcataagccagcttgactgcgagcgtgacggcgcgagcaggtgcgaaagcaggtcatagtgatccggtggttctgaatggaagggccatcgctcaacggataaaaggtactccggggataacaggctgataccgcccaagagttcatatcgacggcggtgtttggcacctcgatgtcggctcatcacatcctggggctgaagtaggtcccaagggtatggctgttcgccatttaaagtggtacgcgagctgggtttagaacgtcgtgagacagttcggtccctatctgccgtgggcgctggagaactgaggggggctgctcctagtacgagaggaccggagtggacgcatcactggtgctcgggttgtcatgccaagtcccttgcccgggcagtaaatggggaagagataacatgcccaagcatgtaagcaatccccccggccccagttaacaaggaaatcctttttccttttttttttcccatttctttttcctattttaatatataaaggcttctattgatattttatgcaccaaaaatagtctaaacaaattatagggcacaaaataataatatttaaaacttggcacaccccactaagccaccatggttgatgtattgttcattgcttatttctgctaggagaagaaggatccgatcctccggaaattatagctccgaaagaagggcaggaacccgacctctccgaaatagatctttcgtgccaggagaacttcgacgaaggcaagtccattcttcccttgatg

SEQ ID NO: 5076 - DNA, 1040 bp, Zea mays
  Zm_smallRNAprecursor_565
gagttggtttaactgccctaactatggcagaatatttccgagatgttaataagcaagacgtgcttttattcatcgataatatctttcgttttgttcaagcaggatcggaagtatccgccttattaggcagaatgccctccgcagtgggttatcaacctacccttagtacagaaatgggttctttgcgagaaagaattacttctaccaaaaagggatctataacttcgatccaagcagtttatgtacctgcagacgatttgaccgaccctgctcctgccacaacatttgcacatttggacgctactaccgtactttccagaggattagcttccaagggtatttatcccgcagtagatcctttagattaaacctcaactatggtacagcctcggattgttggcaacgaacattatgaaactgcgcaaagagttaaggaaactttacaacgttacaaagaacttcaggacattatcacaattcttggattgaaaaaccgatcaaaaaaggacgagcgaagtaagtaatcgaaaaactttcttctttgttcgtcctatctataagaggagagcatatgaaaaatgtaacccattcttttatttttttagctcactggccattcgctgggagttttgggcttaatacagatattttagcaacaaatctaataaatctaactgtagtggttggtgtattgggttcatgaacggacacctttggctaatttaattcgctggagagataagcccgtggctctttcccgtcaacactacttcgtctacccacttctctttcaggaatatatttatgcatttgctcatgatttctgatgaccgagtcgattccatgattataagttcataaccctagcacccattcccattttgggcggaacagatctactaattcttttattccagttagtaagagggatcttgaactaagaaatagacctagcagctagcttctcgaaatcaagatattggaattggattagtcaatcgattcataactgcctttcgagcacaaccgtttcgagcaca

SEQ ID NO: 5077 - DNA, 1035 bp, Zea mays
  Zm_smallRNAprecursor_566
gttggtttaactgccctaactatggcagaatatttccgagatgttaataagcaagacgtgcttttattcatcgataatatctttcgttttgttcaagcaggatcggaagtatccgccttattaggcagaatgccctccgcagtgggttatcaacctacccttagtacagaaatgggttctttgcgagaaagaattacttctaccaaaaagggatctataacttcgatccaagcagtttatgtacctgcagacgatttgaccgaccctgctcctgccacaacatttgcacatttggacgctactaccgtactttccagaggattagcttccaagggtatttatcccgcagtagatcctttagattaaacctcaactatggtacagcctcggattgttggcaacgaacattatgaaactgcgcaaagagttaaggaaactttacaacgttacaaagaacttcaggacattatcacaattcttggattgaaaaaccgatcaaaaaaggacgagcgaagtaagtaatcgaaaaactttcttctttgttcgtcctatctataagaggagagcatatgaaaaatgtaacccattcttttatttttttagctcactggccattcgctgggagttttgggcttaatacagatattttagcaacaaatctaataaatctaactgtagtggttggtgtattgggttcatgaacggacacctttggctaatttaattcgctggagagataagcccgtggctctttcccgtcaacactacttcgtctacccacttctctttcaggaatatatttatgcatttgctcatgatttctgatgaccgagtcgattccatgattataagttcataaccctagcacccattcccattttgggcggaacagatctactaattcttttattccagttagtaagagggatcttgaactaagaaatagacctagcagctagcttctcgaaatcaagatattggaattggattagtcaatcgattcataactgcctttcgagcacaaccgtttcgagc

SEQ ID NO: 5078 - DNA, 1062 bp, Zea mays
  Zm_smallRNAprecursor_567
aaagatcagatcgaaaacaatgtgccaacaaatcaaccacactctctgaaatctgaaactatctggaatctgaagcacacacaactcttatgaaactgctggaggaggacaaataaacaaaggaattagatatcaaggtatgggggttataatgttaataggtgtcaagtctagaggttggtaactgttgttggttgatgtcaagaggtgtctcttcttggtctgagcttcattggtctccaaagttgattgtcccaataccatcacggccaaagcacatcgagaaggaattagacgtcaggacttttgcagccagaccagtctcccaaggcgaactccaagccgcgatggttgccgttgtagtagcgcttggcataggcttgtgcttgcaggaagcgatcgcgaacttccgccaagaagatgtaccgttgttgcagcatgtcgtccacggtctgggtccacgatgtgcccgtcaagggcatgttcgcttagaccaatccagagggggattggagaggtttaaatccccgtctagtcaaaaatggctaggcagggatttaaaccccttcaatccccctctggattggtctaaccgaacaagccccaaaagggggccagtgtcggtggttcctgaccgtaaaccacctgaaatggagtcgtgcacaggcaggggcggacccagcgggtggtccatatgatccacggcacaccctaagatcatataagtatagttatcatagtggtgtaagcgctatatttttaaacttggtggtcaaggttcgagtcttgttaatccttattttttgtgcaaagcggtgctcatacgcagcttgatgtctgccattttgaagaggtcgcgccatacgtcgctggtgaagaccaggttccgatcgctcatgatgagttgggagatccatagaggcagacgatctcggtgaagaaagggcgtgcgacagaggtggtggtgtaggggtgtctcagagcgatgaagtggagaaacggtccacgaccgttaagacggacttgccatggatgtgaggcaatccctcgatgatgtccatg

SEQ ID NO: 5079 - DNA, 1063 bp, Zea mays
  Zm_smallRNAprecursor_568
taacgaaccgagctaggatgtcagctcagctcatgaaaattcaaacgaaaccgattcgagccgagtcgaactgaccacaaatcgagcgagctaacgagccacgatcatttcgtccagccctagttgtgaggtagaacatctgcattattttgttcagagcattggattgtctagtcccagtaattatatttgatgaaaaatgcttagtcaattgttaactgttaagtttatttttttgaagtaatcttatattttttatgtacttcgaattatttttatctgctacttatgtgtgttattttttcgcaagagaagcatgactaattgattgaaccaacaagcaaggagaaactcgtcccaataattgataggggcttcttacaaaaatattaatagctaatcaaggacttgagcttacttgtttcatgagtcagttaaataatccagatgctattagggggtgtttggtttctatggactaatttttagtgtcttcattttagtccctaaattgccggacacagggactaaaagagggattatctctattttagtccatatgtttggcaatttagagactaaaagagatgaaaatagagggactaaaaattagtccctagaaaccaaacactccctcaatgtgctcggagttgcaaatatgttctgtaccctgtaaatgatccaaaacttttggttttggttatgatccagaattccagattgctatttgaccagcttttcaagagctgggtgtgagtatctgaccagaattttggacgttgtcttcataagcatagatgtagtgatacgaagttagggaaatccactttttggtagaatctttgaaagcatcatccgtgtctgttgcatttctgacctctgtcaatacacagagatggctaacactgtctcttttctaacattctacagcaggctggaaagaaagaggaggaggaatttagcacaggccctctgtcagtcctaatgatgagtgttaagaacaacacccaggtatgcaatttatcctgtttccctccagttattttgctagaaacttaagtgc

SEQ ID NO: 5080 - DNA, 1091 bp, Zea mays
  Zm_smallRNAprecursor_569
gaagagctcacggggaaccaccaccaagccgtctaggaggcggcaacctccaagagtaacaagccaacgacctcacttgatgatctccctagtgcctcaaagatcaacaacttgatgcaatgcactagatggctctcaatctcactagaatgcaatcccaaccaatatgagtgagagagagggagaggaaaggctccaatatgctcacaagtgttccaactagcctccttcacactttcaacccgggcaacacaaggatatatagccccctctccaaaactagccgttatgggtcaattgccccttttctgcgcacatgcggacggtctgcaatacaagcccggactgtccgcacaagaatcccaacggctataaacggttataaaaatgtcagagcattcaaaaatgacttgcggacggtctgcccctcaaggtcggacggtccgcgatacataaaactgagccaaaacgaagttttgctgactctgcacatttgctgaaatttgtactgcggacggtccgcacccggaccccggacggtccgcaatacaaaatctttgtactgtggacggtccgcacctggaccctggacggtccgtaatacaaaatatttgtactgtggacggtccgcactcaggccccggacggtccgcagttcaaaaaataaaaccaacacagaactactcgagttctgtccaaacaccaatccttcaactacggacggtccgccacctgggaccagacggtccgcagtacaaaaacttcacgaaacacagaaactccgtgtttctgcccattacctcaagttagacctgcggacaatccgccatgctggcctggacggtccgcggtacctcaattcagcccacattcaagaaatcgcttttgaataaattttattacacgaaccaaagcgttgttagccctcatgcaaatgcatcaactatacgagcaatgaggcactaaagacatgtcaagtaagataattgacccctcttgatagtacggctatctagcctactaacccggtcaattatcaacctctaagcaccttttgaccggtaaaacaaaaacctattgttatacctttg

SEQ ID NO: 5081 - DNA, 1167 bp, Zea mays
  Zm_smallRNAprecursor_570
tcaacacacaatcattgcagttcaggggacagtctagggaaaggacaaatggatctactcttggggcaataacaatttttgttcgagcaaagtctactctttaaactttcagctcatctgctcacctgcctcgttcaagtggatttggaaaccaaaggttctcaagaaaatcaaagtattcatttggcttgtcttaacaaacaaaatcaacacccgaaacctgcttaaaaaggtgtatagtccataacaaatgactacaattgtgtgatatgtgatcttaatagtgaagagaccacctatcatctactgtttgactactcttttagtattgtctgatggccgagactatgtctggattcattgggatcattcatttagaaagaaattcttcatgaagattttggcaatcacggcgtgggaaatatggaaacaacgaaactttgcattattcgggaatgatgacccatctctatcttcttggaggcaacgactgctatgcaagcagtccttctgtgcaagcgtgcaagcaaaccatctgatccattagatcatgatccaaccgtaggtcacatttaacacttaaacccttccaccaccagctcaataatctttataaaaaaaacccctaacaaaccatggttgtatctgtggttggatcgtaatctaatggatcagatggtttgcttgcacgcttgcacagaaggactgcttgcataacagtcattgcccttcttggaaggcttgcttcaatgacacgctgaaattgtatctgattagattgagcccggatcttaatctccttatatctagttggttcttggctttgtaatatggattgtctttccctttttttcccttatcccttttctttcatttttccttcctttcttgtttaccccttttctgtttttgtacaatcgtttacatatcttaaataaaattatactatagaggaccaccctacaattttcccctaaaaatccaaaacgatccaaaaccgtgtcactatctcaagctgttcttagcatcttgaattacagtttttgaatgcaaaaaaatgatctaaacagattctgattgagctgaaattatgcacataactttataagtgatttactaaggtgtccacaaaacttgagctcaaatggatctaaatttcaatagcag

SEQ ID NO: 5082 - DNA, 1168 bp, Zea mays
  Zm_smallRNAprecursor_571
tcaacacacaatcattgcagttcaggggacagtctagggaaaggacaaatggatctactcttggggcaataacaatttttgttcgagcaaagtctactctttaaactttcagctcatctgctcacctgcctcgttcaagtggatttggaaaccaaaggttctcaagaaaatcaaagtattcatttggcttgtcttaacaaacaaaatcaacacccgaaacctgcttaaaaaggtgtatagtccataacaaatgactacaattgtgtgatatgtgatcttaatagtgaagagaccacctatcatctactgtttgactactcttttagtattgtctgatggccgagactatgtctggattcattgggatcattcatttagaaagaaattcttcatgaagattttggcaatcacggcgtgggaaatatggaaacaacgaaactttgcattattcgggaatgatgacccatctctatcttcttggaggcaacgactgctatgcaagcagtccttctgtgcaagcgtgcaagcaaaccatctgatccattagatcatgatccaaccgtaggtcacatttaacacttaaacccttccaccaccagctcaataatctttataaaaaaaacccctaacaaaccatggttgtatctgtggttggatcgtaatctaatggatcagatggtttgcttgcacgcttgcacagaaggactgcttgcataacagtcattgcccttcttggaaggcttgcttcaatgacacgctgaaattgtatctgattagattgagcccggatcttaatctccttatatctagttggttcttggctttgtaatatggattgtctttccctttttttcccttatcccttttctttcatttttccttcctttcttgtttaccccttttctgtttttgtacaatcgtttacatatcttaaataaaattatactatagaggaccaccctacaattttcccctaaaaatccaaaacgatccaaaaccgtgtcactatctcaagctgttcttagcatcttgaattacagtttttgaatgcaaaaaaatgatctaaacagattctgattgagctgaaattatgcacataactttataagtgatttactaaggtgtccacaaaacttgagctcaaatggatctaaatttcaatagcaga

SEQ ID NO: 5083 - DNA, 1192 bp, Zea mays
  Zm_smallRNAprecursor_572
tcaacacacaatcattgcagttcaggggacagtctagggaaaggacaaatggatctactcttggggcaataacaatttttgttcgagcaaagtctactctttaaactttcagctcatctgctcacctgcctcgttcaagtggatttggaaaccaaaggttctcaagaaaatcaaagtattcatttggcttgtcttaacaaacaaaatcaacacccgaaacctgcttaaaaaggtgtatagtccataacaaatgactacaattgtgtgatatgtgatcttaatagtgaagagaccacctatcatctactgtttgactactcttttagtattgtctgatggccgagactatgtctggattcattgggatcattcatttagaaagaaattcttcatgaagattttggcaatcacggcgtgggaaatatggaaacaacgaaactttgcattattcgggaatgatgacccatctctatcttcttggaggcaacgactgctatgcaagcagtccttctgtgcaagcgtgcaagcaaaccatctgatccattagatcatgatccaaccgtaggtcacatttaacacttaaacccttccaccaccagctcaataatctttataaaaaaaacccctaacaaaccatggttgtatctgtggttggatcgtaatctaatggatcagatggtttgcttgcacgcttgcacagaaggactgcttgcataacagtcattgcccttcttggaaggcttgcttcaatgacacgctgaaattgtatctgattagattgagcccggatcttaatctccttatatctagttggttcttggctttgtaatatggattgtctttccctttttttcccttatcccttttctttcatttttccttcctttcttgtttaccccttttctgtttttgtacaatcgtttacatatcttaaataaaattatactatagaggaccaccctacaattttcccctaaaaatccaaaacgatccaaaaccgtgtcactatctcaagctgttcttagcatcttgaattacagtttttgaatgcaaaaaaatgatctaaacagattctgattgagctgaaattatgcacataactttataagtgatttactaaggtgtccacaaaacttgagctcaaatggatctaaatttcaatagcagatcaggaaactcaaacttgacttgg

SEQ ID NO: 5084 - DNA, 1190 bp, Zea mays
  Zm_smallRNAprecursor_573
caacacacaatcattgcagttcaggggacagtctagggaaaggacaaatggatctactcttggggcaataacaatttttgttcgagcaaagtctactctttaaactttcagctcatctgctcacctgcctcgttcaagtggatttggaaaccaaaggttctcaagaaaatcaaagtattcatttggcttgtcttaacaaacaaaatcaacacccgaaacctgcttaaaaaggtgtatagtccataacaaatgactacaattgtgtgatatgtgatcttaatagtgaagagaccacctatcatctactgtttgactactcttttagtattgtctgatggccgagactatgtctggattcattgggatcattcatttagaaagaaattcttcatgaagattttggcaatcacggcgtgggaaatatggaaacaacgaaactttgcattattcgggaatgatgacccatctctatcttcttggaggcaacgactgctatgcaagcagtccttctgtgcaagcgtgcaagcaaaccatctgatccattagatcatgatccaaccgtaggtcacatttaacacttaaacccttccaccaccagctcaataatctttataaaaaaaacccctaacaaaccatggttgtatctgtggttggatcgtaatctaatggatcagatggtttgcttgcacgcttgcacagaaggactgcttgcataacagtcattgcccttcttggaaggcttgcttcaatgacacgctgaaattgtatctgattagattgagcccggatcttaatctccttatatctagttggttcttggctttgtaatatggattgtctttccctttttttcccttatcccttttctttcatttttccttcctttcttgtttaccccttttctgtttttgtacaatcgtttacatatcttaaataaaattatactatagaggaccaccctacaattttcccctaaaaatccaaaacgatccaaaaccgtgtcactatctcaagctgttcttagcatcttgaattacagtttttgaatgcaaaaaaatgatctaaacagattctgattgagctgaaattatgcacataactttataagtgatttactaaggtgtccacaaaacttgagctcaaatggatctaaatttcaatagcagatcaggaaactcaaacttgacttg

SEQ ID NO: 5085 - DNA, 1191 bp, Zea mays
  Zm_smallRNAprecursor_574
caacacacaatcattgcagttcaggggacagtctagggaaaggacaaatggatctactcttggggcaataacaatttttgttcgagcaaagtctactctttaaactttcagctcatctgctcacctgcctcgttcaagtggatttggaaaccaaaggttctcaagaaaatcaaagtattcatttggcttgtcttaacaaacaaaatcaacacccgaaacctgcttaaaaaggtgtatagtccataacaaatgactacaattgtgtgatatgtgatcttaatagtgaagagaccacctatcatctactgtttgactactcttttagtattgtctgatggccgagactatgtctggattcattgggatcattcatttagaaagaaattcttcatgaagattttggcaatcacggcgtgggaaatatggaaacaacgaaactttgcattattcgggaatgatgacccatctctatcttcttggaggcaacgactgctatgcaagcagtccttctgtgcaagcgtgcaagcaaaccatctgatccattagatcatgatccaaccgtaggtcacatttaacacttaaacccttccaccaccagctcaataatctttataaaaaaaacccctaacaaaccatggttgtatctgtggttggatcgtaatctaatggatcagatggtttgcttgcacgcttgcacagaaggactgcttgcataacagtcattgcccttcttggaaggcttgcttcaatgacacgctgaaattgtatctgattagattgagcccggatcttaatctccttatatctagttggttcttggctttgtaatatggattgtctttccctttttttcccttatcccttttctttcatttttccttcctttcttgtttaccccttttctgtttttgtacaatcgtttacatatcttaaataaaattatactatagaggaccaccctacaattttcccctaaaaatccaaaacgatccaaaaccgtgtcactatctcaagctgttcttagcatcttgaattacagtttttgaatgcaaaaaaatgatctaaacagattctgattgagctgaaattatgcacataactttataagtgatttactaaggtgtccacaaaacttgagctcaaatggatctaaatttcaatagcagatcaggaaactcaaacttgacttgg

SEQ ID NO: 5086 - DNA, 1188 bp, Zea mays
  Zm_smallRNAprecursor_575
aacacacaatcattgcagttcaggggacagtctagggaaaggacaaatggatctactcttggggcaataacaatttttgttcgagcaaagtctactctttaaactttcagctcatctgctcacctgcctcgttcaagtggatttggaaaccaaaggttctcaagaaaatcaaagtattcatttggcttgtcttaacaaacaaaatcaacacccgaaacctgcttaaaaaggtgtatagtccataacaaatgactacaattgtgtgatatgtgatcttaatagtgaagagaccacctatcatctactgtttgactactcttttagtattgtctgatggccgagactatgtctggattcattgggatcattcatttagaaagaaattcttcatgaagattttggcaatcacggcgtgggaaatatggaaacaacgaaactttgcattattcgggaatgatgacccatctctatcttcttggaggcaacgactgctatgcaagcagtccttctgtgcaagcgtgcaagcaaaccatctgatccattagatcatgatccaaccgtaggtcacatttaacacttaaacccttccaccaccagctcaataatctttataaaaaaaacccctaacaaaccatggttgtatctgtggttggatcgtaatctaatggatcagatggtttgcttgcacgcttgcacagaaggactgcttgcataacagtcattgcccttcttggaaggcttgcttcaatgacacgctgaaattgtatctgattagattgagcccggatcttaatctccttatatctagttggttcttggctttgtaatatggattgtctttccctttttttcccttatcccttttctttcatttttccttcctttcttgtttaccccttttctgtttttgtacaatcgtttacatatcttaaataaaattatactatagaggaccaccctacaattttcccctaaaaatccaaaacgatccaaaaccgtgtcactatctcaagctgttcttagcatcttgaattacagtttttgaatgcaaaaaaatgatctaaacagattctgattgagctgaaattatgcacataactttataagtgatttactaaggtgtccacaaaacttgagctcaaatggatctaaatttcaatagcagatcaggaaactcaaacttgactt

SEQ ID NO: 5087 - DNA, 1189 bp, Zea mays
  Zm_smallRNAprecursor_576
aacacacaatcattgcagttcaggggacagtctagggaaaggacaaatggatctactcttggggcaataacaatttttgttcgagcaaagtctactctttaaactttcagctcatctgctcacctgcctcgttcaagtggatttggaaaccaaaggttctcaagaaaatcaaagtattcatttggcttgtcttaacaaacaaaatcaacacccgaaacctgcttaaaaaggtgtatagtccataacaaatgactacaattgtgtgatatgtgatcttaatagtgaagagaccacctatcatctactgtttgactactcttttagtattgtctgatggccgagactatgtctggattcattgggatcattcatttagaaagaaattcttcatgaagattttggcaatcacggcgtgggaaatatggaaacaacgaaactttgcattattcgggaatgatgacccatctctatcttcttggaggcaacgactgctatgcaagcagtccttctgtgcaagcgtgcaagcaaaccatctgatccattagatcatgatccaaccgtaggtcacatttaacacttaaacccttccaccaccagctcaataatctttataaaaaaaacccctaacaaaccatggttgtatctgtggttggatcgtaatctaatggatcagatggtttgcttgcacgcttgcacagaaggactgcttgcataacagtcattgcccttcttggaaggcttgcttcaatgacacgctgaaattgtatctgattagattgagcccggatcttaatctccttatatctagttggttcttggctttgtaatatggattgtctttccctttttttcccttatcccttttctttcatttttccttcctttcttgtttaccccttttctgtttttgtacaatcgtttacatatcttaaataaaattatactatagaggaccaccctacaattttcccctaaaaatccaaaacgatccaaaaccgtgtcactatctcaagctgttcttagcatcttgaattacagtttttgaatgcaaaaaaatgatctaaacagattctgattgagctgaaattatgcacataactttataagtgatttactaaggtgtccacaaaacttgagctcaaatggatctaaatttcaatagcagatcaggaaactcaaacttgacttg

SEQ ID NO: 5088 - DNA, 1160 bp, Zea mays
  Zm_smallRNAprecursor_577
tcctcttggaactcatcttctcggagatactcatcaagatggtgcgacgccgcaatccctcagtggtcgagttcagtagtgactctgacgaaatccaggaagaatctcatatttcttcccctccgcctcgtcgttctctctccaagagaggacgaggttctggccgattggaaggggagggatcctcgatgccctcgcaacctgcgcgcgggggcgtcgaaaggttggcgccactcgtccccgccgaagcacctcctccgcaggatacgctccctgctaggaggaggatggagctttcgacgacgaggttgaacctccgtcgtccgacgctcccctcatcaccggtctccacatgcatctggcgaccgtttcccgggggccaaatgaacctcaggtcgacttctctttgaagggggtggactcccttcaacgcttaaggttcacaaatctcactctcacacccagacatcctggtgtccaggaccctcagttctagaacctttttcaggctgacttttataattatgtcatcatgtctaagaagcacccagtcgttagacaacgtttcattgactaggaggggtgtgagaatatggggatgctaacatgacgtcggctctccgtaacttagagagaaagaggttgaaaatataatgactatggaatacccctgaaacaatgaagtagtggctcagttctatgccactctctaggtaaagaaagttgatgaagaagctgatgggtatgactacctagttatgtacttctttatccaaggggtatggcataaagttagctaccgtcgttttgcccacatctttggcttctctgatgaagatatttagggcagcatccttaaagttcatgacattaggctgcccatgcggtaagaaactgaatttattcatatttctatggagcgggaattttggatcactgccaacatgcataggtactataggtaccttaactctttgtccaggatgacccttctcccgaagggcggaaatcagatgaatgtccttggggagagtcggattctccttcttctccttgctccaaacagtctttcccgcataaacgtgtttgacatgatctgggaagagatccttcatgcttcctggtctccactcaaggggtgtctccatgcacccttttat

SEQ ID NO: 5089 - DNA, 1124 bp, Zea mays
  Zm_smallRNAprecursor_578
cttggaactcatcttctcggagatactcatcaagatggtgcgacgccgcaatccctcagtggtcgagttcagtagtgactctgacgaaatccaggaagaatctcatatttcttcccctccgcctcgtcgttctctctccaagagaggacgaggttctggccgattggaaggggagggatcctcgatgccctcgcaacctgcgcgcgggggcgtcgaaaggttggcgccactcgtccccgccgaagcacctcctccgcaggatacgctccctgctaggaggaggatggagctttcgacgacgaggttgaacctccgtcgtccgacgctcccctcatcaccggtctccacatgcatctggcgaccgtttcccgggggccaaatgaacctcaggtcgacttctctttgaagggggtggactcccttcaacgcttaaggttcacaaatctcactctcacacccagacatcctggtgtccaggaccctcagttctagaacctttttcaggctgacttttataattatgtcatcatgtctaagaagcacccagtcgttagacaacgtttcattgactaggaggggtgtgagaatatggggatgctaacatgacgtcggctctccgtaacttagagagaaagaggttgaaaatataatgactatggaatacccctgaaacaatgaagtagtggctcagttctatgccactctctaggtaaagaaagttgatgaagaagctgatgggtatgactacctagttatgtacttctttatccaaggggtatggcataaagttagctaccgtcgttttgcccacatctttggcttctctgatgaagatatttagggcagcatccttaaagttcatgacattaggctgcccatgcggtaagaaactgaatttattcatatttctatggagcgggaattttggatcactgccaacatgcataggtactataggtaccttaactctttgtccaggatgacccttctcccgaagggcggaaatcagatgaatgtccttggggagagtcggattctccttcttctccttgctccaaacagtctttcccgcataaacgtgtttgacatgatctgggaagagatccttcatgcttcctggtctc

SEQ ID NO: 5090 - DNA, 1105 bp, Zea mays
  Zm_smallRNAprecursor_579
cactcgtccccgccgaagcacctcctccgcaggatacgctccctgctaggaggaggatggagctttcgacgacgaggttgaacctccgtcgtccgacgctcccctcatcaccggtctccacatgcatctggcgaccgtttcccgggggccaaatgaacctcaggtcgacttctctttgaagggggtggactcccttcaacgcttaaggttcacaaatctcactctcacacccagacatcctggtgtccaggaccctcagttctagaacctttttcaggctgacttttataattatgtcatcatgtctaagaagcacccagtcgttagacaacgtttcattgactaggaggggtgtgagaatatggggatgctaacatgacgtcggctctccgtaacttagagagaaagaggttgaaaatataatgactatggaatacccctgaaacaatgaagtagtggctcagttctatgccactctctaggtaaagaaagttgatgaagaagctgatgggtatgactacctagttatgtacttctttatccaaggggtatggcataaagttagctaccgtcgttttgcccacatctttggcttctctgatgaagatatttagggcagcatccttaaagttcatgacattaggctgcccatgcggtaagaaactgaatttattcatatttctatggagcgggaattttggatcactgccaacatgcataggtactataggtaccttaactctttgtccaggatgacccttctcccgaagggcggaaatcagatgaatgtccttggggagagtcggattctccttcttctccttgctccaaacagtctttcccgcataaacgtgtttgacatgatctgggaagagatccttcatgcttcctggtctccactcaaggggtgtctccatgcacccttttattatgaagatgatcgaagtggtcactcagactcgctttgagaagcctgtcaaacacttccgttatgtctccatgcaccccttgctccaaatagtctttgtaccatagcgggagaagaaggaagcactaccataaacccagtatggtacatagcgggagtgtttgacaggcttctcga

SEQ ID NO: 5091 - DNA, 1186 bp, Zea mays
  Zm_smallRNAprecursor_580
aggttttagtttccattaacaacaggggtgttacaagcaccatctcaagtgtctcaaatatactacaccgtagtgggtttgccatataatctagatttcgagctttactgttggagcggggtgttttgttgccctaaattatataaattacaattatttttaatttctcttaaagtcgcgcagcgtatagactactgtcgtccgacggcccacgagcaatgcaagctacgaacccaagggatctcccaaataaagttgtgaaagctctcgttactcaccgcccgatccaacggatcgtgctctcgaaaacaaatcttggtcgtccccttcccctcaaatccaacggcgtcaagctcacgtcccgcagatcggctcctcgcaccatccccgccccgccgctataaaaacactcatctgttgcatttcgattccgaacccaaatcatcattccctttgccttcacatcagagtagacgcgcaccctaggctctcgggagatggaggacagtagcgcggtggtggagaagttggcgtttgggcgaaagctaggcggcgagccaaagaagaaggcggtgtcgcggtctgtcaaggctgagctccagtttctagttgggcgcatcaggcggtaccttaaggaaggtcagtacgcgcagcgcgtcggcaggggcgcgcccgtgttctttgccagcgtccttgagtacctcgccgccgaggtcctgtagctggcgggcgccgcgacgcgcaatagtaagaggggccgcatcgtcccgcgccacctcctcctcgccattcgtaaggacgaggagctcggcaagctgcttgccggggtcaccatcgcgcacggcggtgtgctgctcaacatcaacctcgccctcctccccaacaaggccgccgccgccgcaggcagtaacaagtcccccacgaagtccgccgcgaagtcgccgaagtagtgtcttgtctcacgttcaccccgtcctatacactgtggttgtggatgtcgacttttgccgttttggaagtgtgtagtgatgcgtcgcctgcgattaacctaagttctagttaaatttctagctctagtgctgcttggtaatggggtctgcatgcaatatggtgttcacatgtgatgatacaaaaatgtcaaactcagacatagataaagtgaaattgtttctccttttgtatttcc

SEQ ID NO: 5092 - DNA, 1186 bp, Zea mays; identical to SEQ ID NO: 5091
  Zm_smallRNAprecursor_581

SEQ ID NO: 5093 - DNA, 1187 bp, Zea mays
  Zm_smallRNAprecursor_582
aggttttagtttccattaacaacaggggtgttacaagcaccatctcaagtgtctcaaatatactacaccgtagtgggtttgccatataatctagatttcgagctttactgttggagcggggtgttttgttgccctaaattatataaattacaattatttttaatttctcttaaagtcgcgcagcgtatagactactgtcgtccgacggcccacgagcaatgcaagctacgaacccaagggatctcccaaataaagttgtgaaagctctcgttactcaccgcccgatccaacggatcgtgctctcgaaaacaaatcttggtcgtccccttcccctcaaatccaacggcgtcaagctcacgtcccgcagatcggctcctcgcaccatccccgccccgccgctataaaaacactcatctgttgcatttcgattccgaacccaaatcatcattccctttgccttcacatcagagtagacgcgcaccctaggctctcgggagatggaggacagtagcgcggtggtggagaagttggcgtttgggcgaaagctaggcggcgagccaaagaagaaggcggtgtcgcggtctgtcaaggctgagctccagtttctagttgggcgcatcaggcggtaccttaaggaaggtcagtacgcgcagcgcgtcggcaggggcgcgcccgtgttctttgccagcgtccttgagtacctcgccgccgaggtcctgtagctggcgggcgccgcgacgcgcaatagtaagaggggccgcatcgtcccgcgccacctcctcctcgccattcgtaaggacgaggagctcggcaagctgcttgccggggtcaccatcgcgcacggcggtgtgctgctcaacatcaacctcgccctcctccccaacaaggccgccgccgccgcaggcagtaacaagtcccccacgaagtccgccgcgaagtcgccgaagtagtgtcttgtctcacgttcaccccgtcctatacactgtggttgtggatgtcgacttttgccgttttggaagtgtgtagtgatgcgtcgcctgcgattaacctaagttctagttaaatttctagctctagtgctgcttggtaatggggtctgcatgcaatatggtgttcacatgtgatgatacaaaaatgtcaaactcagacatagataaagtgaaattgtttctccttttgtatttcct

SEQ ID NO: 5094 - DNA, 1187 bp, Zea mays; identical to SEQ ID NO: 5093
  Zm_smallRNAprecursor_583

SEQ ID NO: 5095 - DNA, 1117 bp, Zea mays
  Zm_smallRNAprecursor_584
ctataaaaacactcatctgttgcatttcgattccgaacccaaatcatcattccctttgccttcacatcagagtagacgcgcaccctaggctctcgggagatggaggacagtagcgcggtggtggagaagttggcgtttgggcgaaagctaggcggcgagccaaagaagaaggcggtgtcgcggtctgtcaaggctgagctccagtttctagttgggcgcatcaggcggtaccttaaggaaggtcagtacgcgcagcgcgtcggcaggggcgcgcccgtgttctttgccagcgtccttgagtacctcgccgccgaggtcctgtagctggcgggcgccgcgacgcgcaatagtaagaggggccgcatcgtcccgcgccacctcctcctcgccattcgtaaggacgaggagctcggcaagctgcttgccggggtcaccatcgcgcacggcggtgtgctgctcaacatcaacctcgccctcctccccaacaaggccgccgccgccgcaggcagtaacaagtcccccacgaagtccgccgcgaagtcgccgaagtagtgtcttgtctcacgttcaccccgtcctatacactgtggttgtggatgtcgacttttgccgttttggaagtgtgtagtgatgcgtcgcctgcgattaacctaagttctagttaaatttctagctctagtgctgcttggtaatggggtctgcatgcaatatggtgttcacatgtgatgatacaaaaatgtcaaactcagacatagataaagtgaaattgtttctccttttgtatttccttacaaattgggtattacagaaacttaggttaaaattattcactttgagttattccgaaccaagcacctaataataacttagattatacagaacaatcaagtcgcatggctaacgcctagtcagcgtttgaacttcggacagtgagttattccgaagtccgtggccttctcgatgaggttggtgagcgagtgctcgtactcgaattcagtgaggtcgcacaacatcttcccagcatcccctcccgctgtcgccccgtgttctgttctatagctagaaatacggtggcgatgtgccttgtacaagatgcaaaggcgtcaacgtttttgtt

SEQ ID NO: 5096 - DNA, 1114 bp, Zea mays
  Zm_smallRNAprecursor_585
gacaacacaccatcgtgcgtgatggtgacctcgacaagcagattgccgagctcctcgtccttgcggatggccaggaggaggtagcgcgggacgatgcggcccctcttgctgtcacgcgccgcggcacccgccagctccatgacctcggcggcgaggtactcgaggacgctggcaaggaacacgggcgcgcccctaccgacgcgttgcccgtactgaccttccttcaggtaccacctgatgcgcccaactggaactggagcccggccttgacagttcgcgacaccgcattcttctttggcccgccgcccagcttccgcccaaacgcaaacttctccaccaccgcgctgccgtcctccatcccccgagagcctagggtgcacgtctgctctaatgtggaggcaaagggaattgtgatttggattcgaaatcggaatgcagcggaggaatgtttttatagcggcgggacggggatggtgtgggggaccgatccgcgggacgtgagcttgacgccgttggatttgaggggaaggggacgaccaggatttgttttcgagagcacgatccgttggatcgggcagtgaggaacgagagcttttatagctgtatttgggagatcccttgggtcggtagcttgcatggcccgtgggccgtcggacgacagtggtctatacgctgcgcgactttaggacaatttaaaaatgattgtattttatataatttatggcaacaacaaaacattccgctccaacagtaaagctcccaatctagattatagggcagcccactacggtgtagtatatttgagacacttgagatgatgcttgtaacacccgtggtgttaatagaaactaaaacccgacatggcatcatatgcattgacatctttgtgttgtaatacacttaaaatgtattcactaagaccaaaaaaaactttaagtgagatatggtgatggatagagagtcgaaaatctagtatgaaaaactctagttttggtccaaatatcaaagttatagggttttccaaaccaagcaactttcatgtgcacagatttccaagtttaaaggaaaaaatggagaaaaattcaaaactaagtcttgacctagggtttgaaat

SEQ ID NO: 5097 - DNA, 1117 bp, Zea mays
  Zm_smallRNAprecursor_586
cagcttgattcgttctctgttgcatttcgattccgaacccaaatcatcattccccctgccttcacatcagagtagacgcgcaccctaggctctcgggagatggaggacagtagcgcggtggtggagaagttggcgtttgggcgaaagctaggcggcgagccaaagaagaaggcggtgtcgcggtctgtcaaggctgagctccagtttctagttgggcgcatcaggcggtaccttaaggaaggtcagtacgcgcagcgcgtcggcaggggcgcgcccgtgttctttgccagcgtccttgagtacctcgccgccgaggtcctgtagctggcgggcgccgcgacgcgcaatagtaagaggggccgcatcgtcccgcgccacctcctcctcgccattcgtaaggacgaggagctcggcaagctgcttgccggggtcaccatcgcgcacggcggtgtgctgctcaacatcaacctcgccctcctccccaacaaggccgccgccgccgcaggcagtaacaagtcccccacgaagtccgccgcgaagtcgccgaagtagtgtcttgtctcacgttcaccccgtcctatacactgtggttgtggatgtcgacttttgccgttttggaagtgtgtagtgatgcgtcgcctgcgattaacctaagttctagttaaatttctagctctagtgctgcttggtaatggggtctgcatgcaatatggtgttcacatgtgatgatacaaaaatgtcaaactcagacatagataaagtgaaattgtttctccttttgtatttccttacaaattgggtattacagaaacttaggttaaaattattcactttgagttattccgaaccaagcacctaataataacttagattatacagaacaatcaagtcgcatggctaacgcctagtcagcgtttgaacttcggacagtgagttattccgaagtccgtggccttctcgatgaggttggtgagcgagtgctcgtactcgaattcagtgaggtcgcacaacatcttcccagcatcccctcccgctgtcgccccgtgttctgttctatagctagaaatacggtggcgatgtgccttgtacaagatgcaaaggcgtcaacgtttttgtt

SEQ ID NO: 5098 - DNA, 1114 bp, Zea mays
  Zm_smallRNAprecursor_587
gacaacacaccatcgtgcgtgatggtgacctcgacaagcagattgccgagctcctcgtccttgcggatggccaggaggaggtagcgcgggacgatgcggcccctcttgctgtcacgcgccgcggcacccgccagctccatgacctcggcggcgaggtactcgaggacgctggcaaggaacacgggcgcgcccctaccgacgcgttgcccgtactgaccttccttcaggtaccacctgatgcgcccaactggaactggagcccggccttgacagttcgcgacaccgcattcttctttggcccgccgcccagcttccgcccaaacgcaaacttctccaccaccgcgctgtcgtcctctatcccccgagagcctagggtgcacgtctgctctaatgtggaggcaaagggaatggtgatttggattcgaaatcggaatgcagcggaggaatgtttttatagcggcgggacggggatggtgtgggggaccgatccgcgggacgtgagcttgacgccgttggatttgaggggaaggggacgaccaggatttgttttcgagagcacgatccgttagattgggcagtgaggaacgagcgcttttatagctgtatttgggagatcccttgggtcggtagcttgcatggcccgtgggccgtcggacgacagtggtctatacgatgcgcgactttaggacaatttaaaaatgattgtattttatataatttatggcaacaacaaaacattccgctccaacagtaaagctccaaatttagattatagggcagcccactacggtgtagtatatttgaaacacttgagatggtgcttgtaacacccgtggtgttaatagaaactaaaacccgacatgacatcatatgcattgacatctttgtgttgtaatacacttaaaatgtattcactaagaccaaaaaaaactttaagtgggatatggtgatggatagagagtcgaaaatctagtatgaaaaactctagttttggtccaaatatcaaagttatagggttttccaaaccaagcaactttcatgtgcacagattttcaagtttaaaggaaaaactaagtcttgacctagggtttgaaattctgaaatttttatcagc

SEQ ID NO: 5099 - DNA, 1041 bp, Zea mays
  Zm_smallRNAprecursor_588
ttcctccgtgcatactaaaagtcttgtttattctgagtcaggcagtcaggcccatgaggagccggagctgaggcaactcatgcttgcacgatgatttaccggtcttattgtcgccatgcatgattcatgccatgccacacacacatagcatgcacactcctgcacggacacgtcattcgagctaggcgatgcatctggatctagactggagagggaacccgtccaaaccccacccatctatcgcttacagttcgccgtcgtcgtagctatccttatcaccagcacgcataaaaaaaatctaggcgagaaataaatttaaacagacacaccaacgacataaacaaaaaaaaacaaaaaaaatgcaaaatatggggcttgaacccacgaccatatggttagaagccttgtgctctaccaagtgggctagatgggctttgtgctcatgtctgcaacaaatattttaataacacaaccgagctcggcgccaagatctgtggcgccgagctcggttccacgtcgacgccacgcgtctgggttgtgccaacgcaacacgacctcggcgccatagcctatggcgccgagctgtgttagctcggcgccataggctatggcgccgagcaaagggtccaaaactgcatttaaaatttttttaggtctaaacgtgattttatttctgtttaagggctaaaatacaaaaaattcggagcctgctacagcctgtacactggagcagcagaggcgagagtggaggcgagagctgacgtggcaggggcgagagagaggctgtgcactggactcagccttatcgcctgagaggccagaagtgcagaaccccgggagctcgctctcgctccctccacctccctccccccttgaccctcccagccgcaaaaccgcaggccgcatcccgcccgccgcccgccgcccacctgtggcaaccgccgcctacataaacgaccaatcgaccactcgccgaaccaagccacccacccaaaacccaatggcgtccaacctcctatccgcggtggcaatcgagaagga

SEQ ID NO: 5100 - DNA, 1040 bp, Zea mays
  Zm_smallRNAprecursor_589
tcctccgtgcatactaaaagtcttgtttattctgagtcaggcagtcaggcccatgaggagccggagctgaggcaactcatgcttgcacgatgatttaccggtcttattgtcgccatgcatgattcatgccatgccacacacacatagcatgcacactcctgcacggacacgtcattcgagctaggcgatgcatctggatctagactggagagggaacccgtccaaaccccacccatctatcgcttacagttcgccgtcgtcgtagctatccttatcaccagcacgcataaaaaaaatctaggcgagaaataaatttaaacagacacaccaacgacataaacaaaaaaaaacaaaaaaaatgcaaaatatggggcttgaacccacgaccatatggttagaagccttgtgctctaccaagtgggctagatgggctttgtgctcatgtctgcaacaaatattttaataacacaaccgagctcggcgccaagatctgtggcgccgagctcggttccacgtcgacgccacgcgtctgggttgtgccaacgcaacacgacctcggcgccatagcctatggcgccgagctgtgttagctcggcgccataggctatggcgccgagcaaagggtccaaaactgcatttaaaatttttttaggtctaaacgtgattttatttctgtttaagggctaaaatacaaaaaattcggagcctgctacagcctgtacactggagcagcagaggcgagagtggaggcgagagctgacgtggcaggggcgagagagaggctgtgcactggactcagccttatcgcctgagaggccagaagtgcagaaccccgggagctcgctctcgctccctccacctccctccccccttgaccctcccagccgcaaaaccgcaggccgcatcccgcccgccgcccgccgcccacctgtggcaaccgccgcctacataaacgaccaatcgaccactcgccgaaccaagccacccacccaaaacccaatggcgtccaacctcctatccgcggtggcaatcgagaagga

SEQ ID NO: 5101 - DNA, 1184 bp, Zea mays
  Zm_smallRNAprecursor_590
gaaataaaaaaattatacagattttataccaaatatgaattgaccactaagaaatagagtgcactatatattcctatactttttcaggatctaagggtctgtaaaaagcagtgcaatgaatgtttatacccttgcaacttggttattagtgttgatccaaagtggatactaataagtaaacttactagctaagcaaagcacacaaggatacctaacaaccaatgttcaattaagcgcagataatcgcccgcctaatcgcgattaggcaatgtctggagatgtatctatagtgtgctgtgcatgattctcctagtatgtggaagtgttggttgcctttggcagaattctggtataacatgacttaccacattctttgggtggtttgtggatacgatcctcctgtggctactgctccacagttaccagttccagagtctgacgaaagggacagccggccggcatatctgccaggcgacagccatacactttctaacaattatattaaggagaataaaaaggtccaaaatagacttggacaatgaccaccaaataaaggtggttacaaagtatgctaaggggctgttacacagatgactatataaaagacgaccagacctgaactctccctgagttaagggcacaaccacaaacctttcagccctgcagcccctgctagacaccacatcttggcatcgtccctaatgtcttgagtaatcttagagatgtccggagtagccccatcaaagacacaagagtttctgtgtttctacaaccaccaggccactaggattacagctgaattgaatcctttcttttgtgccttttgaactatctttcctgacttatgccaccagtcttgaaaactatattccgcagttcctggagtgaggtgctacaacccaataagagacagggtatgaaaccaaacttccctagcaaaaacacattgtaacaaaatgtgttgcatggtttcatcttcctgatcacaaagaaggcattttgtgggatggtccaaacctcgacgagccaatcgatccgctgtccagcagcgatttaaaaaagccagccaaatgaaaaatttacatctcggagatgcccaacttttccagacccttgctgccggttcaaaggtgagcatctcctcaaagaaacgatgataaacagatttagaggagtattcccct

SEQ ID NO: 5102 - DNA, 1090 bp, Zea mays
  Zm_smallRNAprecursor_591
atataaagatgtggagctctcttgcgtgttcgagaaaaaaagtattgtcaggagccatggttctaacccttgactttggagggttcgtccaacacaactgtggctagtatatgaagcgacacaattgtactaatatccaaaggtgagcatgtgtgaagctaatggaatgtgatattatcaaagataggggatattaccttgtgtccatcaagtgcactctgcactagttctgaaatttcattgaatattgtttcctgtgaagctgtatggtcaaagactctatcacatgtgaaagaatattctgactctacataagaaaaagattaaaaatcaatccaacactttatttattatttaaatctcttattacaagcttaatcataaattataataaaaatatatgattaacctgaatgtgccaaacaaacacatcggccaatgcatccccttgtttcaggaaatgtgattctggcctatttgtgttctgtttgtagtaatggtcgcacacggcaaaagacacatatgcttttcgttagttcctgcatataaaataaaatcacaatttaaaattaaaaatggtaattacttttgtcagatctttgccggagaaacaagccagtgagttcttagcccaagtacgcacactcgaacacagatccaccaatctaccaaactaactactgcctagataaggtaagtctaagggtgtgtttgattcagctttctgaaccagattcgcttccaaaattctataatctcaaccaaacgtacaacaacagaatagattcctaaaaatctacatattcctttagttcaattcagaatcaccttctaaccaagattttctagattcttgttatctatgctaccaatctatcatgctcttacacaatctacaattgacagttgttttaaccaaacatattttaattttttcaaaatcgtcagctggcaacagcttttcacagctcaccgctacaatcagattttcagaaatctacacctaccctaaatctagcaccaatcaagcattatttcctaacaatctcctcttaagccttgtggtgtaaactgttagagtacccgttag

SEQ ID NO: 5103 - DNA, 1045 bp, Zea mays
  Zm_smallRNAprecursor_592
tgcatgcatgcaccggagctagctgagtgtacatagtgaagtgtttgagggaagtctgggtgacaagtagcaattgtgctggctagctaggtcccttagtgcagcatgcgctttttcccccccttaagtgcagcatgaactttggagatcttactagatcgaggaccagcatatgatacaggatagtgggggaaacaattaggtttggtgtccccaggagttctctacaagcacttcatgcggcactatatttatttttcagaccttttgtgaagtgtttgtgtgtgttgggggggggggggactcttgatgccaccaaccatatttggaaataatgtttagtgaccgcgggagttctctgcaaaaacttcacaagctgacacttttttagagcttttgtgaagtgtttaggagaattctcggtgccactaatcatttggagcatgttggtcaagtgtgtgtgccatgtcttgaaagaattaggtttggtgtccctaggagttctctacaagcacttcacgaggcttcgtactgagagcttttgtgaagtgtttgggggaactcttggtgtcacaaatcatttggcggatcttggtcaagtgtgtgacagaagaaattatttaaggacgtggatccatataccttgaaagaattaggtttggtgtcttcaggagttctcttcaagcacttcacgaggcatcacactgagagcttttgtgaagtgtttgggggaactcttggtgtcacaaatcatttgcatttgcttgatgttagtcatgcaccatgtgatatgagataaaggacatggcaacgttttgtgttactaggagttccctacaagcacttcatgagaccttgacttaataaagggccattgtgaagtgtttgggtgaactcttagcatcatgaagcatttagttataataatataagttatccatgtgaataccatatgggatacacctttgaacaatgtttggtgttaccatgagttcccttcaagcacttcacatgaggcaccattcaaatgacaactccatttaag

SEQ ID NO: 5104 - DNA, 1218 bp, Zea mays
  Zm_smallRNAprecursor_593
tgcatgcatgcaccggagctagctgagtgtacatagtgaagtgtttgagggaagtctgggtgacaagtagcaattgtgctggctagctaggtcccttagtgcagcatgcgctttttcccccccttaagtgcagcatgaactttggagatcttactagatcgaggaccagcatatgatacaggatagtgggggaaacaattaggtttggtgtccccaggagttctctacaagcacttcatgcggcactatatttatttttcagaccttttgtgaagtgtttgtgtgtgttgggggggggggggactcttgatgccaccaaccatatttggaaataatgtttagtgaccgcgggagttctctgcaaaaacttcacaagctgacacttttttagagcttttgtgaagtgtttaggagaattctcggtgccactaatcatttggagcatgttggtcaagtgtgtgtgccatgtcttgaaagaattaggtttggtgtccctaggagttctctacaagcacttcacgaggcttcgtactgagagcttttgtgaagtgtttgggggaactcttggtgtcacaaatcatttggcggatcttggtcaagtgtgtgacagaagaaattatttaaggacgtggatccatataccttgaaagaattaggtttggtgtcttcaggagttctcttcaagcacttcacgaggcatcacactgagagcttttgtgaagtgtttgggggaactcttggtgtcacaaatcatttgcatttgcttgatgttagtcatgcaccatgtgatatgagataaaggacatggcaacgttttgtgttactaggagttccctacaagcacttcatgagaccttgacttaataaagggccattgtgaagtgtttgggtgaactcttagcatcatgaagcatttagttataataatataagttatccatgtgaataccatatgggatacacctttgaacaatgtttggtgttaccatgagttcccttcaagcacttcacatgaggcaccattcaaatgacaactccatttaagattatgtgtaatgtgaagtgtttgggggaactcttggtggtactcaacatccatttgtgtcttcaagttggtgatactcaacactgatgtaagtttccaagaacccaacacttgaatcatggtttcaacttccaaattccatatatgcatgtgcttcatgagccctagatatg

SEQ ID NO: 5105 - DNA, 1130 bp, Zea mays
  Zm_smallRNAprecursor_594
ttgagggaagtctgggtgacaagtagcaattgtgctggctagctaggtcccttagtgcagcatgcgctttttcccccccttaagtgcagcatgaactttggagatcttactagatcgaggaccagcatatgatacaggatagtgggggaaacaattaggtttggtgtccccaggagttctctacaagcacttcatgcggcactatatttatttttcagaccttttgtgaagtgtttgtgtgtgttgggggggggggggactcttgatgccaccaaccatatttggaaataatgtttagtgaccgcgggagttctctgcaaaaacttcacaagctgacacttttttagagcttttgtgaagtgtttaggagaattctcggtgccactaatcatttggagcatgttggtcaagtgtgtgtgccatgtcttgaaagaattaggtttggtgtccctaggagttctctacaagcacttcacgaggcttcgtactgagagcttttgtgaagtgtttgggggaactcttggtgtcacaaatcatttggcggatcttggtcaagtgtgtgacagaagaaattatttaaggacgtggatccatataccttgaaagaattaggtttggtgtcttcaggagttctcttcaagcacttcacgaggcatcacactgagagcttttgtgaagtgtttgggggaactcttggtgtcacaaatcatttgcatttgcttgatgttagtcatgcaccatgtgatatgagataaaggacatggcaacgttttgtgttactaggagttccctacaagcacttcatgagaccttgacttaataaagggccattgtgaagtgtttgggtgaactcttagcatcatgaagcatttagttataataatataagttatccatgtgaataccatatgggatacacctttgaacaatgtttggtgttaccatgagttcccttcaagcacttcacatgaggcaccattcaaatgacaactccatttaagattatgtgtaatgtgaagtgtttgggggaactcttggtggtactcaacatccatttgtgtcttcaagttggtgatactcaacactgatgtaagtttccaagaacccaacacttgaatcatggtttcaac

SEQ ID NO: 5106 - DNA, 1045 bp, Zea mays
  Zm_smallRNAprecursor_595
tgatacaggatagtgggggaaacaattaggtttggtgtccccaggagttctctacaagcacttcatgcggcactatatttatttttcagaccttttgtgaagtgtttgtgtgtgttgggggggggggggactcttgatgccaccaaccatatttggaaataatgtttagtgaccgcgggagttctctgcaaaaacttcacaagctgacacttttttagagcttttgtgaagtgtttaggagaattctcggtgccactaatcatttggagcatgttggtcaagtgtgtgtgccatgtcttgaaagaattaggtttggtgtccctaggagttctctacaagcacttcacgaggcttcgtactgagagcttttgtgaagtgtttgggggaactcttggtgtcacaaatcatttggcggatcttggtcaagtgtgtgacagaagaaattatttaaggacgtggatccatataccttgaaagaattaggtttggtgtcttcaggagttctcttcaagcacttcacgaggcatcacactgagagcttttgtgaagtgtttgggggaactcttggtgtcacaaatcatttgcatttgcttgatgttagtcatgcaccatgtgatatgagataaaggacatggcaacgttttgtgttactaggagttccctacaagcacttcatgagaccttgacttaataaagggccattgtgaagtgtttgggtgaactcttagcatcatgaagcatttagttataataatataagttatccatgtgaataccatatgggatacacctttgaacaatgtttggtgttaccatgagttcccttcaagcacttcacatgaggcaccattcaaatgacaactccatttaagattatgtgtaatgtgaagtgtttgggggaactcttggtggtactcaacatccatttgtgtcttcaagttggtgatactcaacactgatgtaagtttccaagaacccaacacttgaatcatggtttcaacttccaaattccatatatgcatgtgcttcatgagccctagatatg

SEQ ID NO: 5107 - DNA, 1068 bp, Zea mays
  Zm_smallRNAprecursor_596
tccctaggagttctctacaagcacttcacgaggcttcgtactgagagcttttgtgaagtgtttgggggaactcttggtgtcacaaatcatttggcggatcttggtcaagtgtgtgacagaagaaattatttaaggacgtggatccatataccttgaaagaattaggtttggtgtcttcaggagttctcttcaagcacttcacgaggcatcacactgagagcttttgtgaagtgtttgggggaactcttggtgtcacaaatcatttgcatttgcttgatgttagtcatgcaccatgtgatatgagataaaggacatggcaacgttttgtgttactaggagttccctacaagcacttcatgagaccttgacttaataaagggccattgtgaagtgtttgggtgaactcttagcatcatgaagcatttagttataataatataagttatccatgtgaataccatatgggatacacctttgaacaatgtttggtgttaccatgagttcccttcaagcacttcacatgaggcaccattcaaatgacaactccatttaagattatgtgtaatgtgaagtgtttgggggaactcttggtggtactcaacatccatttgtgtcttcaagttggtgatactcaacactgatgtaagtttccaagaacccaacacttgaatcatggtttcaacttccaaattccatatatgcatgtgcttcatgagccctagatatgtttattcatttgttttctatttttgacactaatatatgacaatagctagataggttcgtctctaaggttttttttggtctatgtgcaaaatacaaaagtatgccatatcacctatactacataaaaataaaattatcctaaattttattccactgtgtttatctaaatatttaaaacaaaattaggcattaaaattaaaatgtaaagggtgtatcatatttactgatatatttttaacttctagtaaagaggatcttgtgcctgatgttctttgaaatgagatcttcaattacatcttcatatttaatcttctctcgaacaacatgttcaaatacaattgt

SEQ ID NO: 5108 - DNA, 1134 bp, Zea mays
  Zm_smallRNAprecursor_597
gggacctaatgttcacttcaattgccaatttgcaggagaagaaatgcagcaagtgtgctcttgaagagcaggctggatccttctctcaatggttggatgaaaggaagaggtaagccatagcttttctccttagcaatggatgatatttgtagtttcccaactcgattagctaacatgcatccatatctttcattgctctttttgttgaaggcgtgatatggaagagcttgcaaggttcagaaggaagagctacgtgcacaatgtgctagttcttgctggtagtgttggctttgtggcattcacgttgtcatgcgttgctgatgttatagcagatgaaatgaactagggagaaggggaggggagcacggcggcagcaaatgctccatggttggttcttttggcacctatcaattacacaatataaaccaccttccaatcaattacaagagacacagtaacaaagatgaggtgatataacacatgtgactctaacttgcttttattttgtgaagctaacttgtgaatttgatgcatgtcaaactaaccacaggaaagtgaaacaaaggaaaattgtttcaaaatgtgaaacaaacttgtaagtaacacaggagaaaatgacacacaaaatgccccaagtagcatgtcaaacataaagggcaaaaattataacctagcacaccagccacaaaacttcaaaaatgctactgcaccacagctctagcaaaagtgccttaccatacacatctactgcacctaaccatgaagaaacgaaaaatcatcatcattctgagttctggccctgcagaagaaaacaggcagaattctacaaggactgaaactccaggccagagaacatcagcaggcaacaaatttcaactccagaattttcttacaagcagaagagtattcaccatatcacatagtggcagaagaattaaagttcaaagttccacctgacttgcacagaactaccgacgattaaattcagctgctcatttctctcagttttcttgaacaaagcatctcaatcactaagacaaaagaactcgagcaatgttgtcacgagcaccaaatcagaatgcctttcatccagacaggctctgcttgtttcacttccacgcctccttccaccac

SEQ ID NO: 5109 - DNA, 1109 bp, Zea mays
  Zm_smallRNAprecursor_598
ggacctaatgttcacttcaattgccaatttgcaggagaagaaatgcagcaagtgtgctcttgaagagcaggctggatccttctctcaatggttggatgaaaggaagaggtaagccatagcttttctccttagcaatggatgatatttgtagtttcccaactcgattagctaacatgcatccatatctttcattgctctttttgttgaaggcgtgatatggaagagcttgcaaggttcagaaggaagagctacgtgcacaatgtgctagttcttgctggtagtgttggctttgtggcattcacgttgtcatgcgttgctgatgttatagcagatgaaatgaactagggagaaggggaggggagcacggcggcagcaaatgctccatggttggttcttttggcacctatcaattacacaatataaaccaccttccaatcaattacaagagacacagtaacaaagatgaggtgatataacacatgtgactctaacttgcttttattttgtgaagctaacttgtgaatttgatgcatgtcaaactaaccacaggaaagtgaaacaaaggaaaattgtttcaaaatgtgaaacaaacttgtaagtaacacaggagaaaatgacacacaaaatgccccaagtagcatgtcaaacataaagggcaaaaattataacctagcacaccagccacaaaacttcaaaaatgctactgcaccacagctctagcaaaagtgccttaccatacacatctactgcacctaaccatgaagaaacgaaaaatcatcatcattctgagttctggccctgcagaagaaaacaggcagaattctacaaggactgaaactccaggccagagaacatcagcaggcaacaaatttcaactccagaattttcttacaagcagaagagtattcaccatatcacatagtggcagaagaattaaagttcaaagttccacctgacttgcacagaactaccgacgattaaattcagctgctcatttctctcagttttcttgaacaaagcatctcaatcactaagacaaaagaactcgagcaatgttgtcacgagcaccaaatcagaatgcctttcatccagacaggctctgcttgttt

SEQ ID NO: 5110 - DNA, 1133 bp, Zea mays
  Zm_smallRNAprecursor_599
ggacctaatgttcacttcaattgccaatttgcaggagaagaaatgcagcaagtgtgctcttgaagagcaggctggatccttctctcaatggttggatgaaaggaagaggtaagccatagcttttctccttagcaatggatgatatttgtagtttcccaactcgattagctaacatgcatccatatctttcattgctctttttgttgaaggcgtgatatggaagagcttgcaaggttcagaaggaagagctacgtgcacaatgtgctagttcttgctggtagtgttggctttgtggcattcacgttgtcatgcgttgctgatgttatagcagatgaaatgaactagggagaaggggaggggagcacggcggcagcaaatgctccatggttggttcttttggcacctatcaattacacaatataaaccaccttccaatcaattacaagagacacagtaacaaagatgaggtgatataacacatgtgactctaacttgcttttattttgtgaagctaacttgtgaatttgatgcatgtcaaactaaccacaggaaagtgaaacaaaggaaaattgtttcaaaatgtgaaacaaacttgtaagtaacacaggagaaaatgacacacaaaatgccccaagtagcatgtcaaacataaagggcaaaaattataacctagcacaccagccacaaaacttcaaaaatgctactgcaccacagctctagcaaaagtgccttaccatacacatctactgcacctaaccatgaagaaacgaaaaatcatcatcattctgagttctggccctgcagaagaaaacaggcagaattctacaaggactgaaactccaggccagagaacatcagcaggcaacaaatttcaactccagaattttcttacaagcagaagagtattcaccatatcacatagtggcagaagaattaaagttcaaagttccacctgacttgcacagaactaccgacgattaaattcagctgctcatttctctcagttttcttgaacaaagcatctcaatcactaagacaaaagaactcgagcaatgttgtcacgagcaccaaatcagaatgcctttcatccagacaggctctgcttgtttcacttccacgcctccttccaccac

SEQ ID NO: 5111 - DNA, 1131 bp, Zea mays
  Zm_smallRNAprecursor_600
gattagctaacatgcatccatatctttcattgctctttttgttgaaggcgtgatatggaagagcttgcaaggttcagaaggaagagctacgtgcacaatgtgctagttcttgctggtagtgttggctttgtggcattcacgttgtcatgcgttgctgatgttatagcagatgaaatgaactagggagaaggggaggggagcacggcggcagcaaatgctccatggttggttcttttggcacctatcaattacacaatataaaccaccttccaatcaattacaagagacacagtaacaaagatgaggtgatataacacatgtgactctaacttgcttttattttgtgaagctaacttgtgaatttgatgcatgtcaaactaaccacaggaaagtgaaacaaaggaaaattgtttcaaaatgtgaaacaaacttgtaagtaacacaggagaaaatgacacacaaaatgccccaagtagcatgtcaaacataaagggcaaaaattataacctagcacaccagccacaaaacttcaaaaatgctactgcaccacagctctagcaaaagtgccttaccatacacatctactgcacctaaccatgaagaaacgaaaaatcatcatcattctgagttctggccctgcagaagaaaacaggcagaattctacaaggactgaaactccaggccagagaacatcagcaggcaacaaatttcaactccagaattttcttacaagcagaagagtattcaccatatcacatagtggcagaagaattaaagttcaaagttccacctgacttgcacagaactaccgacgattaaattcagctgctcatttctctcagttttcttgaacaaagcatctcaatcactaagacaaaagaactcgagcaatgttgtcacgagcaccaaatcagaatgcctttcatccagacaggctctgcttgtttcacttccacgcctccttccaccaccttggcaactccgaggcttgcactgacgctcttgccaatggagcgcaccttcctccaccctgtgttttcatcacaaacatcaccggcgaggcaatcaagtgaccaatataaccaaccccaatgctataaatactgtgcatgatctccttcgtcttctggt

SEQ ID NO: 5112 - DNA, 1172 bp, Zea mays
  Zm_smallRNAprecursor_601
catgcgttgctgatgttatagcagatgaaatgaactagggagaaggggaggggagcacggcggcagcaaatgctccatggttggttcttttggcacctatcaattacacaatataaaccaccttccaatcaattacaagagacacagtaacaaagatgaggtgatataacacatgtgactctaacttgcttttattttgtgaagctaacttgtgaatttgatgcatgtcaaactaaccacaggaaagtgaaacaaaggaaaattgtttcaaaatgtgaaacaaacttgtaagtaacacaggagaaaatgacacacaaaatgccccaagtagcatgtcaaacataaagggcaaaaattataacctagcacaccagccacaaaacttcaaaaatgctactgcaccacagctctagcaaaagtgccttaccatacacatctactgcacctaaccatgaagaaacgaaaaatcatcatcattctgagttctggccctgcagaagaaaacaggcagaattctacaaggactgaaactccaggccagagaacatcagcaggcaacaaatttcaactccagaattttcttacaagcagaagagtattcaccatatcacatagtggcagaagaattaaagttcaaagttccacctgacttgcacagaactaccgacgattaaattcagctgctcatttctctcagttttcttgaacaaagcatctcaatcactaagacaaaagaactcgagcaatgttgtcacgagcaccaaatcagaatgcctttcatccagacaggctctgcttgtttcacttccacgcctccttccaccaccttggcaactccgaggcttgcactgacgctcttgccaatggagcgcaccttcctccaccctgtgttttcatcacaaacatcaccggcgaggcaatcaagtgaccaatataaccaaccccaatgctataaatactgtgcatgatctccttcgtcttctggtcacccgatatcgcgtgaaccttatcgcgagctttctctacggcgaactcgatgccgtacagaaagcccacgtacggcccctatagcgatgagctccaggaaaacgatagccacgattactatggtttggtctcgacgatggattctggtgttatccatctggatggcactgcaacggcaaaacgaa

SEQ ID NO: 5113 - DNA, 1066 bp, Zea mays
  Zm_smallRNAprecursor_602
agcaaatgctccatggttggttcttttggcacctatcaattacacaatataaaccaccttccaatcaattacaagagacacagtaacaaagatgaggtgatataacacatgtgactctaacttgcttttattttgtgaagctaacttgtgaatttgatgcatgtcaaactaaccacaggaaagtgaaacaaaggaaaattgtttcaaaatgtgaaacaaacttgtaagtaacacaggagaaaatgacacacaaaatgccccaagtagcatgtcaaacataaagggcaaaaattataacctagcacaccagccacaaaacttcaaaaatgctactgcaccacagctctagcaaaagtgccttaccatacacatctactgcacctaaccatgaagaaacgaaaaatcatcatcattctgagttctggccctgcagaagaaaacaggcagaattctacaaggactgaaactccaggccagagaacatcagcaggcaacaaatttcaactccagaattttcttacaagcagaagagtattcaccatatcacatagtggcagaagaattaaagttcaaagttccacctgacttgcacagaactaccgacgattaaattcagctgctcatttctctcagttttcttgaacaaagcatctcaatcactaagacaaaagaactcgagcaatgttgtcacgagcaccaaatcagaatgcctttcatccagacaggctctgcttgtttcacttccacgcctccttccaccaccttggcaactccgaggcttgcactgacgctcttgccaatggagcgcaccttcctccaccctgtgttttcatcacaaacatcaccggcgaggcaatcaagtgaccaatataaccaaccccaatgctataaatactgtgcatgatctccttcgtcttctggtcacccgatatcgcgtgaaccttatcgcgagctttctctacggcgaactcgatgccgtacagaaagcccacgtacggcccctatagcgatgagctccaggaaaacgatagccacgattactatggtttggtctcgacgatggatt

SEQ ID NO: 5114 - DNA, 1134 bp, Zea mays
  Zm_smallRNAprecursor_603
atgctccatggttggttcttttggcacctatcaattacacaatataaaccaccttccaatcaattacaagagacacagtaacaaagatgaggtgatataacacatgtgactctaacttgcttttattttgtgaagctaacttgtgaatttgatgcatgtcaaactaaccacaggaaagtgaaacaaaggaaaattgtttcaaaatgtgaaacaaacttgtaagtaacacaggagaaaatgacacacaaaatgccccaagtagcatgtcaaacataaagggcaaaaattataacctagcacaccagccacaaaacttcaaaaatgctactgcaccacagctctagcaaaagtgccttaccatacacatctactgcacctaaccatgaagaaacgaaaaatcatcatcattctgagttctggccctgcagaagaaaacaggcagaattctacaaggactgaaactccaggccagagaacatcagcaggcaacaaatttcaactccagaattttcttacaagcagaagagtattcaccatatcacatagtggcagaagaattaaagttcaaagttccacctgacttgcacagaactaccgacgattaaattcagctgctcatttctctcagttttcttgaacaaagcatctcaatcactaagacaaaagaactcgagcaatgttgtcacgagcaccaaatcagaatgcctttcatccagacaggctctgcttgtttcacttccacgcctccttccaccaccttggcaactccgaggcttgcactgacgctcttgccaatggagcgcaccttcctccaccctgtgttttcatcacaaacatcaccggcgaggcaatcaagtgaccaatataaccaaccccaatgctataaatactgtgcatgatctccttcgtcttctggtcacccgatatcgcgtgaaccttatcgcgagctttctctacggcgaactcgatgccgtacagaaagcccacgtacggcccctatagcgatgagctccaggaaaacgatagccacgattactatggtttggtctcgacgatggattctggtgttatccatctggatggcactgcaacggcaaaacgaaacgggttactgttattgatcggctccattcc

SEQ ID NO: 5115 - DNA, 1179 bp, Zea mays
  Zm_smallRNAprecursor_604
aaaccaccttccaatcaattacaagagacacagtaacaaagatgaggtgatataacacatgtgactctaacttgcttttattttgtgaagctaacttgtgaatttgatgcatgtcaaactaaccacaggaaagtgaaacaaaggaaaattgtttcaaaatgtgaaacaaacttgtaagtaacacaggagaaaatgacacacaaaatgccccaagtagcatgtcaaacataaagggcaaaaattataacctagcacaccagccacaaaacttcaaaaatgctactgcaccacagctctagcaaaagtgccttaccatacacatctactgcacctaaccatgaagaaacgaaaaatcatcatcattctgagttctggccctgcagaagaaaacaggcagaattctacaaggactgaaactccaggccagagaacatcagcaggcaacaaatttcaactccagaattttcttacaagcagaagagtattcaccatatcacatagtggcagaagaattaaagttcaaagttccacctgacttgcacagaactaccgacgattaaattcagctgctcatttctctcagttttcttgaacaaagcatctcaatcactaagacaaaagaactcgagcaatgttgtcacgagcaccaaatcagaatgcctttcatccagacaggctctgcttgtttcacttccacgcctccttccaccaccttggcaactccgaggcttgcactgacgctcttgccaatggagcgcaccttcctccaccctgtgttttcatcacaaacatcaccggcgaggcaatcaagtgaccaatataaccaaccccaatgctataaatactgtgcatgatctccttcgtcttctggtcacccgatatcgcgtgaaccttatcgcgagctttctctacggcgaactcgatgccgtacagaaagcccacgtacggcccctatagcgatgagctccaggaaaacgatagccacgattactatggtttggtctcgacgatggattctggtgttatccatctggatggcactgcaacggcaaaacgaaacgggttactgttattgatcggctccattccttacatcagagaaatacagtttgaaaaggatctggtcagttaaatctggatcatcatctaatcatgtgctcctatgcattcatctaacca

SEQ ID NO: 5116 - DNA, 1164 bp, Zea mays
  Zm_smallRNAprecursor_605
caattacaagagacacagtaacaaagatgaggtgatataacacatgtgactctaacttgcttttattttgtgaagctaacttgtgaatttgatgcatgtcaaactaaccacaggaaagtgaaacaaaggaaaattgtttcaaaatgtgaaacaaacttgtaagtaacacaggagaaaatgacacacaaaatgccccaagtagcatgtcaaacataaagggcaaaaattataacctagcacaccagccacaaaacttcaaaaatgctactgcaccacagctctagcaaaagtgccttaccatacacatctactgcacctaaccatgaagaaacgaaaaatcatcatcattctgagttctggccctgcagaagaaaacaggcagaattctacaaggactgaaactccaggccagagaacatcagcaggcaacaaatttcaactccagaattttcttacaagcagaagagtattcaccatatcacatagtggcagaagaattaaagttcaaagttccacctgacttgcacagaactaccgacgattaaattcagctgctcatttctctcagttttcttgaacaaagcatctcaatcactaagacaaaagaactcgagcaatgttgtcacgagcaccaaatcagaatgcctttcatccagacaggctctgcttgtttcacttccacgcctccttccaccaccttggcaactccgaggcttgcactgacgctcttgccaatggagcgcaccttcctccaccctgtgttttcatcacaaacatcaccggcgaggcaatcaagtgaccaatataaccaaccccaatgctataaatactgtgcatgatctccttcgtcttctggtcacccgatatcgcgtgaaccttatcgcgagctttctctacggcgaactcgatgccgtacagaaagcccacgtacggcccctatagcgatgagctccaggaaaacgatagccacgattactatggtttggtctcgacgatggattctggtgttatccatctggatggcactgcaacggcaaaacgaaacgggttactgttattgatcggctccattccttacatcagagaaatacagtttgaaaaggatctggtcagttaaatctggatcatcatctaatcatgtgctcctatgcattcatctaacca

SEQ ID NO: 5117 - DNA, 1071 bp, Zea mays
  Zm_smallRNAprecursor_606
aacgaaaaatcatcatcattctgagttctggccctgcagaagaaaacaggcagaattctacaaggactgaaactccaggccagagaacatcagcaggcaacaaatttcaactccagaattttcttacaagcagaagagtattcaccatatcacatagtggcagaagaattaaagttcaaagttccacctgacttgcacagaactaccgacgattaaattcagctgctcatttctctcagttttcttgaacaaagcatctcaatcactaagacaaaagaactcgagcaatgttgtcacgagcaccaaatcagaatgcctttcatccagacaggctctgcttgtttcacttccacgcctccttccaccaccttggcaactccgaggcttgcactgacgctcttgccaatggagcgcaccttcctccaccctgtgttttcatcacaaacatcaccggcgaggcaatcaagtgaccaatataaccaaccccaatgctataaatactgtgcatgatctccttcgtcttctggtcacccgatatcgcgtgaaccttatcgcgagctttctctacggcgaactcgatgccgtacagaaagcccacgtacggcccctatagcgatgagctccaggaaaacgatagccacgattactatggtttggtctcgacgatggattctggtgttatccatctggatggcactgcaacggcaaaacgaaacgggttactgttattgatcggctccattccttacatcagagaaatacagtttgaaaaggatctggtcagttaaatctggatcatcatctaatcatgtgctcctatgcattcatctaaccaggaattgtctcttttgtgctctaaccgaggctcaagcaattccagagtagctgaataacctctatatagttttgattgaaaataatatctatgactaggagcaagcaagtatcacacatggtttattccagtcttcactgcttatatcacaaagaggatgaaccactatttgcattgagaaaaactgaatgcaccagcaagtcaccaagtattacgtacctctggtgttggagaat

SEQ ID NO: 5118 - DNA, 1045 bp, Zea mays
  Zm_smallRNAprecursor_607
taaattcagctgctcatttctctcagttttcttgaacaaagcatctcaatcactaagacaaaagaactcgagcaatgttgtcacgagcaccaaatcagaatgcctttcatccagacaggctctgcttgtttcacttccacgcctccttccaccaccttggcaactccgaggcttgcactgacgctcttgccaatggagcgcaccttcctccaccctgtgttttcatcacaaacatcaccggcgaggcaatcaagtgaccaatataaccaaccccaatgctataaatactgtgcatgatctccttcgtcttctggtcacccgatatcgcgtgaaccttatcgcgagctttctctacggcgaactcgatgccgtacagaaagcccacgtacggcccctatagcgatgagctccaggaaaacgatagccacgattactatggtttggtctcgacgatggattctggtgttatccatctggatggcactgcaacggcaaaacgaaacgggttactgttattgatcggctccattccttacatcagagaaatacagtttgaaaaggatctggtcagttaaatctggatcatcatctaatcatgtgctcctatgcattcatctaaccaggaattgtctcttttgtgctctaaccgaggctcaagcaattccagagtagctgaataacctctatatagttttgattgaaaataatatctatgactaggagcaagcaagtatcacacatggtttattccagtcttcactgcttatatcacaaagaggatgaaccactatttgcattgagaaaaactgaatgcaccagcaagtcaccaagtattacgtacctctggtgttggagaattaacgcactgtctaagaagcagcctcttcgcgacatgtccaagaagccggccgcctgttgttcggggttaccagcatcctcacgaacgtcgccaagcggctggttcttcgggtcctcgccggcggcgacttccggcttcttggtgcccttgggcggcctcctccattttgtcgcctccgttgccagg

SEQ ID NO: 5119 - DNA, 1100 bp, Zea mays
  Zm_smallRNAprecursor_608
ttcagctgctcatttctctcagttttcttgaacaaagcatctcaatcactaagacaaaagaactcgagcaatgttgtcacgagcaccaaatcagaatgcctttcatccagacaggctctgcttgtttcacttccacgcctccttccaccaccttggcaactccgaggcttgcactgacgctcttgccaatggagcgcaccttcctccaccctgtgttttcatcacaaacatcaccggcgaggcaatcaagtgaccaatataaccaaccccaatgctataaatactgtgcatgatctccttcgtcttctggtcacccgatatcgcgtgaaccttatcgcgagctttctctacggcgaactcgatgccgtacagaaagcccacgtacggcccctatagcgatgagctccaggaaaacgatagccacgattactatggtttggtctcgacgatggattctggtgttatccatctggatggcactgcaacggcaaaacgaaacgggttactgttattgatcggctccattccttacatcagagaaatacagtttgaaaaggatctggtcagttaaatctggatcatcatctaatcatgtgctcctatgcattcatctaaccaggaattgtctcttttgtgctctaaccgaggctcaagcaattccagagtagctgaataacctctatatagttttgattgaaaataatatctatgactaggagcaagcaagtatcacacatggtttattccagtcttcactgcttatatcacaaagaggatgaaccactatttgcattgagaaaaactgaatgcaccagcaagtcaccaagtattacgtacctctggtgttggagaattaacgcactgtctaagaagcagcctcttcgcgacatgtccaagaagccggccgcctgttgttcggggttaccagcatcctcacgaacgtcgccaagcggctggttcttcgggtcctcgccggcggcgacttccggcttcttggtgcccttgggcggcctcctccattttgtcgcctccgttgccaggcggctgcttctcggggatctcgccggcggcagggtcgtcgccggagaggtcggtcttct

SEQ ID NO: 5120 - DNA, 1092 bp, Zea mays
  Zm_smallRNAprecursor_609
ccagcaagtcaccaagtattacgtacctctggtgttggagaattaacgcactgtctaagaagcagcctcttcgcgacatgtccaagaagccggccgcctgttgttcggggttaccagcatcctcacgaacgtcgccaagcggctggttcttcgggtcctcgccggcggcgacttccggcttcttggtgcccttgggcggcctcctccattttgtcgcctccgttgccaggcggctgcttctcggggatctcgccggcggcagggtcgtcgccggagaggtcggtcttcttgaggtcctcgctgccgccgccgccgccgccggcggcggccggcttcttggacatgtcgcgaggaggctgattcttagacatgtcgccggcgaggacctaccgctggtacgtaatacttggtgacttgctggtgcattcagtttttctccatgcaaatagtggttcatcctctttgtgatataagcagtgaagactggaataaaccctgtgtgatacttgcttgctcctagtcatagatattattttcaatcaaaactatatagaggttattcagctactctggaattgcttgagcctcggttagagcacaaaagagacaattcctagttagatgaatgcataggagcacatgattagatgatgatccagatttaactgaccagatccttttcaaactgtatttctctgatgtaaggaatggagccgatcaataacagtaacccgtttcgttttgccgttgcagtgccatccagatggataacaccagaatccatcgtcgagaccaaaccatagtaatcgtggctatcgttttcctggagctcatcgctataggggccgtacgtgggctttctgtacggcatcgagttcgccgtagagaaagctcgcgataaggttcacgcgatgtcgggtgaccagaagacgaaggagatcatgcacagtatttatagcattggggttggttatattggtcacttgattgcctcgccggtgatgtttgtgatgaaaacacagggtggaggaaggtgcgctccattggcaagagcgtcagtgcaagcctcggagttgccaaggtggtggaagg

SEQ ID NO: 5121 - DNA, 1139 bp, Zea mays
  Zm_smallRNAprecursor_610
aggcggctgcttctcggggatctcgccggcggcagggtcgtcgccggagaggtcggtcttcttgaggtcctcgctgccgccgccgccgccgccggcggcggccggcttcttggacatgtcgcgaggaggctgattcttagacatgtcgccggcgaggacctaccgctggtacgtaatacttggtgacttgctggtgcattcagtttttctccatgcaaatagtggttcatcctctttgtgatataagcagtgaagactggaataaaccctgtgtgatacttgcttgctcctagtcatagatattattttcaatcaaaactatatagaggttattcagctactctggaattgcttgagcctcggttagagcacaaaagagacaattcctagttagatgaatgcataggagcacatgattagatgatgatccagatttaactgaccagatccttttcaaactgtatttctctgatgtaaggaatggagccgatcaataacagtaacccgtttcgttttgccgttgcagtgccatccagatggataacaccagaatccatcgtcgagaccaaaccatagtaatcgtggctatcgttttcctggagctcatcgctataggggccgtacgtgggctttctgtacggcatcgagttcgccgtagagaaagctcgcgataaggttcacgcgatgtcgggtgaccagaagacgaaggagatcatgcacagtatttatagcattggggttggttatattggtcacttgattgcctcgccggtgatgtttgtgatgaaaacacagggtggaggaaggtgcgctccattggcaagagcgtcagtgcaagcctcggagttgccaaggtggtggaaggaggcgtggaagtgaaacaagcagagcctgtctggatgaaaggcattctgatttggtgcccgtgacaacattgctcgagttcttttgtcttagtgattaagatgctttgttcaagaaaactgagagaaatgagcagctgaatttaatcgtcggtagttctgtgcaagtcaggtggaactttgaactttaattcttctgccactatgtgatatggtgaatactcttctgcttgtaagaaaattctggagttgaaatttgttgcctgctgatgttct

SEQ ID NO: 5122 - DNA, 1079 bp, Zea mays
  Zm_smallRNAprecursor_611
tcggtcttcttgaggtcctcgctgccgccgccgccgccgccggcggcggccggcttcttggacatgtcgcgaggaggctgattcttagacatgtcgccggcgaggacctaccgctggtacgtaatacttggtgacttgctggtgcattcagtttttctccatgcaaatagtggttcatcctctttgtgatataagcagtgaagactggaataaaccctgtgtgatacttgcttgctcctagtcatagatattattttcaatcaaaactatatagaggttattcagctactctggaattgcttgagcctcggttagagcacaaaagagacaattcctagttagatgaatgcataggagcacatgattagatgatgatccagatttaactgaccagatccttttcaaactgtatttctctgatgtaaggaatggagccgatcaataacagtaacccgtttcgttttgccgttgcagtgccatccagatggataacaccagaatccatcgtcgagaccaaaccatagtaatcgtggctatcgttttcctggagctcatcgctataggggccgtacgtgggctttctgtacggcatcgagttcgccgtagagaaagctcgcgataaggttcacgcgatgtcgggtgaccagaagacgaaggagatcatgcacagtatttatagcattggggttggttatattggtcacttgattgcctcgccggtgatgtttgtgatgaaaacacagggtggaggaaggtgcgctccattggcaagagcgtcagtgcaagcctcggagttgccaaggtggtggaaggaggcgtggaagtgaaacaagcagagcctgtctggatgaaaggcattctgatttggtgcccgtgacaacattgctcgagttcttttgtcttagtgattaagatgctttgttcaagaaaactgagagaaatgagcagctgaatttaatcgtcggtagttctgtgcaagtcaggtggaactttgaactttaattcttctgccactatgtgatatggtgaatactcttctgcttgtaagaaaattctggagttgaaatttgttgcctgct

SEQ ID NO: 5123 - DNA, 1117 bp, Zea mays
  Zm_smallRNAprecursor_612
gtcttcttgaggtcctcgctgccgccgccgccgccgccggcggcggccggcttcttggacatgtcgcgaggaggctgattcttagacatgtcgccggcgaggacctaccgctggtacgtaatacttggtgacttgctggtgcattcagtttttctccatgcaaatagtggttcatcctctttgtgatataagcagtgaagactggaataaaccctgtgtgatacttgcttgctcctagtcatagatattattttcaatcaaaactatatagaggttattcagctactctggaattgcttgagcctcggttagagcacaaaagagacaattcctagttagatgaatgcataggagcacatgattagatgatgatccagatttaactgaccagatccttttcaaactgtatttctctgatgtaaggaatggagccgatcaataacagtaacccgtttcgttttgccgttgcagtgccatccagatggataacaccagaatccatcgtcgagaccaaaccatagtaatcgtggctatcgttttcctggagctcatcgctataggggccgtacgtgggctttctgtacggcatcgagttcgccgtagagaaagctcgcgataaggttcacgcgatgtcgggtgaccagaagacgaaggagatcatgcacagtatttatagcattggggttggttatattggtcacttgattgcctcgccggtgatgtttgtgatgaaaacacagggtggaggaaggtgcgctccattggcaagagcgtcagtgcaagcctcggagttgccaaggtggtggaaggaggcgtggaagtgaaacaagcagagcctgtctggatgaaaggcattctgatttggtgcccgtgacaacattgctcgagttcttttgtcttagtgattaagatgctttgttcaagaaaactgagagaaatgagcagctgaatttaatcgtcggtagttctgtgcaagtcaggtggaactttgaactttaattcttctgccactatgtgatatggtgaatactcttctgcttgtaagaaaattctggagttgaaatttgttgcctgctgatgttctctggcctggagtttcagtccttgtggaattctg

SEQ ID NO: 5124 - DNA, 1083 bp, Zea mays
  Zm_smallRNAprecursor_613
gcgaggaggctgattcttagacatgtcgccggcgaggacctaccgctggtacgtaatacttggtgacttgctggtgcattcagtttttctccatgcaaatagtggttcatcctctttgtgatataagcagtgaagactggaataaaccctgtgtgatacttgcttgctcctagtcatagatattattttcaatcaaaactatatagaggttattcagctactctggaattgcttgagcctcggttagagcacaaaagagacaattcctagttagatgaatgcataggagcacatgattagatgatgatccagatttaactgaccagatccttttcaaactgtatttctctgatgtaaggaatggagccgatcaataacagtaacccgtttcgttttgccgttgcagtgccatccagatggataacaccagaatccatcgtcgagaccaaaccatagtaatcgtggctatcgttttcctggagctcatcgctataggggccgtacgtgggctttctgtacggcatcgagttcgccgtagagaaagctcgcgataaggttcacgcgatgtcgggtgaccagaagacgaaggagatcatgcacagtatttatagcattggggttggttatattggtcacttgattgcctcgccggtgatgtttgtgatgaaaacacagggtggaggaaggtgcgctccattggcaagagcgtcagtgcaagcctcggagttgccaaggtggtggaaggaggcgtggaagtgaaacaagcagagcctgtctggatgaaaggcattctgatttggtgcccgtgacaacattgctcgagttcttttgtcttagtgattaagatgctttgttcaagaaaactgagagaaatgagcagctgaatttaatcgtcggtagttctgtgcaagtcaggtggaactttgaactttaattcttctgccactatgtgatatggtgaatactcttctgcttgtaagaaaattctggagttgaaatttgttgcctgctgatgttctctggcctggagtttcagtccttgtggaattctgcctgttttcttatgcagggccagaactcaga

SEQ ID NO: 5125 - DNA, 1192 bp, Zea mays
  Zm_smallRNAprecursor_614
ctgattcttagacatgtcgccggcgaggacctaccgctggtacgtaatacttggtgacttgctggtgcattcagtttttctccatgcaaatagtggttcatcctctttgtgatataagcagtgaagactggaataaaccctgtgtgatacttgcttgctcctagtcatagatattattttcaatcaaaactatatagaggttattcagctactctggaattgcttgagcctcggttagagcacaaaagagacaattcctagttagatgaatgcataggagcacatgattagatgatgatccagatttaactgaccagatccttttcaaactgtatttctctgatgtaaggaatggagccgatcaataacagtaacccgtttcgttttgccgttgcagtgccatccagatggataacaccagaatccatcgtcgagaccaaaccatagtaatcgtggctatcgttttcctggagctcatcgctataggggccgtacgtgggctttctgtacggcatcgagttcgccgtagagaaagctcgcgataaggttcacgcgatgtcgggtgaccagaagacgaaggagatcatgcacagtatttatagcattggggttggttatattggtcacttgattgcctcgccggtgatgtttgtgatgaaaacacagggtggaggaaggtgcgctccattggcaagagcgtcagtgcaagcctcggagttgccaaggtggtggaaggaggcgtggaagtgaaacaagcagagcctgtctggatgaaaggcattctgatttggtgcccgtgacaacattgctcgagttcttttgtcttagtgattaagatgctttgttcaagaaaactgagagaaatgagcagctgaatttaatcgtcggtagttctgtgcaagtcaggtggaactttgaactttaattcttctgccactatgtgatatggtgaatactcttctgcttgtaagaaaattctggagttgaaatttgttgcctgctgatgttctctggcctggagtttcagtccttgtggaattctgcctgttttcttatgcagggccagaactcagaatgatgatgatttttcgtttcttcatggttaggtgcagtagatgtgtatggtaaggcacttttgctagagctgtggtgcagtagcatttttgaagttttgtggctcgtgtgctaggtt

SEQ ID NO: 5126 - DNA, 1071 bp, Zea mays
  Zm_smallRNAprecursor_615
ttcttagacatgtcgccggcgaggacctaccgctggtacgtaatacttggtgacttgctggtgcattcagtttttctccatgcaaatagtggttcatcctctttgtgatataagcagtgaagactggaataaaccctgtgtgatacttgcttgctcctagtcatagatattattttcaatcaaaactatatagaggttattcagctactctggaattgcttgagcctcggttagagcacaaaagagacaattcctagttagatgaatgcataggagcacatgattagatgatgatccagatttaactgaccagatccttttcaaactgtatttctctgatgtaaggaatggagccgatcaataacagtaacccgtttcgttttgccgttgcagtgccatccagatggataacaccagaatccatcgtcgagaccaaaccatagtaatcgtggctatcgttttcctggagctcatcgctataggggccgtacgtgggctttctgtacggcatcgagttcgccgtagagaaagctcgcgataaggttcacgcgatgtcgggtgaccagaagacgaaggagatcatgcacagtatttatagcattggggttggttatattggtcacttgattgcctcgccggtgatgtttgtgatgaaaacacagggtggaggaaggtgcgctccattggcaagagcgtcagtgcaagcctcggagttgccaaggtggtggaaggaggcgtggaagtgaaacaagcagagcctgtctggatgaaaggcattctgatttggtgcccgtgacaacattgctcgagttcttttgtcttagtgattaagatgctttgttcaagaaaactgagagaaatgagcagctgaatttaatcgtcggtagttctgtgcaagtcaggtggaactttgaactttaattcttctgccactatgtgatatggtgaatactcttctgcttgtaagaaaattctggagttgaaatttgttgcctgctgatgttctctggcctggagtttcagtccttgtggaattctgcctgttttcttatgcagggccagaactcagaa

SEQ ID NO: 5127 - DNA, 1247 bp, Zea mays
  Zm_smallRNAprecursor_616
ttcttagacatgtcgccggcgaggacctaccgctggtacgtaatacttggtgacttgctggtgcattcagtttttctccatgcaaatagtggttcatcctctttgtgatataagcagtgaagactggaataaaccctgtgtgatacttgcttgctcctagtcatagatattattttcaatcaaaactatatagaggttattcagctactctggaattgcttgagcctcggttagagcacaaaagagacaattcctagttagatgaatgcataggagcacatgattagatgatgatccagatttaactgaccagatccttttcaaactgtatttctctgatgtaaggaatggagccgatcaataacagtaacccgtttcgttttgccgttgcagtgccatccagatggataacaccagaatccatcgtcgagaccaaaccatagtaatcgtggctatcgttttcctggagctcatcgctataggggccgtacgtgggctttctgtacggcatcgagttcgccgtagagaaagctcgcgataaggttcacgcgatgtcgggtgaccagaagacgaaggagatcatgcacagtatttatagcattggggttggttatattggtcacttgattgcctcgccggtgatgtttgtgatgaaaacacagggtggaggaaggtgcgctccattggcaagagcgtcagtgcaagcctcggagttgccaaggtggtggaaggaggcgtggaagtgaaacaagcagagcctgtctggatgaaaggcattctgatttggtgcccgtgacaacattgctcgagttcttttgtcttagtgattaagatgctttgttcaagaaaactgagagaaatgagcagctgaatttaatcgtcggtagttctgtgcaagtcaggtggaactttgaactttaattcttctgccactatgtgatatggtgaatactcttctgcttgtaagaaaattctggagttgaaatttgttgcctgctgatgttctctggcctggagtttcagtccttgtggaattctgcctgttttcttatgcagggccagaactcagaatgatgatgatttttcgtttcttcatggttaggtgcagtagatgtgtatggtaaggcacttttgctagagctgtggtgcagtagcatttttgaagttttgtggctcgtgtgctaggttataatttttgccctttatgtttgacatgctacttggggcattttgtgtgccattttctc

SEQ ID NO: 5128 - DNA, 1034 bp, Zea mays
  Zm_smallRNAprecursor_617
agacatgtcgccggcgaggacctaccgctggtacgtaatacttggtgacttgctggtgcattcagtttttctccatgcaaatagtggttcatcctctttgtgatataagcagtgaagactggaataaaccctgtgtgatacttgcttgctcctagtcatagatattattttcaatcaaaactatatagaggttattcagctactctggaattgcttgagcctcggttagagcacaaaagagacaattcctagttagatgaatgcataggagcacatgattagatgatgatccagatttaactgaccagatccttttcaaactgtatttctctgatgtaaggaatggagccgatcaataacagtaacccgtttcgttttgccgttgcagtgccatccagatggataacaccagaatccatcgtcgagaccaaaccatagtaatcgtggctatcgttttcctggagctcatcgctataggggccgtacgtgggctttctgtacggcatcgagttcgccgtagagaaagctcgcgataaggttcacgcgatgtcgggtgaccagaagacgaaggagatcatgcacagtatttatagcattggggttggttatattggtcacttgattgcctcgccggtgatgtttgtgatgaaaacacagggtggaggaaggtgcgctccattggcaagagcgtcagtgcaagcctcggagttgccaaggtggtggaaggaggcgtggaagtgaaacaagcagagcctgtctggatgaaaggcattctgatttggtgcccgtgacaacattgctcgagttcttttgtcttagtgattaagatgctttgttcaagaaaactgagagaaatgagcagctgaatttaatcgtcggtagttctgtgcaagtcaggtggaactttgaactttaattcttctgccactatgtgatatggtgaatactcttctgcttgtaagaaaattctggagttgaaatttgttgcctgctgatgttctctggcctggagtttcagtccttgtggaattctg

SEQ ID NO: 5129 - DNA, 1078 bp, Zea mays
  Zm_smallRNAprecursor_618
gtttttctccatgcaaatagtggttcatcctctttgtgatataagcagtgaagactggaataaaccctgtgtgatacttgcttgctcctagtcatagatattattttcaatcaaaactatatagaggttattcagctactctggaattgcttgagcctcggttagagcacaaaagagacaattcctagttagatgaatgcataggagcacatgattagatgatgatccagatttaactgaccagatccttttcaaactgtatttctctgatgtaaggaatggagccgatcaataacagtaacccgtttcgttttgccgttgcagtgccatccagatggataacaccagaatccatcgtcgagaccaaaccatagtaatcgtggctatcgttttcctggagctcatcgctataggggccgtacgtgggctttctgtacggcatcgagttcgccgtagagaaagctcgcgataaggttcacgcgatgtcgggtgaccagaagacgaaggagatcatgcacagtatttatagcattggggttggttatattggtcacttgattgcctcgccggtgatgtttgtgatgaaaacacagggtggaggaaggtgcgctccattggcaagagcgtcagtgcaagcctcggagttgccaaggtggtggaaggaggcgtggaagtgaaacaagcagagcctgtctggatgaaaggcattctgatttggtgcccgtgacaacattgctcgagttcttttgtcttagtgattaagatgctttgttcaagaaaactgagagaaatgagcagctgaatttaatcgtcggtagttctgtgcaagtcaggtggaactttgaactttaattcttctgccactatgtgatatggtgaatactcttctgcttgtaagaaaattctggagttgaaatttgttgcctgctgatgttctctggcctggagtttcagtccttgtggaattctgcctgttttcttatgcagggccagaactcagaatgatgatgatttttcgtttcttcatggttaggtgcagtagatgtgtatggtaaggcacttttgctagagctgtggt

SEQ ID NO: 5130 - DNA, 1051 bp, Zea mays
  Zm_smallRNAprecursor_619
acaattcctagttagatgaatgcataggagcacatgattagatgatgatccagatttaactgaccagatccttttcaaactgtatttctctgatgtaaggaatggagccgatcaataacagtaacccgtttcgttttgccgttgcagtgccatccagatggataacaccagaatccatcgtcgagaccaaaccatagtaatcgtggctatcgttttcctggagctcatcgctataggggccgtacgtgggctttctgtacggcatcgagttcgccgtagagaaagctcgcgataaggttcacgcgatgtcgggtgaccagaagacgaaggagatcatgcacagtatttatagcattggggttggttatattggtcacttgattgcctcgccggtgatgtttgtgatgaaaacacagggtggaggaaggtgcgctccattggcaagagcgtcagtgcaagcctcggagttgccaaggtggtggaaggaggcgtggaagtgaaacaagcagagcctgtctggatgaaaggcattctgatttggtgcccgtgacaacattgctcgagttcttttgtcttagtgattaagatgctttgttcaagaaaactgagagaaatgagcagctgaatttaatcgtcggtagttctgtgcaagtcaggtggaactttgaactttaattcttctgccactatgtgatatggtgaatactcttctgcttgtaagaaaattctggagttgaaatttgttgcctgctgatgttctctggcctggagtttcagtccttgtggaattctgcctgttttcttatgcagggccagaactcagaatgatgatgatttttcgtttcttcatggttaggtgcagtagatgtgtatggtaaggcacttttgctagagctgtggtgcagtagcatttttgaagttttgtggctcgtgtgctaggttataatttttgccctttatgtttgacatgctacttggggcattttgtgtgccattttctcctgtgttacttacaattttgtttcacattttgaaacaattttcctttgtt

SEQ ID NO: 5131 - DNA, 1047 bp, Zea mays
  Zm_smallRNAprecursor_620
ttcctagttagatgaatgcataggagcacatgattagatgatgatccagatttaactgaccagatccttttcaaactgtatttctctgatgtaaggaatggagccgatcaataacagtaacccgtttcgttttgccgttgcagtgccatccagatggataacaccagaatccatcgtcgagaccaaaccatagtaatcgtggctatcgttttcctggagctcatcgctataggggccgtacgtgggctttctgtacggcatcgagttcgccgtagagaaagctcgcgataaggttcacgcgatgtcgggtgaccagaagacgaaggagatcatgcacagtatttatagcattggggttggttatattggtcacttgattgcctcgccggtgatgtttgtgatgaaaacacagggtggaggaaggtgcgctccattggcaagagcgtcagtgcaagcctcggagttgccaaggtggtggaaggaggcgtggaagtgaaacaagcagagcctgtctggatgaaaggcattctgatttggtgcccgtgacaacattgctcgagttcttttgtcttagtgattaagatgctttgttcaagaaaactgagagaaatgagcagctgaatttaatcgtcggtagttctgtgcaagtcaggtggaactttgaactttaattcttctgccactatgtgatatggtgaatactcttctgcttgtaagaaaattctggagttgaaatttgttgcctgctgatgttctctggcctggagtttcagtccttgtggaattctgcctgttttcttatgcagggccagaactcagaatgatgatgatttttcgtttcttcatggttaggtgcagtagatgtgtatggtaaggcacttttgctagagctgtggtgcagtagcatttttgaagttttgtggctcgtgtgctaggttataatttttgccctttatgtttgacatgctacttggggcattttgtgtgccattttctcctgtgttacttacaattttgtttcacattttgaaacaattttcctttgtt

SEQ ID NO: 5132 - DNA, 1192 bp, Zea mays
  Zm_smallRNAprecursor_621
ttcctagttagatgaatgcataggagcacatgattagatgatgatccagatttaactgaccagatccttttcaaactgtatttctctgatgtaaggaatggagccgatcaataacagtaacccgtttcgttttgccgttgcagtgccatccagatggataacaccagaatccatcgtcgagaccaaaccatagtaatcgtggctatcgttttcctggagctcatcgctataggggccgtacgtgggctttctgtacggcatcgagttcgccgtagagaaagctcgcgataaggttcacgcgatgtcgggtgaccagaagacgaaggagatcatgcacagtatttatagcattggggttggttatattggtcacttgattgcctcgccggtgatgtttgtgatgaaaacacagggtggaggaaggtgcgctccattggcaagagcgtcagtgcaagcctcggagttgccaaggtggtggaaggaggcgtggaagtgaaacaagcagagcctgtctggatgaaaggcattctgatttggtgcccgtgacaacattgctcgagttcttttgtcttagtgattaagatgctttgttcaagaaaactgagagaaatgagcagctgaatttaatcgtcggtagttctgtgcaagtcaggtggaactttgaactttaattcttctgccactatgtgatatggtgaatactcttctgcttgtaagaaaattctggagttgaaatttgttgcctgctgatgttctctggcctggagtttcagtccttgtggaattctgcctgttttcttatgcagggccagaactcagaatgatgatgatttttcgtttcttcatggttaggtgcagtagatgtgtatggtaaggcacttttgctagagctgtggtgcagtagcatttttgaagttttgtggctcgtgtgctaggttataatttttgccctttatgtttgacatgctacttggggcattttgtgtgccattttctcctgtgttacttacaattttgtttcacattttgaaacaattttcctttgtttcactttcctgtggttagtttgacatgcatcaaattcacaagttagcttcacaaaataaaagcaagttagagtcacatgtgttatatcacctcatctttgttactgtgtctcttgtaattgattggaaggtggtttatattgtgt

SEQ ID NO: 5133 - DNA, 1039 bp, Zea mays
  Zm_smallRNAprecursor_622
tcaaactgtatttctctgatgtaaggaatggagccgatcaataacagtaacccgtttcgttttgccgttgcagtgccatccagatggataacaccagaatccatcgtcgagaccaaaccatagtaatcgtggctatcgttttcctggagctcatcgctataggggccgtacgtgggctttctgtacggcatcgagttcgccgtagagaaagctcgcgataaggttcacgcgatgtcgggtgaccagaagacgaaggagatcatgcacagtatttatagcattggggttggttatattggtcacttgattgcctcgccggtgatgtttgtgatgaaaacacagggtggaggaaggtgcgctccattggcaagagcgtcagtgcaagcctcggagttgccaaggtggtggaaggaggcgtggaagtgaaacaagcagagcctgtctggatgaaaggcattctgatttggtgcccgtgacaacattgctcgagttcttttgtcttagtgattaagatgctttgttcaagaaaactgagagaaatgagcagctgaatttaatcgtcggtagttctgtgcaagtcaggtggaactttgaactttaattcttctgccactatgtgatatggtgaatactcttctgcttgtaagaaaattctggagttgaaatttgttgcctgctgatgttctctggcctggagtttcagtccttgtggaattctgcctgttttcttatgcagggccagaactcagaatgatgatgatttttcgtttcttcatggttaggtgcagtagatgtgtatggtaaggcacttttgctagagctgtggtgcagtagcatttttgaagttttgtggctcgtgtgctaggttataatttttgccctttatgtttgacatgctacttggggcattttgtgtgccattttctcctgtgttacttacaattttgtttcacattttgaaacaattttcctttgtttcactttcctgtggttagtttgacatgcatcaaattcacaagttagcttcacaaaataaaag

SEQ ID NO: 5134 - DNA, 1059 bp, Zea mays
  Zm_smallRNAprecursor_623
caataacagtaacccgtttcgttttgccgttgcagtgccatccagatggataacaccagaatccatcgtcgagaccaaaccatagtaatcgtggctatcgttttcctggagctcatcgctataggggccgtacgtgggctttctgtacggcatcgagttcgccgtagagaaagctcgcgataaggttcacgcgatgtcgggtgaccagaagacgaaggagatcatgcacagtatttatagcattggggttggttatattggtcacttgattgcctcgccggtgatgtttgtgatgaaaacacagggtggaggaaggtgcgctccattggcaagagcgtcagtgcaagcctcggagttgccaaggtggtggaaggaggcgtggaagtgaaacaagcagagcctgtctggatgaaaggcattctgatttggtgcccgtgacaacattgctcgagttcttttgtcttagtgattaagatgctttgttcaagaaaactgagagaaatgagcagctgaatttaatcgtcggtagttctgtgcaagtcaggtggaactttgaactttaattcttctgccactatgtgatatggtgaatactcttctgcttgtaagaaaattctggagttgaaatttgttgcctgctgatgttctctggcctggagtttcagtccttgtggaattctgcctgttttcttatgcagggccagaactcagaatgatgatgatttttcgtttcttcatggttaggtgcagtagatgtgtatggtaaggcacttttgctagagctgtggtgcagtagcatttttgaagttttgtggctcgtgtgctaggttataatttttgccctttatgtttgacatgctacttggggcattttgtgtgccattttctcctgtgttacttacaattttgtttcacattttgaaacaattttcctttgtttcactttcctgtggttagtttgacatgcatcaaattcacaagttagcttcacaaaataaaagcaagttagagtcacatgtgttatatcacctcatctttgttactgtgtctcttgtaatt

SEQ ID NO: 5135 - DNA, 1184 bp, Zea mays
  Zm_smallRNAprecursor_624
gaatccatcgtcgagaccaaaccatagtaatcgtggctatcgttttcctggagctcatcgctataggggccgtacgtgggctttctgtacggcatcgagttcgccgtagagaaagctcgcgataaggttcacgcgatgtcgggtgaccagaagacgaaggagatcatgcacagtatttatagcattggggttggttatattggtcacttgattgcctcgccggtgatgtttgtgatgaaaacacagggtggaggaaggtgcgctccattggcaagagcgtcagtgcaagcctcggagttgccaaggtggtggaaggaggcgtggaagtgaaacaagcagagcctgtctggatgaaaggcattctgatttggtgcccgtgacaacattgctcgagttcttttgtcttagtgattaagatgctttgttcaagaaaactgagagaaatgagcagctgaatttaatcgtcggtagttctgtgcaagtcaggtggaactttgaactttaattcttctgccactatgtgatatggtgaatactcttctgcttgtaagaaaattctggagttgaaatttgttgcctgctgatgttctctggcctggagtttcagtccttgtggaattctgcctgttttcttatgcagggccagaactcagaatgatgatgatttttcgtttcttcatggttaggtgcagtagatgtgtatggtaaggcacttttgctagagctgtggtgcagtagcatttttgaagttttgtggctcgtgtgctaggttataatttttgccctttatgtttgacatgctacttggggcattttgtgtgccattttctcctgtgttacttacaattttgtttcacattttgaaacaattttcctttgtttcactttcctgtggttagtttgacatgcatcaaattcacaagttagcttcacaaaataaaagcaagttagagtcacatgtgttatatcacctcatctttgttactgtgtctcttgtaattgattggaaggtggtttatattgtgtactaaagagggctgaagagtttttgacagattggactggtagcttccccagggtcagaaaaaagaatgtgactcactgactgtaggggaatgccatggaagtgtagatgtgatgtttcttctcaattgtatatgccattggattgatgtttggaaatt

SEQ ID NO: 5136 - DNA, 1097 bp, Zea mays
  Zm_smallRNAprecursor_625
ttggttatattggtcacttgattgcctcgccggtgatgtttgtgatgaaaacacagggtggaggaaggtgcgctccattggcaagagcgtcagtgcaagcctcggagttgccaaggtggtggaaggaggcgtggaagtgaaacaagcagagcctgtctggatgaaaggcattctgatttggtgcccgtgacaacattgctcgagttcttttgtcttagtgattaagatgctttgttcaagaaaactgagagaaatgagcagctgaatttaatcgtcggtagttctgtgcaagtcaggtggaactttgaactttaattcttctgccactatgtgatatggtgaatactcttctgcttgtaagaaaattctggagttgaaatttgttgcctgctgatgttctctggcctggagtttcagtccttgtggaattctgcctgttttcttatgcagggccagaactcagaatgatgatgatttttcgtttcttcatggttaggtgcagtagatgtgtatggtaaggcacttttgctagagctgtggtgcagtagcatttttgaagttttgtggctcgtgtgctaggttataatttttgccctttatgtttgacatgctacttggggcattttgtgtgccattttctcctgtgttacttacaattttgtttcacattttgaaacaattttcctttgtttcactttcctgtggttagtttgacatgcatcaaattcacaagttagcttcacaaaataaaagcaagttagagtcacatgtgttatatcacctcatctttgttactgtgtctcttgtaattgattggaaggtggtttatattgtgtactaaagagggctgaagagtttttgacagattggactggtagcttccccagggtcagaaaaaagaatgtgactcactgactgtaggggaatgccatggaagtgtagatgtgatgtttcttctcaattgtatatgccattggattgatgtttggaaattttacgtgtagtatgtctaagataagtccttttatgtactggttccgtgaacctataaaaatgcttcagctagttcttgagcattagttgtggtagtgtggaag

SEQ ID NO: 5137 - DNA, 1094 bp, Zea mays
  Zm_smallRNAprecursor_626
tggttatattggtcacttgattgcctcgccggtgatgtttgtgatgaaaacacagggtggaggaaggtgcgctccattggcaagagcgtcagtgcaagcctcggagttgccaaggtggtggaaggaggcgtggaagtgaaacaagcagagcctgtctggatgaaaggcattctgatttggtgcccgtgacaacattgctcgagttcttttgtcttagtgattaagatgctttgttcaagaaaactgagagaaatgagcagctgaatttaatcgtcggtagttctgtgcaagtcaggtggaactttgaactttaattcttctgccactatgtgatatggtgaatactcttctgcttgtaagaaaattctggagttgaaatttgttgcctgctgatgttctctggcctggagtttcagtccttgtggaattctgcctgttttcttatgcagggccagaactcagaatgatgatgatttttcgtttcttcatggttaggtgcagtagatgtgtatggtaaggcacttttgctagagctgtggtgcagtagcatttttgaagttttgtggctcgtgtgctaggttataatttttgccctttatgtttgacatgctacttggggcattttgtgtgccattttctcctgtgttacttacaattttgtttcacattttgaaacaattttcctttgtttcactttcctgtggttagtttgacatgcatcaaattcacaagttagcttcacaaaataaaagcaagttagagtcacatgtgttatatcacctcatctttgttactgtgtctcttgtaattgattggaaggtggtttatattgtgtactaaagagggctgaagagtttttgacagattggactggtagcttccccagggtcagaaaaaagaatgtgactcactgactgtaggggaatgccatggaagtgtagatgtgatgtttcttctcaattgtatatgccattggattgatgtttggaaattttacgtgtagtatgtctaagataagtccttttatgtactggttccgtgaacctataaaaatgcttcagctagttcttgagcattagttgtggtagtgtgga

SEQ ID NO: 5138 - DNA, 1096 bp, Zea mays
  Zm_smallRNAprecursor_627
tggttatattggtcacttgattgcctcgccggtgatgtttgtgatgaaaacacagggtggaggaaggtgcgctccattggcaagagcgtcagtgcaagcctcggagttgccaaggtggtggaaggaggcgtggaagtgaaacaagcagagcctgtctggatgaaaggcattctgatttggtgcccgtgacaacattgctcgagttcttttgtcttagtgattaagatgctttgttcaagaaaactgagagaaatgagcagctgaatttaatcgtcggtagttctgtgcaagtcaggtggaactttgaactttaattcttctgccactatgtgatatggtgaatactcttctgcttgtaagaaaattctggagttgaaatttgttgcctgctgatgttctctggcctggagtttcagtccttgtggaattctgcctgttttcttatgcagggccagaactcagaatgatgatgatttttcgtttcttcatggttaggtgcagtagatgtgtatggtaaggcacttttgctagagctgtggtgcagtagcatttttgaagttttgtggctcgtgtgctaggttataatttttgccctttatgtttgacatgctacttggggcattttgtgtgccattttctcctgtgttacttacaattttgtttcacattttgaaacaattttcctttgtttcactttcctgtggttagtttgacatgcatcaaattcacaagttagcttcacaaaataaaagcaagttagagtcacatgtgttatatcacctcatctttgttactgtgtctcttgtaattgattggaaggtggtttatattgtgtactaaagagggctgaagagtttttgacagattggactggtagcttccccagggtcagaaaaaagaatgtgactcactgactgtaggggaatgccatggaagtgtagatgtgatgtttcttctcaattgtatatgccattggattgatgtttggaaattttacgtgtagtatgtctaagataagtccttttatgtactggttccgtgaacctataaaaatgcttcagctagttcttgagcattagttgtggtagtgtggaag

SEQ ID NO: 5139 - DNA, 1109 bp, Zea mays
  Zm_smallRNAprecursor_628
ccaaggtggtggaaggaggcgtggaagtgaaacaagcagagcctgtctggatgaaaggcattctgatttggtgcccgtgacaacattgctcgagttcttttgtcttagtgattaagatgctttgttcaagaaaactgagagaaatgagcagctgaatttaatcgtcggtagttctgtgcaagtcaggtggaactttgaactttaattcttctgccactatgtgatatggtgaatactcttctgcttgtaagaaaattctggagttgaaatttgttgcctgctgatgttctctggcctggagtttcagtccttgtggaattctgcctgttttcttatgcagggccagaactcagaatgatgatgatttttcgtttcttcatggttaggtgcagtagatgtgtatggtaaggcacttttgctagagctgtggtgcagtagcatttttgaagttttgtggctcgtgtgctaggttataatttttgccctttatgtttgacatgctacttggggcattttgtgtgccattttctcctgtgttacttacaattttgtttcacattttgaaacaattttcctttgtttcactttcctgtggttagtttgacatgcatcaaattcacaagttagcttcacaaaataaaagcaagttagagtcacatgtgttatatcacctcatctttgttactgtgtctcttgtaattgattggaaggtggtttatattgtgtactaaagagggctgaagagtttttgacagattggactggtagcttccccagggtcagaaaaaagaatgtgactcactgactgtaggggaatgccatggaagtgtagatgtgatgtttcttctcaattgtatatgccattggattgatgtttggaaattttacgtgtagtatgtctaagataagtccttttatgtactggttccgtgaacctataaaaatgcttcagctagttcttgagcattagttgtggtagtgtggaagagcaaagcacggttcagatttagcagggttttttttttcgaggaagttcagataaaaatgctttatatatataacaaataatatatccataagttggaatcacctctttctaaacatcatat

SEQ ID NO: 5140 - DNA, 1070 bp, Zea mays
  Zm_smallRNAprecursor_629
ttaagtgtaagtattatttgtttcttttccttttgttttattgcacgttgcatttcttgtttggtgcttttccatacaattatgttgttgcaatgttgcactatcccttgtacaagcatcacgcaatgagtacggaatataatgcaacaagtacaagagacaatgcaaaaccaaaattatggttgtctgattaattgtaccaatttaataaaactggttttgattcatctttggttttgtgacaataaattcaattagtttaatagagtaactaattaagataagctcacaagaaaggataaaacaaccgggcctttttggctttaggccctatttagaactcatagagctaataattagctagccaacaaattattagttaggttaagctagctaatgaagtgattgttagttgtgagttagctaatcattagctagattattaactgtgggtgtttggaacctctacaggtaattccctgtatgccactggaaaatatactcattccttgtatgccactggccccacatgtcatagacaccaaaaaatatacctatatgccactcagtggcacacaagggatgagtataaaatctgatggcataccaggaattttctccaggtaattttagtagatatctattagctctaaatttttcaaacagggcctcggtagaaaactcttgaagatggagtcttaaacaattccttgagtgcacgcactagagaagtgaaatgattatgctattaccttacgcactaattaaccacatctacactttgttgctagtcttaactaataatgtgctagcacagtaaaaaggtttattcaggacaaagctagccaaataaaaataaagactgacctctagcttaaaggacacttactgcttctatcatgttgcagttgtccggtgtacatacattaatctaaagccgggcaaggagaaacaatggcgggtgccacatgcgtgatatgacttttattagcaaattgtttacccaaaaggagccatggtaatgacactgaattgacacggaggcaacttaagcgtcgtcctcttgcgct

SEQ ID NO: 5141 - DNA, 1086 bp, Zea mays
  Zm_smallRNAprecursor_630
tgaaaaatagccagcaatttttcatgtccttatactcagttatgatttctgatgacgtcatattagacatctgtacaggtaaaagaaggttgaagatattaaaaatttatggaaattttttttacacaatgtgaacacatcatacgttaagaaacatacatataaacttatgtttattaagatataacagatcatcattagttcattacatgtaattactaatgaaaaaataggtatgtacatacatttaatatttttacagttgcaagcttagtttgcaatgttcttatgatctttctctaataccaacatgttttcgatgtcattgaaaacgtgttagccagtttaatttatctagataacgatcaagttatctaaacatatagtcataccttaatggtagggacatttttcatggcgcagtctaattcaatgacatatttttcagtcattttttttgcatgttccaatataagacagtaaactgtcacggtcgtcccttacatgttgaagctcaattttaagactttcaacttttttaataaatcgacgtttcgtttcacagcttcattttgcaaagactaaaaggacaataacataattaagacattataatattctaattaaacaataccaaataaggattgcattgttcattatctgtcatctatcatttaacgtatagagttgaaatagagaatgagtatacgacagaaattaacatgcccagttcaactcgtccctagatgttgtgcttcagttagaacattataccgttgcctgcgtatcttctgttaccatcctcgtggatgtgtcgattcaaactcggaagaatgcataaataccattttttggaaggagaaaaaaagacaaataacatctcacgactcacgtgttcctctgcgtgacctcatgtgaactgggcatgttaatttcttacatatgctcattctccagttcaactctagacgctgatgatagatgtttgttattgaactatgcaatctttatttgtgctgttaattaaaatcctgatgtattaaattatgctgctgtccttctagtcattgcaaaataaaagctgcg

SEQ ID NO: 5142 - DNA, 1055 bp, Zea mays
  Zm_smallRNAprecursor_631
gaaggttgaagatattaaaaatttatggaaattttttttacacaatgtgaacacatcatacgttaagaaacatacatataaacttatgtttattaagatataacagatcatcattagttcattacatgtaattactaatgaaaaaataggtatgtacatacatttaatatttttacagttgcaagcttagtttgcaatgttcttatgatctttctctaataccaacatgttttcgatgtcattgaaaacgtgttagccagtttaatttatctagataacgatcaagttatctaaacatatagtcataccttaatggtagggacatttttcatggcgcagtctaattcaatgacatatttttcagtcattttttttgcatgttccaatataagacagtaaactgtcacggtcgtcccttacatgttgaagctcaattttaagactttcaacttttttaataaatcgacgtttcgtttcacagcttcattttgcaaagactaaaaggacaataacataattaagacattataatattctaattaaacaataccaaataaggattgcattgttcattatctgtcatctatcatttaacgtatagagttgaaatagagaatgagtatacgacagaaattaacatgcccagttcaactcgtccctagatgttgtgcttcagttagaacattataccgttgcctgcgtatcttctgttaccatcctcgtggatgtgtcgattcaaactcggaagaatgcataaataccattttttggaaggagaaaaaaagacaaataacatctcacgactcacgtgttcctctgcgtgacctcatgtgaactgggcatgttaatttcttacatatgctcattctccagttcaactctagacgctgatgatagatgtttgttattgaactatgcaatctttatttgtgctgttaattaaaatcctgatgtattaaattatgctgctgtccttctagtcattgcaaaataaaagctgcgaaacaaaacattgatttattgaacaaagttgaaagtcttataattgagtttaa

SEQ ID NO: 5143 - DNA, 1054 bp, Zea mays
  Zm_smallRNAprecursor_632
aaggttgaagatattaaaaatttatggaaattttttttacacaatgtgaacacatcatacgttaagaaacatacatataaacttatgtttattaagatataacagatcatcattagttcattacatgtaattactaatgaaaaaataggtatgtacatacatttaatatttttacagttgcaagcttagtttgcaatgttcttatgatctttctctaataccaacatgttttcgatgtcattgaaaacgtgttagccagtttaatttatctagataacgatcaagttatctaaacatatagtcataccttaatggtagggacatttttcatggcgcagtctaattcaatgacatatttttcagtcattttttttgcatgttccaatataagacagtaaactgtcacggtcgtcccttacatgttgaagctcaattttaagactttcaacttttttaataaatcgacgtttcgtttcacagcttcattttgcaaagactaaaaggacaataacataattaagacattataatattctaattaaacaataccaaataaggattgcattgttcattatctgtcatctatcatttaacgtatagagttgaaatagagaatgagtatacgacagaaattaacatgcccagttcaactcgtccctagatgttgtgcttcagttagaacattataccgttgcctgcgtatcttctgttaccatcctcgtggatgtgtcgattcaaactcggaagaatgcataaataccattttttggaaggagaaaaaaagacaaataacatctcacgactcacgtgttcctctgcgtgacctcatgtgaactgggcatgttaatttcttacatatgctcattctccagttcaactctagacgctgatgatagatgtttgttattgaactatgcaatctttatttgtgctgttaattaaaatcctgatgtattaaattatgctgctgtccttctagtcattgcaaaataaaagctgcgaaacaaaacattgatttattgaacaaagttgaaagtcttataattgagtttaa

SEQ ID NO: 5144 - DNA, 1205 bp, Zea mays
  Zm_smallRNAprecursor_633
tttcgttttttacgaggataaaagaaagaacaaacagcaggctgctactccttgggcgagagatagagagagagagggtgcggatcggagtgccggccggcagggcaggcgcacggaaatggagggcctggcagcctccgtccgtccgccatgagcccatgcccatccagcatccatgggcaggcagcaccagcagagggtgtggtcagaagagaggaccgagagagagagagagtaccggcccgtgcctctgcagtctggcactctggctgctgccgctgccgctgccgcaccacccgccagcccggttgggtggttacttgccgcaactagcagctatttatatgccccagcctctgtgggccgtttgcactcactccaaagcaaagcaaatctctctctctctctccatctctccacacacagccccttcgctgccgaggtccctcgccggacggggggtgaaggacgaaggggaagaaaggtgcgcgggcatgctttccacaggctttcttgaactgtgaactcgtgggcgtggtggtggtggtgctggtgctgggtgtgtgggacggaatgattggctcctcccagtcccagtcccagtcccacccaccaattctcttccccccgaccggccgtgaattgaattgaatcgaatcgcatcgctgagcttccccccggctcgctcacgcgacctgttgatggttcaagaaagcccatggaaaccatgcagcctccctcctgtgcagctgtgctctggtggcggagaattccgccggttccgggtgagggaattcagcagaccagccaccccgatgcggattcgtgtgtggaggaggtgagttgtgtgtctcagatcgcttcccgtgttgttgtgggggttgaattctggtaggggacggtctcctggccttttgtttcggtgcgggtttcttgtgctagcttggatgtgaattttcgctgaagcagatgtcttgaggctttttctgtcttgcagagttgcagttgcagcgacgactccaactccaacgaggggatccacgcctggactgttctgttccaacgaggggatccaactccaactcagcggcaggcagctagctgtcctgttcgaaattcaaaacccggccagatccgtgcttgcgctgctcgccggggctgctttgtccactcaggccatcgatctccagttccatgtatgctcc

SEQ ID NO: 5145 - DNA, 1205 bp, Zea mays; identical to SEQ ID NO: 5144
  Zm_smallRNAprecursor_634

SEQ ID NO: 5146 - DNA, 1206 bp, Zea mays
  Zm_smallRNAprecursor_635
tttcgttttttacgaggataaaagaaagaacaaacagcaggctgctactccttgggcgagagatagagagagagagggtgcggatcggagtgccggccggcagggcaggcgcacggaaatggagggcctggcagcctccgtccgtccgccatgagcccatgcccatccagcatccatgggcaggcagcaccagcagagggtgtggtcagaagagaggaccgagagagagagagagtaccggcccgtgcctctgcagtctggcactctggctgctgccgctgccgctgccgcaccacccgccagcccggttgggtggttacttgccgcaactagcagctatttatatgccccagcctctgtgggccgtttgcactcactccaaagcaaagcaaatctctctctctctctccatctctccacacacagccccttcgctgccgaggtccctcgccggacggggggtgaaggacgaaggggaagaaaggtgcgcgggcatgctttccacaggctttcttgaactgtgaactcgtgggcgtggtggtggtggtgctggtgctgggtgtgtgggacggaatgattggctcctcccagtcccagtcccagtcccacccaccaattctcttccccccgaccggccgtgaattgaattgaatcgaatcgcatcgctgagcttccccccggctcgctcacgcgacctgttgatggttcaagaaagcccatggaaaccatgcagcctccctcctgtgcagctgtgctctggtggcggagaattccgccggttccgggtgagggaattcagcagaccagccaccccgatgcggattcgtgtgtggaggaggtgagttgtgtgtctcagatcgcttcccgtgttgttgtgggggttgaattctggtaggggacggtctcctggccttttgtttcggtgcgggtttcttgtgctagcttggatgtgaattttcgctgaagcagatgtcttgaggctttttctgtcttgcagagttgcagttgcagcgacgactccaactccaacgaggggatccacgcctggactgttctgttccaacgaggggatccaactccaactcagcggcaggcagctagctgtcctgttcgaaattcaaaacccggccagatccgtgcttgcgctgctcgccggggctgctttgtccactcaggccatcgatctccagttccatgtatgctcca

SEQ ID NO: 5147 - DNA, 1206 bp, Zea mays; identical to SEQ ID NO: 5146
  Zm_smallRNAprecursor_636

SEQ ID NO: 5148 - DNA, 1164 bp, Zea mays
  Zm_smallRNAprecursor_637
gcggcgccgaggaaatcgtggctagaatgagaattggttcgcgcgagatttagttagccggaacaaagaattctcaaatctggctcgccgatcgaaacaaccagagcaaatgcattcgtcgaaactgtgcaagatccagggaaggaaggaacacatcctaggagccaagaaacccgcagcgaaacaaagaaaagaaggcggaactcgcatccgaggagccaagcaacccgcaccgagaaattcacaaggccggaaccaccccccctagctacctgaattcaacccacagaaaaccatctgagccacaattcgcctccgcacacgcgagggaattcaggcacccgatgcggcaagagcgaactcgttgtcagcgaattgaattccccgagaattacacccgggcgacccatacggagccgaaattcagagcgggaggacctaaattcccctcaaccggctgaattctcggcgatgctggcacaagaggggaggctgcatggtttccatgggctttcttgaaccatcaacaggtagagccggccgagagcgaggctgcggggaagctccgcagctcaattcacggccggtgcatgggggaagagaattgctagctgggaggagccaagcattccatccgacataccaccaccacccacgagttcacagttcaagaaagcctgtggaaagcatgcccgcgcacctttctccacacgtcccacaccccgttcctccggcgagggacacgcgccgaccacaattctacgccgcccacggagagggagggggactggaactgtggtgtggagagagaggagggaggtggttgagagagagagatagagagagggttgctttggagtgagagcaacggcccacagaggccgggggatataaatagctgcggcaagtaaccaaccaaccgggctggcggtggcgggtggcgtggtagcggcaccggcaggcggcaggcagcggccagagcgcagaggcacgggccggtacccagccgtagccccgtagccgagtactctcggtcctctcctctgacctccctctgtctggctctctgcccatggatgggcgaggctcatggcggacgaaggcagccaggctgccagtgccaggcccctccttttccgtgcgcctgccggcacccgcgcgctc

SEQ ID NO: 5149 - DNA, 1164 bp, Zea mays; identical to SEQ ID NO: 5148
  Zm_smallRNAprecursor_638

SEQ ID NO: 5150 - DNA, 1165 bp, Zea mays
  Zm_smallRNAprecursor_639
gcggcgccgaggaaatcgtggctagaatgagaattggttcgcgcgagatttagttagccggaacaaagaattctcaaatctggctcgccgatcgaaacaaccagagcaaatgcattcgtcgaaactgtgcaagatccagggaaggaaggaacacatcctaggagccaagaaacccgcagcgaaacaaagaaaagaaggcggaactcgcatccgaggagccaagcaacccgcaccgagaaattcacaaggccggaaccaccccccctagctacctgaattcaacccacagaaaaccatctgagccacaattcgcctccgcacacgcgagggaattcaggcacccgatgcggcaagagcgaactcgttgtcagcgaattgaattccccgagaattacacccgggcgacccatacggagccgaaattcagagcgggaggacctaaattcccctcaaccggctgaattctcggcgatgctggcacaagaggggaggctgcatggtttccatgggctttcttgaaccatcaacaggtagagccggccgagagcgaggctgcggggaagctccgcagctcaattcacggccggtgcatgggggaagagaattgctagctgggaggagccaagcattccatccgacataccaccaccacccacgagttcacagttcaagaaagcctgtggaaagcatgcccgcgcacctttctccacacgtcccacaccccgttcctccggcgagggacacgcgccgaccacaattctacgccgcccacggagagggagggggactggaactgtggtgtggagagagaggagggaggtggttgagagagagagatagagagagggttgctttggagtgagagcaacggcccacagaggccgggggatataaatagctgcggcaagtaaccaaccaaccgggctggcggtggcgggtggcgtggtagcggcaccggcaggcggcaggcagcggccagagcgcagaggcacgggccggtacccagccgtagccccgtagccgagtactctcggtcctctcctctgacctccctctgtctggctctctgcccatggatgggcgaggctcatggcggacgaaggcagccaggctgccagtgccaggcccctccttttccgtgcgcctgccggcacccgcgcgctcg

SEQ ID NO: 5151 - DNA, 1051 bp, Zea mays
  Zm_smallRNAprecursor_640
gagcaggcgatcgagatcgggcacgggcggcagcagcaggcaggaaggcacacatgctccttccattcttccaaaagcgattttttttttaaaaaaagagagctttgttcgctcgctccagccgtccaagatgttaaaaaaacaagctttcctcggtgtccatgtgccgcccggccggctccggtgggtatcggacaaggcggtccgagattttctagcccgtgtcgagtgcctcctgccctgcctttcttcgtcatggccatgtgtttgcttcatacagtatacgatatatactataaacctcttcatctttcctgaaacacaagcgtctgctacgcatctccagagaatgggatgaccgaccggcaggacagcaatgtaacgcacccactgggccagtccgcctaaagcccaccatcgccagcgtcggacgttcatgcgctcgtgcgcagcctattcagacgggcacctcgctctcaaaacctaggctgagagaggagggaggcccgcccttataagtgcaacacggcccccttggctaggcgaggtggtactaacccagggcgtgcataccggtcccttacatcccacccccctaagaggcccaaagctctcccaggcagcagcggcaatgtaggctccgataccaattgtaacgcacccactgggccagtccgcccaaagcccaccatcgccagcgtcatacgttcatgcgctcgtgcgcagcctattcagacgggcacctcgctctcaaaacctaggctgagagaggagggaggctcgcccttataagtgcaacacggcccccttagctaggcgaggtggtactaacccagggcgtgcataccggtcccttacatcccacccccctaagaggcccaaagctctcccaggcagcagcggcaatgtaggctccgataccaattgtaacgcacccactgggccagtccgcccaaagcccaccatcgccagcgtcggacgttcatgcgctcgtgtgcagcctatttaggcgggcacctcgctctcaaaacctaggctgagagaggaggga

SEQ ID NO: 5152 - DNA, 1225 bp, Zea mays
  Zm_smallRNAprecursor_641
agcgtctgctacgcatctccagagaatgggatgaccgaccggcaggacagcaatgtaacgcacccactgggccagtccgcctaaagcccaccatcgccagcgtcggacgttcatgcgctcgtgcgcagcctattcagacgggcacctcgctctcaaaacctaggctgagagaggagggaggcccgcccttataagtgcaacacggcccccttggctaggcgaggtggtactaacccagggcgtgcataccggtcccttacatcccacccccctaagaggcccaaagctctcccaggcagcagcggcaatgtaggctccgataccaattgtaacgcacccactgggccagtccgcccaaagcccaccatcgccagcgtcatacgttcatgcgctcgtgcgcagcctattcagacgggcacctcgctctcaaaacctaggctgagagaggagggaggctcgcccttataagtgcaacacggcccccttagctaggcgaggtggtactaacccagggcgtgcataccggtcccttacatcccacccccctaagaggcccaaagctctcccaggcagcagcggcaatgtaggctccgataccaattgtaacgcacccactgggccagtccgcccaaagcccaccatcgccagcgtcggacgttcatgcgctcgtgtgcagcctatttaggcgggcacctcgctctcaaaacctaggctgagagaggagggaggcccgcccttataagtgcaacacggcccccttggctaggcgaggtggtactaacccagggcgtgcatatcggtctctcacatcccacccccctaagaggcccaaagctctcccaggcagcagcggcagtgtgggctccgataccaattgtaacgcacccactgggccagtccgcctaaagcccaccatcgccagcgtcatacgttcatgcgctcgtgcgcagcctattcagacgggcacctcgctctcaaaacctaggctgagagaggagggaggcccgcccttataagtgcaacacggcccccttggctaggcgaggtggtactaacctagggcgtgcataccggtcccttacaagcaataaccctgcgtctgtgttgatgcaatgcaaggcaaggctggcagcgctgaatctaaagaaggtctggactctggaccacacccctactgttgccagagaactatgcatgggccggagccggacattgactgttctgt

SEQ ID NO: 5153 - DNA, 1051 bp, Zea mays
  Zm_smallRNAprecursor_642
tggtactaacccagggcgtgcataccggtcccttacatcccacccccctaagaggcccaaagctctcccaggcagcagcggcaatgtaggctccgataccaattgtaacgcacccactgggccagtccgcccaaagcccaccatcgccagcgtcatacgttcatgcgctcgtgcgcagcctattcagacgggcacctcgctctcaaaacctaggctgagagaggagggaggctcgcccttataagtgcaacacggcccccttagctaggcgaggtggtactaacccagggcgtgcataccggtcccttacatcccacccccctaagaggcccaaagctctcccaggcagcagcggcaatgtaggctccgataccaattgtaacgcacccactgggccagtccgcccaaagcccaccatcgccagcgtcggacgttcatgcgctcgtgtgcagcctatttaggcgggcacctcgctctcaaaacctaggctgagagaggagggaggcccgcccttataagtgcaacacggcccccttggctaggcgaggtggtactaacccagggcgtgcatatcggtctctcacatcccacccccctaagaggcccaaagctctcccaggcagcagcggcagtgtgggctccgataccaattgtaacgcacccactgggccagtccgcctaaagcccaccatcgccagcgtcatacgttcatgcgctcgtgcgcagcctattcagacgggcacctcgctctcaaaacctaggctgagagaggagggaggcccgcccttataagtgcaacacggcccccttggctaggcgaggtggtactaacctagggcgtgcataccggtcccttacaagcaataaccctgcgtctgtgttgatgcaatgcaaggcaaggctggcagcgctgaatctaaagaaggtctggactctggaccacacccctactgttgccagagaactatgcatgggccggagccggacattgactgttctgttctgttctctgctctgctctgtgtgttcacttctcttgtactaccgaccg

SEQ ID NO: 5154 - DNA, 1225 bp, Zea mays
  Zm_smallRNAprecursor_643
agaggcccaaagctctcccaggcagcagcggcaatgtaggctccgataccaattgtaacgcacccactgggccagtccgcccaaagcccaccatcgccagcgtcatacgttcatgcgctcgtgcgcagcctattcagacgggcacctcgctctcaaaacctaggctgagagaggagggaggctcgcccttataagtgcaacacggcccccttagctaggcgaggtggtactaacccagggcgtgcataccggtcccttacatcccacccccctaagaggcccaaagctctcccaggcagcagcggcaatgtaggctccgataccaattgtaacgcacccactgggccagtccgcccaaagcccaccatcgccagcgtcggacgttcatgcgctcgtgtgcagcctatttaggcgggcacctcgctctcaaaacctaggctgagagaggagggaggcccgcccttataagtgcaacacggcccccttggctaggcgaggtggtactaacccagggcgtgcatatcggtctctcacatcccacccccctaagaggcccaaagctctcccaggcagcagcggcagtgtgggctccgataccaattgtaacgcacccactgggccagtccgcctaaagcccaccatcgccagcgtcatacgttcatgcgctcgtgcgcagcctattcagacgggcacctcgctctcaaaacctaggctgagagaggagggaggcccgcccttataagtgcaacacggcccccttggctaggcgaggtggtactaacctagggcgtgcataccggtcccttacaagcaataaccctgcgtctgtgttgatgcaatgcaaggcaaggctggcagcgctgaatctaaagaaggtctggactctggaccacacccctactgttgccagagaactatgcatgggccggagccggacattgactgttctgttctgttctctgctctgctctgtgtgttcacttctcttgtactaccgaccgtacaccgtgaatctgccattgccatgaccatgaggtccggctccggcgggcggtgccttccccatggccatcacccggcagtgggctgggcgtcgctgtcatgacgccgccacccattcccgtgcatgcgatgcgacatccaccatatgacgacagattgattgagccacaaagcctgcctttgctctcctgcaaaggatataattgtcgaccaaatccacttt

SEQ ID NO: 5155 - DNA, 1071 bp, Zea mays
  Zm_smallRNAprecursor_644
gaggtggctcatcagaggaagcagggcctccagaccctgagggagcccgctttgtatgagcagctgggttggtggaatcaacccagtagggtacgtagcgggagtgtttgacaggtttttcgaagtgagtctgggtgaccacttcgatcatcttcatgataaagggtgcatgaagacaccccttgagaggagaccaggaagcacgaaggatctcttcccatatcatgtcaaacacatttatgcgggtgagactgttaggagtaaggaggagaaggaagacctgactccccctaaggacgttcatttgattcccgcctttcaggagaacggtcatcctggacaaagagttaaggtacctgtagtacctatacatgttggcggtggtccagaactcccgatccatagagacatgaataaattcagtctcttcccgcatgggcagcttaatgtcatgaactctcatgttgctgccctaaatatcagcatcagagaagcctagaatatgggcaaaacgacggtagctgactttgtgccagttcccctggatgaagaaatacatgacagggtaatcatacccatcagcttcttcatctactttcttgacccagagggtggcatagaactgagctaccacctcgtcgttccaggggtattccattatcataatatttttaacccctttctctctaggttacggagagctgacgtcatgtcagcatctcccatgttctcacatccttcccagtcaataaaccgatgcctaacaactggatatttcttggacaaaattgtggcagaacctccaagttattgggcccacatgcacctgtccttgtcccaaagacctcagacgactatgcatgtgcaccagataacttaataggatctgtccgattgccccaagtacatcggataaaccacttacaaccaagatcgcgggattaagtaatacaaatcacgcacaccaatatttttgcagcggaaatcttactaccaaattttacaagttacaaaagttttacattattttatcagagtgattacaaaagtataagtttgaaatatatgcta

SEQ ID NO: 5156 - DNA, 1062 bp, Zea mays
  Zm_smallRNAprecursor_645
atgcaaatgatttgagacaagagttcccccaaacacttcacaaaagctcttgaaacaatgcctcgtgaagtgcttgcatagaactcctagggacatcaaacctagttcttacaaaacgtgccatgtcatccttaaatcatttcttgtggcatgcatttgaccaacatctagcaaataattagtaggatcgagagctacatttaacacttgacaaaatctctgagtatctcacgaagtgcttccacataactcctaagaacaccaaactttggttattgtctttaagtcatttcatgtggcatgtgcttgcctaacctttgtcaaatggttagtgccatcgagagagccatatatgaataaacatatctagagctcacaaagcacatgcatatatggaacttataaattggaaccatgattcaaagagttagggtattgaatacttacatgagtgttgagtatcaccaactttgagccgtatatggatgttgtgccaccaagagttcccccaaacacttcacatgcacctaatcttgaaatgtgttattgaatggtgcctcatgtgaagtgcttgaagggaactcatggtaacaccagacattgttcaaagttgtattgcccatggtatccatatggccataatatattattataactaattgcttcatgataccaagagttcccccaaacacttcacaactggcctttattaagccaaggtatcgagacgtgcttgtaggtaactcctagtaacacaaaattttgtatagccttcaaactcatatcacatgacacatgacaaacatctagcacatgcaaatgatttgagaaaccaagagttcccccaaacacttcacaaaagctcttgaaacaatgcctcgtgaagtgcttgcatagaactcctagggacatcaaacctagttcttacaaaacatgccacgtcatccttaaataatttcttgtggcgtgcatttgaccaacatctagcaaataattagtggcatcgagagctacattgaacacttgacaaaagctctaagaagagtatctcatgaagtgctt

SEQ ID NO: 5157 - DNA, 1116 bp, Zea mays
  Zm_smallRNAprecursor_646
ctcgtgaagtgcttgcatagaactcctagggacatcaaacctagttcttacaaaacgtgccatgtcatccttaaatcatttcttgtggcatgcatttgaccaacatctagcaaataattagtaggatcgagagctacatttaacacttgacaaaatctctgagtatctcacgaagtgcttccacataactcctaagaacaccaaactttggttattgtctttaagtcatttcatgtggcatgtgcttgcctaacctttgtcaaatggttagtgccatcgagagagccatatatgaataaacatatctagagctcacaaagcacatgcatatatggaacttataaattggaaccatgattcaaagagttagggtattgaatacttacatgagtgttgagtatcaccaactttgagccgtatatggatgttgtgccaccaagagttcccccaaacacttcacatgcacctaatcttgaaatgtgttattgaatggtgcctcatgtgaagtgcttgaagggaactcatggtaacaccagacattgttcaaagttgtattgcccatggtatccatatggccataatatattattataactaattgcttcatgataccaagagttcccccaaacacttcacaactggcctttattaagccaaggtatcgagacgtgcttgtaggtaactcctagtaacacaaaattttgtatagccttcaaactcatatcacatgacacatgacaaacatctagcacatgcaaatgatttgagaaaccaagagttcccccaaacacttcacaaaagctcttgaaacaatgcctcgtgaagtgcttgcatagaactcctagggacatcaaacctagttcttacaaaacatgccacgtcatccttaaataatttcttgtggcgtgcatttgaccaacatctagcaaataattagtggcatcgagagctacattgaacacttgacaaaagctctaagaagagtatctcatgaagtgcttccacagaactcataagaacaccaaactccggttatttgtctttaaatcatttcatgtggcacgtgcttgcctaacctttgtcaaatggttagtgccatcgagagagccatatata

SEQ ID NO: 5158 - DNA, 1063 bp, Zea mays
  Zm_smallRNAprecursor_647
tgacattctagtgatttgagccctgttctagtgtgctagtctttttgagctcaagtcttggtcttgtgtgtgcgtagttgctgtgatctttgtgttttgtgtgagttgctcatcccttccttactccgtgattctttgtgaacatcaaaagtgtaagggcgagaggctccaagttgtggagattccttgcgaacgggataagaaaagaaaagcaaaacaccatggtattcaagttgatcattggatcacttgagaggagttgagtgcaactctcgtccgttgggacgccacaacgtggagtaggcaagttttgtacttggccgaaccatgggataaaccactgtgtcatctctgtgttgatctctttgtggttatcgtattgtgcaagttcttctctctagccacttggtgattattgtgttaacacttaaccaagttttgtggcttaagttttaagttttacaggatcacctattcacccccctctaggtgctctcaaagagttcccccaaacacttcacatgcacctaatcttgaaatgtgttatttgaatggtgcctcatgtgaagtgcttgaagggaactcatagtaacacccgacattgttcaaagttgtatcgcccatggtatccatatggccatcatatattattataacaaaatgcttcatgataccaagagttcccccaaacacttcacaactggcctttattaagccaaggtatcgtgaagtgcttgtagggaactcctagtaacacaaaacgttgtctggccttcaactcatatcacatggcacatgaccaacatctagcacatgcaaatgatttcaaacaccaagagttcccaaacacttggcaaaacctcttgaaacaatgtctcatgaagtgcttgcagagaactcctagggacatcaaacctagttattccaaaacatggcccatcatctttaaaaacatttcttgtgatatgcattgaccaacatctagcaaatagttagtggcatcgagagctacattgaacacttgataaaagctctaagagtatctcacgaagtgcttccacgg

SEQ ID NO: 5159 - DNA, 1225 bp, Zea mays
  Zm_smallRNAprecursor_648
tgacattctagtgatttgagccctgttctagtgtgctagtctttttgagctcaagtcttggtcttgtgtgtgcgtagttgctgtgatctttgtgttttgtgtgagttgctcatcccttccttactccgtgattctttgtgaacatcaaaagtgtaagggcgagaggctccaagttgtggagattccttgcgaacgggataagaaaagaaaagcaaaacaccatggtattcaagttgatcattggatcacttgagaggagttgagtgcaactctcgtccgttgggacgccacaacgtggagtaggcaagttttgtacttggccgaaccatgggataaaccactgtgtcatctctgtgttgatctctttgtggttatcgtattgtgcaagttcttctctctagccacttggtgattattgtgttaacacttaaccaagttttgtggcttaagttttaagttttacaggatcacctattcacccccctctaggtgctctcaaagagttcccccaaacacttcacatgcacctaatcttgaaatgtgttatttgaatggtgcctcatgtgaagtgcttgaagggaactcatagtaacacccgacattgttcaaagttgtatcgcccatggtatccatatggccatcatatattattataacaaaatgcttcatgataccaagagttcccccaaacacttcacaactggcctttattaagccaaggtatcgtgaagtgcttgtagggaactcctagtaacacaaaacgttgtctggccttcaactcatatcacatggcacatgaccaacatctagcacatgcaaatgatttcaaacaccaagagttcccaaacacttggcaaaacctcttgaaacaatgtctcatgaagtgcttgcagagaactcctagggacatcaaacctagttattccaaaacatggcccatcatctttaaaaacatttcttgtgatatgcattgaccaacatctagcaaatagttagtggcatcgagagctacattgaacacttgataaaagctctaagagtatctcacgaagtgcttccacggaactcctaagaacaccaaactttggttattgtcttcaaatcatttcatgtggcacgtgcttggctaacctttgtcaaatggttaatgccatcgagagagccatatatatgaataaacatatctagagctcacaaagcacatgcatatatggaacttggaaac

SEQ ID NO: 5160 - DNA, 1116 bp, Zea mays
  Zm_smallRNAprecursor_649
cttgtgtgtgcgtagttgctgtgatctttgtgttttgtgtgagttgctcatcccttccttactccgtgattctttgtgaacatcaaaagtgtaagggcgagaggctccaagttgtggagattccttgcgaacgggataagaaaagaaaagcaaaacaccatggtattcaagttgatcattggatcacttgagaggagttgagtgcaactctcgtccgttgggacgccacaacgtggagtaggcaagttttgtacttggccgaaccatgggataaaccactgtgtcatctctgtgttgatctctttgtggttatcgtattgtgcaagttcttctctctagccacttggtgattattgtgttaacacttaaccaagttttgtggcttaagttttaagttttacaggatcacctattcacccccctctaggtgctctcaaagagttcccccaaacacttcacatgcacctaatcttgaaatgtgttatttgaatggtgcctcatgtgaagtgcttgaagggaactcatagtaacacccgacattgttcaaagttgtatcgcccatggtatccatatggccatcatatattattataacaaaatgcttcatgataccaagagttcccccaaacacttcacaactggcctttattaagccaaggtatcgtgaagtgcttgtagggaactcctagtaacacaaaacgttgtctggccttcaactcatatcacatggcacatgaccaacatctagcacatgcaaatgatttcaaacaccaagagttcccaaacacttggcaaaacctcttgaaacaatgtctcatgaagtgcttgcagagaactcctagggacatcaaacctagttattccaaaacatggcccatcatctttaaaaacatttcttgtgatatgcattgaccaacatctagcaaatagttagtggcatcgagagctacattgaacacttgataaaagctctaagagtatctcacgaagtgcttccacggaactcctaagaacaccaaactttggttattgtcttcaaatcatttcatgtggcacgtgcttggctaacctttgtcaaatggttaatgccatcgagagagccatatatatgaataa

SEQ ID NO: 5161 - DNA, 1048 bp, Zea mays
  Zm_smallRNAprecursor_650
ggagattccttgcgaacgggataagaaaagaaaagcaaaacaccatggtattcaagttgatcattggatcacttgagaggagttgagtgcaactctcgtccgttgggacgccacaacgtggagtaggcaagttttgtacttggccgaaccatgggataaaccactgtgtcatctctgtgttgatctctttgtggttatcgtattgtgcaagttcttctctctagccacttggtgattattgtgttaacacttaaccaagttttgtggcttaagttttaagttttacaggatcacctattcacccccctctaggtgctctcaaagagttcccccaaacacttcacatgcacctaatcttgaaatgtgttatttgaatggtgcctcatgtgaagtgcttgaagggaactcatagtaacacccgacattgttcaaagttgtatcgcccatggtatccatatggccatcatatattattataacaaaatgcttcatgataccaagagttcccccaaacacttcacaactggcctttattaagccaaggtatcgtgaagtgcttgtagggaactcctagtaacacaaaacgttgtctggccttcaactcatatcacatggcacatgaccaacatctagcacatgcaaatgatttcaaacaccaagagttcccaaacacttggcaaaacctcttgaaacaatgtctcatgaagtgcttgcagagaactcctagggacatcaaacctagttattccaaaacatggcccatcatctttaaaaacatttcttgtgatatgcattgaccaacatctagcaaatagttagtggcatcgagagctacattgaacacttgataaaagctctaagagtatctcacgaagtgcttccacggaactcctaagaacaccaaactttggttattgtcttcaaatcatttcatgtggcacgtgcttggctaacctttgtcaaatggttaatgccatcgagagagccatatatatgaataaacatatctagagctcacaaagcacatgcatatatggaacttggaaac

SEQ ID NO: 5162 - DNA, 1063 bp, Zea mays
  Zm_smallRNAprecursor_651
aatgatttcaaacaccaagagttcccaaacacttggcaaaacctcttgaaacaatgtctcatgaagtgcttgcagagaactcctagggacatcaaacctagttattccaaaacatggcccatcatctttaaaaacatttcttgtgatatgcattgaccaacatctagcaaatagttagtggcatcgagagctacattgaacacttgataaaagctctaagagtatctcacgaagtgcttccacggaactcctaagaacaccaaactttggttattgtcttcaaatcatttcatgtggcacgtgcttggctaacctttgtcaaatggttaatgccatcgagagagccatatatatgaataaacatatctagagctcacaaagcacatgcatatatggaacttggaaaccggaaccatgattcaaagagttagggtcttgaatacttacatgagtgttgagtatcaccaactttgaggcgtgtatggatgttgtgccaccaagagttcccccaaacacttcacatgcacctaatcttgaaatgtgttatttgaatggtgcctcatgtgaagtgcttgaagggaactcatggtaacaccagacattgttcaaagttgtatcgcccatggtatccatatggccatcatatattattataactaaatgcttcatgataccaagagttcccccaaacacttcacaactggcctttaatttattgagccaaggtattgtgaagtgcttgtagggaactcctagtaacacaaaacgttgcctggccttcaactcatatcacatggcacatgaccaacatctagcacatgcaaacgatttcaaacaccaagagttctcaaacacttgacaaaacctcttgaaacaatgcctcgtgaagtgcttgcagagaactcctagggacatcaaacctagctattccaaaacatggcccgtcatctttaaaatcatttcttgtggcacgcactcaaccaacatctagcaaataaacacttcacaaaagctctaaaaaagagtctcgtggagtgaactcctgagaacaccaaactttgat

SEQ ID NO: 5163 - DNA, 1230 bp, Zea mays
  Zm_smallRNAprecursor_652
aatgatttcaaacaccaagagttcccaaacacttggcaaaacctcttgaaacaatgtctcatgaagtgcttgcagagaactcctagggacatcaaacctagttattccaaaacatggcccatcatctttaaaaacatttcttgtgatatgcattgaccaacatctagcaaatagttagtggcatcgagagctacattgaacacttgataaaagctctaagagtatctcacgaagtgcttccacggaactcctaagaacaccaaactttggttattgtcttcaaatcatttcatgtggcacgtgcttggctaacctttgtcaaatggttaatgccatcgagagagccatatatatgaataaacatatctagagctcacaaagcacatgcatatatggaacttggaaaccggaaccatgattcaaagagttagggtcttgaatacttacatgagtgttgagtatcaccaactttgaggcgtgtatggatgttgtgccaccaagagttcccccaaacacttcacatgcacctaatcttgaaatgtgttatttgaatggtgcctcatgtgaagtgcttgaagggaactcatggtaacaccagacattgttcaaagttgtatcgcccatggtatccatatggccatcatatattattataactaaatgcttcatgataccaagagttcccccaaacacttcacaactggcctttaatttattgagccaaggtattgtgaagtgcttgtagggaactcctagtaacacaaaacgttgcctggccttcaactcatatcacatggcacatgaccaacatctagcacatgcaaacgatttcaaacaccaagagttctcaaacacttgacaaaacctcttgaaacaatgcctcgtgaagtgcttgcagagaactcctagggacatcaaacctagctattccaaaacatggcccgtcatctttaaaatcatttcttgtggcacgcactcaaccaacatctagcaaataaacacttcacaaaagctctaaaaaagagtctcgtggagtgaactcctgagaacaccaaactttgattggctaacctcttccaaatgcatggttagtggcatcgagagtccccaccccttccccctccagccacttaaaaaaaaactctcaaaacagtttcttgtaaagtgctcctagagaactcctggccggggacaccaaacctaattgtttcctccactatcttatatcat

SEQ ID NO: 5164 - DNA, 1116 bp, Zea mays
  Zm_smallRNAprecursor_653
gaagtgcttgcagagaactcctagggacatcaaacctagttattccaaaacatggcccatcatctttaaaaacatttcttgtgatatgcattgaccaacatctagcaaatagttagtggcatcgagagctacattgaacacttgataaaagctctaagagtatctcacgaagtgcttccacggaactcctaagaacaccaaactttggttattgtcttcaaatcatttcatgtggcacgtgcttggctaacctttgtcaaatggttaatgccatcgagagagccatatatatgaataaacatatctagagctcacaaagcacatgcatatatggaacttggaaaccggaaccatgattcaaagagttagggtcttgaatacttacatgagtgttgagtatcaccaactttgaggcgtgtatggatgttgtgccaccaagagttcccccaaacacttcacatgcacctaatcttgaaatgtgttatttgaatggtgcctcatgtgaagtgcttgaagggaactcatggtaacaccagacattgttcaaagttgtatcgcccatggtatccatatggccatcatatattattataactaaatgcttcatgataccaagagttcccccaaacacttcacaactggcctttaatttattgagccaaggtattgtgaagtgcttgtagggaactcctagtaacacaaaacgttgcctggccttcaactcatatcacatggcacatgaccaacatctagcacatgcaaacgatttcaaacaccaagagttctcaaacacttgacaaaacctcttgaaacaatgcctcgtgaagtgcttgcagagaactcctagggacatcaaacctagctattccaaaacatggcccgtcatctttaaaatcatttcttgtggcacgcactcaaccaacatctagcaaataaacacttcacaaaagctctaaaaaagagtctcgtggagtgaactcctgagaacaccaaactttgattggctaacctcttccaaatgcatggttagtggcatcgagagtccccaccccttccccctccagccacttaaaaaaaaactctcaaaacagtttcttgtaaagtgctcctagagaa

SEQ ID NO: 5165 - DNA, 1053 bp, Zea mays
  Zm_smallRNAprecursor_654
gtggcatcgagagctacattgaacacttgataaaagctctaagagtatctcacgaagtgcttccacggaactcctaagaacaccaaactttggttattgtcttcaaatcatttcatgtggcacgtgcttggctaacctttgtcaaatggttaatgccatcgagagagccatatatatgaataaacatatctagagctcacaaagcacatgcatatatggaacttggaaaccggaaccatgattcaaagagttagggtcttgaatacttacatgagtgttgagtatcaccaactttgaggcgtgtatggatgttgtgccaccaagagttcccccaaacacttcacatgcacctaatcttgaaatgtgttatttgaatggtgcctcatgtgaagtgcttgaagggaactcatggtaacaccagacattgttcaaagttgtatcgcccatggtatccatatggccatcatatattattataactaaatgcttcatgataccaagagttcccccaaacacttcacaactggcctttaatttattgagccaaggtattgtgaagtgcttgtagggaactcctagtaacacaaaacgttgcctggccttcaactcatatcacatggcacatgaccaacatctagcacatgcaaacgatttcaaacaccaagagttctcaaacacttgacaaaacctcttgaaacaatgcctcgtgaagtgcttgcagagaactcctagggacatcaaacctagctattccaaaacatggcccgtcatctttaaaatcatttcttgtggcacgcactcaaccaacatctagcaaataaacacttcacaaaagctctaaaaaagagtctcgtggagtgaactcctgagaacaccaaactttgattggctaacctcttccaaatgcatggttagtggcatcgagagtccccaccccttccccctccagccacttaaaaaaaaactctcaaaacagtttcttgtaaagtgctcctagagaactcctggccggggacaccaaacctaattgtttcctccactatcttatatcat

SEQ ID NO: 5166 - DNA, 1154 bp, Zea mays
  Zm_smallRNAprecursor_655
ctttctttttgtgggggactataaacaccctgatttccgggctgcactaaatttttaggtgacattaaagaaggcattccagagctattgtggtttgtaccagactcgtacgtgtctggcagagtggcacacgccaatccacccagaaaaaaacatgttaggccttatcatttgtaccggattgataaatcgaaacgatttctaaccggattgattctctaatttatataaactttaattagttgaaacgattacagatgcaatccgatacaaacgaataagaccttagagctgttcagttgtttcagaatgcaaccaggatccattccaatttatggatacttatattaattaggcaaacaatccgatctagaatccttagggccaccgttccgtaggaacgcaacaggctcttatgaacagaaatgcactcttcattttatttccatgccagcacagtagcgtagggattcagagttttgaggaactgaaatcaagtggcagaacttttcatcatcatcatcgtggtgctatactcctatgttacagtgggtcggcaaggcaaccagtcatggatcagatttgaagccgagctcggtacggttgcaggaagccgaaactagcagaggccctagctagttagggccccagcagctgaggtacatgacggtcctcatcccctcctccgcggcggccttgtccgcggcgggcggcgccagcttcctggcctgcgcgaagctgggagcgttggccttggcggcgcggtggacggagcgcagcgcgtagttccagcggcacaggcccgcctggtccttgagcgcctccacggccccgacgctcatcgccaccatccacgacgccttcgctgcagccgccatctgtgtctcctgtttgttctttctttctcgggctttttgcttggcgattggttctcgctgtggttactcgagctggggagagtgttgtgctgaggtgcagagaagaggtggtgggtgtgggttaatatactcgtgtagtgccagtggtgggctggtggccgggagaggcgggcgaaacaggtggccgcggacgttggttttccaggaataccgggggctcaccgctccggttggtagcagactagaggtagctagcgcaggtcgatctccgaccag

SEQ ID NO: 5167 - DNA, 1134 bp, Zea mays
  Zm_smallRNAprecursor_656
taaggggtatatataataattagttgatttattgtaaacctcttagctaattttagctactagctattaattttagaggtttagaataagactttatactttctgaaactttaacttttttcctagacataacactaattattaatcaagacataaaaggtgtataaaattgacgactaattattaatcaagacataaaaggtgtataaaattgacggggcgatgacccactttgccccctatagatccgccttctgtctgtcatatctgtgtgatgctgaatatgcacattgtgaaccaaacttataagatactgtattttgagcataaacttcatctaaaaggacagggaatgcaacgccggtatgcgatgaaccctccctcctgtctacttggaatttggaatcgtggactcaaagctctcagatttcacgccagtacattgtacaggatcagaagtcagtcgatcgtacacagtccaaaacgcccgaacggaagtggcagaacttttcatcatcatcatcatccgatcatcgtcgtatatttacaataatcagctcgcgagctcgcggtcgctgaagaaggccaaagaccagctaagatacgaaaggctagttaattgggtccccagcagctgaggtacatgacggtcctcaagccctcctccgcggcggccttgtcctgccgccccttctccgccgccggggccaggtccttgtcccgctgcgcggcgaagcttctgctgccgctgcgcacgttggccttggcggtccggtagacggaccgcagcgcgtagttccagcggcagaggcctccctggtccttgagcgcttccacggcgcccacgctcatggccaccatccacgacgacgccttcgtcgctgctgctgctgccatctcctcccggtgttggtcttctcctcctctctcgagagaaaactttcgcttgttgtttcttgtttgtagcgagtgaggttgcttggttggtggtgctgtgttgaggtggagaggcgagccggagcgggtgggttatatgtaccggcgggcggggacggggacggggacggggacgggaacggggcggcggaaattggtgggcgcggacccctggttttcctggataccgggggctct

SEQ ID NO: 5168 - DNA, 1097 bp, Zea mays
  Zm_smallRNAprecursor_657
ttttatttgttctatccggtcacttctcctctactgggcgcgcaacatttttcttggatgcttctgctcagcccgcgcgccatgctgcagcctttttctctctgttcggtcacttctcctcacagccatgcatgcgtgtcaggggcgtcagcgtttttttcgtccagtcgcttccagcagctgcgcgcacattttttttacagccacactctactgccgtgtgcgcagccttttgttcttgtgaccagtcgctgtgtcacccgcgcagcaaggaaacttttttttttgtcacttccgtgcagcagtgtgagggatacagggcgcgcagaacttttcttttgcgcagttctttttcttttgtcgtctggtctcatctgcgcagacacttggttttgtttttttcgcatggaatctctgcagtacacttttttagaatcctgcgtcagaaatttgaattttttggcatcttccctctgctgtttctggctctctggccacactggtcagaaccagctgaactggcccatgggggcggttgaaccggtcctgaggaccagctcaactgcctatatatatttgacactccccttctcttctcccacttcattcactctcgccttagtcgcttcacaacctttagagcctctctttcacacacctcaaccggttcacagtttcaccacctttttaatcatggtgcgtcgtcgcaacccttcagtgattgagtttagcagcgactcggacgagattcaggaggaatctcccgtcccctctcctccgcctcgtcgctccctctctaagagaggacgtggctctggtcggatggatggcgagggctcttccatgccctcgcagccgacttgcgggagacgccaaaaggttggcgcctctcgtcctcgtcatagcacgtcttcctctgggtatgctccctgccaggaggaggatggggctttcgacgacttcgtcgaccttccggcgcctgatgctctctacgtcaccggactgcacatgcatccggcgaacgtcagccgcggtccgcatgaatctcccgtcgacttcactctgaagggaatagacacccttcagcgcctgaggtt

SEQ ID NO: 5169 - DNA, 1048 bp, Zea mays
  Zm_smallRNAprecursor_658
gtggttacaagaaacaaagcacggttggttgcccaaggctacactcaagtggaaggacttgattttggtgaaacctatgcgccggtagcaaggttagagtcaattagaatattaattgcctatgctactaaccatgattttaagttatatcaaatggatgtcaagagcgcatttctaaatggaccactacaagagagggtctatgtggagcaaccaccgggctttgaagatccaaagaagccaaatcatgtttacctacttcacaaggcactctacgggcttaaacaagcccctagagcttggtatgattgccttaaggatttcttgcttaaaaatggttttgaaataggaaaagtacactctactttattcactcgcaaagttgacaatcaattatttgtttgtcaaatatatgtcgacgacattatatctggcagtactgatgaaactttttgtgaagaatttagtagggttatgacaaataggtttgagatgtccatgatgggtgagctcaagtacttcatgggttttcaagttaaacaactcaaggaaggaacctttctgtgccaaaccaagtacacacaagacatgctcaaaaagtttggcatggaaaaggcaaagcacgccaagacactaatggcttcaagtggtcatctcgacttaaatgaagaaggtaaatctgtagatcaaaagctttatagatcaatgataggatatctactatatttgtgtgcatctaggccagacatcatgcttagtgtgtgcatgtgtgcccgttttcaagctaacccaaaagagtgtcacttagtggtcgttaagagaattttgagatatctagttcacacccaaaatctaggtctctggtatcctaagggctcctttttcgatttatttggctattctgattcagactatgccggttgtaaagtagatcgaaaaagcacctcggggacttgccaattccttgggcggtccctggtgtcttggagctctaagaagcaaaactgtgttgcactttccacttccgaggccgaatacatagctgctg

SEQ ID NO: 5170 - DNA, 1040 bp, Zea mays
  Zm_smallRNAprecursor_659
ggattgcggcatttttctctatgtgccgaaacatttctgctgatgtacatgagctggcaaggcgtcaacgggagactaacgacagtcttcgtcatcaagcttccactatgggtatgccctttgcccctcgctcgcctgacgtgcctctccatcctcctcccccggagatcaatgagtggcaccagcaggcctacagggtgccatttatgtcagcagacgacgaagaagaagaagcctacgttgatgatcgcgagcagtttgccccgcctccctaccatggggatccgggtcaatcatcctctcaccctccgcctccctactcgggtccgtgacccattcctggtgaccctaggccatccggctctggttaccatcaccaccctccacctcctcctgatcatcgtacatcttcggcatctgttttttctgcggctgatgagccacctagggactccacattcgaggaagacgtgatgaggaccctcttccttgactacacttcataccctccatcatatcctccgtcctatcctcctcctggaggatattgattcatgtatccatgtctctctcttcgtttttggtacttgttgccaaaaagggggagaaaatccaaaatttctagtcattctgttcgtggttctttcggttatgtatttcttttggattatttttgttttggccactgttgtggcttgtatcctcttatcattgtatgaaataaaactgctgggttattattcaaagtgatatgatggtcttctagccatcatcttttgtcccatcagtttgtaatgattgctttgctatgaagtaaaaatgatgtgtatttagagatagtcatgtgcatcacagctcctgttatgacactcttgcacccctcggatggttgtattcagtatgatttttgtcactatctctaaatgtgttgctcacatgacatattatgtcaaaacattggattcacaatcgtgcacacatttagggggagccatctacatacaatcattcaaaagaaattttctattgcaaatgtttat

SEQ ID NO: 5171 - DNA, 1064 bp, Zea mays
  Zm_smallRNAprecursor_660
aaaccaaaatgtcaatagctctgccatcgtcattatcggattcacataacatatacagtatagcccttttaccataagccgcagcccgcagggttttcaagcttctttccctagatgaatatgtcttcactgcacatgatgcgaagttcggttggcttcggataatcagcaagcgtatttacacaacaatacctgctgtgagtagtagatggatataaacatgggcgctacctgttgcagtgctgctagaaatcctagtttacaagagcatgcaatgctagcttagcttaatgaagtgttatggctccacgatgggatcagtcgcttttactagcagacagagatcgaataaacacagatcagaaccaaaatatcagaaagatcagcctaaccttgttctactggcatggcacgggactaattaagaaccattcagcatgatcagaacccttaccgagcccgtaacgtctctggaccttccttgggaatgaagagtacatgagtgatattggttcggctcacatcacatccaaatccaacggcaagactcgatcgaagaaggacatgagccgaaacaataccacgccatgtcgtctccttcctcccgcatcaccctcccccgcccggccgccatagctagcatagagctctgggactgtgttctctgatgatgcgtgcctaaagcagctatttaatagggactgggaggcgcgggcgctggccctggccctggtgaagccacgttattagcatcggtccgcatgcacccttaatttcctttctactaccggtccgcatccagacgtcgttggagcggttgttctccgatagtacactgtatttggggtggagagagggataggggttatggtgttgtccatattaaggattttccctttattaaataaaaagagagagaagggggccagtcgggtgggccgctacaaggcccatctgaccgagcagcccaccggctggcaggcggctaaggcatgaagagaccacggcttggagatcgtggaggacgagcagagcaaaaatttgcttcctggcggcgctctgca

SEQ ID NO: 5172 - DNA, 1142 bp, Zea mays
  Zm_smallRNAprecursor_661
ggcatgcccatggaggaagcttgacgacgaagattgtcgtcagtctcccgctgacgccgtgccacctcatggacatcagcagcaacgttgcggcacatggagaaaaatgccgcaaacccatggaccaagcgagcacccatcccacggccacgacctcgaccacgaccacgagcacgtggcatgggagagccgcggccaggagagggacgcgaggcagcagcgggggggggggggaagaggaaggatggtggggaggctggcgaggtggctcagaggaggaggcagggcctccagaccgtgagggaacccgcttcgtacgagcagctgggttggaggaatcaacccagtagggtacgtagcgggagtgtttgacgggtttttcgaagtgggtctgggtgaccacttcgatcatcttcatgataaagggtgcatgaagacaccctctgtgaggagaccaggaagcacggacgatctcctcccagatcatgtcaaacacattgatgcgggcgagactgtttggagcaaggaggaggaggaggactcgactctccccaaggacgttcatttgattaccgccctttgggagaacggtcatccgggacaaggaattaaggtacctgtagtacctatgcatgttagcggttgtccagaactcccgctcagtagagacatgaatgaattccgtctcttcccgcatgggcagccgaatgccatgcactcgcatgttgctgccctgaatgtctgtatcagagaagcccagaatatgggcaaaacgacgataactgactttgtgccagttaccctggatgaagaaatacatgactgggtaatcatacccatcagcttcctcatctactttctttatccagagggtggcataaaactgagctaccacctcatcgttccaggggtattccatggtcataatgtttcggaacccctttctctctaagtgaacgagcgctgacgacatgtcagcatctcccatattctcacaaccctcccagtcaataaatctatgtcggacgactgggtgtttcttggaaagaatgacagaattgtagaagtcagcctggaaaagattccagaaccgagggtcctgaacaccaggatgacgaggagtgagagtagggttggtaaac

SEQ ID NO: 5173 - DNA, 1058 bp, Zea mays
  Zm_smallRNAprecursor_662
aacgttgcggcacatggagaaaaatgccgcaaacccatggaccaagcgagcacccatcccacggccacgacctcgaccacgaccacgagcacgtggcatgggagagccgcggccaggagagggacgcgaggcagcagcgggggggggggggaagaggaaggatggtggggaggctggcgaggtggctcagaggaggaggcagggcctccagaccgtgagggaacccgcttcgtacgagcagctgggttggaggaatcaacccagtagggtacgtagcgggagtgtttgacgggtttttcgaagtgggtctgggtgaccacttcgatcatcttcatgataaagggtgcatgaagacaccctctgtgaggagaccaggaagcacggacgatctcctcccagatcatgtcaaacacattgatgcgggcgagactgtttggagcaaggaggaggaggaggactcgactctccccaaggacgttcatttgattaccgccctttgggagaacggtcatccgggacaaggaattaaggtacctgtagtacctatgcatgttagcggttgtccagaactcccgctcagtagagacatgaatgaattccgtctcttcccgcatgggcagccgaatgccatgcactcgcatgttgctgccctgaatgtctgtatcagagaagcccagaatatgggcaaaacgacgataactgactttgtgccagttaccctggatgaagaaatacatgactgggtaatcatacccatcagcttcctcatctactttctttatccagagggtggcataaaactgagctaccacctcatcgttccaggggtattccatggtcataatgtttcggaacccctttctctctaagtgaacgagcgctgacgacatgtcagcatctcccatattctcacaaccctcccagtcaataaatctatgtcggacgactgggtgtttcttggaaagaatgacagaattgtagaagtcagcctggaaaagattccagaaccgagggtcctgaacaccaggatgacgaggagtgagagtagggttggtaaa

SEQ ID NO: 5174 - DNA, 1057 bp, Zea mays
  Zm_smallRNAprecursor_663
acgttgcggcacatggagaaaaatgccgcaaacccatggaccaagcgagcacccatcccacggccacgacctcgaccacgaccacgagcacgtggcatgggagagccgcggccaggagagggacgcgaggcagcagcgggggggggggggaagaggaaggatggtggggaggctggcgaggtggctcagaggaggaggcagggcctccagaccgtgagggaacccgcttcgtacgagcagctgggttggaggaatcaacccagtagggtacgtagcgggagtgtttgacgggtttttcgaagtgggtctgggtgaccacttcgatcatcttcatgataaagggtgcatgaagacaccctctgtgaggagaccaggaagcacggacgatctcctcccagatcatgtcaaacacattgatgcgggcgagactgtttggagcaaggaggaggaggaggactcgactctccccaaggacgttcatttgattaccgccctttgggagaacggtcatccgggacaaggaattaaggtacctgtagtacctatgcatgttagcggttgtccagaactcccgctcagtagagacatgaatgaattccgtctcttcccgcatgggcagccgaatgccatgcactcgcatgttgctgccctgaatgtctgtatcagagaagcccagaatatgggcaaaacgacgataactgactttgtgccagttaccctggatgaagaaatacatgactgggtaatcatacccatcagcttcctcatctactttctttatccagagggtggcataaaactgagctaccacctcatcgttccaggggtattccatggtcataatgtttcggaacccctttctctctaagtgaacgagcgctgacgacatgtcagcatctcccatattctcacaaccctcccagtcaataaatctatgtcggacgactgggtgtttcttggaaagaatgacagaattgtagaagtcagcctggaaaagattccagaaccgagggtcctgaacaccaggatgacgaggagtgagagtagggttggtaaa

SEQ ID NO: 5175 - DNA, 1058 bp, Zea mays
  Zm_smallRNAprecursor_664
acgttgcggcacatggagaaaaatgccgcaaacccatggaccaagcgagcacccatcccacggccacgacctcgaccacgaccacgagcacgtggcatgggagagccgcggccaggagagggacgcgaggcagcagcgggggggggggggaagaggaaggatggtggggaggctggcgaggtggctcagaggaggaggcagggcctccagaccgtgagggaacccgcttcgtacgagcagctgggttggaggaatcaacccagtagggtacgtagcgggagtgtttgacgggtttttcgaagtgggtctgggtgaccacttcgatcatcttcatgataaagggtgcatgaagacaccctctgtgaggagaccaggaagcacggacgatctcctcccagatcatgtcaaacacattgatgcgggcgagactgtttggagcaaggaggaggaggaggactcgactctccccaaggacgttcatttgattaccgccctttgggagaacggtcatccgggacaaggaattaaggtacctgtagtacctatgcatgttagcggttgtccagaactcccgctcagtagagacatgaatgaattccgtctcttcccgcatgggcagccgaatgccatgcactcgcatgttgctgccctgaatgtctgtatcagagaagcccagaatatgggcaaaacgacgataactgactttgtgccagttaccctggatgaagaaatacatgactgggtaatcatacccatcagcttcctcatctactttctttatccagagggtggcataaaactgagctaccacctcatcgttccaggggtattccatggtcataatgtttcggaacccctttctctctaagtgaacgagcgctgacgacatgtcagcatctcccatattctcacaaccctcccagtcaataaatctatgtcggacgactgggtgtttcttggaaagaatgacagaattgtagaagtcagcctggaaaagattccagaaccgagggtcctgaacaccaggatgacgaggagtgagagtagggttggtaaac

SEQ ID NO: 5176 - DNA, 1171 bp, Zea mays
  Zm_smallRNAprecursor_665
cgcatgggcagccgaatgccatgcactcgcatgttgctgccctgaatgtctgtatcagagaagcccagaatatgggcaaaacgacgataactgactttgtgccagttaccctggatgaagaaatacatgactgggtaatcatacccatcagcttcctcatctactttctttatccagagggtggcataaaactgagctaccacctcatcgttccaggggtattccatggtcataatgtttcggaacccctttctctctaagtgaacgagcgctgacgacatgtcagcatctcccatattctcacaaccctcccagtcaataaatctatgtcggacgactgggtgtttcttggaaagaatgacagaattgtagaagtcagcctggaaaagattccagaaccgagggtcctgaacaccaggatgacgaggagtgagagtagggttggtaaacctcagacgctgaagggtttctattcccttctgagtgaagtcgacgggagattcatgcggaccgcggctgacgttcgccggatgcatgtgcagtccggtgacgtagagagcatcaggcgccggaaggtcgacgaagtcgtcgaaagccccatcctcctcttggcagggagcataccctgaggaagacgtgctacgacgaggacgagaggcgccaaccttttggcgtctcccgcgagtcggctgtgagggcatggaagagccctcgccagccatccgaccagagccacgtcctctcttagagagggagcgacgaggcggaggagaggggacgggagattcctcctgaatctcgtcggagtcgctgctgaactcgaccacagaggggttgcgacgacgcaccatgatttgaaaaggtggtgaaactgtgaagcggatgaagtgtgtgaaggagaggctctaaagattgtgaagcgaccaaggcgagagtgaatgaagtgggagaagagaaggagagagtgaagtatatataggcagttgagctggtcctcaggaccagttcaaccgcccccatgggccagctcagctggttctgaccagtgtggtcagagaaccagaaacaacagagagaagaaagaaaaaaattcaaatatgcgcacagctgctggaagtgactggacaggaaaaaattttgcatgcgcacacctgctgatgaccaaataaaa

SEQ ID NO: 5177 - DNA, 1094 bp, Zea mays
  Zm_smallRNAprecursor_666
tgtagaggacacatcctaacaatctcctctttgttctctacatacctcacactcaaacttttattaaatccatcctttaacaagtttacacatagagaccaatgcgtgacaatgatctattaagtatcatcgcactcattgattacaacatgctccactgcttcaaaacgaaagattttattatgttgcaatctgtagcccctgtgattcaggatcataggtactcccttaaacttgtttttctcatactgattcttgggacactgatattccccaaacttatcacccttgactattggaccatgacaggcattacacttgtgcatattatacctctttagtacattttctatatatgacttctgtaagagtcctaatactcccttttgtctgtccctgttaatttctattccaagaacataagaggcttctcctatgtctttcatatcaaaattcgaggaaagaaacatttttgtttccgccagtagatccttatcactactagctaagagtatgtcatcgacatacagaacaaggaagatatactttcctttcctaaattttgcataaatgcaattgtcatccttgttttcctcgaaaccaaactttcttatagtctgatcaaacttgatgtaccactgtctggaggcctgttttaatccataaatggacctcctcaagtgacatcccatgtgttttttaccgctcacaacaaaactctttggttgtgccatgaacatgttttctactaactctccatttaagaatgttgtttttacatccatctgatggagctctagatcaaaatgagcaactagtgtcatgatgatcctgaatgaatcttttgttaagacaagtgagaaggtttcatggtagtcaatgtcttctctctctgtgaaccctttggccacaagtctagccttgtattttactacgttccctctggagtcactctttgtcttgtagacccatttacagcctactgttttggctcattggggaatgacttctaagtcccaaactttgttctttctcatggattctaattcatcttccatggcggataaccatttggatgaatttgcgcttctcat

SEQ ID NO: 5178 - DNA, 1160 bp, Zea mays
  Zm_smallRNAprecursor_667
ggagaacagagaggaatgaagctagggtttttccctctgcccgaaatctccgcttcttatagccagcgcacaaatcttgaaccattcgatcgtttcttggacggctcagatcgctgcacaggggaggcagcgcccgcgtgggccaaaagcacagcctaggcccaggttgtggcccgggcacgcgtccccccctctcctgaccgagttgggccaagtgagtcgagccagaggtcgggcaggccgccagcgccagctgggccgccagccagactaggcgcgcgcgattagccagattgcaccaatgttgaatatttaattcatacatgttttatgattcagtatttatttcagatgtcctaaatattttctgttttaatttttgcaaaggtgctcatactgctatgctgattagccagattgcacagatcaaaccgctagatggtagtaattaccattcttggcgagaggatattgacatgataaccacagttggtgagatatattacgcactacggtttgataaaccagtagagcccacagggggcactcccaactataaccacatgcggatgcaatacagcatcgacaaggtcaagtgggaaaggtcaaataacaagtgtatgattattcttaagaggagcatcaaggagccacttaagagttccataccagagtgcgagactgacaggtagtaccttgagagggtagcctctcatcataaagggtcatctaaggcttatgcttgctctctaatgacagaatttgtcaatgcaaaatacgatggaaatggtgtcagactatttattcagaaaatgatattcatcgtggctaagataaacaagtaccgcgggtctcctttacacgaggaatttgtagtgtttatgataatgaagtcactacccaaagagtttgagacttttcacatatagtataacaccagtgtcactgataagtggaacatagaccaactcttgacatagtgtgtccaggaggaagaggttaaagcagactggagactctgtcaacctcgtaaaagccaatatccctagacagaataagaactcaaaaaagaagttaaagaagaagggtaaacagaataatcaggcttactcaagcaacaataatcagccaagacaaggaggcagttttttagttccccc

SEQ ID NO: 5179 - DNA, 1159 bp, Zea mays
  Zm_smallRNAprecursor_668
cttgaaccattcgatcgtttcttggacggctcagatcgctgcacaggggaggcagcgcccgcgtgggccaaaagcacagcctaggcccaggttgtggcccgggcacgcgtccccccctctcctgaccgagttgggccaagtgagtcgagccagaggtcgggcaggccgccagcgccagctgggccgccagccagactaggcgcgcgcgattagccagattgcaccaatgttgaatatttaattcatacatgttttatgattcagtatttatttcagatgtcctaaatattttctgttttaatttttgcaaaggtgctcatactgctatgctgattagccagattgcacagatcaaaccgctagatggtagtaattaccattcttggcgagaggatattgacatgataaccacagttggtgagatatattacgcactacggtttgataaaccagtagagcccacagggggcactcccaactataaccacatgcggatgcaatacagcatcgacaaggtcaagtgggaaaggtcaaataacaagtgtatgattattcttaagaggagcatcaaggagccacttaagagttccataccagagtgcgagactgacaggtagtaccttgagagggtagcctctcatcataaagggtcatctaaggcttatgcttgctctctaatgacagaatttgtcaatgcaaaatacgatggaaatggtgtcagactatttattcagaaaatgatattcatcgtggctaagataaacaagtaccgcgggtctcctttacacgaggaatttgtagtgtttatgataatgaagtcactacccaaagagtttgagacttttcacatatagtataacaccagtgtcactgataagtggaacatagaccaactcttgacatagtgtgtccaggaggaagaggttaaagcagactggagactctgtcaacctcgtaaaagccaatatccctagacagaataagaactcaaaaaagaagttaaagaagaagggtaaacagaataatcaggcttactcaagcaacaataatcagccaagacaaggaggcagttttttagttccccctgatacatgcctctactgcaaaaagacaggtcattacaagagaaagtgccctgaattcctgcagtttctactag

SEQ ID NO: 5180 - DNA, 1158 bp, Zea mays
  Zm_smallRNAprecursor_669
ggcacgcgtccccccctctcctgaccgagttgggccaagtgagtcgagccagaggtcgggcaggccgccagcgccagctgggccgccagccagactaggcgcgcgcgattagccagattgcaccaatgttgaatatttaattcatacatgttttatgattcagtatttatttcagatgtcctaaatattttctgttttaatttttgcaaaggtgctcatactgctatgctgattagccagattgcacagatcaaaccgctagatggtagtaattaccattcttggcgagaggatattgacatgataaccacagttggtgagatatattacgcactacggtttgataaaccagtagagcccacagggggcactcccaactataaccacatgcggatgcaatacagcatcgacaaggtcaagtgggaaaggtcaaataacaagtgtatgattattcttaagaggagcatcaaggagccacttaagagttccataccagagtgcgagactgacaggtagtaccttgagagggtagcctctcatcataaagggtcatctaaggcttatgcttgctctctaatgacagaatttgtcaatgcaaaatacgatggaaatggtgtcagactatttattcagaaaatgatattcatcgtggctaagataaacaagtaccgcgggtctcctttacacgaggaatttgtagtgtttatgataatgaagtcactacccaaagagtttgagacttttcacatatagtataacaccagtgtcactgataagtggaacatagaccaactcttgacatagtgtgtccaggaggaagaggttaaagcagactggagactctgtcaacctcgtaaaagccaatatccctagacagaataagaactcaaaaaagaagttaaagaagaagggtaaacagaataatcaggcttactcaagcaacaataatcagccaagacaaggaggcagttttttagttccccctgatacatgcctctactgcaaaaagacaggtcattacaagagaaagtgccctgaattcctgcagtttctactagagagcggtaaggaccaagttacatttgtaaatgagtctttatacttagaatattccagttattcttggtggatactggataaacttaggtgcaactgttc

SEQ ID NO: 5181 - DNA, 1083 bp, Zea mays
  Zm_smallRNAprecursor_670
aattagagtggcaaatggagttgaagcagcagtcgagaccattggatatctacatcttaaattacctaatggttttgtactgttgttgagagagatactttatataccttacttgcgaagaaaccttatttcgttttctagattagatgatcaacacattaattgccattttggtgatagacagtgtgtcattcagtttgataataaagatgttggtcttgccatccgacgagatatgctttatttactttcgcaaagtgatgttgttaatgtattagatacaccagaaaacgatccaaccaacaatggcaggaaaagaaaacgaagtgatggagaaatctcatcgaaattatggcactatcgtttgggtcatatttcgagggggagaatagaacgtctcgttagggaacagatcctccatactctagacttcacagacttagagcaatgcagagattgcattaagggtaaatttgcgaagcagattaagaaaaatgttaagcatagtacaagagtgttagaaattattcatacagatatctgtggtccttttccagttaggacagtagatgggtttaactcgttcataaccttcacagatgactactctcgctacagttattttatctcattaaagaaagatcagaagctttagacaagtttaaacagttcaaggctgaagtagaaaaccaacatgatttgaagataaagattgtccaatcagatcatggggggagtactatgggcgtcataccgagtatggccaggtctcaggacctttcgcgaggttcctaagagaaaatggtattgttgctcaatattcaacacccggtgaaccacaacagaatgaggttgccgaaaggcgtaacataacgctaatggatatggtaaggagtatgctaagttactctaacctaccattgggtttatggatggaggctttaaaaaacgctatgcatatactcaacggagttcttagtaaatcagtggctagaacttcatatgagttgtgtactggcagaaaacccacactcaactacttccacatatggggttgtccagtagaagctagaatatttaatc

SEQ ID NO: 5182 - DNA, 1036 bp, Zea mays
  Zm_smallRNAprecursor_671
cattggatatctacatcttaaattacctaatggttttgtactgttgttgagagagatactttatataccttacttgcgaagaaaccttatttcgttttctagattagatgatcaacacattaattgccattttggtgatagacagtgtgtcattcagtttgataataaagatgttggtcttgccatccgacgagatatgctttatttactttcgcaaagtgatgttgttaatgtattagatacaccagaaaacgatccaaccaacaatggcaggaaaagaaaacgaagtgatggagaaatctcatcgaaattatggcactatcgtttgggtcatatttcgagggggagaatagaacgtctcgttagggaacagatcctccatactctagacttcacagacttagagcaatgcagagattgcattaagggtaaatttgcgaagcagattaagaaaaatgttaagcatagtacaagagtgttagaaattattcatacagatatctgtggtccttttccagttaggacagtagatgggtttaactcgttcataaccttcacagatgactactctcgctacagttattttatctcattaaagaaagatcagaagctttagacaagtttaaacagttcaaggctgaagtagaaaaccaacatgatttgaagataaagattgtccaatcagatcatggggggagtactatgggcgtcataccgagtatggccaggtctcaggacctttcgcgaggttcctaagagaaaatggtattgttgctcaatattcaacacccggtgaaccacaacagaatgaggttgccgaaaggcgtaacataacgctaatggatatggtaaggagtatgctaagttactctaacctaccattgggtttatggatggaggctttaaaaaacgctatgcatatactcaacggagttcttagtaaatcagtggctagaacttcatatgagttgtgtactggcagaaaacccacactcaactacttccacatatggggttgtccagtagaagctagaat

SEQ ID NO: 5183 - DNA, 1138 bp, Zea mays
  Zm_smallRNAprecursor_672
cgagggagcatccttgacctgcagaatatcatgttcttagcagtccttttttaagtacacactccttaatcttagtaatattactgattagaaggcctacgagatcgtgtgctatttatacatcttaattctattaatatggatgagtcatgtgctatttgtgatgactcacggggtgataccagatcgtgccactattggagctgctgacaagcatgattttttccacgtgttaatgttgttgtggatgagccttccacttatcaacaaggctctagcattccggaatggcagcttgttatgtctgagaaacttgctgcactggatcgtacatgcacttgggatctgttcttttactgtcacatgtacagagttgttatatgggaaatgtattagtggtcctcgaacttggcatcctatgtcacttagatccttgaactatcaaaatcagaaaaacatgtgttggaacttggcggcccatctaaaaccaggtttgctcaaaccggataccgacgtggcgtgccacgttagactcacttgggtcctagaacttggcattgctgtgtcacttgagtctcttaagttggtataatatgtcatttgggtccccgaactttcattagtgtgttccaacatggcacaccacgttagcatccggtttgagcaaacctgattttttatggttttgcacggccgaaccaagttttaggacctgttttctagtttggggatccaagtgacacaatgtgccaagtttaaggatcgttaatgcattttacttgaaagtttactattggatataacatgattggacaaacccaggagtgtatctatttgttagaaggcaactagcgttttgtcacatgttgtgtctctcaattctaagtgggtattcaaaattaagacaaagtcggatggttctatagagagagagataaggcctatctcgctgccagggtttttcaacaaaccacggtcgcgattatggtgagatttctgcactcattgctcatatgactattcttcgtactttacttgcagtgggtgcttcctcttcttgggccatatgtcatatggatgttaaggatgtgttaatgctcctccaggttatatttgttggcttcgtcatactttatat

SEQ ID NO: 5184 - DNA, 1075 bp, Zea mays
  Zm_smallRNAprecursor_673
aatgatgatagtggacaaaccaatggctattcgactaatgatgatgcctatacaattgatgaggatgagaacagtgaggatgaagaggtgtacatattggttagtggttagtgagattatcagcttgttaatttcatttggcttaggacgatagtaataaggcatgtggagacaacgatctcttcaaacgataattatgcaatagtcgtttgtagagttgtcgacttattcatcgtggatgtgatttctggttagctaatcagatttagttggtgataggaggacattgaggcagtgatgatagacctaggtcttgatggtgatgaacaggacaatgaaatagagagcaatgaagagtatgttgaaaagggttatgcaatcaattctgattatctattgctaaagtatatgcactattgtgcaatgtacatttctactcactacaagaaactaataaatgtccgtgggttaatttaagaacgtgggtaccgacgttcttaattgagttatgttcgtgggttaatttaagaacgtaggtacccacgttcttaaattaaattcgtgggctcgtgctaaaaccgtcgaacttatcgtattaggaacgtgggtacccacgttcttaagttaaattcgtgggccacgtggacaccgtcgaacttaacccaaaacctaaattcttaagttaaatttgtgggtactattatttacttcactaactcctattatacgacattggccacctgatcacattttagttataaagatgcaataactatatcaaagttgttgactctttctttcttgctaatatgatttggatattgatttaggaggatcacgagaataggatggagactcgagtatggaggagaaagtcagagttttatgaatcaatacgacacaaagtagatcaaacacagagaagacacaaatttaacatggaaaacccctccaaagcgaaggagaaaaaccacaagcgctggccagcaacaatatcactatttttcgggtggttacaaatcgcagaagatttacaatgaggtgacgttctgttgcggattacaagtgtatttat

SEQ ID NO: 5185 - DNA, 1071 bp, Zea mays
  Zm_smallRNAprecursor_674
cctggactgctataatttgattgagatggtatagtttttttagataaaagatggacatggtatttgaattattgagatccatttttaacctgatgccttactaaatactgtcaggctgccccaacgtgaacttgtcaaaccttttggagtctgattaaattgatagaaaagaacatcttagtcaaaccttttgaagtctgattaaattgatagaaaagaacaccgagatttatgtctcaaataagcaaatgctataagaatatgcctttcatatgtacgtctatataatactagtggtgagttaggaacaggatgaggatctcctgtcaaaagcccaaaatcttaccagccaaaaatcgaagggacaaatttaatatcgtctacggtgtcaataagttaagattagcttatctccttttgaaactctaaaaacagtgcagagaacaataaagctacccaacttccaaacgccaaaggaccagaattaaatttatcagaattggcaggggccgcgcgaacgcgtaccccctctaccacaaattatgacgtccactctcccacttggggagatggtaagccagcgcacccgccatgtgcaatgcaggccactgacctaggccactgggcttcttgatccctagtcgaccccgtccaggtaagtatggagcaatggagcacggagcgctcatcttatagcgcgagctcgtggcgcgtctgccttcgcctggcgaggtggtgctaaatcctgagaccgaacgaaacgcgttctgcacttgtgcgcgctgctgcttgagttctcgtgggccactgcttgtagtccatggacctttaacctcgagcccaacatattttccttttccgtgtttggaaacaaccggactgcgagctgcaatggactggacccggttaggcgtgaaattagagccttttgagagtgcaattattatccgtgccctataacaatgttttactgttcttcaacagcttcaaatccgaagttcatcccttagttttttcttttctattttattaaaaaaaatcaaacaagttcgccactgctatgtatgtttc

SEQ ID NO: 5186 - DNA, 1071 bp, Zea mays
  Zm_smallRNAprecursor_675
cctggactgctataatttgattgagatggtatagtttttttagataaaagatggacatggtatttgaattattgagatccatttttaacctgatgccttactaaatactgtcaggctgccccaacgtgaacttgtcaaaccttttggagtttgattaaattgatagaaaagaacatcttagtcaaaccttttgaagtctgattaaattgatagaaaagaacaccgagatttatgtctcaaataagcaaatgctataagaatatgcctttcatatgtacgtctatataatactagtggtgagttaggaacaggatgaggatctcctgtcaaaagcccaaaatcttaccagccaaaaatcgaagggacaaatttaatatcgtctacggtgtcaataagttaagattagcttatctccttttgaaactctaaaaacagtgcagagaacaataaagctacccaacttccaaacgccaaaggaccagaattaaatttatcagaattggcaggggccgcgcgaacgcgtaccccctctaccacaaattatgacgtccactctcccacttggggagatggtaagccagcgcacccgccatgtgcaatgcaggccactgacctaggccactgggcttcttgatccctagtcgaccccgtccaggtaagtatggagcaatggagcacggagcgctcatcttatagcgcgagctcgtggcgcgtctgccttcgcctggcgaggtggtgctaaatcctgagaccgaacgaaacgcgttctgcacttgtgcgcgctgctgcttgagttctcgtgggccactgcttgtagtccatggacctttaacctcgagcccaacatattttccttttccgtgtttggaaacaaccggactgcgagctgcaatggactggacccggttaggcgtgaaattagagccttttgagagtgcaattattatccgtgccctataacaatgttttactgttcttcaacagcttcaaatccgaagttcatcccttagttttttcttttctattttattaaaaaaaatcaaacaagttcgccactgctatgtatgtttc

SEQ ID NO: 5187 - DNA, 1058 bp, Zea mays
  Zm_smallRNAprecursor_676
gcagaaatgttgcggcacatggagaaaaatgccgcaaacccatggaccaagcgagcacccatcccgcggccacgacctcgaccacgaccacgagcacgtggcatgggagatccgcggctaggagagggacgcgaggtagcagcggggggagaggaggatggatgatggggaggctggcgaggtggctcagtggaggaggcagggcctccagaccgtgagggagcccgcttcgtacgagcagctgggttggaggaatcaacccagtagggtacgtagcgggagtgtttgatgggtttttcgaagtgggtctgggtgaccacttcgatcatcttcatgataaagggtgcatgaagacaccctctgagaggagaccaggaagcacggacgatctcttcccagatcatgtcaaacacattgatgcgggtgagactgtttggagcaaggacgaggaggaagacgcgactctccccaaggacattcatttgatttccgcccttcgggagaacggtcatccgggacaaagaattaaggtacctgtagtacctatgcatgttagcggttgtccagaactcccgctcagtagagacatgaatgaatttcgtctcttcccgcatgggcagctgaatgtcatgcactcgcatgttgctgccctgaatatctgcatcagagaagcccagaatatgggcaaaacgacgataactgactttgtgccagttaccctggatgaagaaatacatgactgggtaatcatacccatcggcttcctcatctactttctttatccagagggtggcatagaactgagctaccacctcgtcgttccaggggtattccatggtcataatgtttcgtaacccctttctctctaagttttcgagagctgacgtcatgttagcatctcccatattctcacaaccctcccagtcaataaacctatgtctgatgactgggtgtttcttggaaagaatgacagaattgtagaagtcagcctggaaaagattccagaaccgagggtcctggacaccaggatgacgaggagtgagagtagggttggtgaa

SEQ ID NO: 5188 - DNA, 1057 bp, Zea mays
  Zm_smallRNAprecursor_677
cagaaatgttgcggcacatggagaaaaatgccgcaaacccatggaccaagcgagcacccatcccgcggccacgacctcgaccacgaccacgagcacgtggcatgggagatccgcggctaggagagggacgcgaggtagcagcggggggagaggaggatggatgatggggaggctggcgaggtggctcagtggaggaggcagggcctccagaccgtgagggagcccgcttcgtacgagcagctgggttggaggaatcaacccagtagggtacgtagcgggagtgtttgatgggtttttcgaagtgggtctgggtgaccacttcgatcatcttcatgataaagggtgcatgaagacaccctctgagaggagaccaggaagcacggacgatctcttcccagatcatgtcaaacacattgatgcgggtgagactgtttggagcaaggacgaggaggaagacgcgactctccccaaggacattcatttgatttccgcccttcgggagaacggtcatccgggacaaagaattaaggtacctgtagtacctatgcatgttagcggttgtccagaactcccgctcagtagagacatgaatgaatttcgtctcttcccgcatgggcagctgaatgtcatgcactcgcatgttgctgccctgaatatctgcatcagagaagcccagaatatgggcaaaacgacgataactgactttgtgccagttaccctggatgaagaaatacatgactgggtaatcatacccatcggcttcctcatctactttctttatccagagggtggcatagaactgagctaccacctcgtcgttccaggggtattccatggtcataatgtttcgtaacccctttctctctaagttttcgagagctgacgtcatgttagcatctcccatattctcacaaccctcccagtcaataaacctatgtctgatgactgggtgtttcttggaaagaatgacagaattgtagaagtcagcctggaaaagattccagaaccgagggtcctggacaccaggatgacgaggagtgagagtagggttggtgaa

SEQ ID NO: 5189 - DNA, 1058 bp, Zea mays
  Zm_smallRNAprecursor_678
cagaaatgttgcggcacatggagaaaaatgccgcaaacccatggaccaagcgagcacccatcccgcggccacgacctcgaccacgaccacgagcacgtggcatgggagatccgcggctaggagagggacgcgaggtagcagcggggggagaggaggatggatgatggggaggctggcgaggtggctcagtggaggaggcagggcctccagaccgtgagggagcccgcttcgtacgagcagctgggttggaggaatcaacccagtagggtacgtagcgggagtgtttgatgggtttttcgaagtgggtctgggtgaccacttcgatcatcttcatgataaagggtgcatgaagacaccctctgagaggagaccaggaagcacggacgatctcttcccagatcatgtcaaacacattgatgcgggtgagactgtttggagcaaggacgaggaggaagacgcgactctccccaaggacattcatttgatttccgcccttcgggagaacggtcatccgggacaaagaattaaggtacctgtagtacctatgcatgttagcggttgtccagaactcccgctcagtagagacatgaatgaatttcgtctcttcccgcatgggcagctgaatgtcatgcactcgcatgttgctgccctgaatatctgcatcagagaagcccagaatatgggcaaaacgacgataactgactttgtgccagttaccctggatgaagaaatacatgactgggtaatcatacccatcggcttcctcatctactttctttatccagagggtggcatagaactgagctaccacctcgtcgttccaggggtattccatggtcataatgtttcgtaacccctttctctctaagttttcgagagctgacgtcatgttagcatctcccatattctcacaaccctcccagtcaataaacctatgtctgatgactgggtgtttcttggaaagaatgacagaattgtagaagtcagcctggaaaagattccagaaccgagggtcctggacaccaggatgacgaggagtgagagtagggttggtgaac

SEQ ID NO: 5190 - DNA, 1142 bp, Zea mays
  Zm_smallRNAprecursor_679
caaaaggcatgcccatggaggaagcttgatgacgaagattgtcatcagtctcccgctgacgccgtgccacctcatggacatcagcagaaatgttgcggcacatggagaaaaatgccgcaaacccatggaccaagcgggcacccatcccgcggccacgacctcgaccacgaccacgagcacgtggcatgggagatccgcggccaggagagggacgcgaggcagcagcggggggagaggaggatggatgatggggaggctggcgaggtggctcagtggaggaggcagggcctccagaccgtgagggagcccgcttcgtacgagcagctgggttggaggaatcaacccagtagggtacgtagcgggagtgtttgacgggtttttcgaagtgggtctgggtgaccacttcgatcatcttcatgataaagggtgcatgaagacaccctctgagaggagaccaggaagcacggacgatctcttcccagatcatgtcaaacacattgatgcgggcgagactgtttggagcaaggaggaggaggaagacgcgactctccccaaggacgttcatttgatttccgcccttcgggagaacggtcatccgggacaaagaattaaggtacctgtagtacctatgcatgttagcggttgtccagaactcccgctcagtagagacatgaatgaattccgtctcttcccgcatgggcagccgaatgtcatgcactcgcatgttgctgccctgaatatctgcatcagagaagcccagaatatgggcaaaacgacgataactgactttgtgccagttaccctggatgaagaaatacatgactgggtaatcatacccatcggcttcctcatctactttctttatccagagggtggcatagaactgagctaccacctcgtcgttccaggggtattccatggtcataatgtttcgtaacccctttctctctaagttttcgagagctgacgtcatgtcagcatctcccatattctcacaaccctcccagtcaataaacctatgtctgacgactgggtgtttcttggaaagaatgacagaattttagaagtcaacctggaaaagattccagaaccgagggtcctggacaccaggatgacgaggagtgagagtagggttggtgaac

SEQ ID NO: 5191 - DNA, 1058 bp, Zea mays
  Zm_smallRNAprecursor_680
gcagaaatgttgcggcacatggagaaaaatgccgcaaacccatggaccaagcgggcacccatcccgcggccacgacctcgaccacgaccacgagcacgtggcatgggagatccgcggccaggagagggacgcgaggcagcagcggggggagaggaggatggatgatggggaggctggcgaggtggctcagtggaggaggcagggcctccagaccgtgagggagcccgcttcgtacgagcagctgggttggaggaatcaacccagtagggtacgtagcgggagtgtttgacgggtttttcgaagtgggtctgggtgaccacttcgatcatcttcatgataaagggtgcatgaagacaccctctgagaggagaccaggaagcacggacgatctcttcccagatcatgtcaaacacattgatgcgggcgagactgtttggagcaaggaggaggaggaagacgcgactctccccaaggacgttcatttgatttccgcccttcgggagaacggtcatccgggacaaagaattaaggtacctgtagtacctatgcatgttagcggttgtccagaactcccgctcagtagagacatgaatgaattccgtctcttcccgcatgggcagccgaatgtcatgcactcgcatgttgctgccctgaatatctgcatcagagaagcccagaatatgggcaaaacgacgataactgactttgtgccagttaccctggatgaagaaatacatgactgggtaatcatacccatcggcttcctcatctactttctttatccagagggtggcatagaactgagctaccacctcgtcgttccaggggtattccatggtcataatgtttcgtaacccctttctctctaagttttcgagagctgacgtcatgtcagcatctcccatattctcacaaccctcccagtcaataaacctatgtctgacgactgggtgtttcttggaaagaatgacagaattttagaagtcaacctggaaaagattccagaaccgagggtcctggacaccaggatgacgaggagtgagagtagggttggtgaa

SEQ ID NO: 5192 - DNA, 1057 bp, Zea mays
  Zm_smallRNAprecursor_681
cagaaatgttgcggcacatggagaaaaatgccgcaaacccatggaccaagcgggcacccatcccgcggccacgacctcgaccacgaccacgagcacgtggcatgggagatccgcggccaggagagggacgcgaggcagcagcggggggagaggaggatggatgatggggaggctggcgaggtggctcagtggaggaggcagggcctccagaccgtgagggagcccgcttcgtacgagcagctgggttggaggaatcaacccagtagggtacgtagcgggagtgtttgacgggtttttcgaagtgggtctgggtgaccacttcgatcatcttcatgataaagggtgcatgaagacaccctctgagaggagaccaggaagcacggacgatctcttcccagatcatgtcaaacacattgatgcgggcgagactgtttggagcaaggaggaggaggaagacgcgactctccccaaggacgttcatttgatttccgcccttcgggagaacggtcatccgggacaaagaattaaggtacctgtagtacctatgcatgttagcggttgtccagaactcccgctcagtagagacatgaatgaattccgtctcttcccgcatgggcagccgaatgtcatgcactcgcatgttgctgccctgaatatctgcatcagagaagcccagaatatgggcaaaacgacgataactgactttgtgccagttaccctggatgaagaaatacatgactgggtaatcatacccatcggcttcctcatctactttctttatccagagggtggcatagaactgagctaccacctcgtcgttccaggggtattccatggtcataatgtttcgtaacccctttctctctaagttttcgagagctgacgtcatgtcagcatctcccatattctcacaaccctcccagtcaataaacctatgtctgacgactgggtgtttcttggaaagaatgacagaattttagaagtcaacctggaaaagattccagaaccgagggtcctggacaccaggatgacgaggagtgagagtagggttggtgaa

SEQ ID NO: 5193 - DNA, 1058 bp, Zea mays
  Zm_smallRNAprecursor_682
cagaaatgttgcggcacatggagaaaaatgccgcaaacccatggaccaagcgggcacccatcccgcggccacgacctcgaccacgaccacgagcacgtggcatgggagatccgcggccaggagagggacgcgaggcagcagcggggggagaggaggatggatgatggggaggctggcgaggtggctcagtggaggaggcagggcctccagaccgtgagggagcccgcttcgtacgagcagctgggttggaggaatcaacccagtagggtacgtagcgggagtgtttgacgggtttttcgaagtgggtctgggtgaccacttcgatcatcttcatgataaagggtgcatgaagacaccctctgagaggagaccaggaagcacggacgatctcttcccagatcatgtcaaacacattgatgcgggcgagactgtttggagcaaggaggaggaggaagacgcgactctccccaaggacgttcatttgatttccgcccttcgggagaacggtcatccgggacaaagaattaaggtacctgtagtacctatgcatgttagcggttgtccagaactcccgctcagtagagacatgaatgaattccgtctcttcccgcatgggcagccgaatgtcatgcactcgcatgttgctgccctgaatatctgcatcagagaagcccagaatatgggcaaaacgacgataactgactttgtgccagttaccctggatgaagaaatacatgactgggtaatcatacccatcggcttcctcatctactttctttatccagagggtggcatagaactgagctaccacctcgtcgttccaggggtattccatggtcataatgtttcgtaacccctttctctctaagttttcgagagctgacgtcatgtcagcatctcccatattctcacaaccctcccagtcaataaacctatgtctgacgactgggtgtttcttggaaagaatgacagaattttagaagtcaacctggaaaagattccagaaccgagggtcctggacaccaggatgacgaggagtgagagtagggttggtgaac

SEQ ID NO: 5194 - DNA, 1149 bp, Zea mays
  Zm_smallRNAprecursor_683
ctgcgtgcacagtcctttttttgtagagttcggtcagcaggggtgtgcatgcagaatcttttttctgggtgtgcatgttgtgtccggtcacttctcctctgctgagcgcgcgcagatttttcttggacgcttctgctcagcccgcgcgccatgcatgcgtgtcaggggcgccaatttttcctgtccagtcgcttcgagcagctgcgcgcaaatttgaatttttttgcatcttccctctgctgtttctggttctctgaccacactggtcagaaccagctgaactggcccatggggggcggttgaactggtcctgaggaccagctcaactgcctatatatacttgactctctccttctcttctcccacttcattctctctcgccttagtcgcttcacaacctttagagcctctccttcacacacttcaaccggttcgcagtttcaccaccttttcaatcatggtgcgtcgtcgcaatccctctgtgattgagtttagcagcgactccgacgagattcaggaggaatctcccgtcccctctcctccgcctcgtcgctccctctctaagagaggacgtggctctggtcggatggatggcgagggctcttccatgccctcgcagccaactcgcgggtgacgccaaaaggttggcgcctctcgtcctcgtcgtagcacgtcttcctcagggtatgctccctgccaggaggaggatggggctttcgacgacttcgtcgaccttcggcgcctgatgctctctacgtcaccggactgcacatgcattcggggaacgtcagccgcggtccgcatgaatctcccgtcgacttcactcagaagggaatagacacccttcagcgtctgaggtttaccaaccctactctcactcctcgtcatcctggtgtccaggaccctcggttctggaatcttttccaggctgacttctacaattctgtcattctttccaagaaacacccagtcgtccgacatagatttattgactgtgagggttgtgagaatatgggagatgctgacatgtcgtcagctctcgtaaacttagagagaaaggggttacggaacattatgaccatggaatacccctggaacgatgaggtggtagctcagttctatgccaccctctggataaagaaagtagat

SEQ ID NO: 5195 - DNA, 1067 bp, Zea mays
  Zm_smallRNAprecursor_684
gtttctggttctctgaccacactggtcagaaccagctgaactggcccatggggggcggttgaactggtcctgaggaccagctcaactgcctatatatacttgactctctccttctcttctcccacttcattctctctcgccttagtcgcttcacaacctttagagcctctccttcacacacttcaaccggttcgcagtttcaccaccttttcaatcatggtgcgtcgtcgcaatccctctgtgattgagtttagcagcgactccgacgagattcaggaggaatctcccgtcccctctcctccgcctcgtcgctccctctctaagagaggacgtggctctggtcggatggatggcgagggctcttccatgccctcgcagccaactcgcgggtgacgccaaaaggttggcgcctctcgtcctcgtcgtagcacgtcttcctcagggtatgctccctgccaggaggaggatggggctttcgacgacttcgtcgaccttcggcgcctgatgctctctacgtcaccggactgcacatgcattcggggaacgtcagccgcggtccgcatgaatctcccgtcgacttcactcagaagggaatagacacccttcagcgtctgaggtttaccaaccctactctcactcctcgtcatcctggtgtccaggaccctcggttctggaatcttttccaggctgacttctacaattctgtcattctttccaagaaacacccagtcgtccgacatagatttattgactgtgagggttgtgagaatatgggagatgctgacatgtcgtcagctctcgtaaacttagagagaaaggggttacggaacattatgaccatggaatacccctggaacgatgaggtggtagctcagttctatgccaccctctggataaagaaagtagatgaggaagccgatgagtatgattacccagtcatgtatttcttcatccagggtaactggcacaaagtcagttatcgtcgttttgcccatattctgggcttctctgatgcagacattcagggcagcaacatgcgagtgcatggcattcggctgcccatgcgg

SEQ ID NO: 5196 - DNA, 1190 bp, Zea mays
  Zm_smallRNAprecursor_685
agctctcgtaaacttagagagaaaggggttacggaacattatgaccatggaatacccctggaacgatgaggtggtagctcagttctatgccaccctctggataaagaaagtagatgaggaagccgatgagtatgattacccagtcatgtatttcttcatccagggtaactggcacaaagtcagttatcgtcgttttgcccatattctgggcttctctgatgcagacattcagggcagcaacatgcgagtgcatggcattcggctgcccatgcgggaagagacggaattcattcatgtctctactgagcgggagttctggacaaccgctaacatgcataggtactacaggtaccttaactctttgtcccggatgaccgttctcccaaagggcggtaatcaaatgaacgtccttggggagagtcgagtcttcctcctcctccttgctccaaacagtctcgtccgcatcaatgtgtttgacatgatctgggaagagatcgtccgtgcttcctggtctcctcacaaagggtgtcttcatgcaccctttatcatgaagatgatcgaagtggtcacccagacccacttcgaaaaacccgtcaaacactcccgctacgtaccctactgggttgattcctccaacccagctgctcgtacgaagcgggctccctcacggtctggaggccctgcctcctcctctgagccacctcgccagcctccccaccatacttcctcctctcccccccgctgctgcctcgcgtccctctcctggccgcggatctcccatgccacgtgctcgtggtcgtggtcgaggtcgtggccgcgggatgggtgctcgcttggtccatgggtttgcggcatttttctccatgtgccgcaacatttctgctgatgtccatgaagtggcacggcgtcagcgggagactgacgacaatcttcgtcgtcaagcttcctccatgggcatgccttttgtccctcgttcgcctgatgtgcctctccatcctcctcccccggagatcaatgagtggcaccagcaggcctacggggtgccttttatgcctgcagacgatgaagatgaagaagtctatgttgatgatcgcgaggagtttgccccgcctccctaccatggggatccgggtcaatcatcctcccaccctccgcctccttacccgggtccgggacccattcctggtgac

SEQ ID NO: 5197 - DNA, 1144 bp, Zea mays
  Zm_smallRNAprecursor_686
tgatgtacacataatattttttacatctaacattgtgtataagtgataatgttctgcattaataacaaaaagtgtatgtcctaattataatttaagcgggaatggagatcccgacagggatttatctccacggagaataggaaagggaagaatcggccccacaaacattcgtgaggatgcttgtcggaaaaaaaatcattacggaaacaaggatggagaattatttccggaaaattccctttgtcattcctatcctcacctagccacctatactaggccggttctctcacccctacacagtgtaatatctctctccacgtagcagaattcactcgaagctatagaccacacttccaactttttgcattttggccctttttgaggtttttttgcacaactatgactcttgtagtttcatttcaaaaaatagatcccaatctcgacaccatcatcattggcgccgaggtaacgcacagtggcgccgatataattggcgccaacttttcctacgtggcagccgatgtggcaagtcccaggggttgacgtcatagatcttggcgccgacccccctgaatagcgccggaccccgccgtcaaggggggtcgacgccaagatctatgacgccgaacccctgtgacttgccacatcggctgccacgtaggaaaaaagttggcgtcgctgtgcgttatctcggcaccaatgatgatgacgccgaggttggactccatttttttaaatgaaactgaaaagagcatagttgtgcaaaaaaaacccaaaaaggctaaaatccaaaaaagttgggaccacactctccgactctcggatgccagggcgaggccgcatacccggaaagaagatttttaagtatttttaaaaatattaataattatatcactaaacgttttaaaattatttatagatttaggaaatcgaaaataacacatctcgacgccatattgagtatcaaacctagaaaatgtcctagatgatgtagggcacattgctacataggcaccgagctccggcgtataacatctcaattctcaacgccgcataacacagagtatcaaatctggatttgtgtcctagatgatgtgacgcacatgctactacttagcagtcgtcgagttctagcgtataacag

SEQ ID NO: 5198 - DNA, 1145 bp, Zea mays
  Zm_smallRNAprecursor_687
tgatgtacacataatattttttacatctaacattgtgtataagtgataatgttctgcattaataacaaaaagtgtatgtcctaattataatttaagcgggaatggagatcccgacagggatttatctccacggagaataggaaagggaagaatcggccccacaaacattcgtgaggatgcttgtcggaaaaaaaatcattacggaaacaaggatggagaattatttccggaaaattccctttgtcattcctatcctcacctagccacctatactaggccggttctctcacccctacacagtgtaatatctctctccacgtagcagaattcactcgaagctatagaccacacttccaactttttgcattttggccctttttgaggtttttttgcacaactatgactcttgtagtttcatttcaaaaaatagatcccaatctcgacaccatcatcattggcgccgaggtaacgcacagtggcgccgatataattggcgccaacttttcctacgtggcagccgatgtggcaagtcccaggggttgacgtcatagatcttggcgccgacccccctgaatagcgccggaccccgccgtcaaggggggtcgacgccaagatctatgacgccgaacccctgtgacttgccacatcggctgccacgtaggaaaaaagttggcgtcgctgtgcgttatctcggcaccaatgatgatgacgccgaggttggactccatttttttaaatgaaactgaaaagagcatagttgtgcaaaaaaaacccaaaaaggctaaaatccaaaaaagttgggaccacactctccgactctcggatgccagggcgaggccgcatacccggaaagaagatttttaagtatttttaaaaatattaataattatatcactaaacgttttaaaattatttatagatttaggaaatcgaaaataacacatctcgacgccatattgagtatcaaacctagaaaatgtcctagatgatgtagggcacattgctacataggcaccgagctccggcgtataacatctcaattctcaacgccgcataacacagagtatcaaatctggatttgtgtcctagatgatgtgacgcacatgctactacttagcagtcgtcgagttctagcgtataacagg

SEQ ID NO: 5199 - DNA, 1143 bp, Zea mays
  Zm_smallRNAprecursor_688
gatgtacacataatattttttacatctaacattgtgtataagtgataatgttctgcattaataacaaaaagtgtatgtcctaattataatttaagcgggaatggagatcccgacagggatttatctccacggagaataggaaagggaagaatcggccccacaaacattcgtgaggatgcttgtcggaaaaaaaatcattacggaaacaaggatggagaattatttccggaaaattccctttgtcattcctatcctcacctagccacctatactaggccggttctctcacccctacacagtgtaatatctctctccacgtagcagaattcactcgaagctatagaccacacttccaactttttgcattttggccctttttgaggtttttttgcacaactatgactcttgtagtttcatttcaaaaaatagatcccaatctcgacaccatcatcattggcgccgaggtaacgcacagtggcgccgatataattggcgccaacttttcctacgtggcagccgatgtggcaagtcccaggggttgacgtcatagatcttggcgccgacccccctgaatagcgccggaccccgccgtcaaggggggtcgacgccaagatctatgacgccgaacccctgtgacttgccacatcggctgccacgtaggaaaaaagttggcgtcgctgtgcgttatctcggcaccaatgatgatgacgccgaggttggactccatttttttaaatgaaactgaaaagagcatagttgtgcaaaaaaaacccaaaaaggctaaaatccaaaaaagttgggaccacactctccgactctcggatgccagggcgaggccgcatacccggaaagaagatttttaagtatttttaaaaatattaataattatatcactaaacgttttaaaattatttatagatttaggaaatcgaaaataacacatctcgacgccatattgagtatcaaacctagaaaatgtcctagatgatgtagggcacattgctacataggcaccgagctccggcgtataacatctcaattctcaacgccgcataacacagagtatcaaatctggatttgtgtcctagatgatgtgacgcacatgctactacttagcagtcgtcgagttctagcgtataacag

SEQ ID NO: 5200 - DNA, 1040 bp, Zea mays
  Zm_smallRNAprecursor_689
tggcatacagacagtcacacattattgagtgtcaatgtttgtcctttcgtaccaaaggaacctctgagtgctttgatataaattatctggcctcaaatttgaccgttgatataaaattgtttcaggttttgctccatttcattgctttgtttttttcatttttttactactttaaaacaatagtttcatgtgacgtgctaaacgcgtatgtgtattcctctccccgtttctcatttaataaattggtccataagcctatccaagcctaatacaacagaaagctacacacaaaacaacacttttatatagtaccattttgttagttgaagtaaatagacaaccgagcgagctattaaaataataaggaaggtcgtgttttttaacttatatctttcttgtctttgattagataaattataatatttatttttattagtttaatatctgatatgtggaccatattttatattcactacaggaattcacttaattcccgtcggcctgaaaccgacgggaataagtaattcccgtcggtttagggcttattcccgtcggtttcaggctgacaggcgtcccttgtcggggataaggttatccccgtcggcggctgacgggaataattaattcccgtcggctagatagtggccgacaggaattaaggctaactcccgtcggttttgctggccgacgggagttattaattaattcccgtcggttccccaggccgacgggagttattaattaattctcgtcggccttacgtggccgacgggaattaactgggccgacaggagttagtaattaattcccgtcggttcgaccatagccgacgggaattaactgggccgacgggaattaccctatactgctacaaaaacaacactaaattatgtcactatttctgcacacataacatatatcaaacataacataaatcacatataacagccacattacaaacacatgtagagatacgacatccacaaacacatgcatttagacataaacacttgcatttataattaaaacatccaccaacg

SEQ ID NO: 5201 - DNA, 1059 bp, Zea mays
  Zm_smallRNAprecursor_690
cctgggagtcgtccgagtcatcggacgacgccgggggagagacgggagccggagacccctcggactcggaggagaactcctcctccgagtattccgagtcaccgaaatcctccgatggaggagtcggctcacgcttgcgcttgttgttcttgcccatggcggaagcagacagaggggaggaaaagaaggcagtaaggagcagcgaagagatgtgaagaaaccagagaagcaaaggggttatttatagaagggaaaggcaaccgctcacttctaaccgcggtcactgaacagtcgcaaggcattcaataagcactcccacccatctgcagacacgtcagacggcggacgccgtttcatgcaacactacacccattgggactccagtcaacagcgcaaaggatatgattacactagccgtcccatcgcattactactcagaggcaaccggctaaaacactcagcgtaccaacacaacagcaatccaggatattcccgtcggccgggtaccgacgggatttactctaaaaccgacgggatttagctattcccgtcggttttagagtaaatcccgtcggtacccggccgacaggagctacccgacggggattacattacctcccgtcggggccgacgggagataattatctcccgtcggccctaggtagccgacagcggttgtcgctccccggcccagggctgacgtggcgggcaattaactcccgtcggccttaggtagccgacgggagttatgtgtccgccacgtcagccctgattgccgggacgggggagcgacaactgccgtcggcttggctaagccgacggaagttatcctggacagtaccaggataactcccgtcggctttgcaaagccgacgggagttaaactgtcacccccccccccaaaaaccccatatttatgatcaatggcacagaaaatatacacaatatcatcatgcacattcacacatcaatcacatccatccacacacatcaatcacatccatccacaaacatatatataagaacattcatacacataagaagtgttcatccacataa

SEQ ID NO: 5202 - DNA, 1075 bp, Zea mays
  Zm_smallRNAprecursor_691
acatttgtaaacagacaattatatcccattttgcacaattgactaacagataacaaattatatccaagcgactcaactaaaaacacattagaaatagagtgctcagatgaaatagcaattttacctaacccttttaccttgccttggttcccatcaccgaatattattgaatcttgggaatccttgttcttgacataggaagagaacatcctcttttcccccgtcatgtggtttgtgcatccgctgtcgataatccagcttgaacccccggatgcataaacctgcaaggcaaatttaggcttgggtcttaggtacccaactcttgttgggtcctacaaggttagtcacaattgtcttagggacccaaatgcaagttttatctcccttgcatcttgcccctaatttcctagcaatcaccttcttattctttctataaatcactacaagaaactaataaatgttcgtgggttaatttaagaacgtgggtaccgacgttcttaattgagttatgttcgtgggttaatttaagaacgtgggtacccacgttcttatattaaattccggggctcgcggtaaaaccgtcgaacttatcgtattaggaacgtgggtacccacgttcttaacttaaattcgtgggccacgtggacaccgtcgaacttaaccaaaaacctaaatctctcccaccccgtgcgtctatcttcttttccctacttgcctcgccgccagcccgccgctacttgcccgccgccaccccgcgtccacctgaacgcctcaccgcgcgcttgggcagggtggtaccgcgcggtgctcgccatcaagcgccgctgcggcgagcacctcgaccagcagccgaggagcccctttctcggcatgcccaagtccttccccggcgtcaagccggagttctgggacgggatgcggtcccgcctcgccgccctccgacccaacaggtccatttcgcgctggttcctagccgacctccctaccgtgcttgtagtgggcgactcggtgttcatccatggggggttcctcgaggccaacgtcgagtacggcctggagcggatcaatgcggatc

SEQ ID NO: 5203 - DNA, 1109 bp, Zea mays
  Zm_smallRNAprecursor_692
tcaaaacactatgtatgggatgatatgaactgcctaaataagaattcttgagcgtcgaataacctgagtactaactacatcaaacaatttgcattaatgaaactgtgtaaatccaccggataatcaaaaatacgcatgtctgatgaaatggttgttgctatctgtttccataacgaatccttggtttaactgaataagtaaagaaaatgggccctttctcttcgtctcagatcgatggatcttctcgattggaagatctcccatatggataatacacattccagttgaccgagcctaatgctaattgttttgttccgaagcaaagatatctgcggaggccggttcgttcgtcctattctgatattcaggaccaagaggtcctggattctctttcggataggccctgaaaggagaagagaagctgaaatgccaacggacttctacacccgatatatcatataaccccttgagtgttttaatggaacatggtgtaatattcatattgtcctctgataaaaattgaacttcaaaaaaggaattcttttgattcaagcatctctttctcaactcaacaacttgaagtattaatcttatatttaatataccaagaaatcacatcagatcataatatatatcaataccctctaatatatatcaatatttcccttcttttatctatgcaaaacaaaaaagaatagtaattaatcctataaatctacgcagttgctcaagaattcactattcttcttaatcaacgatttcttatatagagagaacggccctcagaaattgcaaatactaatttgttaagaattaatcgaattgaagtcatagtgtcatcgttggcaggaatcgatatattcgcaagatctgggtcacaatttgtatcgactaaagaaatagtaggaatccccaaaatggcacattcctgaagagctatatactctttttgctgatcaaggacgatcacaatgtcaggcaacctcgtcatatatttgatcccgccgagatatctttgcaaggtagataattttctctttaagattgccgcatctctttaaatcgagatccagtgatataacgtaaggtcttccaaaagtagaacaaat

SEQ ID NO: 5204 - DNA, 1172 bp, Zea mays
  Zm_smallRNAprecursor_693
tccatttatgttttatttcccctaattctaattgggtggggtataaaggaatttgcgctcttcatatacccctatggctggatagtaattttcagtgatatacttcttatctgttttggtgagagattgaaacaatttttagcaggcatcttttggaaaaactttcgagttcaaaactttttcatttttcttaaaaagttttggacggatttgttgaaacgattttcaacaggtaccccttggaaatggggtacttgactattctacaaggattatagtggatttggaacaaactatgttggagttttatcaacaattttattctaaaaaaaagggttgggagtcgaatttatactgcagagtatcaaaattatactactgcctcctaaatcaataattcgtagtgcttttgcctttcttgcgtactcctggtgaaccagttgctagccatatgtttaggaggcttttttctccaggtactggtactaagccgctttgccatctcttcatcttcatctgcaaagaattctcgacgtgaaaacacagagacaaaggcctgatctttgaataggaaaaagaatggatccgaaggtcccaaatcaattggcttattcgaaaaaagccttcttctttgaaagatatatctcgtgtctgatactgcattgttccactctgcaagaagtccgaatcagtctcttgcacctcccccctttttcagcaactatggttgctgcggggatttttcttctagctagacttcttcctcttttcatatccctaccctggataatgagtttcatttctttaataggtacaataacactcttcttaggagccactttagctcttgctcagagagatattaaaagaagcttagcctattctacaatgtctcaattgggttatatgatgttagctctaggtataggttcttatcaagctgctttattccatttgatcactcatgcttattcgaaagctttattgttcttaggatccggatccgttattcattcaatggaacctcttgttggatattcaccagataaaagtcagaatatggttcttatgggtggtttaagaaaatatgttccaattacaagaactacttttttatgtggtacactttctctttgtggtattccacctcttgcttgcttctggtccaaaga

SEQ ID NO: 5205 - DNA, 1153 bp, Zea mays
  Zm_smallRNAprecursor_694
tgaaaaaactattggcgggccttcaagacaaatgtttggaatttagcaacaaatgtattcaacgactgagaaaaattttccactcagtcggagctagcagtgagaaattcaccccttcagctgaagatttaccaaagaccttcgaacatattgagggtgaaattgatgagcttgacgaagttatagccgggcacggtgacttctgcgcctgggtagcttctcggggcactgctgcagctttcctaaaagctggctgcgatcatggaaagattgtcaataggcccaatttcactttatcaccatcaattctagatgacattcctgatctcgcccgaagcatttccaatagatttgtaaaaatgatatggacaaaaggcgggcgagaaaaggctggagacgaagctcggagtcatcttgaaccagtaagaaatcataccttgtgcctacctcttccttcaagctcgattttgacttacaacaacttaattcatgtaggatgacgaagccgaagccgatggttaaagagaatgacgccgaagctgaggtcccttgaagattaaataggagtagactgtagacagactcaagaaacttttgagataacttttgtaaatgtgactaaacttgtctttaatgaattctgttcataccttgtaatatgctcttatccttccattaatgtataagaggtgctttgatgtggacgaaattatctttttgagccaaaggcgaaaaaacaccttcccttcttttcgtacacaacgaagcatagaaaacaacatttccctttcttccgaagctctttttttctttttgccgaagcaaccacttatgctatgatgatggttatcctacatatgcctggatgaatgtttatgaatgcaaatgctatgatgtaatgtgatgtgcaaatgaatgtccaaacacatattcgaagccataatcacagccattatttccttagaaacaatcacatatcagtgctaacttttcgctgtaagctctgcattcccttaggaacgactttggagcttcttcgccttttactttcggcggaatcagcgttgacttttcgctgtaagctctgcattcccttaggaacgactttggagcttcttcgccttttactttcggcggaatcagcgttgacttt

SEQ ID NO: 5206 - DNA, 1150 bp, Zea mays
  Zm_smallRNAprecursor_695
tgaaaaaattattgacgagccttcaagaaaaatgtttggaatttagcaacaaatgtattcaacgactaagaaaaattttctactcagttggagccagcagtgagaaatttaccccgtcagctgaagatttaccaaagaccttcgaacatattgagggtgaaattgatgagcttgacgaagttatagccgggcacggtgacttctgtgcctgggtagcttctcggggcactgctgcagctttcctaaaagatggctgcgatcatggaaagattgtcaatagggccaatttcactttatcaccatcaatcctagatgacattcctgatctcgcccgaagtatttccaatagatttgtaaagatgatatggacaaaaggcgggcgagaaaaagctggagacgaagctcggagtcatcttgaaccagtaagaagtcataccttgtgcttacctcttccttaaagctcgatttttacttacaacaacttaattcatgtaggatgacgaagccgaagccgatggttaagaatgtcgccgaagctgaagtcccttgaagattaaataggagtagactgtagacagactcaagaaacttttgagataacttttgtaaatataactaaacttgtctttaatgaattttgttcataccttgtaatatgctcttatccttccattaatgtatgagaggtgctttgatgtggacgaaattatctttttgagccgaaggcgaaaaaaaacaccttcccttcttttcgtacacagcgaagcatagaaaacaacatttccctttcttccgaagctctcctttttgtacacgaagaagctcttttttttttgccgaagcaaccacttatgccatgatgatgattatcctacatatgcctggatgaatgcttatgaatgcaaatgctttgatgtaatgtgacgtgcaaatgaatgtccaaacacatatccgaagccatactcacagccattatttccttagaaacaatcacacatcagctctgcattcccttagaaacgactttggagctttttcgccttttactttcggcgaaattagcgttgacttttcgctgtaagctctgcattcccttaaaaacgactttggagcttcttcgccttttactttcggcggaatcagcgttgac

SEQ ID NO: 5207 - DNA, 1069 bp, Zea mays
  Zm_smallRNAprecursor_696
gagcttatgagtcttctcgattgttattcaggctatcatcaaatttggatgaagaaggaggatgagccaaagaccagtttcataacccctagtggaacatattgttatcttcggatgcctgaggggctcaagaacgctggaggaagtttcagcagaatgactgcgaaggttctccaatctcagataggcagaaatgtgctaacttatgttgatgatatcattgtaaaaagcacgaagcaggaaaatcacattgctgatttgcaagagaccttcgccagttttaggcaagctggcctaaagttgaatccagaaaaatgtgtcttcggagtcaagaaggggaaatttcttggatgcttggtttcaacaaagggaattgaagctaatccaagtaaaattgaagctatacttcgaatagagccaccaactacaaaaaagggggcccaaagattgataaggaggctggcatctcttaatagatttatatccagatcagcagaaagaaatctaccattcttcgaagtactgaaatcagtcgaagtctttcaatggggaccaagccaacaaaaagccttcgaggacctgaagcaatatttgatagatttgacaacattaactccaccaacgccaggggctccgttgttattatatgtggcagcttcgcactcagcggtaagtgcagcacttgtccaggagaagcttgacggccaagtcaagaagcaggtcccagtgtattttgtatctgaagttcttagtatatcaaagaataactatacagaattagagaaggtgttatatgctgttttgatggcatccaggaagcttcggcattactttcaagcatacaatgttattgttccttcttcgcagccgttgaaggatattatgagaaatagagaagctactgggcggattggaaaatgggctgcagagctcaatgaattttgcattgattgtgtgcatagatcttcgatccagtcccaagcgttggcagattttatcgccgattggacgccagaggctcaggatgaagaaacaaataaagatgccgaagtatggacagtgttctgcg

SEQ ID NO: 5208 - DNA, 1109 bp, Zea mays
  Zm_smallRNAprecursor_697
atgcagcagagggagcgtgcgcggggagagagcggtcgggagcggggaggcgagcgcgcgcgaaggtgtggggagcagcagagggagcgcgcggggagagagcggtcgcgagcagggaggcgagcgcgcgcgacggtgtggggagcagcagagggagcgcgaccaagagagcagtagagggagcgcacaagcatcgagggagcagcatagggagcgcccgagcgtcgaggggcgagctgttgcctggtgagcgcgaccaggccctcaccggcgacaacaagcacacgaccaaggagcgcgcgagcggcaaggtgagtgcacggcgcgagcagagggagcgctggccgctggcagcggtgctggtgacgggggcgccgcccgaccatcgccaaatctcgggtgggagcctcctatttgccaatagaagtgttgccctacttctacacccgatatatcatataaccccttgagtgttttaatggaacatggtgtaatattcatattgtcctctgataaaaattgaacttcaaaaaaggaattcttttgattcaagcatctctttctcaactcagcaacttgaagtattaatcttatatttaatataccaagaaatcacatcagatcataatacatatcaataccctctaatatatatcaatatttcccttcttttatctatgcaaaacaaaaaagaatagtaattaatcctataaatctacgcagttgctcaagaattcactattcttcttaatcaacgatttcttatatagagagaacggtcctcagaaattgcaaatactaatttgttaagaattaatcgaattgaagtcatagtgtcatcattggcaggtatcgatatattcgcaagatctgggtcacaatttgtatcgactaaagaaatagtaggaatccccaaaatggcacattcctgaagagctatatactctttttgctgatcaaggacgatcacaatgtcaggcaacctcgtcatatatttgatcccgccgagatatctttgcaaggtagataattttctctttaagattgtcgcatctctttttgggagatggtggaattttcccattttttcttctgctcttaagtctcta

SEQ ID NO: 5209 - DNA, 1094 bp, Zea mays
  Zm_smallRNAprecursor_698
tcggcatctgcatagccaactatttgtagggaattagatcttctatacgtaagcatgagacctttagtaccttgaaggtaccttagagccttcttgactgctttccagtgttctatgcctggattcttctgatagcgtccaagcatcccggtggtaaaagctaagtcagggcgagtacatacttgagcatacataatgcttccgatagctgaagcatatggtactgacttcatcttgtttttctcatactgattcttgggacactgatattccccaaacttatcacccttgactattggaccaggcgaggcattacacttgtgcatattatacctctttagtacattttctatatatgacttctgtgagagtcctaatactccgttttgtctatctctgtgaatttctattccaagaacataagaggcttctcccatgtctttcatatcaaaattcgaggaaagaaacccttttgtttccgctagtagatccttatcactactagctaagagtatgtcatcgacatacagaacaaggaagatatactttccttttctaaattttgcataaatgcaattgtcttccttgttttcctcgaaaccaaactttcttatagtctgatcaaacttgatgtaccactgtctggaagcctgttttaatccataaatggacctcctcaagtgacatcccatgtgttctttaccgctcacagcaaaaccctttggttgtgccatgaacacgttttcttctaactctccatttaggaatgttgtctttacatccatctgatggagctctagatcaaaatgagcaactagtgccattatgatcctgaatgaatcttttgttgagacaggtgagaaggtttcatggtagtcaatgccttctctccgtgtgaaccctttggccacaagtctagccttgtatctttctatgttccctctggagtcacgctttgtcttgtagacccatttacagcctactgttttggctccatggggaatgacttctaagtcccaaactttgttcattctcatggattctaattcatcttccatggctgataaccatttggatgaatttgcactcctcat

SEQ ID NO: 5210 - DNA, 1074 bp, Zea mays
  Zm_smallRNAprecursor_699
gaaaaaactgttggcgggcctttaagacaaatgtgtggaatttagcaacaaatgtattcaacgactgagaaaaattttccactcagtcggagctagcagtgagaaattcaccccgtcagctgaagatttaccaaagaccttcgaacatattgagggtgaaattgatgagcttgacgaagttatagccgggcacggtgacttctgcgcctgggtagcttctcggggcactgctgcagctttcctaaaagctggctgcgatcatgaaaagattgtcaataggcccaatttcacttttatcaccatcaattctagatgacattcctgatctcgcccgaagcatttccaatagatttgtaaagatgatatggacaaaaggcgggcgagaaaaggctggagacgaagctcggagtcatcttgaaccagtaagaaatcataccttgtgcttacctcttccgtcaagctcgattttgacttacaacaacttaattcatgtaggatgacgaagccgaagccgatggttaaagagaatgacaccgaagctgaggtcccttgaagattaaataggagtagacttgtaatatgctcttatccttccattaatgtatgagaggtgctttgatgtggacgaaattatctttttgagccgaaggcgaaaaaacaccttcccttcttttcatacacagcgaagcatagaaaacaacatttccctttcttccgaagctcttcttttcgtacacgaagaagtaaaaaagacagttttttttttctttttgccgaagcaaccacttatgctatgatgatgattatcctacatatgcctggatgaatgtttatgaatgcaaatgctatgatgtaatgtgatgtgcaaatgaatgtccaaacacatatccgaagccataatcacagccattatttccttagaaacaatcacatatcagtgctaacttttcgctgtaagctctgcattcccttaggaacgactttggagcttcttcaccttttactttcggcggaatcagcgttgacttttcgctgtaagctctgcattcccttaggaacgactttggagcttct

SEQ ID NO: 5211 - DNA, 1063 bp, Zea mays
  Zm_smallRNAprecursor_700
acttcagcgctgtagcgcttggtatgagcctcgtggagaagcaatggctagtccacggggctcatacttcagcgttgcagtgcttggtactcggacctcggctcgaggcattttctctaccccttcttaccctgaaaaagcagggtcaccttgtgtccttaaacctataaccatctttcggctaacctagcctccttcgtccctctgtaccaacaaggggtagtacaggaatattgacctgttgtccatcgactacgccttttggcctgatcttaggccccgactcaccctccatggacgaaccttgcggaggaaaccttgggttttcggggcattggattctcaccaatgttttcgttactcaagccgacattctcgcttccgcttcgtcgacccccacttttgcgtttgcttccctctaaggcggaacgcttccctaccgatgcattttgacatcccacaacttcggcagatcgcttagccccgttcatcttcagcgcaagggcgctcgatcagtgagctattacgcactctttaaagggtggctgcttctaggcaaacctcctggctgtctttgcacccccacctcctttatcactaagcggtcatttaggggccttagctggtgatccgggctgtttccctctcgacgatgaagcttatcccccgtcatctcactggtcatatctagtattcagagtttgcctcgatttggtaccgcttgcgcagcccgcaccgaaacagtgctttaccccttgatgtccagtcaactgctgcgcctcaacgcatttcggggagaaccagctagctctgggttcgagtggcatttcacccctaaccacaactcatccgctgattcttcaacatcagtcggttcggacccctgcttagtttcatccaagcttcatcctggtcatggatagaacacccaggttcgggtccataagcagtgacaatcaccctatgaagactcgctttcgctatggctccggtgggttccatttccttaaccaagccactgcctatgagtcgccggctcattcttcaacaggcacgcggtcag

SEQ ID NO: 5212 - DNA, 1064 bp, Zea mays
  Zm_smallRNAprecursor_701
gaacacccaggttcgggtccataagcagtgacaatcaccctatgaagactcgctttcgctatggctccggtgggttccatttccttaaccaagccactgcctatgagtcgccggctcattcttcaacaggcacgcggtcagagatcactttcccctcccactacttgggagctcagcacggtttcacgttctatttcactacccactgggggttcctttcacctttccctcagggtactacttcgctatcggtcacccaggagtatttagccttgcaaggtggtccttgctgattcacacgggattccacgtgccccatgctactcgggtcagagcgtaagctagtgatgctttcggctactggactttagccatctagggtgcgacactcaaccacttcgcctagcagcacaacacttgtattgctctcccacaaccccattttcacggtttaggctgctcccatttcgctcgccgctactacgggaatcgcttttgctttcttttcctctggctactaagatgtttcagttcgccaggttgtctcttgcctgctcatggattcagcaggcagttcaaaaggttgacctatttgggaatctccggatctatgcttattttcaactccccaaagcatttcgtcgcttgctacgcccttccttgtctctgggtgcctaggtatccaccgcaagcctttcctcttttgaacctcgccattaacgttaaggctatgccatcctaaggtgctactaaatggaaggatcttatcaacgtccatgaatgcgaaatcatagatcaaactgacaaattggcaaccttcggtgctatcatagtatccgctaagttcatggtgctatcatagtatccgctaaatcatagaagcaccaaacaatgactataccggttaggctcgggtatagggcattagaacaccagacttcggatctccagcatggccgctgtcgcaacacggtgttgccgtcgttcctgttggtcgtcgcagcaaggaagacgacacctggtgtcgctgatctgcggggtaatagccggattagaacacagac

SEQ ID NO: 5213 - DNA, 1162 bp, Zea mays
  Zm_smallRNAprecursor_702
gtacggaattaaaatcgtacgtagtaatttagtctagtttaaaacagtgataacttttgcattttaaacccgattcaatccattcaagtggcgttagattcgtattaaaattgtctacatgatagaagtattttcacctgctggtgcatattttatttaatttatttaaatatttgtttgaccgatggttaatagaacgacgttttattttaaatctaatttatgatttctaatggcgcatttataaattaacaatagtttggttaatcttaactgaattattctttattaaataattgtttagtttaaatgtgctatctatttattagttctcacgtgttgtgtcgtacgcgtgttgtaccaacttttttggattttagccctttttggtttttttttgcacaactatgccctttgcagtttcatttcaaaaaatggaccccaacctcggcgccatcatcattggcgccgaggtaacgcacagcgacgccagtactattggcgccaacttttcctacgtggcagccgatgtggcatgtcccagggggtcggcgccatagatcttggcgccgaccccccatgacggcgaggtccgacactatccaggggggtcggcgccaagatctatgacgccgaccccctgggacttgccacatcggcagccacgtaggaaaagttggcgccaattatgttgacgccaatgatgatggcggcgaggttggggtccattttttgaaatgaaactgcaaagggcataattgtgcaaaaaaaaaccccaaaagggctaaaatgcaaaaaagttggcgtgctgtacgcatattgtgcgcgtgctgccgtactatttcgtgcgttgtgtttttcgtctcgcaccatcattttgtctcgcttgtagtcgataatgttatttaaattacttatttaactaagagttgttagcgtagtagattaattaaaactagacgatagctctaggttgcatttaataaatgtcgaataatgcgagtatgtcgaattaagtattctaattaatacttgtttagtgtaaacgtgataacttctcgacgtagctccgactgtcgcgtttcttttcctcgcgtgactgtagaagcgacctctattttataccacacgttcttatagcgtttccctttgtatgtttgtt

SEQ ID NO: 5214 - DNA, 1091 bp, Zea mays
  Zm_smallRNAprecursor_703
tacataaataaaataacaaaataattggaacatggatataatgaaatattagcccaaaaccatataaagcaatagcaaaactacccaaggggtaaacaaggtaaaaaggataaacagactagggtgacctattggttcccatcaaaattaaacctatgcatgaataaatgacattaaagaacattattgggtaaaataaaagtggtcaaggcaccacttgcctggcacttgagattccaggtaccagggtgattcttcagatcctcgaaacctcgcgctagtcgcagcaatacaaacaaatatggtatagacaaaattaacatcccaccaaacataagaacaaactgcataataataatctacgcgttactacgagatcgtggaatcgagaactactaagatcggagttacaattaaagagttatgatcttatagaagatctacatgatttaaatattaaactatagggttttttaaattggcgcccttagttttggtgttgtgctcacctatacccttagtcgtgttttttgctcagctgtgcccttccagtactatagaacagaagggcacaactgaacaaaaaatacgactaagggtataggtgagcacaccaccaaaactaagggtaccaatttaaaaaacccaaactatattataaattggttagtatagattgtatgagagattattctatatataattatctcaactttaatctaagtcattattttgattaaagattatcccgttaaattataaccataaaattagaatactatattaatattaaagaagttaatccaatagacatagattaacccaattataaaagtatgggatatcacataataaatgttgctattgggtagtagatatttatacgaagctaacacaactggaacaagtcaaatcagatttaaaacggaggagttacgaatttcctaaggttttatgtatttgatacgagattaattaagaaataaactttaattccattttcatgttaaacagagacacagggtgataaacaacattattacaaagttataggaactggaatgaactaatttgaacttaatatgaatttt

SEQ ID NO: 5215 - DNA, 1090 bp, Zea mays
  Zm_smallRNAprecursor_704
caatgcttagtcacttaatcaaacttgtacccctaacatagctctacaagttcgatgtattgacctagggcaaaacctttatggattaagaaatacaaggccccaaacttggcctaattacactgaattttcagagttaaccatatgggagctcttggggctttttccaattaagtccaaattgttccacatcacgtgaaaatcctctgatatcaaagttgtttggtttttgacattctaccactttgatgtatacactttggtccaaaagtgtatagaatttgaaatcaccatatagggcacaaattagggtttctagggttccatttagggttttgggtgctttagggtttttatgccactcaaatccatcaaacttaatctcttgtgaacatttccaataacttttgaggtactactcaatttgacttcatatttacccatatgccctaatcccagggttaagtactcggaataaggttcgagcgccatgccaaatgtgtccgaaaaagaagagcaaagcaaaggtagcatgaccaaaagtgaaccaaccccttggactgctgcgaaaaacaccatctgatttcaaagtagctcgatctaattcaaaaatttcccctaattgagcacaccgcgcatatttttttacagtagcaggatcagaataacttactccattaagttcgccaccatagaactccaccgttacgcctacttgttcaacactatatttggattctgctcttctaaaaggaacgtccgctctcacaattccctcttcatctaccaaaacgaccggaaatgtttcataaaaagtaggcatacgacgtacaaaaagctcgcgtccttctttatctctaaagacgggatgtcctaaccatccaacagctatgccatcccctagggttaagaacacttcaagttaccacatcacacttgttttgaagttttacctagtggatgcattgtaggtgtaacaaacataatgacatgtcaatgcatatgatgccatgctcaagttttagttctagtaacaccaggggtgttcaatacatggctacttacaacgcagtggcgcaacaagcaataa

SEQ ID NO: 5216 - DNA, 1174 bp, Zea mays
  Zm_smallRNAprecursor_705
atatatatatagtttatctattaagagccctgggctctatataactgtagagagccccagcccacgtccgatcactttttacgcaagcgaacagatttattgtaaacggaaacccattttagcgtaaacagagtaacaaccgcgagccctacatgtttacgctattccattcttccgtttatacataatagtgatttagcataactactccagccgacccacgttccagaaataaaggaatgagcccactaccccacttcccacgcggtcaaacacttctataccctaacccccgcgcggtcaaccatcctggccgactcgccgcgtttcttcagcggtcgcctgggcgattcttgttcatccgccgccgccagcccgtttcgccgtcctccaccgccgcacgccctcaacattaatcgccgccgccgttgacagcatcgtcgagccgctgccgttgtcaatcttgcgcgccccgcgtcacattggctcacgtccgcggtcgctatgtcgtccggattccaaggtgctcgagttgattttttaattttatgctttacaatgcaacttcctaatctccttccccactccggcagtgtgaatcgccttcatttgtctccgcgcgaactcaaccctaatcggcgccgccgttgacagtgtcgtcgagccggccgctgctgtcaatcctccgccaccgcgtcctataggtatttcacatgcccaccaacggtcttcattgatcttactgttcttgtgcgattatggttcagttatttatcatagagcctttaggtttgataaaggttcacggacctgttcttttggactcattgtatgctcaaattgtgtgggtgaagatatatgcaatgatgtgaattatacatacctttatgaagtaggggttgatattttgatgtggaaacaagtgtggtggggaggttgaattatgtaccgtgatagaccggacatgcccttgggcttccttgtatgggtaactttctgcattgataattccaccatttctcataatgtaggctttgtttggcacaacttattttcagcttattcacaaatttaagcagaagttctgccaaacagctagattctgcagcagcttatcagttcagctgcttctcagaatacacaaaaagcagctaagaagcagaagctgcttttc

SEQ ID NO: 5217 - DNA, 1094 bp, Zea mays
  Zm_smallRNAprecursor_706
tcggcatctacataaccaactatttgtagggaattagatcttctgtacgtaagcatgagacctttagtaccttgaaggtaccttagagccttcttgactgctttccagtgttctatgtctggattcttctgatagcgtccaagcatcccggtggtaaaagctaagtcagggcgagtacatacttgagcatacataatgcttccgatagctgaagcatatggtactgacttcatcttgtttttctcatactgattcttgggacactgatattccccaaacttatcacccttgactattggaccaggcgaggcattacacttgtgcatattatacctctttagtacattttctatatatgacttatgtgagagtcctaatacacccttttgtctgtctctgtgaatttctattccaagaacataggaggcttctcccatgtctttcatatcaaaattcgaggaaagaaacccttttgtttccactagtagatccttatcactactagctaagagtatgtcatcgacatacagaacaaggaagatatactttccttttctaaattttgcataaatgcaattgtcttccttgttttcctcgaaaccaaactttcttatagtctgatcaacttgatgtaccactgtctggaggcctgttttaatccataaatggacctcctcaagtgacatcccatgtgttctttaccgctcacaacaaaaccctttggttgtgccatgaacacattttctgctaactctccatttaggaatgttgtctttacatccatctgatggagctctagatcaaaatgagcaactagtgccattatgatcctgaatgaatcttttgttgagacaggtgagaaggtttcatggtagtcaatgccttctctctgtgtgaaccctttggccacaagtctagccttatatctttctatgttccctctggagtcacgctttgtcttgtagacccatttacagcctactgttttggctccatggggaatgacttctaagtcccaaactttgttcattctcatggattctaattcatcttccatggctgataaccatttggatgaatttgtacttctcata

SEQ ID NO: 5218 - DNA, 1149 bp, Zea mays
  Zm_smallRNAprecursor_707
tcagtcgcgcagcacctgtttgaccggtcgcaggtctgtcacctgcctttttttgtgtcgcagcactttttcttgaccggtcccttcctcctgcagattttttattttgctctgtcctgtcactgcgcgcagaaatattttttctgactgctgccgctctgcgtccagtcacttccctggcgcgcaaattttttttttctgtccagtcacttccagcagctgcgcgcaaatttgaatttgtcgtttctggttctctgaccacactggtcagaaccagctgaactggcccatgggggcggttgaactggtcctgaggaccagctcaactgcctatatatacttgactctccccttctcttctcccacttcattcactcttgccttggtcgcttcacaacctttagagcctctccttcacacacttcattcgcttcacagtttcaccaccttttcaatcatggtgcgtcgtcgcaacccctctgtggtcgagttcagcagcgactccgacgagattcaggaggaatctcccgtcccctctcctccgcctcgtcgctccctctctaagagaggacgtggctctggtcggatggctagcgagggctcttccatgccctcgcagccgactcgcgggagacgccaaaaggttggcgcctctcgtcctcgtcgtagcacgtcttcctcagggtatgctccctgccaagaggaggatggggctttcgacgacttcgtcgaccttccggcgcctgatgctctctacgtcaccggactgcacatgcatccggcgaacgtcagccgcggtccgcatgaatctcccgtcgacttcactcagaagggaatagaaacccttcagcgtctgaggtttaccaaccctactctcactcctcgtcatcctggtgtccaggaccctcggttctggaatcttttccaggctgacttctacaattctgtcattctttccaagaaacacccagtcgtccgacatagatttattgactgggagggttgtgagaatatgggagatgctgacatgtcgtcagctctcgtaaacttagagagaaaggggttacgtaacattatgaccatggaatgcccctggaacgatgaggtggtagctcagttctatgccaccctctggataaagaaagtaga

SEQ ID NO: 5219 - DNA, 1067 bp, Zea mays
  Zm_smallRNAprecursor_708
gtttctggttctctgaccacactggtcagaaccagctgaactggcccatgggggcggttgaactggtcctgaggaccagctcaactgcctatatatacttgactctccccttctcttctcccacttcattcactcttgccttggtcgcttcacaacctttagagcctctccttcacacacttcattcgcttcacagtttcaccaccttttcaatcatggtgcgtcgtcgcaacccctctgtggtcgagttcagcagcgactccgacgagattcaggaggaatctcccgtcccctctcctccgcctcgtcgctccctctctaagagaggacgtggctctggtcggatggctagcgagggctcttccatgccctcgcagccgactcgcgggagacgccaaaaggttggcgcctctcgtcctcgtcgtagcacgtcttcctcagggtatgctccctgccaagaggaggatggggctttcgacgacttcgtcgaccttccggcgcctgatgctctctacgtcaccggactgcacatgcatccggcgaacgtcagccgcggtccgcatgaatctcccgtcgacttcactcagaagggaatagaaacccttcagcgtctgaggtttaccaaccctactctcactcctcgtcatcctggtgtccaggaccctcggttctggaatcttttccaggctgacttctacaattctgtcattctttccaagaaacacccagtcgtccgacatagatttattgactgggagggttgtgagaatatgggagatgctgacatgtcgtcagctctcgtaaacttagagagaaaggggttacgtaacattatgaccatggaatgcccctggaacgatgaggtggtagctcagttctatgccaccctctggataaagaaagtagatgaggaagccgatgggtatgattacccagtcatgtatttcttcatccagggtaactggcacaaagtcagttatcgtcattttgcccatattctgggcttctctgatgcagacattcagggcagcaacatgcgagtgcatggcattcggctgcccatgcgg

SEQ ID NO: 5220 - DNA, 1190 bp, Zea mays
  Zm_smallRNAprecursor_709
agctctcgtaaacttagagagaaaggggttacgtaacattatgaccatggaatgcccctggaacgatgaggtggtagctcagttctatgccaccctctggataaagaaagtagatgaggaagccgatgggtatgattacccagtcatgtatttcttcatccagggtaactggcacaaagtcagttatcgtcattttgcccatattctgggcttctctgatgcagacattcagggcagcaacatgcgagtgcatggcattcggctgcccatgcgggaagagacggaattcattcatgtctctactgagcgggagttctggacaaccgctaacatgcataggtactacaggtaccttaattccttgtcccggatgaccgttctcccaaagggcggtaatcaaatgaacgtccttggggagagtcgagtcctcctcctcctccttgctccaaacagtctcgcccgcatcaatgtgtttgacatgatctgggaggagatcgtccgtgcttcctggtctcctcacagagggtgtcttcatgcaccctttatcatgaagatgatcgaagtggtcacccagacccacttcgaaaaacccgtcaaacactcccgctacgtaccctactgggttgattcttccaacccagctgctcgtacgaagcgggttccctcacggtctggaggccctgcctcctcctctgagccacctcgccagcctccccaccatccttcctcctctccccccgctgctgcctcgcgtccctctcctggccgcggctctcccatgccacgtgctcgtggtcgtggtcgtggtcgtggccgcgggatgggtgctcgcttggtccatgggcttgcggcatttttctccatgtgccgcaacatttctgctgatgtccatgaggtggcacggcgtcagcgggagactgacgacaatcttcgtcgtcaagcttcctccatgggcatgccttttgtccctcgttcgcctgatgtgcctctccatcctcctcccccggagatcaatgagtggcaccagcaggcctacggggtgccttttatgtctgcagacgatgaagatgaagaagtctatgttgatgatcgcgaggagtttgccccgcctccctaccacggggatccgggtcaatcatcctcccaccctccgcctccttacccgggtccgggacccattcctggtgacc

SEQ ID NO: 5221 - DNA, 1105 bp, Zea mays
  Zm_smallRNAprecursor_710
aacacacacagagaacaaatatgataacaagctataaatggtatggacggaaagtgaagggaaacatgatgtaaatttacaacaaaaagtgagaaaaaatctataacccgaacggtccggtcttcgtcttcctggatcgagttcgcctagcgtgggtgtgacccgatgacccatcccacaaggcaagccatcgggaggcccattagacggcactgacatgtttctgtgtcgtagggacccggaaatatctatcctctacactatgaatctacgatttgttttactatcacttcgatattggtcaacgccaccctaatagaattgtcgtgctctatcaacgcttttctaactgtcgcccttgcaaattcgtcaggaagtgacggcacaatgataaccaatgatgactccaatgaattaaccccatattggatgcctcttacaatatttgtggctaggcttagatcagatgatctaggggatgtttggtttctagggactaatgtttagtcccttcattttgttccattttagtatataaattgataaatataggaactaaaatagagttttagtttctatatttgataattttgtaactaaagtgaaataaaatgtagggactaaaaattagtccctagaaaccaaacaccccctagacggttgccttccatgtgtggccgttgatggtcacctgcctctgtttgcagcagccttacaaataattctagcacgagttcttgtagcagcacttgtcaagccaccatgtgcaacacatataacagaaggttgtgatgctctgacattaacgaccctagggccacggctgacggagtatattgtctgctcaacgttcctaaactgtataaacacgttaatttatcaaaaaaataaacaatataagaacaggttgtataaaaaatcactatgaaagccctaataacaaactaagaaaaaaattatatgtctgacagtaacgactgaaaacttgatacatgattattcagaataccaactaaaaaaactggtagggagtattaatgacgctactaactattactatagctataaaaaaatattgggcaaaaaggatgtcagtaaccttaac

SEQ ID NO: 5222 - DNA, 1091 bp, Zea mays
  Zm_smallRNAprecursor_711
ttagtttgataagttttaaatttagttaaattaacgtgcctgtgtcacgcgcttcggcccgcgacgatttaattttaaattcaaatttattagtgtgcgacgattcattttaatttcagattatttaatggtgttgcattgagcatttagtcgcgtgacgttttgttttaaattcagttgaagtgacgtatgccatcttgcgacgctttacattattttcatatttaaagtgtttcgtggcgcgctttatcgcgcgacgattcgtttaatttcagtttagtctaagtgttgtgtcgcgtgtttcgccgtgcgacgactcattttatttttagcttagttcatgcgtactgccgtgcgccttgtcgtgcggcaactcgtcccaattttcggtttagttcgcgtgtgccgtcgtgcgtttcgctgcgcgacaatctttttaaatttaccttgagttgtttacattaattaagggttttttaaattggtgctcagtttggtggtgtgctcacctatacccttagtcgtgttttttgctcagttgttcccttccagtgctatagaacagaggggcacagctgagcaaaaaatacgactaagggtataggtgagcacaccaccaaaactgagggcaccaatttaaaaacccataattaaacgcgtagcgtaactttattttatgcatagcgtgattgtcaaattaatatggttatgtttagacaagtattttaatccttagttgcctaacgtaattgcccttcgaccgtagcctcgacctttgttttctctttctcgcttagtcataggtgcgagttctgcgccaagcctttgcttatttgttatattctactatgtggtgtattgttcattttttattaaaatcttggaatgtatgtttggactcatatagataacgatcagttggcggagtccgaaggagttgtaggtgaagaccctgagcagcagctggttggtgaaggcaagtgtcccttgacccatctatgtactacgaattttataattcactccctgcatttacacaatttatatctaaggattgactagctttgtttatcatgtccttgtttacctat

SEQ ID NO: 5223 - DNA, 1058 bp, Zea mays
  Zm_smallRNAprecursor_712
cataataattaccctcagaaattaataatttaaattatatagacacctctacataacattatcacgggtgacaaatcatataaaatgactttatttccgagggtataataattaccctcggaaatttaaaattaaaattatctaagcaccactaattaaatttaggccctcggatataataagataaacattatttaacatactaactattaaataacaacattggaaactacaaaacaatattaatatatacaaaatattaataatacattaaatacattaatattaaataccttacaccggcggccgatggcgggcgggcggggcgggcgtcgacggcgggctgggcgggcgtcgtcggcgggcggggcggtgggcgtcgacggtgggcgggcgtcgacggcggcggcagcgagcgggcagagacagagagaagagagaagcgagcgcgcgcgcgtgaaaaatgaaccgcgcaccgggccgggaccgtgttaaaaaagcttatctccgacggctagttacgagaccgtcggatataaccttatgtccgacggcctcgtaactagccgtcggagataagtctatatttccgagagcccatgttgaccgtcagacataagataatatccgacggcctcgtaggaagccgtcggagatagagtgaccgtcggatattcatcagtttactgtagtgatgaaattagatacacttttaaccgttactacttgaagacacgttttaatgtgtattagcaatttatccttaaccatgtagagatgtttttggtgtaaaatttaaaacatgtaacctaccgaggtatattagtcaccatagttgttgtgtggtatatcttccactagagctaacgtggcatatattataggaggctcaaacaatgttaacattaattgtgtttagctagtgtatgttgtataggtctaataaaggcataataataataataataataataataataataataataataataataataataataataataataaatcagaaaaaatggtcatgcccatttgaaatgggaaaaagt

SEQ ID NO: 5224 - DNA, 1067 bp, Zea mays
  Zm_smallRNAprecursor_713
agttcacttgataataatgattgtgttggctctaactcaagtaatgcaaatgatggttctatctcaagcatacttgatgattatggtgattgttcatgctcggacaatgatatcgctactacaagcccatccattacatcacattgcttcatgtcacaaggtaatacgaaggtatataatgctaatgtgactaatcattcatattcatatgatgagcttgttggtatacttgcaagcatgaacattgctttagaaattgagaaagataaaacaagaaacttggaaaatgaaaactcatttctaaagtattcatgtgaacaacaaaagcatctactttatgttgttacttgttcacatgaggagctaaaattgagtcatgaggaacttagtgttgctcatgaaaatttgatacaagagcatgcttttctcactaacgagttttctagtaaagaaaataaaactagtgataattcatcccatgaattatatgatcaattgaaaaatgttgctaatccatgtgatgaagacaagaagcatgtatccacctcttgtgatgatttattagctatgccatgttcttcaagtatagattattactattcttccttgtcttgtgagactaaccttttgaaggaaaataataagctcaaaaacaaagtgaagaatttaagcaacatgtttgagagatggcataaatcaaaagtcactcatgatcttatattgaaaaatcaaagaagatatgatgacaagagtggccttggtttcaacaagagcaatatcaaaggcagacaattcaaattaaaaggaaatgagctatctcacttcatgtgctataaatgccatgagatgggtcatcttgcaaaggcatgccccaataaaaggaagctcaagttgaagaaggaagaaaggaggctaaagcatgacaagtgcttcaagtgccacacttggggtcacctcacctcaatgtgcccaaccaagaaattagtgaagccacaagtgaagcctcaaccaaagccacgagttgagcaaaggaaggatccccaaaagcaaatcaagattaaccatga

SEQ ID NO: 5225 - DNA, 1042 bp, Zea mays
  Zm_smallRNAprecursor_714
tgaacattgctttagaaattgagaaagataaaacaagaaacttggaaaatgaaaactcatttctaaagtattcatgtgaacaacaaaagcatctactttatgttgttacttgttcacatgaggagctaaaattgagtcatgaggaacttagtgttgctcatgaaaatttgatacaagagcatgcttttctcactaacgagttttctagtaaagaaaataaaactagtgataattcatcccatgaattatatgatcaattgaaaaatgttgctaatccatgtgatgaagacaagaagcatgtatccacctcttgtgatgatttattagctatgccatgttcttcaagtatagattattactattcttccttgtcttgtgagactaaccttttgaaggaaaataataagctcaaaaacaaagtgaagaatttaagcaacatgtttgagagatggcataaatcaaaagtcactcatgatcttatattgaaaaatcaaagaagatatgatgacaagagtggccttggtttcaacaagagcaatatcaaaggcagacaattcaaattaaaaggaaatgagctatctcacttcatgtgctataaatgccatgagatgggtcatcttgcaaaggcatgccccaataaaaggaagctcaagttgaagaaggaagaaaggaggctaaagcatgacaagtgcttcaagtgccacacttggggtcacctcacctcaatgtgcccaaccaagaaattagtgaagccacaagtgaagcctcaaccaaagccacgagttgagcaaaggaaggatccccaaaagcaaatcaagattaaccatgaatataatggtgatgtggggaagaaaaagaaaacaagaagacattcaatatataatcaagataacatgatgagcacaaatcaaaagaagaaggatggtttggctcaaatcaagtgctacatgtgtgatgatatgggtcactttgcctcaaggtgtcccgacaatcttgagaagaaggctcaagcaaatgagaagaggcaagactatgtgaagca

SEQ ID NO: 5226 - DNA, 1182 bp, Zea mays
  Zm_smallRNAprecursor_715
atgaatgtttctttggagtatacagaatctgtcataagtgacaagtatttgaaatattgaaagtcactttgattggaaggctctcatataggataaatcacataagttgtctgagagaccatagtttggtttttaattgatctataatcatggaaagtgaaggggtacaaggatatttgttgagaaatattttggcacttatcttggtactccaagttgaagatcaagaccaaagatgatcaaagttgaggttatcatataaccgattgcataatcttctttcttacatatggcaatccaaatgcttaaattggttgtaagtatttcttggcacatttcaatttgattactctattattgccatgatctagacataaaagagaaaaaaactcgtgttcgtgaatgaataaggtgctaagtaagaaattcaaattcttaaagcacttatctaaaggggaattctctatatgactagagttgtgaaactaactttttttttacctaagtgatctatgtagtttcacagcatgagaatgagtttctcaaatggactatgcaattaaacgtataaagaagaacaatccaaatctatgtgatgtattctctcttgtacatttggatttatttcttctacattaaatactcaccatgatatgatttaaaattagcctttgaacttaatcaatttatcatgcatggttaatttgttaaaattaagcattgaagattaagagaattttagttcatataataaggtttccttgtttaagtatctgcctactttatatattcaaagtgttataaaagagaatttgatgcttgtattactaacaacatctcttttgagcttgttcatgaagtctagtgaaaagagattccatatgttcaaattggttactcctcatcaaaaagtaagaaaaggattgctagaggcaaagtggtacttaattggagcaatcaaaagattgaccgagaaagagagcaagcaacacattcaaaggcaaatcaagcaaatatgattgatgtttcaaacatggattgattttgagtattttccaagtatttttggtttgacatcaattcatgatcacttatactcaaatcatgtacattcatgcaaattatttatatatggttgaatactaatgcttggtgcggtcataaagttcaatgatcctattt

SEQ ID NO: 5227 - DNA, 1142 bp, Zea mays
  Zm_smallRNAprecursor_716
tcactactacagaaaatgtttttactggcggccctaaagtgatctatccaagcggaggacgactccgctagcatttatatgcttgtgaaaatcatcaccttttcaagcatagcacttagaatttgtttgcaaagatcatcatttgcaggcagctgccttaagatgaccacctgcaaacatatgcttcctacatgctgttgtcttttttgacagaatgggcaaagccccctatttcattaagaaataggtaccaacgtacgaccagcacctggtccaaagaggctaccataggcaacgactgctatgcaaatagtccttctgtgcaagcatgcaagcaaaccatctgatccattatatcgtgatccaaccgtaagtaacatttaacacttaaacccttccatcaccagctcaataatctttataaaaaagctcctaacaaattatggttgtatctatggttggatcgtactgctatgcaaatagtccttctgtacaagcatgcaagcaaaccatctgatccattagatcgtgatcaaaccgtaagtcatatttaacacttaaacccttccaccaccaggtcaataatctttataaaaaagctcctaacaaattatggttgtatctatggttgaatcgtaatctaatggatcagatagtttgcttgcatgcttgcacagaaccactgcttgcatagcagtcgttgccggctaccacaacctcttacaatttcaacgacattagacggcaaacgaaaccccatgacatctagcaaacaaactgaagagtaatacacgtgttacctcactacttatcaaagacaactaaacgaaatcgtctcaaagatttgccaccggccaacagcaggagggccacgatcagtgaagacaccaacttcaatcagcctgagccagcgacatgcgagcaaacttcatcctagaattattctagagataggaacccagccaatagcaggaccaaagacttcctgcacaacctttcttgatctgcccacttcctgcctctgccatctttcttgctctctatttctggaggagagcccaggagtccaacaaataacagcaaagaaaaataacatcagtaggatcaagaattactttgttattgaaacaagcatcaacctt

SEQ ID NO: 5228 - DNA, 1143 bp, Zea mays
  Zm_smallRNAprecursor_717
tcactactacagaaaatgtttttactggcggccctaaagtgatctatccaagcggaggacgactccgctagcatttatatgcttgtgaaaatcatcaccttttcaagcatagcacttagaatttgtttgcaaagatcatcatttgcaggcagctgccttaagatgaccacctgcaaacatatgcttcctacatgctgttgtcttttttgacagaatgggcaaagccccctatttcattaagaaataggtaccaacgtacgaccagcacctggtccaaagaggctaccataggcaacgactgctatgcaaatagtccttctgtgcaagcatgcaagcaaaccatctgatccattatatcgtgatccaaccgtaagtaacatttaacacttaaacccttccatcaccagctcaataatctttataaaaaagctcctaacaaattatggttgtatctatggttggatcgtactgctatgcaaatagtccttctgtacaagcatgcaagcaaaccatctgatccattagatcgtgatcaaaccgtaagtcatatttaacacttaaacccttccaccaccaggtcaataatctttataaaaaagctcctaacaaattatggttgtatctatggttgaatcgtaatctaatggatcagatagtttgcttgcatgcttgcacagaaccactgcttgcatagcagtcgttgccggctaccacaacctcttacaatttcaacgacattagacggcaaacgaaaccccatgacatctagcaaacaaactgaagagtaatacacgtgttacctcactacttatcaaagacaactaaacgaaatcgtctcaaagatttgccaccggccaacagcaggagggccacgatcagtgaagacaccaacttcaatcagcctgagccagcgacatgcgagcaaacttcatcctagaattattctagagataggaacccagccaatagcaggaccaaagacttcctgcacaacctttcttgatctgcccacttcctgcctctgccatctttcttgctctctatttctggaggagagcccaggagtccaacaaataacagcaaagaaaaataacatcagtaggatcaagaattactttgttattgaaacaagcatcaaccttc

SEQ ID NO: 5229 - DNA, 1141 bp, Zea mays
  Zm_smallRNAprecursor_718
cactactacagaaaatgtttttactggcggccctaaagtgatctatccaagcggaggacgactccgctagcatttatatgcttgtgaaaatcatcaccttttcaagcatagcacttagaatttgtttgcaaagatcatcatttgcaggcagctgccttaagatgaccacctgcaaacatatgcttcctacatgctgttgtcttttttgacagaatgggcaaagccccctatttcattaagaaataggtaccaacgtacgaccagcacctggtccaaagaggctaccataggcaacgactgctatgcaaatagtccttctgtgcaagcatgcaagcaaaccatctgatccattatatcgtgatccaaccgtaagtaacatttaacacttaaacccttccatcaccagctcaataatctttataaaaaagctcctaacaaattatggttgtatctatggttggatcgtactgctatgcaaatagtccttctgtacaagcatgcaagcaaaccatctgatccattagatcgtgatcaaaccgtaagtcatatttaacacttaaacccttccaccaccaggtcaataatctttataaaaaagctcctaacaaattatggttgtatctatggttgaatcgtaatctaatggatcagatagtttgcttgcatgcttgcacagaaccactgcttgcatagcagtcgttgccggctaccacaacctcttacaatttcaacgacattagacggcaaacgaaaccccatgacatctagcaaacaaactgaagagtaatacacgtgttacctcactacttatcaaagacaactaaacgaaatcgtctcaaagatttgccaccggccaacagcaggagggccacgatcagtgaagacaccaacttcaatcagcctgagccagcgacatgcgagcaaacttcatcctagaattattctagagataggaacccagccaatagcaggaccaaagacttcctgcacaacctttcttgatctgcccacttcctgcctctgccatctttcttgctctctatttctggaggagagcccaggagtccaacaaataacagcaaagaaaaataacatcagtaggatcaagaattactttgttattgaaacaagcatcaacctt

SEQ ID NO: 5230 - DNA, 1063 bp, Zea mays
  Zm_smallRNAprecursor_719
acttcagcgccgtagcgcctggtatgagcctcatggagaagcaatggctagtccacggggctcatacttcagcgctgcagcgcttggtactcggacctcggctcgaggcattttctctaccccttcttaccctgaaaaagcagggtcaccttgtgtccttaaacctataaccatctttcggctaacctagcctcctccgtccctctgtaccaacaaggggtagtacaggaatattgacatgttgtccatcgactacgcctttcggcctgatcttaggccctgactcaccctccgtggacgaaccttgcggaggaaaccttgggttttcggggcattggattctcaccaatgttttcgttactcaagccgacattctcgcttccgcttcgtcgacccccactttcgcgtttgcttccctctaaggcggaacgctcccctaccgatgcattttgacatcccacagcttcggcagatcgcttagccccgttcatcttcagcgcaagggcgctcgatcagtgagctattacgcactctttaaagggtggctgcttctaggcaaacctcctggctgtctttgcacccccacctcctttatcactgagcggtcatttaggggccttagctggtgatccgggctgtttccctctcgacgatgaagcttatcccccatcgtctcactggccgaccttgacccctgttatttttgggtcatatctagtattcagagtttgcctcgatttggtaccgctcgcgcagcccgcaccgaaacagtgctttacccctagatgtccagtcaactgctgcgcctcaacgcatttcggggagaaccagctagctctgggttcgagtggcatttcacccctaaccacaactcatccgctgattcttcaacatcagtcggttcggacctctgcttagtttcatccaagcttcatcctggtcatggatagatcacccaggttcgggtccataagcagtgacaatcgccctatgaagactcgctttcgctacggctccggtgggttccattcccttaaccaagccactgcctatgagtcgccgg

SEQ ID NO: 5231 - DNA, 1064 bp, Zea mays
  Zm_smallRNAprecursor_720
atcacccaggttcgggtccataagcagtgacaatcgccctatgaagactcgctttcgctacggctccggtgggttccattcccttaaccaagccactgcctatgagtcgccggctcattcttcaacaggcacgcggtcagagatcactttcccctcccactgcttgggagctcagcacggtttcacgttctatttcactacccactggggggttcttttcaccttttcctcacggtactacttcgctatcggtcacctaggagtatttagccttgcaaggtggtccttgctgattcacatgggattccacgtgccccatgctactcgggtcagagcgtaagctagtgatgctttcggctactggactttagccatctagggtacggcactcaaccgcttcgcctagcagcacaacgcttgtattgctctcccacaaccccgttttcacggtttaggctgctcccatttcgctcgccgctactacgggaatcgcttttgctttcttttcctctggctactaagatgtttcagttcgccaggttgtctcttgcctgctcatggattcagcaggcagttcaaaaggttgacctatttgggaatctccggatctatgcttattttcaactccccgaagcatttcgtcgcttgctacgcccttcctcgtctctgggtgcctaggtatccaccgcaagcctttcctcttttgaacctcgccattaaagttaaggctatgccatcctaaggtgctactaaatggaaggatcttatcaacgtccatgaatgcgaaatcatagatcgaactgacgaattggcaaccttcggtgctatcatagtatccgctaagttcacgggctggagataagcggactcgaaccgctgacatccgccacagggtaaaccaccgcctctcaggcctccccgacgggttctaccatagaggacaacaataggcaataactccccccgaacacagcttacaactttcatcgtactgtgctctccaaagagcaactcttctcaaaatcccaaaacaaaaggtgctgagttggaatcccattctaagg

SEQ ID NO: 5232 - DNA, 1136 bp, Zea mays
  Zm_smallRNAprecursor_721
tgtgtcgcccagggcataaggggcatgatgacttggcctcatcctctccttcctctggcttaacaccggcggtctgttcagggttcccaaactcatagtggcaactaaacacgagggttgcgctcgttgcgagacttaacccaacaccttacggcacgagctgacgacagccatgcaccacctgtgtccgcgttcccgagggcacccctctctttcaagaggattcgcggcatgtcaagccctggtaaggttcttcgctttgcatcgaattaaaccacatgctccaccgcttgtgcgggcccccgtcaattcctttgagtttcattcttgcgaacgtactccccaggcgggatacttaacgcgttagctacagcactgcacgggtcgagtcgcacaacacctagtatccatcgtttacggctaggactactggggtctctaatcccatttgctcccctagctttcgtctctcagtgtcagtgtcggcccagcagagtgctttcgccgttggtgttctttccgatctcaatgcatttcaccgctccaccggaaattccctctgcccctaccgtactccagcttggtagtttccaccgcctgtccagggttgagccctgggatttgacggcggacttgaaaagccacctacagacgctttatgcccaatcattccggataacgcttgcatcctctgtcttaccgcggctgctggcacagagttagccgatgcttattcctcagataccgtcattgtttcttctccgagaaaagaagttgacgacccgtaggccttccacctccacgcggcattgctccgtcaggctttcgcccattgcggaaaattccccactgctgcctcccgtaggagtctgggccgtgtctcagtcccagtgtggctgatcatcctctcggaccagctactgatcatcgccttggtaagctattgcctcaccaactagctaatcagacgcgagcccctccttgggcggatttctccttttgctcctcagcctacggggtattagcaaccatttccagttgttgttcccctcccaagggcaggttcttacgcgttactcacccgttcgccactggaaacaccacttcccgttcgacttgcatgtgtttagcatgcc

SEQ ID NO: 5233 - DNA, 1172 bp, Zea mays
  Zm_smallRNAprecursor_722
gatctaagattgcaattcttccatgtttccgcagtagcatattgttccatggagctagggtccaaaataggaatcaacaagtgtttccacgactctaccgcccggccaatcctgttccactgaatcccctccctttttcatggccacatatctttacggctaaggagtgggaaatctttctcctgttacacaaatgaaatgtttcatttcatccaggaaaagccacctctttctccacaaacaatgtctttgtcatttgatccaggagccttccgttagataggaacagctttgctaaatactgagaactctcggatagagtattagaatgaaaagaccattaattatataaggaagagcccagggttctagcccattcccattcctaaatcaataattcgtagtgcttttgcctttcttgcgtactcctggtgaaccagttgctagccatatgtttaggaggcttttttctccaggtactggtactaagccgctttgccatctcttcatcttcatctgcaaagaattctcgacgtgaaaacacagagacaaaggcctgatctttgaataggaaaaagaatggatccgaaggtcccaaatcaattggcttattcgaaaaaagccttcttctttgaaagatatatctcgtgtctggtactgcattgttccactctgcaagaagtccgaatcagtctcttgcacctccccctttttatgataaatataccagaaataattcgaataaatagcagtctctgacaactcatcctctttaatctgcttggacccgctccaatacccataggaaaatccccagtcatattcagcgtacctgtccctgcaatcaaatagattgtcccaagggccccatattctaggagcccaagttatgctattgaaaattcgttcctctagcagttccggtttgaccattccgttccctttttcaaactccacttcttttcatatagcatccctaatcaaagagagaacaatatccatttcaaaacatttctaacggattccttggttcggaccgacgaagtaatggcactcgattattatcaacccgactgcaatctttttctgtcggtaaggattgcaccagagcaccttctacttctaataggccatgaactatagatagagaagaatcattctgagcgagtcca

SEQ ID NO: 5234 - DNA, 1175 bp, Zea mays
  Zm_smallRNAprecursor_723
tatatatatatagtttatctaataagagccctaggctctatataactgtagagagccccagcccatgtccgatcactttttacgcaagcgaacagatttatcgtaaacggaaaccattttagcgtaaacagagtaacaaccgcgagccctacatgtttacgctattccattcttccgtttatacataatagtgatttagcataactactccagccgacccatgttccagaaataaaggaatgggcccactaccccacttcccacgtggtcaaacacttctataccctaacccccgcgcggtcaaccatcctggccgactcgccgcgtttcttcagcggtcgcctgggcgattcttgttcatccaccgctgccagcccgtttcgccgtcctccaccgccgcacgccctcaacattaatcgccgccgccgttgacagcatcgtcgagccgctgccgttgtcaatcttgcgcgccccgcgtcacattggctcacgtccgcggtcgctatgtcgtccggattccaagatgctcgagttgatttttttaattttatgctttacaatgcaacttcctaatctccttccccactccggcagtgtgaatcgccttcatttgtctccgcgcgaactcaaccctaatcggcgccgccgttgacagtgtcgtcgagctggccgctgctgtcaatcctccgccaccgcgtcctataggtatttcacatgcccaccaacggtcttcattgatcttactgttcttgtgcgattatggttcagttatttatcatagagcctttaggtttgataaaggttcacggacctgttcttttggactcattgtatgctcaaattgtgtgggtgaagatatatgcaatgatgtgaattatacatacctttatgaagtaggggttgatattttgatgtggaaacaagtgtggtggggaggttgaattatgtaccgtgatagaccggacaggcccttgggcttccttgtatgggtaactttctgcattgataattccaccgtttctcataatgtagtctagggcctcggagcatgatccatgtttgcatccaaagttcctgaggttgtttccatctatcaggtgttgctcagaaagttttattaactccttgtttcgtatgaagtgagctgcctctatgagaccggtgacaccaaatgc

SEQ ID NO: 5235 - DNA, 1197 bp, Zea mays
  Zm_smallRNAprecursor_724
gaagatgatgatgaagctgcagatgatttggaggaactcccatgcccagatttccttactcaagccgacatattggaaaaatattttggaattgagtatgatagcgaccagtcaaggggttgttgatgtttagtcctaaacaacacgatatgagtatcgtaggtttcactcttagagataatgtattttgtatgaacctcttagagagtgtcaagtcaatgaactatcttcgagtactattgggaagtgtatctctttgatgtattttttttctagtgatatcgatggtgccgagtagcaccaaatttggacttgtgtccatatctatagatgctagtagttgagcactagctcctacaatcttaagtgtgtagaccccaagaagagattaagtcctgtagtctaccacctcccgttatttgtgggcttcaccgatggctggaaacatttggtgatagcaaacgaccttcgggttgaagacgtctgcgagcttgttaagaggccagacgatgttgagccggtgtactatgtccggatgtgtggtcacaaaattaaaatctgccccggctgcatgtgtgtgcttctcttctcttaggtgggtcgctaagtgatcttagtagccgacataagagaagagaagcgcacagatgaagccggggcggctttaaattttgtgaccacacatccggacagagtacaccggctcaacatcgtctggcctcttaacaagctcgcagacgtccccagcccgaaggtcgtttgatgtcaccaaatgtttcccgccctcggtgaagcccacaaataacgagaggtggtagactatagggcataatctcttcttggggtccttcagcattataacatcacagccatgccttctctgtctaactgcattggaaagtgccttttctccaagttcccttattgatggaaccagtatatcacactaacagtatatccctttatcgatggaaccagcttgaatggcagacaacgagcagcctagtatggatgtggtctgcaccggtgcgtctaacaaagttgatgaagacgcgaccaaacttgaatggcagacaacgagcagctccagtgaagggagcggggaggatagtactagtgacgacaatccttgtactcctatacctccaaggaagaaaaaaacatcagatgagcttgatgccgactatattcccaacg

SEQ ID NO: 5236 - DNA, 1197 bp, Zea mays; identical to SEQ ID NO: 5235
  Zm_smallRNAprecursor_725

SEQ ID NO: 5237 - DNA, 1198 bp, Zea mays
  Zm_smallRNAprecursor_726
gaagatgatgatgaagctgcagatgatttggaggaactcccatgcccagatttccttactcaagccgacatattggaaaaatattttggaattgagtatgatagcgaccagtcaaggggttgttgatgtttagtcctaaacaacacgatatgagtatcgtaggtttcactcttagagataatgtattttgtatgaacctcttagagagtgtcaagtcaatgaactatcttcgagtactattgggaagtgtatctctttgatgtattttttttctagtgatatcgatggtgccgagtagcaccaaatttggacttgtgtccatatctatagatgctagtagttgagcactagctcctacaatcttaagtgtgtagaccccaagaagagattaagtcctgtagtctaccacctcccgttatttgtgggcttcaccgatggctggaaacatttggtgatagcaaacgaccttcgggttgaagacgtctgcgagcttgttaagaggccagacgatgttgagccggtgtactatgtccggatgtgtggtcacaaaattaaaatctgccccggctgcatgtgtgtgcttctcttctcttaggtgggtcgctaagtgatcttagtagccgacataagagaagagaagcgcacagatgaagccggggcggctttaaattttgtgaccacacatccggacagagtacaccggctcaacatcgtctggcctcttaacaagctcgcagacgtccccagcccgaaggtcgtttgatgtcaccaaatgtttcccgccctcggtgaagcccacaaataacgagaggtggtagactatagggcataatctcttcttggggtccttcagcattataacatcacagccatgccttctctgtctaactgcattggaaagtgccttttctccaagttcccttattgatggaaccagtatatcacactaacagtatatccctttatcgatggaaccagcttgaatggcagacaacgagcagcctagtatggatgtggtctgcaccggtgcgtctaacaaagttgatgaagacgcgaccaaacttgaatggcagacaacgagcagctccagtgaagggagcggggaggatagtactagtgacgacaatccttgtactcctatacctccaaggaagaaaaaaacatcagatgagcttgatgccgactatattcccaacga

SEQ ID NO: 5238 - DNA, 1196 bp, Zea mays
  Zm_smallRNAprecursor_727
aagatgatgatgaagctgcagatgatttggaggaactcccatgcccagatttccttactcaagccgacatattggaaaaatattttggaattgagtatgatagcgaccagtcaaggggttgttgatgtttagtcctaaacaacacgatatgagtatcgtaggtttcactcttagagataatgtattttgtatgaacctcttagagagtgtcaagtcaatgaactatcttcgagtactattgggaagtgtatctctttgatgtattttttttctagtgatatcgatggtgccgagtagcaccaaatttggacttgtgtccatatctatagatgctagtagttgagcactagctcctacaatcttaagtgtgtagaccccaagaagagattaagtcctgtagtctaccacctcccgttatttgtgggcttcaccgatggctggaaacatttggtgatagcaaacgaccttcgggttgaagacgtctgcgagcttgttaagaggccagacgatgttgagccggtgtactatgtccggatgtgtggtcacaaaattaaaatctgccccggctgcatgtgtgtgcttctcttctcttaggtgggtcgctaagtgatcttagtagccgacataagagaagagaagcgcacagatgaagccggggcggctttaaattttgtgaccacacatccggacagagtacaccggctcaacatcgtctggcctcttaacaagctcgcagacgtccccagcccgaaggtcgtttgatgtcaccaaatgtttcccgccctcggtgaagcccacaaataacgagaggtggtagactatagggcataatctcttcttggggtccttcagcattataacatcacagccatgccttctctgtctaactgcattggaaagtgccttttctccaagttcccttattgatggaaccagtatatcacactaacagtatatccctttatcgatggaaccagcttgaatggcagacaacgagcagcctagtatggatgtggtctgcaccggtgcgtctaacaaagttgatgaagacgcgaccaaacttgaatggcagacaacgagcagctccagtgaagggagcggggaggatagtactagtgacgacaatccttgtactcctatacctccaaggaagaaaaaaacatcagatgagcttgatgccgactatattcccaacg

SEQ ID NO: 5239 - DNA, 1180 bp, Zea mays
  Zm_smallRNAprecursor_728
gatgaagctgcagatgatttggaggaactcccatgcccagatttccttactcaagccgacatattggaaaaatattttggaattgagtatgatagcgaccagtcaaggggttgttgatgtttagtcctaaacaacacgatatgagtatcgtaggtttcactcttagagataatgtattttgtatgaacctcttagagagtgtcaagtcaatgaactatcttcgagtactattgggaagtgtatctctttgatgtattttttttctagtgatatcgatggtgccgagtagcaccaaatttggacttgtgtccatatctatagatgctagtagttgagcactagctcctacaatcttaagtgtgtagaccccaagaagagattaagtcctgtagtctaccacctcccgttatttgtgggcttcaccgatggctggaaacatttggtgatagcaaacgaccttcgggttgaagacgtctgcgagcttgttaagaggccagacgatgttgagccggtgtactatgtccggatgtgtggtcacaaaattaaaatctgccccggctgcatgtgtgtgcttctcttctcttaggtgggtcgctaagtgatcttagtagccgacataagagaagagaagcgcacagatgaagccggggcggctttaaattttgtgaccacacatccggacagagtacaccggctcaacatcgtctggcctcttaacaagctcgcagacgtccccagcccgaaggtcgtttgatgtcaccaaatgtttcccgccctcggtgaagcccacaaataacgagaggtggtagactatagggcataatctcttcttggggtccttcagcattataacatcacagccatgccttctctgtctaactgcattggaaagtgccttttctccaagttcccttattgatggaaccagtatatcacactaacagtatatccctttatcgatggaaccagcttgaatggcagacaacgagcagcctagtatggatgtggtctgcaccggtgcgtctaacaaagttgatgaagacgcgaccaaacttgaatggcagacaacgagcagctccagtgaagggagcggggaggatagtactagtgacgacaatccttgtactcctatacctccaaggaagaaaaaaacatcagatgagcttgatgccgactatat

SEQ ID NO: 5240 - DNA, 1090 bp, Zea mays
  Zm_smallRNAprecursor_729
gtccataattgtatacattagaatgcaaatataatatgaaattatgtaaacatcaagtgaaaaataaccactggtgttagattttttgctaggccttaatagaccggtggtccggtgggtcggcttagggtatgtcgtggcccatccggaccacccattagatacgcttttgatgatcagtgaaattaaacaagcaattaatcagatgtacaaggattcagccctggccctaatggatttggtgcctctttctccaaaaagttctagaatcttattaaaggagatatgatcattgatgttcagtgacttttatgcagggaagttggatatctagtttctttttttggggttatcacattaattcctaagattaatatggatttcaaaattttcaccaaagttctgacaaataggttgtctctagtagctaaggaggctattgggggcagccagatagggtttttatgggttttttaagctggtgccctcagttttgatggtgtgctcacctatacccttagtcgtgtttttgctcagttttgcccttccagtgttatagaacagaagggcaaaacttagcaaaaaacacgactaagggtataggtgagcacaccatcaaaactgagggcaccagcttaaaaaaccattttattaaagacatgaatatcctagagggggtggtcatattacatgaaattattcatgagttgaagataaagaaaaaaggtctgataatgaaaattgattttgaaaaagcttacgacaaagtcaagtggaactttttggaggaagtaatgaaaacaaaaaattttccggataggtggattgatatggtgatgaggacatggagaggagcaactttttcaaaactttcatagatcttaggtagggtgaccctctttcgccaatgttattcaacttggtagtggatgccttaagtgtcatattagataaaggggtcgaaaagggtcacatctctggggtcttaggagaccttgttcctagtggcatttcccacgtccaatacgtagatgatacagtgatcatgatagatgggtctgataggtcaatcttaaacctaaaattaatc

SEQ ID NO: 5241 - DNA, 1112 bp, Zea mays
  Zm_smallRNAprecursor_730
aggactagtcaaacagtgctttccgttaatcacactcgtcgggaggagagcaaatagaggtgctaacaagaaaaaaaccatcacgcacgcgtccctccccccccccccccccccaaggctgaaggctggctaaaattccatcatcggaagcctcaaagatggcaacgagaacctcgccgataaaagaaaagaaacgttgccagcgtaagaatccatggcgtacatgcgctgggcggcttccataaagagtaccttattccaaagagctagcagagctcatcgtaatccgagcagggcacaagataaggtttcaggtagggacacgaccaggccggcaggcgcctcagagcaaacagtgccaccacggcgaccgatgtgaggctgcacagcctgcactgcacgacgacggcgacgcatcatcggcgcgcagcgatggacggaagtgggacggcggtgatggatgtatacggcggaacaagtcccaaggatgagagagagagctgacagaaagagaagtgagcacgcaacagcagctgcgcctaggcctaggctaggcatccatcgatccgtcgctttggggcagccgtatatagatgcagtctggccgatgcgtgctcactctcttctgtcagccacaccatctagcagccaggcccctcatccgcccatcccgccgtcgaccaccgctgcaacagtacaaagcagacgcaacaagaactggacacgaagagagagagagagagagggggcaacacgtttacacaaactgatcttcatgtcatctttcccgaattggggaaggaggaggaggcagccgtccagctagatctgggaggctatcctactggcagcttgactgggtttcttcactcgttctggtggaagagggcttatatagaggagacggtccccaaattaccttgttctttcttgctagtggtgccgcatagccctacagtggttagggttggacttaggaaatagtagggtttatgaggctaggtccagcacactggcctttttcgtttgctgttgcgaccccaacggtaagcgacttggccggtcgtttggtgggcctgctgactagtcgttgaggtcgataatgactgaat

SEQ ID NO: 5242 - DNA, 1140 bp, Zea mays
  Zm_smallRNAprecursor_731
agtagaataaaactgagcaatgatttcatcattccaatcatattggaatgccatgatagtcttcatcctcttttgctcacaggccctcaatgtctgtgtcatctcaggatccccaatagcttcgcacctactccagttaataaaacgctgatggaggataggctggtgcttctttggaaggataactgaattatagaaatcaacatgaaggagattccagaagcgattaccatcaatcctgacatcacgaacatggaatgtaggattttggaagcgcatatcttgaagaagggcagaccctccgctggcactgaaatcaataacatgttcgttggcggaacgacgggcctgcgctttgtgaagcactaacccctggataatgggggcatgagcaggagggagattaacatcatcatcctttcctcccttgtcatcacttgtagcctcctaggcctgtggattcgtcgcgggacgagaccgaccggaggggttccgagccgttcgtccgcgaggtccatgagacccagaggcctcaccacctggcatgacattgccagatccgcgcccacgcatggatctggaccgaggaggagtgtcttcacgaatttatggggcatcgtcacttgaatcggattcaacaaccgatggatttctacgacgcaccatccttaagattaaacaaagaagaacatatggtgagagagatattgatgttcaaggagtttaacaaacacgtttgaggaaagacaagtataatattgggtatgcacttcaaccgttcatatgagcggtttagctacaatgaacaataccaacctacttaactcaaaacaatgttcgagacaatgataacggtttcagtgtgccatacacctaaactacacaatctccttgaagagatacttaagataatcaagaattgtatggatcaagtcaaaaatagggaagatgaaacaatacctcgatctgtgaaaccgaccacgaaaatcccgaagatgagtggagagatggtagaggatcccgaggggatcgaatctccaacaatctccacgaagttttgatagtttttggagggatttgagtgtaggatgtgagagagggagagaggaatgagggtgtcgtcgactggaagaaatgaga

SEQ ID NO: 5243 - DNA, 1098 bp, Zea mays
  Zm_smallRNAprecursor_732
cccaatcatgggcagataggtgccaaaaagcctctggttgttttgtttggatggcgacgcggacatgctggttgctccgctgggatcgatcgagtggctcaagtctggtggttaaggcctgcttaaacaatgacaagtttggggcttgccatgagtgctgcgtccaaaacaaatgcgttatgggtgcaaagtcttggtaggctgtcacggggcatcatcagcaactggctgatgttgttttgaagcgcgctcgtagtggaggttgttttaaatcgaggcaattgcaaaccatgtagttgaacccagctggacgacgtcatcagcacggcatccccgtcggtagtaggcccggatccaggcgctgcgtttttggcagcggtgctgcttgagcgttaggctatctgcactcatactactctaaatttctaccctaaaaagaatattctgtcctggtcagcaaaattctttactctatatcacaatcctccgcactcatgtttactctataccatatattctattatttctctctcctggtgccccgcctctggtcccacaacctttgctgcctccggccccgcctctctcctggtgcacggagcagacgtatgcagtagacgttgctgcaactctacatttaaggtttctggtttgcttgcttgccttagcgtaccggtcccagtacacggctgcagcactcgcgttaactctatccgcatagcgtaccggttccagtcattcactgcggctagccttagcattgagagttgagacgggaaggaagtgcgtaacgcggatgccgccgaagcaaacaaaactgccatgtccaaatccatcccccctttgcatacggtcgtgggtagggctggaaaaaaagctcgagctcgacgagctggctcgggctcgcagcagctcggctcggctcggaccggctcgacgctccgaacgagcccgagccgagcctgtttttctggctcgtgaaaagagcgagccagctcggctcggctcggtgcagctcgcgagctggctcgtggctcgacccaacaacaatttgttacataaaatcttaattagcatataatattaataccgagtaga

SEQ ID NO: 5244 - DNA, 1051 bp, Zea mays
  Zm_smallRNAprecursor_733
aactttgagttgctggaccgttgtctccttataatgtaattatctatttattttgtatagaactcctattatatagtaaagttgtgacattcgatcttgtgccatgattcatcatatgtgtgagacttggtctcggcacacctggtgattatgttcgcgccccggtcttggtgccctaaaacccgggtgtgacattgaggcacaaacccgcttctcatcaaaatcaattgctcgaggtaccatgctattcttaatcttatcatcctcaaacaagatagtgtatcttgcttctacaaacttagtatgtctctcaggcgagcagaaataatactattttatctttctggataggtaatgaaatagcaacttagtgtatctgtaacgcacccactgggccagtccgcccaaagcccaccatcgccagcgtcggacgttcatgcgctcgtgcgcagcctattcagacgggtacctcgctctcaaaacctaggctaagagaggagggaggcccgcccttataagtgcaacacgacccccttggctaggcgaggtggtactaacccagggcgtgcataccggtcccttacatcccacccccctaagaggcccaaagctcttccaggcagcagcggcaatgtaggctccgataccaattgtaacgcacccactgggccagtccgcctaaagcccaccatcgccagcgtcggacgttcatgcgctcgtgcgcagcctattcagacgggcacctcgctctcaaaacctaggctgagagaggagggaggcccgcccttataagtgcaacacgacccccttggctaggcgaggtggtactaactcagggcgtgcataccggtcccttacagtatccgagtctaatttcctgatatctaggttaaatgttttacctttcactagacagccccacacatacaaatctagttgtgcgtctatagaatgtgggcttggtggcaattttgcaaagctcattctttataatagcaaatatccaattctctcctttctaacccataaccatagctactaggatggataa

SEQ ID NO: 5245 - DNA, 1225 bp, Zea mays
  Zm_smallRNAprecursor_734
ttttgtatagaactcctattatatagtaaagttgtgacattcgatcttgtgccatgattcatcatatgtgtgagacttggtctcggcacacctggtgattatgttcgcgccccggtcttggtgccctaaaacccgggtgtgacattgaggcacaaacccgcttctcatcaaaatcaattgctcgaggtaccatgctattcttaatcttatcatcctcaaacaagatagtgtatcttgcttctacaaacttagtatgtctctcaggcgagcagaaataatactattttatctttctggataggtaatgaaatagcaacttagtgtatctgtaacgcacccactgggccagtccgcccaaagcccaccatcgccagcgtcggacgttcatgcgctcgtgcgcagcctattcagacgggtacctcgctctcaaaacctaggctaagagaggagggaggcccgcccttataagtgcaacacgacccccttggctaggcgaggtggtactaacccagggcgtgcataccggtcccttacatcccacccccctaagaggcccaaagctcttccaggcagcagcggcaatgtaggctccgataccaattgtaacgcacccactgggccagtccgcctaaagcccaccatcgccagcgtcggacgttcatgcgctcgtgcgcagcctattcagacgggcacctcgctctcaaaacctaggctgagagaggagggaggcccgcccttataagtgcaacacgacccccttggctaggcgaggtggtactaactcagggcgtgcataccggtcccttacagtatccgagtctaatttcctgatatctaggttaaatgttttacctttcactagacagccccacacatacaaatctagttgtgcgtctatagaatgtgggcttggtggcaattttgcaaagctcattctttataatagcaaatatccaattctctcctttctaacccataaccatagctactaggatggataaaaatatgtgaatacctttagggttgaggaaagggcaccacaaatgtgagggaatcttgttagcggtgtttagagacagtatccatgggtggcggcgactttccccttgctttcgtgtacaaatgattgagtcttaagacttatttgatagaacttcgctccatgattttttagctccgagagttgattatctgatagagtgattctcttccgaagtgaatctat

SEQ ID NO: 5246 - DNA, 1142 bp, Zea mays
  Zm_smallRNAprecursor_735
gagggatgatttgcatcctgatgctgtgcgctccaaacatccattctgtccatgacgtacgcatcaccacaaccgccgcaggcaatcctcacagtcacagctagccatcatggcaggcgggagcaggacggacgacaggcagtctgggtcagctagaggcagaagcagaatcatgctcccttccctggctcgtcccgcggacctggcctcggccacacgctgctggccggccgtatgcgccgccatcacgcggcatgattgcggcgagcgaacggcccgtcgcgtttgtccccattgcacacatcaacaggatcacgcaggtaggcaggcaggctcaccacaccacacatatgatgaggatggatggatggcgctggatgaggagttgatggccgtaatcatgcctgcatgcacattgcagagaaagaattctcgcctattcccgtgctcaagggctcacggcaacgactactatacaagcagttcttctgtacaaacgtgcaagtaaaccatctgatccattagatcgtgatccaaccgtagatcacatttaacacttaaatcattccaccaccagctcattaatctttataaaaaaacctctgacaaaccatgattgtatctgtggttggatcgtaatctaatggatcagatagtttgcttgcatgcttgcacagaaggactgcttgcatagtgctcacatggcatgggcatgtcattctttgccctctccggcccgatcgatctccatatctcaagctagccttgctcattattccatgcaaattatactaggatcttgcgaccatcatgagttcccatgcaggctgaggccgagctagagaacaattctgttttctgtacggtactagtacatccacatcacatcattccacattccccacttgttcggagcaaaccggagtacgtacgtatacgtgaaatgcgtcattaacctctatacactttgttgacgccttttcggagcgccaaataatcaagaagaaccggcggcggtgctctctggtcaggggcggacggtccgcgacctggcgcaggggctaaggtttcctgcctgacggccggacggtccgcgccctggggccggacggtccgcgcgtgcgcaggggcggcggaagatc

SEQ ID NO: 5247 - DNA, 1143 bp, Zea mays
  Zm_smallRNAprecursor_736
gagggatgatttgcatcctgatgctgtgcgctccaaacatccattctgtccatgacgtacgcatcaccacaaccgccgcaggcaatcctcacagtcacagctagccatcatggcaggcgggagcaggacggacgacaggcagtctgggtcagctagaggcagaagcagaatcatgctcccttccctggctcgtcccgcggacctggcctcggccacacgctgctggccggccgtatgcgccgccatcacgcggcatgattgcggcgagcgaacggcccgtcgcgtttgtccccattgcacacatcaacaggatcacgcaggtaggcaggcaggctcaccacaccacacatatgatgaggatggatggatggcgctggatgaggagttgatggccgtaatcatgcctgcatgcacattgcagagaaagaattctcgcctattcccgtgctcaagggctcacggcaacgactactatacaagcagttcttctgtacaaacgtgcaagtaaaccatctgatccattagatcgtgatccaaccgtagatcacatttaacacttaaatcattccaccaccagctcattaatctttataaaaaaacctctgacaaaccatgattgtatctgtggttggatcgtaatctaatggatcagatagtttgcttgcatgcttgcacagaaggactgcttgcatagtgctcacatggcatgggcatgtcattctttgccctctccggcccgatcgatctccatatctcaagctagccttgctcattattccatgcaaattatactaggatcttgcgaccatcatgagttcccatgcaggctgaggccgagctagagaacaattctgttttctgtacggtactagtacatccacatcacatcattccacattccccacttgttcggagcaaaccggagtacgtacgtatacgtgaaatgcgtcattaacctctatacactttgttgacgccttttcggagcgccaaataatcaagaagaaccggcggcggtgctctctggtcaggggcggacggtccgcgacctggcgcaggggctaaggtttcctgcctgacggccggacggtccgcgccctggggccggacggtccgcgcgtgcgcaggggcggcggaagatcg

SEQ ID NO: 5248 - DNA, 1036 bp, Zea mays
  Zm_smallRNAprecursor_737
cagggttttcggcgagatgtttgcagcgggggcgagcgaagggcgagcggaggcgggggcgtgcggtgcggcgcggcagcgatgaaaacggaggttgggcgggggcgtggttatcgggggcaggggcggtctacacaccacgcttaatgtagtacagataaaaaaactaccaaatataatatggtcaaataaaaaatttataattatctaacatcttaaaaataaaaagtataaaaactgtatgtctatataaaaattaattgatcaggtgttgttgataaaatgtgcgtgcatactgagcacgatcttctcatgtccaagcgacctgacatggatgacaggcatgcaacatgtgtcgtactgaacctagagcacgtgcatgacctagttgtgctcgatctgcttagaatgccaccatacgcacttgttctaaaacgagatagacacctaggccctgtttggcacagcttattttcagcttcttcacaaatttaagcagaagttctgccaaacagctagcttctgcagcagcttatcagttcagctgcttgtcagaatacactaaaagcagccaacaagcagaagctgtttttcaccagcttatcagataagctgctttttcaacaagcagcagctgtgccaaacagggccctagtgtagatgcacacccagttccacctagtaccgtgatgtgttgcgtcgtcacagtgaacacatcaaataaatataacaaaactactactccctccggtttcctattagttgtcgttttggttaaggttcgagtcaaagttataaaattttgactacaaataactattttgttatttagttttggaatctaatatttatatgcaccaatttgtcataaaaaatacttttataaaagtataaatgtattaagagttcatttgtattttaacaaaaaacattgatcaaagttatattttggagaccgtgtcgctatcctaaacgacaactaataggaaaccggagagagtatgtagaagtaatatttctatacctattatctata

SEQ ID NO: 5249 - DNA, 1127 bp, Zea mays
  Zm_smallRNAprecursor_738
ttgttcggaagctagtcacaaccttgtcatacatgtccttgatgagcgtaacatattttgttgggactttatgcttattcaatgcccatcacatgagatttctaggtattttatcatagaccttttccatgtcgataaaaaccatgtggaagtccttctgctccttatatcgctcaatgacatgctttattaagaaaattgcttccatggttgaccttgcagacatgaatccaaattggttcatggtgatatgcgtcattcctcttcggcgatgctcaataactctctcccatagcttcatagtgtggctcatgagcttaatccctcgatagttggtacaactttgaatatcttccttgttcttgaagattggtactaatgcactcctccactcatcgggcatttccacacctctattgggataccatctgggcccatcgtcttgccccctttcatcctctttaaagtttttttgacctctgattcttggatcctgcatacaaagcatctatttaaatcatcaaaggagtcatccaattgggtgtccatagtctcattctcacgattgaaaagattgtcaaaatacctctgccacctctgtttgatgtcttgtcctttcaccaagagttgatccatctcatccttaatgcatttaacttggttgagatccctcatcttcctttcctgaatcctagctatcttatagacatccttctccccttcttttgtacttagtcttcggtaaagatcatcataggctcgaccatttgcctcactcacagctcgctttgtagtcttcttatgcatttaacttatttcttatgattctgacaatattaggtcatgtgctgcattgttaagttcgggattcttataattatacatatgttgaatatacttttaatatttttcatttatttttacaggcttgctttgaagggaacccattcaagacagttccaggcccatttaagctcttctggcaatgcatgcgctcaaaacctgggtatgtgtaccttgttattatttatgcgcttaccttctggcatatctcatgattctcatctgatctgcaataagatacgagacaaatatttgatggttctgatgcattaagcactaggttg

SEQ ID NO: 5250 - DNA, 1096 bp, Zea mays
  Zm_smallRNAprecursor_739
cgctctgtagacagcagcgcccctgtgcagtctcttccacccctgacgcgcgcgcagaaattttttttttggtgtgcatgcagaagcgaggcacctttgccctgtccaatcttttcccctgcggcgcacagtgttcctttttgcttgctgccgctcctgtgcgcgccattttttttgtcgattgcctgtactcgaagtggagaatcgttttctgggtatgcatgcagagttcggtcgtttcttgtctgcgtgcacaattttttttgctgtccggtcaacagcagggatgcgcatgcaaattttttttttattttgttctgtccggtcacctcttctctgctcagcgcgcgcagatttttcttggacatttctgctctgcccgcgcactagccatgcatgcgtgtcaggggcgcccaattttttttcctgtccagtcacttccagcagctgcgcaaatttgaatttttttttctctgttgtttctggttctctgaccacactggtcagaaccagctgaactggcccttgggggcggttgaactggtcctgaggaccagctcagctgcctatatatacttgacttcccctcctcttctcccacttcattcactctcgccttggtcgcttcacaacctttagagcctctccttcacacacttcaaccgcttcacagtttcaccaccttttcaatcatggtgcgtcgtcgcaacccctctgtggttgagtttagcagtgactccgacgagattcaggaggaatctcccgtcccctctcctccgcctcgtcgctccctctctaagagaggacgtggctctggtcggatggctggcgagggctcttccatgccctcgcagccgactcgcgggagacgccaaaaggttggcgcctctcgtcctcgtcgtagcacgtcttcctcagggtatgctccctgccaagaggaggatggggctttcgacgacttcgtcgaccttccggcgcctgatgctctctacgtcaccggactgcacatgcatccggcgaacgtcagccgcggtccgcatgaatctcccgtcgacttcactcagaagggaatagaaacccttcagcgtctgaggtt

SEQ ID NO: 5251 - DNA, 1149 bp, Zea mays
  Zm_smallRNAprecursor_740
cgtttcttgtctgcgtgcacaattttttttgctgtccggtcaacagcagggatgcgcatgcaaattttttttttattttgttctgtccggtcacctcttctctgctcagcgcgcgcagatttttcttggacatttctgctctgcccgcgcactagccatgcatgcgtgtcaggggcgcccaattttttttcctgtccagtcacttccagcagctgcgcaaatttgaatttttttttctctgttgtttctggttctctgaccacactggtcagaaccagctgaactggcccttgggggcggttgaactggtcctgaggaccagctcagctgcctatatatacttgacttcccctcctcttctcccacttcattcactctcgccttggtcgcttcacaacctttagagcctctccttcacacacttcaaccgcttcacagtttcaccaccttttcaatcatggtgcgtcgtcgcaacccctctgtggttgagtttagcagtgactccgacgagattcaggaggaatctcccgtcccctctcctccgcctcgtcgctccctctctaagagaggacgtggctctggtcggatggctggcgagggctcttccatgccctcgcagccgactcgcgggagacgccaaaaggttggcgcctctcgtcctcgtcgtagcacgtcttcctcagggtatgctccctgccaagaggaggatggggctttcgacgacttcgtcgaccttccggcgcctgatgctctctacgtcaccggactgcacatgcatccggcgaacgtcagccgcggtccgcatgaatctcccgtcgacttcactcagaagggaatagaaacccttcagcgtctgaggtttaccaaccctactctcactcctcgtcatcctggtgtccaggaccctcggttctggaatcttttccaggctgacttctacaattctgtcattctttccaagaaacacccagtcgtccgacatagatttattgactgggagggttgtgagaatatgggagatgctgacatgtcgtcagctctcgtaaacttagagagaaaggggttacgtaacattatgaccatggaatacccctggaacgatgaggtggtagctcagttctatgccaccctctggataaagaaagtaga

SEQ ID NO: 5252 - DNA, 1067 bp, Zea mays
  Zm_smallRNAprecursor_741
tgtttctggttctctgaccacactggtcagaaccagctgaactggcccttgggggcggttgaactggtcctgaggaccagctcagctgcctatatatacttgacttcccctcctcttctcccacttcattcactctcgccttggtcgcttcacaacctttagagcctctccttcacacacttcaaccgcttcacagtttcaccaccttttcaatcatggtgcgtcgtcgcaacccctctgtggttgagtttagcagtgactccgacgagattcaggaggaatctcccgtcccctctcctccgcctcgtcgctccctctctaagagaggacgtggctctggtcggatggctggcgagggctcttccatgccctcgcagccgactcgcgggagacgccaaaaggttggcgcctctcgtcctcgtcgtagcacgtcttcctcagggtatgctccctgccaagaggaggatggggctttcgacgacttcgtcgaccttccggcgcctgatgctctctacgtcaccggactgcacatgcatccggcgaacgtcagccgcggtccgcatgaatctcccgtcgacttcactcagaagggaatagaaacccttcagcgtctgaggtttaccaaccctactctcactcctcgtcatcctggtgtccaggaccctcggttctggaatcttttccaggctgacttctacaattctgtcattctttccaagaaacacccagtcgtccgacatagatttattgactgggagggttgtgagaatatgggagatgctgacatgtcgtcagctctcgtaaacttagagagaaaggggttacgtaacattatgaccatggaatacccctggaacgatgaggtggtagctcagttctatgccaccctctggataaagaaagtagacgaggaagccgatgggtatgattacccagtcatgtatttcttcatccagggtaactggcacaaagtcagttatcgtcgttttgcccatattctgggcttctctgatgcagacattcagggcagcaacatgcgagtgcatggcattcggctgcccatgcgg

SEQ ID NO: 5253 - DNA, 1190 bp, Zea mays
  Zm_smallRNAprecursor_742
agctctcgtaaacttagagagaaaggggttacgtaacattatgaccatggaatacccctggaacgatgaggtggtagctcagttctatgccaccctctggataaagaaagtagacgaggaagccgatgggtatgattacccagtcatgtatttcttcatccagggtaactggcacaaagtcagttatcgtcgttttgcccatattctgggcttctctgatgcagacattcagggcagcaacatgcgagtgcatggcattcggctgcccatgcgggaagagacggaattcattcatgtctctactgagcgggagttctggacaaccgctaacatgcataggtactacaggtaccttaattccttgtcccggatgaccgttctcccaaagggcggtaatcaaatgaacgtccttggggagagtcgagtcctcctcctcctccttgctccaaacagtctcgcccgcatcaatgtgtttgacatgatctgggaggagatcgtccgtgcttcctggtctcctcacagagggtgtcttcatgcaccctttatcatgaagatgatcgaagtggttacccagacccacttcgaaaaactcgtcaaacactcccgctacgtaccctactgggttgattcctccaacccagctgctcgtacgaagcgggttccctcacggtctggaggccctgcctcctcctctgagccacctcgccagcctccccaccatccttcctcctctccccccgctgctgcctcgcgtccctctcctggccgcggctctcccatgccacgtgctcgtggtcgtggtcgtggtcgtggccgcgggatgggtgctcgcttggtccatgggcttgcggcatttttctccatgtgccgcaacatttctgctgatgtccatgaggtggcacggcgtcagcgggagactgacgacaatcttcgtcgtcaagcttcctccatgggcatgccttttgtccctcgttcgcctgatgtgcctctccatcctcctcccccggagatcaatgagtggcaccagcaggcctacggggtgccttttatgtctgcagacgatgaagatgaagaagtctatgttgatgatcgcggaggagtttgccccgcctccctaccatggggatccgggtcaatcctcctcccaccctccgcctccttacccgggtccgggacccattcctggtgac

SEQ ID NO: 5254 - DNA, 1070 bp, Zea mays
  Zm_smallRNAprecursor_743
tagcgcagaaacaaggtaaagtacatgtaaaccctaatggtaaccaaggtacggtttgaaacgaacccggatcaatccgaggtgtagaccttggcgatgcgacgaagcgtaccttggaccttgtacctcgaaagacgcagatctgctgagcgtagatctgtcggcgaatggatgacctcccttcgacctcgaccccaaccctaacgttccggcggacagcgacgaacggcgccggcgtcttcgcacggatcggccgggtcgccggtccgcgaaggttgacggcggagtcgcgtggacgagcccactgctgctcgccggccggaggaagacaaatgattcgcgggcgacggcggatcgacgcgtaccttctccggcggcggttcggtcgcccgcggatcgcctcgggcgtcttcctcggagtattccgagcgcgcgctcttgcctgggaaggaagcggctgcgagaaacttgagaaaattcctggtatgccatcagattttatactcatcccttgtgtgccactgagtggcatataggtatattttttggtgtctatgacatgtggggccagtggcatacaaggaatgagtatattttccagtggcatacagggaattggccctacagggaattggcccttcaggagaaaattcctggtatgccatcagattttatactcatcccttgtgtgccactgagtggcatataggtatattttttggtgtctatgacatgtggggccagtggcatacaaggaatgagtatattttccagtggcatacagggaattggcccttcagacgcagggaagggatagtttgtaaccggataagcccccgtggggagccatttgatattttatcacttggacttctctaatttattatcgaacctataaattatagacatatatagttttacgagtcacaagtcataaacaccgaatgacatagtattagagagctcaaacttagagcgacaaaaatagcaaaaaaaaatttccgccgagtagaccgtcggcctgacagcctccgccggaggagttactgtcagggagacctcgcgatcgg

SEQ ID NO: 5255 - DNA, 1243 bp, Zea mays
  Zm_smallRNAprecursor_744
tagcgcagaaacaaggtaaagtacatgtaaaccctaatggtaaccaaggtacggtttgaaacgaacccggatcaatccgaggtgtagaccttggcgatgcgacgaagcgtaccttggaccttgtacctcgaaagacgcagatctgctgagcgtagatctgtcggcgaatggatgacctcccttcgacctcgaccccaaccctaacgttccggcggacagcgacgaacggcgccggcgtcttcgcacggatcggccgggtcgccggtccgcgaaggttgacggcggagtcgcgtggacgagcccactgctgctcgccggccggaggaagacaaatgattcgcgggcgacggcggatcgacgcgtaccttctccggcggcggttcggtcgcccgcggatcgcctcgggcgtcttcctcggagtattccgagcgcgcgctcttgcctgggaaggaagcggctgcgagaaacttgagaaaattcctggtatgccatcagattttatactcatcccttgtgtgccactgagtggcatataggtatattttttggtgtctatgacatgtggggccagtggcatacaaggaatgagtatattttccagtggcatacagggaattggccctacagggaattggcccttcaggagaaaattcctggtatgccatcagattttatactcatcccttgtgtgccactgagtggcatataggtatattttttggtgtctatgacatgtggggccagtggcatacaaggaatgagtatattttccagtggcatacagggaattggcccttcagacgcagggaagggatagtttgtaaccggataagcccccgtggggagccatttgatattttatcacttggacttctctaatttattatcgaacctataaattatagacatatatagttttacgagtcacaagtcataaacaccgaatgacatagtattagagagctcaaacttagagcgacaaaaatagcaaaaaaaaatttccgccgagtagaccgtcggcctgacagcctccgccggaggagttactgtcagggagacctcgcgatcggctggggtggagacggccaaccaatccgatcattcgattcgtcatcattgcacgttatcctcttgcctgcctctccctctctagccctcttcttctccggtcagagcagagcgtatgcatctcctcctacatgctgctggcctgcccggctgccctcccgttcattcaattcat

SEQ ID NO: 5256 - DNA, 1105 bp, Zea mays
  Zm_smallRNAprecursor_745
gatcaatccgaggtgtagaccttggcgatgcgacgaagcgtaccttggaccttgtacctcgaaagacgcagatctgctgagcgtagatctgtcggcgaatggatgacctcccttcgacctcgaccccaaccctaacgttccggcggacagcgacgaacggcgccggcgtcttcgcacggatcggccgggtcgccggtccgcgaaggttgacggcggagtcgcgtggacgagcccactgctgctcgccggccggaggaagacaaatgattcgcgggcgacggcggatcgacgcgtaccttctccggcggcggttcggtcgcccgcggatcgcctcgggcgtcttcctcggagtattccgagcgcgcgctcttgcctgggaaggaagcggctgcgagaaacttgagaaaattcctggtatgccatcagattttatactcatcccttgtgtgccactgagtggcatataggtatattttttggtgtctatgacatgtggggccagtggcatacaaggaatgagtatattttccagtggcatacagggaattggccctacagggaattggcccttcaggagaaaattcctggtatgccatcagattttatactcatcccttgtgtgccactgagtggcatataggtatattttttggtgtctatgacatgtggggccagtggcatacaaggaatgagtatattttccagtggcatacagggaattggcccttcagacgcagggaagggatagtttgtaaccggataagcccccgtggggagccatttgatattttatcacttggacttctctaatttattatcgaacctataaattatagacatatatagttttacgagtcacaagtcataaacaccgaatgacatagtattagagagctcaaacttagagcgacaaaaatagcaaaaaaaaatttccgccgagtagaccgtcggcctgacagcctccgccggaggagttactgtcagggagacctcgcgatcggctggggtggagacggccaaccaatccgatcattcgattcgtcatcattgcacgttatcctcttgcctgcctctccctctctagccctcttcttctccggtcaga

SEQ ID NO: 5257 - DNA, 1070 bp, Zea mays
  Zm_smallRNAprecursor_746
gacctcccttcgacctcgaccccaaccctaacgttccggcggacagcgacgaacggcgccggcgtcttcgcacggatcggccgggtcgccggtccgcgaaggttgacggcggagtcgcgtggacgagcccactgctgctcgccggccggaggaagacaaatgattcgcgggcgacggcggatcgacgcgtaccttctccggcggcggttcggtcgcccgcggatcgcctcgggcgtcttcctcggagtattccgagcgcgcgctcttgcctgggaaggaagcggctgcgagaaacttgagaaaattcctggtatgccatcagattttatactcatcccttgtgtgccactgagtggcatataggtatattttttggtgtctatgacatgtggggccagtggcatacaaggaatgagtatattttccagtggcatacagggaattggccctacagggaattggcccttcaggagaaaattcctggtatgccatcagattttatactcatcccttgtgtgccactgagtggcatataggtatattttttggtgtctatgacatgtggggccagtggcatacaaggaatgagtatattttccagtggcatacagggaattggcccttcagacgcagggaagggatagtttgtaaccggataagcccccgtggggagccatttgatattttatcacttggacttctctaatttattatcgaacctataaattatagacatatatagttttacgagtcacaagtcataaacaccgaatgacatagtattagagagctcaaacttagagcgacaaaaatagcaaaaaaaaatttccgccgagtagaccgtcggcctgacagcctccgccggaggagttactgtcagggagacctcgcgatcggctggggtggagacggccaaccaatccgatcattcgattcgtcatcattgcacgttatcctcttgcctgcctctccctctctagccctcttcttctccggtcagagcagagcgtatgcatctcctcctacatgctgctggcctgcccggctgccctcccgttcattcaattcat

SEQ ID NO: 5258 - DNA, 1171 bp, Zea mays
  Zm_smallRNAprecursor_747
acccttatttgttttgtcattaaatcaccaaaaccctcacttggggttgattgcacttacaatctccccctttttggtgattgatgccaaaacaattaaggtcaaaaagataaacatttgcaatagaaaatttcttttgaatgattgtatgtagatggctccccctaaatgtgtgcacgattgtgaatccaatgttttgacataatatgtcatgtgagcaacacaattagagatagtgacaaaaaccatactgaatacaaccatccgaggggtgcaagagtgtcataacaggagttgtgatgcatatgactatctctaaatacacatcatttttacttcatagcaaaacaatcattacaaactgatgggacaaaagatgatggccagaagaccatcatatcactttgaataaaaaacccagcagttttatttcatacaatgataagaggatacaagccacaacggtggccaaaacaaaaataatccaaaagaaatacataaccgaaagaaccacaaacagaatgactagaaattttggattttctccccctttttggcaacaagtaccaaaaacgaagagagagacatggatacatgaatcaatatcctctaggaggaggataggacggaggatatgatggagggtatgatgtgtagttagggaagagggtcctcatcacgtcttcctcgaatgaggattccctaggtggctcatcagccgcagaaaaaacagatgccgaagatgtacgatgatgacgaggaggtggagggtggtgatggtaaccagagccggatggcctagggtcaccgggagtgggtccctaacctgagtagggaggcggagggtgagaggatgattgaccaggatccccatggtagggaggcggggcaaactgctcgcgatcatcaacgtaggcttcttcttcttcatcgtctgctgacataaatggcaccccataggcctgccggtgccactcattgatctccgggggaggaggatggagaggcacgtcaggcgagcgaggggcaaagggcatacccatagtggaagcttgacgacgaagattgtcgtcagtctcccgctgacgccttgccagctcatgtacatcagcagaaatgttccggcacatagagaaaaatgccgcaatcccatggaccaagcgagcaccca

SEQ ID NO: 5259 - DNA, 1143 bp, Zea mays
  Zm_smallRNAprecursor_748
cggtggccaaaacaaaaataatccaaaagaaatacataaccgaaagaaccacaaacagaatgactagaaattttggattttctccccctttttggcaacaagtaccaaaaacgaagagagagacatggatacatgaatcaatatcctctaggaggaggataggacggaggatatgatggagggtatgatgtgtagttagggaagagggtcctcatcacgtcttcctcgaatgaggattccctaggtggctcatcagccgcagaaaaaacagatgccgaagatgtacgatgatgacgaggaggtggagggtggtgatggtaaccagagccggatggcctagggtcaccgggagtgggtccctaacctgagtagggaggcggagggtgagaggatgattgaccaggatccccatggtagggaggcggggcaaactgctcgcgatcatcaacgtaggcttcttcttcttcatcgtctgctgacataaatggcaccccataggcctgccggtgccactcattgatctccgggggaggaggatggagaggcacgtcaggcgagcgaggggcaaagggcatacccatagtggaagcttgacgacgaagattgtcgtcagtctcccgctgacgccttgccagctcatgtacatcagcagaaatgttccggcacatagagaaaaatgccgcaatcccatggaccaagcgagcacccatccctcggccacgacctcgaccacaaccacgtggcatgggagatccgcggccaggagagggacacgaggcagcggcggtgcgagaggaagatggatgatgaggaggctggggaggtggctcagcagaggaggcagggcctccagaccctgagggagcccgcttcgtacgagcagctgggttggaggaatcaacccagtagggtacgtagcgggagtgtttgacaggtttttcgaagtgagtctgggtgaccacttcgatcatcttcatgataaagggtgcatgaagacaccctttgagaggagaccaggaagcacggatgatctcttcccagatcatgtcaaacacattaatgcgggcgagactgttgggagcaaggaggagaaggaagacccgactctccccaaggacgttcatttgattcccgcccttcggg

SEQ ID NO: 5260 - DNA, 1102 bp, Zea mays
  Zm_smallRNAprecursor_749
caaacttaggcatgagctaaatattcttgattctaggaatttcttttgatgtttttcacacatagctcataagtatacctttgatcatatctctttcatgtgctatgactaatgtattttcaagtatatttcaaaccaagtcataggtatattgaaagggaattggagtctttggcgaagacaaaggcttccactccactccatcaacttatccttcgccgtcgctccgagcaattcttcgtctttggtataatcttcactcatatattgtttgccaaagggggagaaagtagtaacagagggcttatatttcactcaaagtatccgtttttggcgattcatgccaaagggggagaaagtattcgcccaaagcaaaaaggaccgcaccaccacctaattttaaactaatgattttcaaattggtatcttattgtgttcaaaagagggagaaagtagtattttcaaaattgatatcttaaaaaccctcttgaacactaagggcttgtttgggagtaaaggtaatggagtggattggagggcatataatcctccactattcaattttagatagcaagggattatagtcctatcaatacccttcattccacttgctcccaaacaagccctaagaggaggatttcatcaagggggagttttgtttagtcaaaggaaaagcatttgaaacagggggagacaatttcaaatcttgaaaatgcttctcaaaatcttgtccatttacctttgactatttgcaaaaggactttgaaaagaatttacaaaagaatttgcaaaaacaaaacatgtggtgcaagcgtggtccaaaatgatgaaaatataaagaaacaatccatgcatatcttatgataatttatattggctcaattctaagtaacctttgcacttacaattatgcaaactaagtcattcatgcacttctatatttgctttggtttgtgttggcatcaatcaccaaaaagggggagattgaaagggaattaggcttacacatatttcctaattgattttggtggttgaattgcccaacacaaaaaaatggactaactagtttgctctagtctataagttttacaggtgccaaagg

SEQ ID NO: 5261 - DNA, 1182 bp, Zea mays
  Zm_smallRNAprecursor_750
atcagcccgactaatcgcgattagtcggacgatatgaaaacaatgcatattatctaggtttcgcatgttgattatagataaaatacttctatattctgcatgttcagacgcattaatcttgggtagatttgggggttggttaaatatatccttactctttttgaatataagagtagttgagcaaccttttgttctgaaaccagtccagtctgttaaatcttcaatgtctttctattagtgttttattagtagtagtaacatcattattgcctgtgactgtttttctcttcatttaatcgttattgatgctcttaagttgatcaagaaaacttagcgccttcaaaaaagttatgaagttttatttatctatggaggctgacagaaccgttgtaattgcttgattcctgttatcagttatgttaccgtctggcacagacgcacagtgactagctataggcttggctgtgttcagtatttctgtgaaggcaacgactgctatgcaagcagtccttctgtgcaagcaatccatctgatccattagatcgtgatccaaccgtaggtcatatttaacacttaaacccttccaccagcagctcaataatctttataaaaaaatccttaacaaaccatggttgtatctgtgattggatcgtaatctaatgtatcagatgatttgcttgcacgcttgcacagaaggactgcttacatagcagtcgttgccttttgtgaaagggcttctagctgagttggttagttggtctgattagcaccactcttaaggtcttgggttcgactctctgtggagcgaatttcaggttgtggttaaaaaaatctcattatatgtcccacaccaaatcataggtttaagtcccgacctctgtcgcagttctcacatgggctacgatgccactatgtaaatggtaaaaagctaaaattatgcacaaattgggattcgaaagcaacgtatgggctctcgctagtcttagtatatacaagttatgtgtccgtgcgttgccacgagacgagggagcacggggagcggcgtctagactacaaatataattattgtttacttctaaacactaaagtacatgtcgtctggtggttagccccaaatttctagagcaccggggtgtgggttcgagtgctcactttgcactatttcttgcaggtgctgggcgt

SEQ ID NO: 5262 - DNA, 1183 bp, Zea mays
  Zm_smallRNAprecursor_751
atcagcccgactaatcgcgattagtcggacgatatgaaaacaatgcatattatctaggtttcgcatgttgattatagataaaatacttctatattctgcatgttcagacgcattaatcttgggtagatttgggggttggttaaatatatccttactctttttgaatataagagtagttgagcaaccttttgttctgaaaccagtccagtctgttaaatcttcaatgtctttctattagtgttttattagtagtagtaacatcattattgcctgtgactgtttttctcttcatttaatcgttattgatgctcttaagttgatcaagaaaacttagcgccttcaaaaaagttatgaagttttatttatctatggaggctgacagaaccgttgtaattgcttgattcctgttatcagttatgttaccgtctggcacagacgcacagtgactagctataggcttggctgtgttcagtatttctgtgaaggcaacgactgctatgcaagcagtccttctgtgcaagcaatccatctgatccattagatcgtgatccaaccgtaggtcatatttaacacttaaacccttccaccagcagctcaataatctttataaaaaaatccttaacaaaccatggttgtatctgtgattggatcgtaatctaatgtatcagatgatttgcttgcacgcttgcacagaaggactgcttacatagcagtcgttgccttttgtgaaagggcttctagctgagttggttagttggtctgattagcaccactcttaaggtcttgggttcgactctctgtggagcgaatttcaggttgtggttaaaaaaatctcattatatgtcccacaccaaatcataggtttaagtcccgacctctgtcgcagttctcacatgggctacgatgccactatgtaaatggtaaaaagctaaaattatgcacaaattgggattcgaaagcaacgtatgggctctcgctagtcttagtatatacaagttatgtgtccgtgcgttgccacgagacgagggagcacggggagcggcgtctagactacaaatataattattgtttacttctaaacactaaagtacatgtcgtctggtggttagccccaaatttctagagcaccggggtgtgggttcgagtgctcactttgcactatttcttgcaggtgctgggcgtg

SEQ ID NO: 5263 - DNA, 1180 bp, Zea mays
  Zm_smallRNAprecursor_752
tcagcccgactaatcgcgattagtcggacgatatgaaaacaatgcatattatctaggtttcgcatgttgattatagataaaatacttctatattctgcatgttcagacgcattaatcttgggtagatttgggggttggttaaatatatccttactctttttgaatataagagtagttgagcaaccttttgttctgaaaccagtccagtctgttaaatcttcaatgtctttctattagtgttttattagtagtagtaacatcattattgcctgtgactgtttttctcttcatttaatcgttattgatgctcttaagttgatcaagaaaacttagcgccttcaaaaaagttatgaagttttatttatctatggaggctgacagaaccgttgtaattgcttgattcctgttatcagttatgttaccgtctggcacagacgcacagtgactagctataggcttggctgtgttcagtatttctgtgaaggcaacgactgctatgcaagcagtccttctgtgcaagcaatccatctgatccattagatcgtgatccaaccgtaggtcatatttaacacttaaacccttccaccagcagctcaataatctttataaaaaaatccttaacaaaccatggttgtatctgtgattggatcgtaatctaatgtatcagatgatttgcttgcacgcttgcacagaaggactgcttacatagcagtcgttgccttttgtgaaagggcttctagctgagttggttagttggtctgattagcaccactcttaaggtcttgggttcgactctctgtggagcgaatttcaggttgtggttaaaaaaatctcattatatgtcccacaccaaatcataggtttaagtcccgacctctgtcgcagttctcacatgggctacgatgccactatgtaaatggtaaaaagctaaaattatgcacaaattgggattcgaaagcaacgtatgggctctcgctagtcttagtatatacaagttatgtgtccgtgcgttgccacgagacgagggagcacggggagcggcgtctagactacaaatataattattgtttacttctaaacactaaagtacatgtcgtctggtggttagccccaaatttctagagcaccggggtgtgggttcgagtgctcactttgcactatttcttgcaggtgctgggcg

SEQ ID NO: 5264 - DNA, 1181 bp, Zea mays
  Zm_smallRNAprecursor_753
tcagcccgactaatcgcgattagtcggacgatatgaaaacaatgcatattatctaggtttcgcatgttgattatagataaaatacttctatattctgcatgttcagacgcattaatcttgggtagatttgggggttggttaaatatatccttactctttttgaatataagagtagttgagcaaccttttgttctgaaaccagtccagtctgttaaatcttcaatgtctttctattagtgttttattagtagtagtaacatcattattgcctgtgactgtttttctcttcatttaatcgttattgatgctcttaagttgatcaagaaaacttagcgccttcaaaaaagttatgaagttttatttatctatggaggctgacagaaccgttgtaattgcttgattcctgttatcagttatgttaccgtctggcacagacgcacagtgactagctataggcttggctgtgttcagtatttctgtgaaggcaacgactgctatgcaagcagtccttctgtgcaagcaatccatctgatccattagatcgtgatccaaccgtaggtcatatttaacacttaaacccttccaccagcagctcaataatctttataaaaaaatccttaacaaaccatggttgtatctgtgattggatcgtaatctaatgtatcagatgatttgcttgcacgcttgcacagaaggactgcttacatagcagtcgttgccttttgtgaaagggcttctagctgagttggttagttggtctgattagcaccactcttaaggtcttgggttcgactctctgtggagcgaatttcaggttgtggttaaaaaaatctcattatatgtcccacaccaaatcataggtttaagtcccgacctctgtcgcagttctcacatgggctacgatgccactatgtaaatggtaaaaagctaaaattatgcacaaattgggattcgaaagcaacgtatgggctctcgctagtcttagtatatacaagttatgtgtccgtgcgttgccacgagacgagggagcacggggagcggcgtctagactacaaatataattattgtttacttctaaacactaaagtacatgtcgtctggtggttagccccaaatttctagagcaccggggtgtgggttcgagtgctcactttgcactatttcttgcaggtgctgggcgt

SEQ ID NO: 5265 - DNA, 1097 bp, Zea mays
  Zm_smallRNAprecursor_754
tctgcacgcacatattttttttatttgtgctgtccggtcaacagcaggggtgcgcatgcaggaatttttttatttgttctgtccggtcacctcttctctgctgggcgcgcgcagttttttttggacgctcctgctcagcccgcgcgccatgcatgcgtgtcaggggcgccaatttttctgtccagtcgcttccagcagctgcgcgcacatttttttacagccccacactactcccttgtgactagtcgctgtgtcacccgcgcagcaaggaaacaatttttgttgtcacttccgtgcagcagtgtgagggatacagggcgcgcagaacttttcttttgcgcagttctttttcttttgctgtccggtctcatctgcgcagacacttggttttgtttttttttgcatggaatctctgcagtacactttttcagaatcctgcgtcagaaatttgaattttttttggcatcttccctctgctgtttctggttctctgaccacactggtcagaaccagctgaactggcccatgggggtggttgaactggtcctgaggaccagctcaactgcctatatatacttgactctccccttctcttctcccacttcattcactctcgccttagtcgcttcacaacctttagagccactctttcacacacctcaaccggttcgcagtttcaccacctttttcatcattgtgcgtcgtcgcaatccctctgtgattgagtttagcagcgactccgatgagattcaggaggaatctcccgtcccctctcctccgcctcgtcgctccctctctaagagaggacgtggctctggtcgaaaggatggcgagggctcttccatgccttcgcagccgactcgcgggagacgccaaaaggttggcgcctctcgtcctcgtcgtagcacgtcttcctctgggtatgctccctgccaggaggaggatggggcgttcgacgacttcgtcgaccttccagcgcctgatgctctctacgtcaccggactgcacatgcatccggcgaacgtcagccgcggtccgcatgaatctctcgtcgacttcactctgaagggaatagacacccttcagcgtctgaggtt

SEQ ID NO: 5266 - DNA, 1159 bp, Zea mays
  Zm_smallRNAprecursor_755
tctggagtgcaccaaggaagtcagatacagataatgagtagtgggggtaggagagctagcatagcaaagcacttttctgaccattcagcatgattatgtatcactcgatatccatccattttaagtgaattctatattatttaagttatcgtatactattttaactcatcacatattacttaagtcaatccatctgatttttagctattgtatcttatccaatcctttaattagttttcaaccgtttttcaagtcatttcatgtttttttagtgatttcatttttaaaaaaaatagttttttcaacgcattttaagtcatttcgtatattgtttgtagaaatttcatcttactcgttttttgttagttgtcctctaattttccaactaattttaggccattctatgtgttttcagacattttatcttacttagtgcttagctgatatttaggaggtgtttgaatgcgttagaactaatagttagggcaacgactattatacaagcagtccttctgtgcaagcgtgcaagcagtccttctgtgaatgcgttagaactaatagtttttataaagattattgagccggtggtggaagggtttaagtgctaaatgtgtcctacggttggatcacaatctaatggatcatatagtttgcttacacgcttgcacagaaggactgcttgcatagcagtcgttgccaataggtagttggctaaaaattattagtggaattagctagctaacaaataactatccaactattaactaatttatcaaaaatagctaatagctgaactattagctagggtgtttagatatctcaactaattttagccactaactattagatttagtttattcaaacaccccttagacacatgtatctttatataatttcatctggtattcaactttatctgattttcagccacttcatattatttagttgtttgattggtttttccaaccgactcagaatagtaccatcaaaaatatacatcagcggataacctttttataatgggtggggtatcgcagaggtaaatcggatccgctttaggccttgtttgtttgtgtcggattggtgggtcggaacgattcctacccggattgcttctctaatttatataaactttgattaactggaacgattacgggtg

SEQ ID NO: 5267 - DNA, 1160 bp, Zea mays
  Zm_smallRNAprecursor_756
tctggagtgcaccaaggaagtcagatacagataatgagtagtgggggtaggagagctagcatagcaaagcacttttctgaccattcagcatgattatgtatcactcgatatccatccattttaagtgaattctatattatttaagttatcgtatactattttaactcatcacatattacttaagtcaatccatctgatttttagctattgtatcttatccaatcctttaattagttttcaaccgtttttcaagtcatttcatgtttttttagtgatttcatttttaaaaaaaatagttttttcaacgcattttaagtcatttcgtatattgtttgtagaaatttcatcttactcgttttttgttagttgtcctctaattttccaactaattttaggccattctatgtgttttcagacattttatcttacttagtgcttagctgatatttaggaggtgtttgaatgcgttagaactaatagttagggcaacgactattatacaagcagtccttctgtgcaagcgtgcaagcagtccttctgtgaatgcgttagaactaatagtttttataaagattattgagccggtggtggaagggtttaagtgctaaatgtgtcctacggttggatcacaatctaatggatcatatagtttgcttacacgcttgcacagaaggactgcttgcatagcagtcgttgccaataggtagttggctaaaaattattagtggaattagctagctaacaaataactatccaactattaactaatttatcaaaaatagctaatagctgaactattagctagggtgtttagatatctcaactaattttagccactaactattagatttagtttattcaaacaccccttagacacatgtatctttatataatttcatctggtattcaactttatctgattttcagccacttcatattatttagttgtttgattggtttttccaaccgactcagaatagtaccatcaaaaatatacatcagcggataacctttttataatgggtggggtatcgcagaggtaaatcggatccgctttaggccttgtttgtttgtgtcggattggtgggtcggaacgattcctacccggattgcttctctaatttatataaactttgattaactggaacgattacgggtgc

SEQ ID NO: 5268 - DNA, 1157 bp, Zea mays
  Zm_smallRNAprecursor_757
ctggagtgcaccaaggaagtcagatacagataatgagtagtgggggtaggagagctagcatagcaaagcacttttctgaccattcagcatgattatgtatcactcgatatccatccattttaagtgaattctatattatttaagttatcgtatactattttaactcatcacatattacttaagtcaatccatctgatttttagctattgtatcttatccaatcctttaattagttttcaaccgtttttcaagtcatttcatgtttttttagtgatttcatttttaaaaaaaatagttttttcaacgcattttaagtcatttcgtatattgtttgtagaaatttcatcttactcgttttttgttagttgtcctctaattttccaactaattttaggccattctatgtgttttcagacattttatcttacttagtgcttagctgatatttaggaggtgtttgaatgcgttagaactaatagttagggcaacgactattatacaagcagtccttctgtgcaagcgtgcaagcagtccttctgtgaatgcgttagaactaatagtttttataaagattattgagccggtggtggaagggtttaagtgctaaatgtgtcctacggttggatcacaatctaatggatcatatagtttgcttacacgcttgcacagaaggactgcttgcatagcagtcgttgccaataggtagttggctaaaaattattagtggaattagctagctaacaaataactatccaactattaactaatttatcaaaaatagctaatagctgaactattagctagggtgtttagatatctcaactaattttagccactaactattagatttagtttattcaaacaccccttagacacatgtatctttatataatttcatctggtattcaactttatctgattttcagccacttcatattatttagttgtttgattggtttttccaaccgactcagaatagtaccatcaaaaatatacatcagcggataacctttttataatgggtggggtatcgcagaggtaaatcggatccgctttaggccttgtttgtttgtgtcggattggtgggtcggaacgattcctacccggattgcttctctaatttatataaactttgattaactggaacgattacgggt

SEQ ID NO: 5269 - DNA, 1158 bp, Zea mays
  Zm_smallRNAprecursor_758
ctggagtgcaccaaggaagtcagatacagataatgagtagtgggggtaggagagctagcatagcaaagcacttttctgaccattcagcatgattatgtatcactcgatatccatccattttaagtgaattctatattatttaagttatcgtatactattttaactcatcacatattacttaagtcaatccatctgatttttagctattgtatcttatccaatcctttaattagttttcaaccgtttttcaagtcatttcatgtttttttagtgatttcatttttaaaaaaaatagttttttcaacgcattttaagtcatttcgtatattgtttgtagaaatttcatcttactcgttttttgttagttgtcctctaattttccaactaattttaggccattctatgtgttttcagacattttatcttacttagtgcttagctgatatttaggaggtgtttgaatgcgttagaactaatagttagggcaacgactattatacaagcagtccttctgtgcaagcgtgcaagcagtccttctgtgaatgcgttagaactaatagtttttataaagattattgagccggtggtggaagggtttaagtgctaaatgtgtcctacggttggatcacaatctaatggatcatatagtttgcttacacgcttgcacagaaggactgcttgcatagcagtcgttgccaataggtagttggctaaaaattattagtggaattagctagctaacaaataactatccaactattaactaatttatcaaaaatagctaatagctgaactattagctagggtgtttagatatctcaactaattttagccactaactattagatttagtttattcaaacaccccttagacacatgtatctttatataatttcatctggtattcaactttatctgattttcagccacttcatattatttagttgtttgattggtttttccaaccgactcagaatagtaccatcaaaaatatacatcagcggataacctttttataatgggtggggtatcgcagaggtaaatcggatccgctttaggccttgtttgtttgtgtcggattggtgggtcggaacgattcctacccggattgcttctctaatttatataaactttgattaactggaacgattacgggtg

SEQ ID NO: 5270 - DNA, 1156 bp, Zea mays
  Zm_smallRNAprecursor_759
tggagtgcaccaaggaagtcagatacagataatgagtagtgggggtaggagagctagcatagcaaagcacttttctgaccattcagcatgattatgtatcactcgatatccatccattttaagtgaattctatattatttaagttatcgtatactattttaactcatcacatattacttaagtcaatccatctgatttttagctattgtatcttatccaatcctttaattagttttcaaccgtttttcaagtcatttcatgtttttttagtgatttcatttttaaaaaaaatagttttttcaacgcattttaagtcatttcgtatattgtttgtagaaatttcatcttactcgttttttgttagttgtcctctaattttccaactaattttaggccattctatgtgttttcagacattttatcttacttagtgcttagctgatatttaggaggtgtttgaatgcgttagaactaatagttagggcaacgactattatacaagcagtccttctgtgcaagcgtgcaagcagtccttctgtgaatgcgttagaactaatagtttttataaagattattgagccggtggtggaagggtttaagtgctaaatgtgtcctacggttggatcacaatctaatggatcatatagtttgcttacacgcttgcacagaaggactgcttgcatagcagtcgttgccaataggtagttggctaaaaattattagtggaattagctagctaacaaataactatccaactattaactaatttatcaaaaatagctaatagctgaactattagctagggtgtttagatatctcaactaattttagccactaactattagatttagtttattcaaacaccccttagacacatgtatctttatataatttcatctggtattcaactttatctgattttcagccacttcatattatttagttgtttgattggtttttccaaccgactcagaatagtaccatcaaaaatatacatcagcggataacctttttataatgggtggggtatcgcagaggtaaatcggatccgctttaggccttgtttgtttgtgtcggattggtgggtcggaacgattcctacccggattgcttctctaatttatataaactttgattaactggaacgattacgggt

SEQ ID NO: 5271 - DNA, 1031 bp, Zea mays
  Zm_smallRNAprecursor_760
ttcttttcccattctcatcgcctttctatccttctaatcgaacttgaaattggattcaaaagaaagctattgtgaaaataaaagaaatacctctttcagaataccctttaatttaaaaagtagaagtggaatagaatacccagttgaagggtaatgatcatacgtctgtaatgcattgtatgtcccagaataggtcccattcttctaccctttccgggtagtcgatggctattcacagctactaccttaacaccaaagaagagttcgacccaatgctttatttctgtcttagtgaatcccgattcgacattaaaagtatattgattctttcccaataaacgaagactcttttctgtaaatactgcgtatttgattccattatcgtacgataatactatattttgatttatatttgtttattgtattatacctttctatattctagatatatagaatagaagaatctcgatttgtcaagtctcatgatcgtatcaagatctatttcaattcggctcagtctttttttttagaaaagattgagccgaattgaattgcaatcaattagaggaataaagaagaattactgcatttcttaacttattttttctctttctattttgcttttttttattttatatggtatccatcgctttgaaaccatcaaatttgatctccttccatatttcacaagctgcggctagttcagcactccatttgcaagctgctttgataatttcattaccttcacgagcaagatcgcgcccttcgttacgagcttgtacacaggcttctaaagccacacgattagctgctgcaccaggtgcatttccccaaggatgtcctaaagttcctccaccaaattgtaatacggaatcatctccaaagatttcggtcagagctggcatatgccaaacatgaatacccccagaagccaccggtataacacctggcatggatacccagtcctgagtgaaaaagataccgcgagaacgatctttttcaataaaatcatcgcgcaataaatcaacaaa

SEQ ID NO: 5272 - DNA, 1031 bp, Zea mays; identical to SEQ ID NO: 5271
  Zm_smallRNAprecursor_761

SEQ ID NO: 5273 - DNA, 1031 bp, Zea mays; identical to SEQ ID NO: 5271
  Zm_smallRNAprecursor_762

SEQ ID NO: 5274 - DNA, 1031 bp, Zea mays; identical to SEQ ID NO: 5271
  Zm_smallRNAprecursor_763

SEQ ID NO: 5275 - DNA, 1032 bp, Zea mays
  Zm_smallRNAprecursor_764
ttcttttcccattctcatcgcctttctatccttctaatcgaacttgaaattggattcaaaagaaagctattgtgaaaataaaagaaatacctctttcagaataccctttaatttaaaaagtagaagtggaatagaatacccagttgaagggtaatgatcatacgtctgtaatgcattgtatgtcccagaataggtcccattcttctaccctttccgggtagtcgatggctattcacagctactaccttaacaccaaagaagagttcgacccaatgctttatttctgtcttagtgaatcccgattcgacattaaaagtatattgattctttcccaataaacgaagactcttttctgtaaatactgcgtatttgattccattatcgtacgataatactatattttgatttatatttgtttattgtattatacctttctatattctagatatatagaatagaagaatctcgatttgtcaagtctcatgatcgtatcaagatctatttcaattcggctcagtctttttttttagaaaagattgagccgaattgaattgcaatcaattagaggaataaagaagaattactgcatttcttaacttattttttctctttctattttgcttttttttattttatatggtatccatcgctttgaaaccatcaaatttgatctccttccatatttcacaagctgcggctagttcagcactccatttgcaagctgctttgataatttcattaccttcacgagcaagatcgcgcccttcgttacgagcttgtacacaggcttctaaagccacacgattagctgctgcaccaggtgcatttccccaaggatgtcctaaagttcctccaccaaattgtaatacggaatcatctccaaagatttcggtcagagctggcatatgccaaacatgaatacccccagaagccaccggtataacacctggcatggatacccagtcctgagtgaaaaagataccgcgagaacgatctttttcaataaaatcatcgcgcaataaatcaacaaaa

SEQ ID NO: 5276 - DNA, 1129 bp, Zea mays
  Zm_smallRNAprecursor_765
tcaattagaggaataaagaagaattactgcatttcttaacttattttttctctttctattttgcttttttttattttatatggtatccatcgctttgaaaccatcaaatttgatctccttccatatttcacaagctgcggctagttcagcactccatttgcaagctgctttgataatttcattaccttcacgagcaagatcgcgcccttcgttacgagcttgtacacaggcttctaaagccacacgattagctgctgcaccaggtgcatttccccaaggatgtcctaaagttcctccaccaaattgtaatacggaatcatctccaaagatttcggtcagagctggcatatgccaaacatgaatacccccagaagccaccggtataacacctggcatggatacccagtcctgagtgaaaaagataccgcgagaacgatctttttcaataaaatcatcgcgcaataaatcaacaaaacctaaagttatttcgcgttccccttctaacttacctactactgtaccggagtggatatgatctccccccgacatacgcaatgctttagctaatacacggaaatgcataccatgatttttctgtctatcaataactgcatgcattgctcggtgaatgtgaagaagtaggccgttgtcgcggcaataatgagacaaagtagtatttgcggtgaatcctcctgttaagtagtcatgcattacaataggaacccctaattcccttgcaaatacagctctcttaatcatttcttcgcatgtacctgcagtcgcattcaagtaatgccccttgatttcaccagtttcggcttgtgctttataaattgcttcggcacaaaagacaaaacggtctctccagcgcataaatggttgtgagtttacgttttcatcatctttggtaaaatcaagtccaccgcgtagacactcataacacgctctaccgtaattttttgcggataatcccaattttggtttaatagtacatcccaataaaggacgaccgtacttgttcaacttatccctttcaacttggataccgtgaggcggaccttggaaagtttttgaataagcagggggaattcgtagatcctccaaacgtagagcgcgtaaggctttgaaa

SEQ ID NO: 5277 - DNA, 1040 bp, Zea mays
  Zm_smallRNAprecursor_766
agaggagcaagtgagagcttgaagtccacctcaacgtggattaggggtgatcggcaaatcaccgataccacgggataaatttcggtgtctctaccttcttgcattacttattgctttgcaagtaattagtgttttgcatattgttcctcaagtattcaatcaccgtagttgtttctcatacattgtttacttattgtcactagagaatttattcctcttgttatattgattaaaattacctagtgtttttgattttagtcaaaaccgcctattcaccccccctctagccggtgtcctagatcctacatctgcctccctacccgggtccgggacccattcctggtgaccctaggccatccggctctggttaccatcaccaccctccacctcctcctgatcatcgtacatcttcgacatctattttttctgcggctgatgagccacatagggactccacattcgaggaggacgtgatgaggaccctcttccctgactacacttcataccctccatcatatcctccgtcctatcctcctcctggaggatattgattcatgtatccatgtctctctctttgtttttggtacttgttgccaaaagggggagaaaatccaaaacttctagtttgtggttctttcggttatgtatttattttttgttttggccactgttgtggcttgtatcctcttatcattgtatgaaataaaactgctgggttgttattcaaagtgatatgatggtcttctggccatcatcttttgtcctatcagtttgtaatgattactttgctatgaagtaaaaatgatgtgtatttagagatagtcatgtgcatcacaactcctgttatgacactcttgcaccccacggatggttgtattcagtatggtttttgtcactatctctaaatgtgttgctcacatgacatattatgtcaaaacattggattcacaatcgtgcacacatttagggggagccatctacatacaatcattcaaaagaaaattttctattgcaaatgtatatctttttgaccttaattg

SEQ ID NO: 5278 - DNA, 1102 bp, Zea mays
  Zm_smallRNAprecursor_767
gaagctaatagttagctagagtattagctagagatatttagatgtctttagttagaagtatgagtgacaatggactctaaattttatactataagatttaagaaccagattagaatagtatcatctatatttttatttgtttttaaaataaatctatttagggttctatcattttgtaaagaagcatttagataccatccattgttaaaaagtatagctaaacaacgtcttcggttaattttaatagctaactgtgagacgagaatggcagatcttctatctctagcactaccgtgctggatataccgtataaataaagcaactaaacatacagtattattttattatattctgaaccacagcacattcctggaagcacgtaggatagccgagaggaatgttcttcgcagctcctcctatattccgcctactaccagtgcacagttaaaaaaaacgacactattttatccgggccggtgccacatgctgaggcactaagggcttgtttgggagtaaaggtaatgaagtggattgaagagcatataatcctccactattcaattttagatagcaagggattatagtcctatcaataccctccattccacttgctcccaaacaagccctaagtggtccgcttttggcggcgaacgcgttttcgtggtcatctctcgccgtaagataaggttggagggagccgtaatgattaatttctttggcttgaatgcacggtgacgcgctgacggcgatccgcgcgctcgctgcagtagtacacgtcccttcttcaagctcaagcatatggagccggagagggatgcggatgccgccgccattccactgtatgtatgtagatggcggccggaactcgatcgattagagattcagagcccggccgacctcacgatttgatgccgatgtcggcatcgcccaactagcatcaccatgatttcagtctttcagtctactcatcattttttgttcttcctaattattattcctagaactgtgcttagcatcgcatcatcagcaggagagaaaacatattaaaaaaaaattagctttggatcacaacacaggaaagaaagaaaacatataaaacttt

SEQ ID NO: 5279 - DNA, 1097 bp, Zea mays
  Zm_smallRNAprecursor_768
gcgcgccacttttccctgtccggtccttcacgcgagtggagaatcttttatttggtcacctggtagtctcagcttgcatgcaaatgtcagggcgtcaatgcgcgcagtgtactttttttttgcatgcagacacctttgccttgtccgatcacttcccctggcgcgcagataaagttttttttgcttgctgccgctcaacgcgccacttttttctgtccggtcgcttcttgtctgcgtgcacagtccttttttttgtggagttcggtcagcagggtgtgcatgcagaatcttttttctgggtgtgcatgctgtgtccggtcacttctcctctgctgagcgcgcgcagatttttcttggacatttctgctctgcccgcgcactagccatgcatgcgtgtcaggggcgcccatttttcctgtccagtcgcttccagcagctgcgcgcaaatttgaattttattttgcatcttccctctgctgtttctggttctctgaccacactggtcagaaccagctgaactggcccatgggggcggttgaactggtcctgaggaccagctcaactgcctatatatacttgactctccccttctcctctcccacttcattcactctcgccttggtcgcttcacaacctttagagcctctcctttacacacttcaaccggttcacagtttcaccaccttttcaatcatggtgcgtcgtcgcaacccctctgtggttgagtttagcagcgactccgacgagattcaggaggaatctcccgtcccctctcctccgcctcgtcgctccctctctaagagaggacgtggctctggtcggaaggatggcgagggctcttctatgcccttgcagccgactcgcgggagacgccaaaaggttggcgcctctcgtcctcgtcgtagcacgtcttcctctgggtatgctccctgccaggaggaggatgggctttcgacgacttcgtcgaccttccggcgcctgatgctctctacatcaccggactgcacatgcatccggcgaacgtcagccgcggtccgcatgaatctcccgtcgacttcactcagaagggaatagacacccttcagcgtctgaggttt

SEQ ID NO: 5280 - DNA, 1149 bp, Zea mays
  Zm_smallRNAprecursor_769
tgcacagtccttttttttgtggagttcggtcagcagggtgtgcatgcagaatcttttttctgggtgtgcatgctgtgtccggtcacttctcctctgctgagcgcgcgcagatttttcttggacatttctgctctgcccgcgcactagccatgcatgcgtgtcaggggcgcccatttttcctgtccagtcgcttccagcagctgcgcgcaaatttgaattttattttgcatcttccctctgctgtttctggttctctgaccacactggtcagaaccagctgaactggcccatgggggcggttgaactggtcctgaggaccagctcaactgcctatatatacttgactctccccttctcctctcccacttcattcactctcgccttggtcgcttcacaacctttagagcctctcctttacacacttcaaccggttcacagtttcaccaccttttcaatcatggtgcgtcgtcgcaacccctctgtggttgagtttagcagcgactccgacgagattcaggaggaatctcccgtcccctctcctccgcctcgtcgctccctctctaagagaggacgtggctctggtcggaaggatggcgagggctcttctatgcccttgcagccgactcgcgggagacgccaaaaggttggcgcctctcgtcctcgtcgtagcacgtcttcctctgggtatgctccctgccaggaggaggatgggctttcgacgacttcgtcgaccttccggcgcctgatgctctctacatcaccggactgcacatgcatccggcgaacgtcagccgcggtccgcatgaatctcccgtcgacttcactcagaagggaatagacacccttcagcgtctgaggtttaccaaccctactctcactcctcgtcatcctggtgtccaggaccctcggttctggaatcttttccaggctgacttctacaattctgtcattctttccaagaaacacccagtcgtccgacatagatttattgactgggaggggtgtgagaatatgggagatgctgacatgtcgtcagctctcgtaaacttagagagaaaggggttacgaaacattatgaccatggaatacccctggaacgatgaggtggtagctcagttctatgccaccctctggataaagaaagtagat

SEQ ID NO: 5281 - DNA, 1070 bp, Zea mays
  Zm_smallRNAprecursor_770
attgaccttgaccacactaatcatcaatatttagtttcagtgccacacaccgccagcggcggttgtattaaccgccagaatctccagcagccaatgagaagattcaccgaaagaacaggctgcatcctcccgtagtccgtacagggagtgagatcgggcgcttggaattccgttttggggggaacgccgcgatccgtttggctgaccttgaccgtgtcaattccggggtctcacgcatcatctgcctctctgacgaccggacgttccatcgccgattattgatcagaccctaacacagacccgtgtttgtgatcaatgttcccccagtcaacgcctatcttagtcacgtggctgcattgcattgcattgtatgcagcaggtcaaacaagagtagccgctgttaggattttttttaaaaaaaaaacaagagtagccttttactacgccacccgtacgtttgttttacttttgagaaaattcctggtatgccatcagattttatactcatcccttgtgtgccactgagtgacatataggtatattttttggtgtctatgacatgtggggccagtggcatacaaggaatgagtatattttacagtggcatacagggaattggccctttacttttacccaatgaagcacatggatggaggcatgtagctaagccgaataggtagtactgtgcgatctgcattagaaacatttatttaattgaattctcagggtcaacaacattctggtcagacgacagcgccgccgagtcctgcggtttctttggcagctttaggaaaatagaaacaacacacacagagatagagaggttggctgaatcgatagagaaagttcaggggtcgtcaggtactgccgccggactgccggaggccggttgaacctatagggagtgcgcgcaacacccgagcaagtatcaggtactagcatggttaaacaatttaaaaccgttggcctggtttgatttcttttgccacctcagcactctctctctctctctctctctccaggtcggatgcatgcagcgagaagacgaggcatgaaagtcgttgctgaag

SEQ ID NO: 5282 - DNA, 1057 bp, Zea mays
  Zm_smallRNAprecursor_771
cggcgcgatagcacaagggggaaccgacttaaagataaaaagacttcggggtcctcaatagatttccataaaccgttaacaaatgtaatggacatggatgtaattttacgtgggctgcgtcccgcgtctataaatagatgaacagtactcccgtactgttcacgcggacttgtcattttgcttttggtgtcacgcttgtactctccaccttctctcaggatcgaaggtacatttgtaatttgggatcatttctgtttttccatgttaataaaatagaaatgattctttggtgatgcttatatcatatttcatgttttatgtgagtccttcgtcattacttgtcatgtttacgagggtatgtctctcatgaccttcgtccgagactcattatttcccgaggggatataatgcttcgaaggacgaaggaccctaacatttaacactttttatgttgccttgttcttaacccttagaatttgagaacaagtctccaacaaatcccttaaatgccattgccgttagtttcaagttaacgccgttagttatatttaaagcaaatccctccaatgccatcaaaatctatacggatcccttcaataccactagaaattggttcgatctatttggttttaaaattttcaaaatagaaaattttttgaacctaaaagttttgaaacgcaaatatatcacattgattttaaaatttatctccatctgttatcattagtgtttgttgttagtttgaaaaaaatattaggaatcaaatagaccgaacagatatagcggagtaatttttagtgtttacaaaaaaaaatgtactaaagtttttaaaaagtgtggaattggtccatattttttttattctagaatatttaaaatccaaatagatcaaaccaatttctagtggcattgaagggattgatatagattttgatgacattggagagatttgctttaaatagaactaacggcgttaacttgaaactaacggcaatggcatttaagggattagaatttaaatttgatggcattgaagggaagctataaaatctgatgg

SEQ ID NO: 5283 - DNA, 1043 bp, Zea mays
  Zm_smallRNAprecursor_772
gcagctaaggagcctccgcctcgtcatgaatcatttgctggaggctaaagaatagccgatgcttgcaagtcagcgcgcaaatcccattctctttgttttaagtccagaagttctacaccgccatcaattatttgtaaagtgcgtgttaaattttttggatactacattagatgtacccccaggttgagatcaagaataggtctgtggcaacttcagtgtaagtataggtaaattatataagctgaactgacttcagtgacaaaacaaagataaaaaaaatctaggcgagaaataaatttaagcggacacaccaacgacataaacaaaaaaaaacaaaaaaaaaatgcaaactatggggcttgaacccacgaccacatggttagaaaccttgtgctctaccaagtgggctagatgggctttgtgctcatgtctgcaacaaatattttaataacacaaccgagctcggcgccaagatctgtggcgccgagccaagatctgtggcgccgagctcggttccacgtcgacgccacgcgtctggggtgtgccaacgcaacacgacctcggcgccatagcctatggcgccgagctgtgttagctcggcgacataggctatggcgccgagcaaagggtccaaaactgcatttaaaattttttaggtttaaacgtgattttacttctgtttaagggctaaaatacacaaaattcggtgcctccgaccacgttctctacttgccggtaggccatcatgtgcagcataaaacttccactaaaaatgacctaaaagattaccacgtctacattacaaaacaaaggcgatgttgatgggccacgtttctgcatggcacggagccattggatcagcagtccacgtcgggagcatgtagctagcgcaagtggataagcatgtgcattgcatccaccggttgaccatttgcttcagttcagttcagttcagcgcttctggcgaacggccacgagaaccaaacgcatttaatttcggtcaacaaaagggcacaacaatccattggtttccttgtctgtca

SEQ ID NO: 5284 - DNA, 1044 bp, Zea mays
  Zm_smallRNAprecursor_773
gcagctaaggagcctccgcctcgtcatgaatcatttgctggaggctaaagaatagccgatgcttgcaagtcagcgcgcaaatcccattctctttgttttaagtccagaagttctacaccgccatcaattatttgtaaagtgcgtgttaaattttttggatactacattagatgtacccccaggttgagatcaagaataggtctgtggcaacttcagtgtaagtataggtaaattatataagctgaactgacttcagtgacaaaacaaagataaaaaaaatctaggcgagaaataaatttaagcggacacaccaacgacataaacaaaaaaaaacaaaaaaaaaatgcaaactatggggcttgaacccacgaccacatggttagaaaccttgtgctctaccaagtgggctagatgggctttgtgctcatgtctgcaacaaatattttaataacacaaccgagctcggcgccaagatctgtggcgccgagccaagatctgtggcgccgagctcggttccacgtcgacgccacgcgtctggggtgtgccaacgcaacacgacctcggcgccatagcctatggcgccgagctgtgttagctcggcgacataggctatggcgccgagcaaagggtccaaaactgcatttaaaattttttaggtttaaacgtgattttacttctgtttaagggctaaaatacacaaaattcggtgcctccgaccacgttctctacttgccggtaggccatcatgtgcagcataaaacttccactaaaaatgacctaaaagattaccacgtctacattacaaaacaaaggcgatgttgatgggccacgtttctgcatggcacggagccattggatcagcagtccacgtcgggagcatgtagctagcgcaagtggataagcatgtgcattgcatccaccggttgaccatttgcttcagttcagttcagttcagcgcttctggcgaacggccacgagaaccaaacgcatttaatttcggtcaacaaaagggcacaacaatccattggtttccttgtctgtcat

SEQ ID NO: 5285 - DNA, 1041 bp, Zea mays
  Zm_smallRNAprecursor_774
agctaaggagcctccgcctcgtcatgaatcatttgctggaggctaaagaatagccgatgcttgcaagtcagcgcgcaaatcccattctctttgttttaagtccagaagttctacaccgccatcaattatttgtaaagtgcgtgttaaattttttggatactacattagatgtacccccaggttgagatcaagaataggtctgtggcaacttcagtgtaagtataggtaaattatataagctgaactgacttcagtgacaaaacaaagataaaaaaaatctaggcgagaaataaatttaagcggacacaccaacgacataaacaaaaaaaaacaaaaaaaaaatgcaaactatggggcttgaacccacgaccacatggttagaaaccttgtgctctaccaagtgggctagatgggctttgtgctcatgtctgcaacaaatattttaataacacaaccgagctcggcgccaagatctgtggcgccgagccaagatctgtggcgccgagctcggttccacgtcgacgccacgcgtctggggtgtgccaacgcaacacgacctcggcgccatagcctatggcgccgagctgtgttagctcggcgacataggctatggcgccgagcaaagggtccaaaactgcatttaaaattttttaggtttaaacgtgattttacttctgtttaagggctaaaatacacaaaattcggtgcctccgaccacgttctctacttgccggtaggccatcatgtgcagcataaaacttccactaaaaatgacctaaaagattaccacgtctacattacaaaacaaaggcgatgttgatgggccacgtttctgcatggcacggagccattggatcagcagtccacgtcgggagcatgtagctagcgcaagtggataagcatgtgcattgcatccaccggttgaccatttgcttcagttcagttcagttcagcgcttctggcgaacggccacgagaaccaaacgcatttaatttcggtcaacaaaagggcacaacaatccattggtttccttgtctgtca

SEQ ID NO: 5286 - DNA, 1042 bp, Zea mays
  Zm_smallRNAprecursor_775
agctaaggagcctccgcctcgtcatgaatcatttgctggaggctaaagaatagccgatgcttgcaagtcagcgcgcaaatcccattctctttgttttaagtccagaagttctacaccgccatcaattatttgtaaagtgcgtgttaaattttttggatactacattagatgtacccccaggttgagatcaagaataggtctgtggcaacttcagtgtaagtataggtaaattatataagctgaactgacttcagtgacaaaacaaagataaaaaaaatctaggcgagaaataaatttaagcggacacaccaacgacataaacaaaaaaaaacaaaaaaaaaatgcaaactatggggcttgaacccacgaccacatggttagaaaccttgtgctctaccaagtgggctagatgggctttgtgctcatgtctgcaacaaatattttaataacacaaccgagctcggcgccaagatctgtggcgccgagccaagatctgtggcgccgagctcggttccacgtcgacgccacgcgtctggggtgtgccaacgcaacacgacctcggcgccatagcctatggcgccgagctgtgttagctcggcgacataggctatggcgccgagcaaagggtccaaaactgcatttaaaattttttaggtttaaacgtgattttacttctgtttaagggctaaaatacacaaaattcggtgcctccgaccacgttctctacttgccggtaggccatcatgtgcagcataaaacttccactaaaaatgacctaaaagattaccacgtctacattacaaaacaaaggcgatgttgatgggccacgtttctgcatggcacggagccattggatcagcagtccacgtcgggagcatgtagctagcgcaagtggataagcatgtgcattgcatccaccggttgaccatttgcttcagttcagttcagttcagcgcttctggcgaacggccacgagaaccaaacgcatttaatttcggtcaacaaaagggcacaacaatccattggtttccttgtctgtcat

SEQ ID NO: 5287 - DNA, 1094 bp, Zea mays
  Zm_smallRNAprecursor_776
cggcatctgcatagccaactattttgtagggaattagatcttctgtacgtaagcatgagacctttagtaccttgaaggtaccttagagccttcttgactgctttccagtgttctatgcctagattcttctgatagcgtccaagcatcccggtggtaaaagctaagtcagggcgagtacatacttgagcatacataatgcttccgatagctgaagcatatggtactgacttcatcttgtttttctcatactgattcttgggacactgatattccccaaacttatcacccttgactattggaccaggcgaggcattacacttgtgcatattatacctctttagtacattttctatatatgacttctgtgagagtcctaatactcccttttgtctgtctctgtgaatttctattccaagaacataggaggcttctcccatgtctttcatatcaaaattcgaggaaagaaacccttttgtttccgctagtagatccttatcactactagctaagagtatgtcatcgacatacagaacaaggaagatatactttccttttctaaattttgcataaatgcaattgtcttccttgttttcctcgaaaccaaactttcttatagtctgatcaaacttgatgtaccactgtctggaggcctgttttaatccataaatggacctcctcaagtgacatcccatgtgttctttaccgctcacaacaaaaccctttggttgtgccatgaacacattttcttctaactctccatttaggaatgttgtctttacatccatctgatggagctctagatcaaaatgagcaactagtgccattatgatcctgaatgaatcttttgttgagacaggtgagaaggtttcatggtagtcaatgccttctctctgtgtgaaccctttggccacaagtctagccttatctctactaatccttaagggtggacggagggcgtccaccacctcactgccctcgcccgcgatgcacgccccgcgcgtgtcttcctcccgccgcgatgcacgccccgcgcgcgtcgccctcccgcgccaggcaccccgccccccctcccccggcgcgccgtgatgcccgcc

SEQ ID NO: 5288 - DNA, 1163 bp, Zea mays
  Zm_smallRNAprecursor_777
tggcctttccggagtggtaatgaatctcaaggtcatagtatttgatcagttccaaccatcttcgttgacggagattaagatctgtctgagtgaagatatacctcagactcttgtgatcggtgaagatgtgacatttgttcccaattaggtaacgcctccatatcttcaaagcatgcactatggctgccaattccaaatcatgggtgggataattctgctcatgcggcttaagtaggtgcgatgcataagcaatgactttctcgttttgcatcagcacacaccctaagccttgcctcgaggcatcacagaatacgacgaaatcctgatgtatatctggtagtgtcaaaatggctgcggtcgtgagcttctcctctatgatctggaaacttccttcacattttggggtccacacaaacttatggtctttcttgaggagctcggtcataggtcttgctatgctggagaatctcttgataaagcggtggtaatatcctgccattcccagaaagctttgaacttcactgacgttggatggctgtctccattttgatactgcttccaccttggaagggtctacttctattccttccgcggtcaagatatgcccaaggaaggctatcttttctaaccagaattcacatttactgagtttagcataaagttggtgtgccctgagttttctgaggacggtccgaaggtgacgcttatggtcttcgcagttcttggagtagataaggatgtcgtcaatgaagaccacgacaaacttatccagctcttccataaacactttgttcatgaggttcatgaaaaaggcgggtgcgtttgtcagtccaaaaggcatcactgtgaattcatattgtccgtactgggtgacaaatgcagtcttctggatatctgcttccttgattctcaattggtgataaccagaccttaggtctatcttggagaagtatttggccccttgaagttgatcgaagaggtcgtcgatctgaggaagtggatacttgttcttgatggtgacttcatttaacgatcggtaatcaatacacatcctcatacttccatctttcttagagacgaaaaggactagtgctccccaaggggatgagctgggacgaatgtaccctttttgttgaagatctgcgatttggagcttcaattct

SEQ ID NO: 5289 - DNA, 1153 bp, Zea mays
  Zm_smallRNAprecursor_778
aaagcggtggtaatatcctgccattcccagaaagctttgaacttcactgacgttggatggctgtctccattttgatactgcttccaccttggaagggtctacttctattccttccgcggtcaagatatgcccaaggaaggctatcttttctaaccagaattcacatttactgagtttagcataaagttggtgtgccctgagttttctgaggacggtccgaaggtgacgcttatggtcttcgcagttcttggagtagataaggatgtcgtcaatgaagaccacgacaaacttatccagctcttccataaacactttgttcatgaggttcatgaaaaaggcgggtgcgtttgtcagtccaaaaggcatcactgtgaattcatattgtccgtactgggtgacaaatgcagtcttctggatatctgcttccttgattctcaattggtgataaccagaccttaggtctatcttggagaagtatttggccccttgaagttgatcgaagaggtcgtcgatctgaggaagtggatacttgttcttgatggtgacttcatttaacgatcggtaatcaatacacatcctcatacttccatctttcttagagacgaaaaggactagtgctccccaaggggatgagctgggacgaatgtaccctttttgttgaagatctgcgatttggagcttcaattctgctaactcggtaggagccatgcggtatggtctctttgcgatgggtgccgttccaggaatcagatctatgtagaattccacttctctttccggtggcattcctggtacctcttctgggaacacatccatgaattcttctaccactgatatgttttctgttgctagattaaacatcattggatcattggcgggtggctgagcctgacaagagatagactttccttggtggtttgtgagaaggactgtcttgtttgcgcaactgatgatacttttgtgtttggtcaaccaatccatccctaagatcacatcaatcccttgggatggcaagacggttaagtctgccaagaacactaccccacttaaaaggattctgacttgggagcatttgagctgacatagaaggtctgaccctagggttcgggtgaccaagggaatctctagaggggtacagagaatgccatgcttt

SEQ ID NO: 5290 - DNA, 1090 bp, Zea mays
  Zm_smallRNAprecursor_779
ctcccctggcagatggcttcggataaaaccacgcctaccgcctccgggattggagcagggtttcccctgagagctgaaagggaagccggtagagaggaaagtgagacccacctctccgcacctccagaactacccttagatctagcccaagttctagccaaccaaacccgactcatcgaggtcctcactcggagtctaaaaaatcaacgtccgaatggtggaagaccgcaagacaggatgggggatttcctgaggctcaagcctcccccatttgccagatctagcaatcccctcgatgctgacgattggctgcgcacgattaaaagaaagctggaagccatcggatgcccagaaaatcagtgtgttcaactggctgctcatcaactttccgggatggccttatcctggtgggataccttcaatgtcaccatcagagatgctacctgggcggagtttgaaacagctttccatgagcatcatgtgcaccaagggatcgttcagctcaaggaagacgaattctgggaactgactcaagacggaagatctgccagcgagtacgtgcacaagttcacggaattggcccgctacgcgccagatgacgtcagtaccgaagtcaataagatggctcgcttcctgaaggggcttagaccagaactcaagaccatcctggctagccaagacttcctcagtttctctcacctctccaacaaagccatgcaagtggaaagggcaaaggaggaagaaaaaggccatctcaagagaaaattccaagtcctccgggctcagcagcaagatcggcaccagaaaactcgatcctttggatttccacccaagggaccaagcttcagtagaccaggtggacccaccccgtcacggttcagtcagtagagtcagagctcctttcatgccccctcagttgcaagcaaccaacccccggcgaatgcatgttggcactgcggagatcccagtcacttcaagaacaactatccccagctgaagccatcaggacctgcctactccaactcggtgaatggccccaagaatacctccgcatccgcccccaaggcaccctcctccatcagccagcaga

SEQ ID NO: 5291 - DNA, 1142 bp, Zea mays
  Zm_smallRNAprecursor_780
gaaaatcagtgtgttcaactggctgctcatcaactttccgggatggccttatcctggtgggataccttcaatgtcaccatcagagatgctacctgggcggagtttgaaacagctttccatgagcatcatgtgcaccaagggatcgttcagctcaaggaagacgaattctgggaactgactcaagacggaagatctgccagcgagtacgtgcacaagttcacggaattggcccgctacgcgccagatgacgtcagtaccgaagtcaataagatggctcgcttcctgaaggggcttagaccagaactcaagaccatcctggctagccaagacttcctcagtttctctcacctctccaacaaagccatgcaagtggaaagggcaaaggaggaagaaaaaggccatctcaagagaaaattccaagtcctccgggctcagcagcaagatcggcaccagaaaactcgatcctttggatttccacccaagggaccaagcttcagtagaccaggtggacccaccccgtcacggttcagtcagtagagtcagagctcctttcatgccccctcagttgcaagcaaccaacccccggcgaatgcatgttggcactgcggagatcccagtcacttcaagaacaactatccccagctgaagccatcaggacctgcctactccaactcggtgaatggccccaagaatacctccgcatccgcccccaaggcaccctcctccatcagccagcagaacaagacccagtatcaaggaagggcacgagttaatcacgtcgatgcttaggaggctcagcaagctccgggagtagtgctcggtgagttccttgttgaatttactcccgctaccgtactttttgattcaggagcatcccattcttttatagccactagttttgtggaaaagcatggcattctctctacccctctagagattctcttggtcacccgaaccctagggtcagaccttctatgtcagctcaaatgctcccaagtcagaatccttttaagtggggtagtgttcttggcagacttaaccgtcttgccatcccaagggattgatgtgatcttagggatggattggttgaccaaacacaaaagtatcatcagttgcgcaaacaagacagtccttctcacagg

SEQ ID NO: 5292 - DNA, 1047 bp, Zea mays
  Zm_smallRNAprecursor_781
ttcgtctacccaaaaatgccctatacgccccttaaaataataaaaggcccaaaaaaacaggaacggtcacccatttttactatggttcggtgatctaaaaacaaaaaaaataaaagaaaaaaggaatgcaacacgaggacttcccaggaggtcatccatcctattactactctcaacaaagcacgcttaacatcaaagttctgatgggatctggtgctttagtgttggtatgatcgcatccttcatatcctgcgtcctccttcctcttatgcccacaccttcgtgctcgactcgccccacggcactgaacatccttcctccgcacgaagtacccaaaaatgcccaaaacgccccttaaaaacaaataaaacaaaaaaaggtaatttaacacgaggacggtcacccatttttactatggtttggtgttcgaaaaacaaacaaaaataaaaccaaaaaagaaatgcaacacgaggacttcacaggaggtcacccatcctagtactactctcgcccaagcacgcttaacctcggagttctgattggatccggtgctttagtgctggtatgatcgcatcggtcataccctgtgtccttcctcttatgcccacacctccgtgctcggctcgcccacggcactgaacatccttcctccgcacaaagtacccgaaaaatgcacaaaacgccccttaaaacaaataaaacaaaaaaggtaatttaacacaaggacggtcacccatttttactatggtttggtgttcaaaaaacaaacaaaaaaaaacaaaaaaaaggaatgcaacacgaggacttccaaggagatcacccatcctagtactactctcgcccaagcacgcttaacctcgaagttctgatgggatccggtgctttagtgttggtatgatcacatccatcatatcatgcgtcctccttccccttatgcccacacctacgtgctcggctcgtcgacgacactaaacatccttcctccacacaaagtacccgagaaatgcccaaaacaacccttaaaacaaataaaacaaaaaaggtaat

SEQ ID NO: 5293 - DNA, 1047 bp, Zea mays
  Zm_smallRNAprecursor_782
cgcacaaagtacccgaaaaatgcacaaaacgccccttaaaacaaataaaacaaaaaaggtaatttaacacaaggacggtcacccatttttactatggtttggtgttcaaaaaacaaacaaaaaaaaacaaaaaaaaggaatgcaacacgaggacttccaaggagatcacccatcctagtactactctcgcccaagcacgcttaacctcgaagttctgatgggatccggtgctttagtgttggtatgatcacatccatcatatcatgcgtcctccttccccttatgcccacacctacgtgctcggctcgtcgacgacactaaacatccttcctccacacaaagtacccgagaaatgcccaaaacaacccttaaaacaaataaaacaaaaaaggtaatttaacacaaggaccgtcacccatttttactatggtttggtgttcgaaaaaaaaccaaaaaaggaatacaacacgaggacttcccacgaggtcacccatcctagtactactctcgcccaagcactcttaacctcggagttctgatgggatccggtgctttagtgctggtatgatcgcatccgtcatatcctgcgtcctccttcctcttatgcccacacctctgtgctcggatcgcccacggcaccgaacatcctttctccgcacaaagtacccaaaaaatgcccaaaacgccccttaaaacaaataaaacaaaaaaggtaatttaacacgaggacggtcacccatttttactatggtttggtgtgtaaaaaacatacaacaataaaaccaaaaaaaggaatgcaacatgaaaacttcccaggaggtcacccatcctagtactactctcgcccaagcacgcttaaccttgcagttttgatgcgatctggtgctttagtgctggtatgatcacatccatcatatcctgcatcctccttcctcttatgcccgcacctccgtgctcggctcgcccacgacactgaacatcgttcctccgcacaaaagtacccgaaaaatgcccaaaacgcccccttcaaacaaataaaacaaaaag

SEQ ID NO: 5294 - DNA, 1054 bp, Zea mays
  Zm_smallRNAprecursor_783
tcgcccacggcactggacatccttcctccgcacaaagtacccgaaaaacgccccttaaaacaaataaaaggtaatttaacacgaggacggtcacccatttttactatggtttggtgttcgaaaaacaaacaaaaataaaaccaaaaaaaaggaatgcaacacgaggacttcacaggaggtcacccatcctgtactactctcgcccaagcacgcttaacttcgaagttctaatgggatccggtgctttagagctggtatgatcgcatctgtcatatcctgcgtcctccttcctcttatgcccacacctccgtgctcggctcgccaacgacactgaacatccttcctccgcacaaagtacccgaaaaatgcccaaaacgccccttaaaacaaataaaaggtaatttaacacgaggacggtcacccatttttactatggtttggtgttcgaaaaacaaacaaaaataaaaccaaaaaaaggaatgcaacacgaggacttctcaggaggtcacccatcctagtactactgtcgcccaagcacgcttaacttcggagttctgatgggatccggtgctttagtgctggtatgatcgcatctgtcatatcctacgtcctccttcctcttatgcccacacctccgtgctcgactcgcccacggcactggacatccttcctccgcacaaagtacccgaaaaatgcccaaaacgccccttaaaataaataaaaggtaatttaacacgaggacgttcacccatttttactatggtttggtgttcgaaaaacaaacaaaaataaaaccaaaaaaggaatgcaacacgaggacttcccaggaggtcacccattctagtactactctcgcccaagcacgcttaacttcggagttctaatgggatccagtgcttttgttgcatgtatgatcgcatccatcatatcctgcgtcctccttcctcttatgcccacacggccatacctccgtgctcggctcgcccacggcgctgtacatccttcctccgcacaaagtacccgaaaaattcccaaaacgtcccttaaaacaaat

SEQ ID NO: 5295 - DNA, 1041 bp, Zea mays
  Zm_smallRNAprecursor_784
cacggcactggacatccttcctccgcacaaagtacccgaaaaacgccccttaaaacaaataaaaggtaatttaacacgaggacggtcacccatttttactatggtttggtgttcgaaaaacaaacaaaaataaaaccaaaaaaaaggaatgcaacacgaggacttcacaggaggtcacccatcctgtactactctcgcccaagcacgcttaacttcgaagttctaatgggatccggtgctttagagctggtatgatcgcatctgtcatatcctgcgtcctccttcctcttatgcccacacctccgtgctcggctcgccaacgacactgaacatccttcctccgcacaaagtacccgaaaaatgcccaaaacgccccttaaaacaaataaaaggtaatttaacacgaggacggtcacccatttttactatggtttggtgttcgaaaaacaaacaaaaataaaaccaaaaaaaggaatgcaacacgaggacttctcaggaggtcacccatcctagtactactgtcgcccaagcacgcttaacttcggagttctgatgggatccggtgctttagtgctggtatgatcgcatctgtcatatcctacgtcctccttcctcttatgcccacacctccgtgctcgactcgcccacggcactggacatccttcctccgcacaaagtacccgaaaaatgcccaaaacgccccttaaaataaataaaaggtaatttaacacgaggacgttcacccatttttactatggtttggtgttcgaaaaacaaacaaaaataaaaccaaaaaaggaatgcaacacgaggacttcccaggaggtcacccattctagtactactctcgcccaagcacgcttaacttcggagttctaatgggatccagtgcttttgttgcatgtatgatcgcatccatcatatcctgcgtcctccttcctcttatgcccacacggccatacctccgtgctcggctcgcccacggcgctgtacatccttcctccgcacaaagtacccgaaaaattcccaaaacgtccctta

SEQ ID NO: 5296 - DNA, 1199 bp, Zea mays
  Zm_smallRNAprecursor_785
tgttcgaaaaacaaacaaaaataaaaccaaaaaaaaggaatgcaacacgaggacttcacaggaggtcacccatcctgtactactctcgcccaagcacgcttaacttcgaagttctaatgggatccggtgctttagagctggtatgatcgcatctgtcatatcctgcgtcctccttcctcttatgcccacacctccgtgctcggctcgccaacgacactgaacatccttcctccgcacaaagtacccgaaaaatgcccaaaacgccccttaaaacaaataaaaggtaatttaacacgaggacggtcacccatttttactatggtttggtgttcgaaaaacaaacaaaaataaaaccaaaaaaaggaatgcaacacgaggacttctcaggaggtcacccatcctagtactactgtcgcccaagcacgcttaacttcggagttctgatgggatccggtgctttagtgctggtatgatcgcatctgtcatatcctacgtcctccttcctcttatgcccacacctccgtgctcgactcgcccacggcactggacatccttcctccgcacaaagtacccgaaaaatgcccaaaacgccccttaaaataaataaaaggtaatttaacacgaggacgttcacccatttttactatggtttggtgttcgaaaaacaaacaaaaataaaaccaaaaaaggaatgcaacacgaggacttcccaggaggtcacccattctagtactactctcgcccaagcacgcttaacttcggagttctaatgggatccagtgcttttgttgcatgtatgatcgcatccatcatatcctgcgtcctccttcctcttatgcccacacggccatacctccgtgctcggctcgcccacggcgctgtacatccttcctccgcacaaagtacccgaaaaattcccaaaacgtcccttaaaacaaataaaaggtaatttaacacgaggacggtcgcccatttttactatggtttggtgttcgaaaaacaaacaaaaataaaaccaaaaaaaggaatgcaacacgaggacttccaggaggtcacccatcctagtactactctcgcccaaacacgattaacttcggagttatgatgggatccggtgctttagtgatggtatgatcacatctgtcatatcctgcgtcatccttcctcttgtgcccacacctccgtgctcggctcgccca

SEQ ID NO: 5297 - DNA, 1058 bp, Zea mays
  Zm_smallRNAprecursor_786
ggctcgccaacgacactgaacatccttcctccgcacaaagtacccgaaaaatgcccaaaacgccccttaaaacaaataaaaggtaatttaacacgaggacggtcacccatttttactatggtttggtgttcgaaaaacaaacaaaaataaaaccaaaaaaaggaatgcaacacgaggacttctcaggaggtcacccatcctagtactactgtcgcccaagcacgcttaacttcggagttctgatgggatccggtgctttagtgctggtatgatcgcatctgtcatatcctacgtcctccttcctcttatgcccacacctccgtgctcgactcgcccacggcactggacatccttcctccgcacaaagtacccgaaaaatgcccaaaacgccccttaaaataaataaaaggtaatttaacacgaggacgttcacccatttttactatggtttggtgttcgaaaaacaaacaaaaataaaaccaaaaaaggaatgcaacacgaggacttcccaggaggtcacccattctagtactactctcgcccaagcacgcttaacttcggagttctaatgggatccagtgcttttgttgcatgtatgatcgcatccatcatatcctgcgtcctccttcctcttatgcccacacggccatacctccgtgctcggctcgcccacggcgctgtacatccttcctccgcacaaagtacccgaaaaattcccaaaacgtcccttaaaacaaataaaaggtaatttaacacgaggacggtcgcccatttttactatggtttggtgttcgaaaaacaaacaaaaataaaaccaaaaaaaggaatgcaacacgaggacttccaggaggtcacccatcctagtactactctcgcccaaacacgattaacttcggagttatgatgggatccggtgctttagtgatggtatgatcacatctgtcatatcctgcgtcatccttcctcttgtgcccacacctccgtgctcggctcgcccacggcactggacatccttcctccgcacaaagtacccgaaaaatgcctaaaacgccccttaa

SEQ ID NO: 5298 - DNA, 1054 bp, Zea mays
  Zm_smallRNAprecursor_787
acggcgctgtacatccttcctccgcacaaagtacccgaaaaattcccaaaacgtcccttaaaacaaataaaaggtaatttaacacgaggacggtcgcccatttttactatggtttggtgttcgaaaaacaaacaaaaataaaaccaaaaaaaggaatgcaacacgaggacttccaggaggtcacccatcctagtactactctcgcccaaacacgattaacttcggagttatgatgggatccggtgctttagtgatggtatgatcacatctgtcatatcctgcgtcatccttcctcttgtgcccacacctccgtgctcggctcgcccacggcactggacatccttcctccgcacaaagtacccgaaaaatgcctaaaacgccccttaaaacaaataaaaggtaatttaacacgaggacggtcacccatttttactatggtttggtgttcgaaaaacaaacaaaaataaaacaaaaaaggaatgcaacacgaggacttcctaggaggtcacccatcctagtactactctcgcccaagcacgcttaacttcggagttctgatgggatccggtgctttagtgctggtatgatcgcatccgtcatatcctgcgtcctccttcctcttatgcccacacctccgtgctcggctcgcccccgacactggacatccttcctcggcacaaagtacccaaaaaatgcccaaaacgccccttaaaacaaataaaaggtaatttaaaacgaggacgttcacccatttttactatggtttggtgttcgaaaaacaaacaaaaataaaaccaaaaaaaggaatgcaacacgaggacgtcccaagaggtcacccattctagtactactctcgcccaagcacgcttaacttcggagttctaatgggatccagtgctttagtgctgatatgatcgcatccgtcatatcctgcgtcctccttcctcttatgcccacacggccacacctctgtgctcggctcgcccacggcactgtacatccttcctccgcacaaagtacccgaaaaatgcccaaaacgtcccttaaaacaaat

SEQ ID NO: 5299 - DNA, 1041 bp, Zea mays
  Zm_smallRNAprecursor_788
gctgtacatccttcctccgcacaaagtacccgaaaaattcccaaaacgtcccttaaaacaaataaaaggtaatttaacacgaggacggtcgcccatttttactatggtttggtgttcgaaaaacaaacaaaaataaaaccaaaaaaaggaatgcaacacgaggacttccaggaggtcacccatcctagtactactctcgcccaaacacgattaacttcggagttatgatgggatccggtgctttagtgatggtatgatcacatctgtcatatcctgcgtcatccttcctcttgtgcccacacctccgtgctcggctcgcccacggcactggacatccttcctccgcacaaagtacccgaaaaatgcctaaaacgccccttaaaacaaataaaaggtaatttaacacgaggacggtcacccatttttactatggtttggtgttcgaaaaacaaacaaaaataaaacaaaaaaggaatgcaacacgaggacttcctaggaggtcacccatcctagtactactctcgcccaagcacgcttaacttcggagttctgatgggatccggtgctttagtgctggtatgatcgcatccgtcatatcctgcgtcctccttcctcttatgcccacacctccgtgctcggctcgcccccgacactggacatccttcctcggcacaaagtacccaaaaaatgcccaaaacgccccttaaaacaaataaaaggtaatttaaaacgaggacgttcacccatttttactatggtttggtgttcgaaaaacaaacaaaaataaaaccaaaaaaaggaatgcaacacgaggacgtcccaagaggtcacccattctagtactactctcgcccaagcacgcttaacttcggagttctaatgggatccagtgctttagtgctgatatgatcgcatccgtcatatcctgcgtcctccttcctcttatgcccacacggccacacctctgtgctcggctcgcccacggcactgtacatccttcctccgcacaaagtacccgaaaaatgcccaaaacgtccctta

SEQ ID NO: 5300 - DNA, 1037 bp, Zea mays
  Zm_smallRNAprecursor_789
tacatccttcctccgcacaaagtacccgaaaaattcccaaaacgtcccttaaaacaaataaaaggtaatttaacacgaggacggtcgcccatttttactatggtttggtgttcgaaaaacaaacaaaaataaaaccaaaaaaaggaatgcaacacgaggacttccaggaggtcacccatcctagtactactctcgcccaaacacgattaacttcggagttatgatgggatccggtgctttagtgatggtatgatcacatctgtcatatcctgcgtcatccttcctcttgtgcccacacctccgtgctcggctcgcccacggcactggacatccttcctccgcacaaagtacccgaaaaatgcctaaaacgccccttaaaacaaataaaaggtaatttaacacgaggacggtcacccatttttactatggtttggtgttcgaaaaacaaacaaaaataaaacaaaaaaggaatgcaacacgaggacttcctaggaggtcacccatcctagtactactctcgcccaagcacgcttaacttcggagttctgatgggatccggtgctttagtgctggtatgatcgcatccgtcatatcctgcgtcctccttcctcttatgcccacacctccgtgctcggctcgcccccgacactggacatccttcctcggcacaaagtacccaaaaaatgcccaaaacgccccttaaaacaaataaaaggtaatttaaaacgaggacgttcacccatttttactatggtttggtgttcgaaaaacaaacaaaaataaaaccaaaaaaaggaatgcaacacgaggacgtcccaagaggtcacccattctagtactactctcgcccaagcacgcttaacttcggagttctaatgggatccagtgctttagtgctgatatgatcgcatccgtcatatcctgcgtcctccttcctcttatgcccacacggccacacctctgtgctcggctcgcccacggcactgtacatccttcctccgcacaaagtacccgaaaaatgcccaaaacgtccctta

SEQ ID NO: 5301 - DNA, 1047 bp, Zea mays
  Zm_smallRNAprecursor_790
ctccgcacaaagtacccgaaaaattcccaaaacgtcccttaaaacaaataaaaggtaatttaacacgaggacggtcgcccatttttactatggtttggtgttcgaaaaacaaacaaaaataaaaccaaaaaaaggaatgcaacacgaggacttccaggaggtcacccatcctagtactactctcgcccaaacacgattaacttcggagttatgatgggatccggtgctttagtgatggtatgatcacatctgtcatatcctgcgtcatccttcctcttgtgcccacacctccgtgctcggctcgcccacggcactggacatccttcctccgcacaaagtacccgaaaaatgcctaaaacgccccttaaaacaaataaaaggtaatttaacacgaggacggtcacccatttttactatggtttggtgttcgaaaaacaaacaaaaataaaacaaaaaaggaatgcaacacgaggacttcctaggaggtcacccatcctagtactactctcgcccaagcacgcttaacttcggagttctgatgggatccggtgctttagtgctggtatgatcgcatccgtcatatcctgcgtcctccttcctcttatgcccacacctccgtgctcggctcgcccccgacactggacatccttcctcggcacaaagtacccaaaaaatgcccaaaacgccccttaaaacaaataaaaggtaatttaaaacgaggacgttcacccatttttactatggtttggtgttcgaaaaacaaacaaaaataaaaccaaaaaaaggaatgcaacacgaggacgtcccaagaggtcacccattctagtactactctcgcccaagcacgcttaacttcggagttctaatgggatccagtgctttagtgctgatatgatcgcatccgtcatatcctgcgtcctccttcctcttatgcccacacggccacacctctgtgctcggctcgcccacggcactgtacatccttcctccgcacaaagtacccgaaaaatgcccaaaacgtcccttaaaacaaataaaaggtaattt

SEQ ID NO: 5302 - DNA, 1037 bp, Zea mays
  Zm_smallRNAprecursor_791
tcggcacaaagtacccaaaaaatgcccaaaacgccccttaaaacaaataaaaggtaatttaaaacgaggacgttcacccatttttactatggtttggtgttcgaaaaacaaacaaaaataaaaccaaaaaaaggaatgcaacacgaggacgtcccaagaggtcacccattctagtactactctcgcccaagcacgcttaacttcggagttctaatgggatccagtgctttagtgctgatatgatcgcatccgtcatatcctgcgtcctccttcctcttatgcccacacggccacacctctgtgctcggctcgcccacggcactgtacatccttcctccgcacaaagtacccgaaaaatgcccaaaacgtcccttaaaacaaataaaaggtaatttaacacgaggacggtcgtccatctttactatggtttggtgttcgaaaaacaaacaaaaataaaaccaaaaaaagaaatgcaacacgaggacttcccaggaggacacccatcctagtactactctcgcccaagcacgtttaacttcggagttctgatgggatccagtgctttagtgatagtatgatcacatccgtcatatcttgcgtcctccttcctcttatgcccacacggccacacctccgtactcggctcgcccacggcactggacatccttccttcgcacaaagtacccgaaaaatgcccaaaacgccccttaaaacaaataaaaggtaatttaacacgaggacggtcacccatttttactatggtttggtgttcgaaaaacaaacaaaaacaaaaccaaaaaaaggaatgcaacacgaggacttccgaggaggtcacccatcctagtactactctcgcccaagcacgcttaacttcgaagttctaatgggatccggtgctttagcactggtatgatcgcatcagtcatatcttgcgtcctccttcctcttatgcccacacctccgtgctcggctcgaccacgacactgaacatccttcctccacacaaagtacccgaaaaatgcccaaaacgcccctta

SEQ ID NO: 5303 - DNA, 1041 bp, Zea mays
  Zm_smallRNAprecursor_792
tggacatccttccttcgcacaaagtacccgaaaaatgcccaaaacgccccttaaaacaaataaaaggtaatttaacacgaggacggtcacccatttttactatggtttggtgttcgaaaaacaaacaaaaacaaaaccaaaaaaaggaatgcaacacgaggacttccgaggaggtcacccatcctagtactactctcgcccaagcacgcttaacttcgaagttctaatgggatccggtgctttagcactggtatgatcgcatcagtcatatcttgcgtcctccttcctcttatgcccacacctccgtgctcggctcgaccacgacactgaacatccttcctccacacaaagtacccgaaaaatgcccaaaacgccccttaaaacaaataaaaggtaatttaacacgaggacggtcacccatttttactatggtctgatgttcgaaaaacaaacaaaataaaaccaaaaaaaggaatgcaacgcgaggacttcccaggaggtcacccatcctagtactactctcgcccaagcacgcttaacttcggagttctgatgggatcaggtgctttagtgctggtatgatcgcatccgtcatatcctgcgtcctccttcctcttatgcccacacctccgtgctcggctcgcccacgacacttgtcggcgtttcgagaccgggggtccctgagccgatgagtgagtgtgccgcgtgccccagcccagatgggtcgagcgcgtgggcgagcgcgaaggggggaaagcgacgtggccggagacgggcgtgagagaggagtggaaatcctgcggccttcgtgttcgtcccgcgcccaggtcgggtgcgcttgcagtagggggttacaagcgtccacgcgggtgagggaagcgagcggccccaagagagcgcctgtcccgtcctcggtcccgcacggccaaccttctctaagaaggccctggtccttccttttatagtcgtaaggagaggatccaggtgtacaatgggggtgtagcagagtgctacgtgtctagcggagggagagctagcgcc

SEQ ID NO: 5304 - DNA, 1037 bp, Zea mays
  Zm_smallRNAprecursor_793
catccttccttcgcacaaagtacccgaaaaatgcccaaaacgccccttaaaacaaataaaaggtaatttaacacgaggacggtcacccatttttactatggtttggtgttcgaaaaacaaacaaaaacaaaaccaaaaaaaggaatgcaacacgaggacttccgaggaggtcacccatcctagtactactctcgcccaagcacgcttaacttcgaagttctaatgggatccggtgctttagcactggtatgatcgcatcagtcatatcttgcgtcctccttcctcttatgcccacacctccgtgctcggctcgaccacgacactgaacatccttcctccacacaaagtacccgaaaaatgcccaaaacgccccttaaaacaaataaaaggtaatttaacacgaggacggtcacccatttttactatggtctgatgttcgaaaaacaaacaaaataaaaccaaaaaaaggaatgcaacgcgaggacttcccaggaggtcacccatcctagtactactctcgcccaagcacgcttaacttcggagttctgatgggatcaggtgctttagtgctggtatgatcgcatccgtcatatcctgcgtcctccttcctcttatgcccacacctccgtgctcggctcgcccacgacacttgtcggcgtttcgagaccgggggtccctgagccgatgagtgagtgtgccgcgtgccccagcccagatgggtcgagcgcgtgggcgagcgcgaaggggggaaagcgacgtggccggagacgggcgtgagagaggagtggaaatcctgcggccttcgtgttcgtcccgcgcccaggtcgggtgcgcttgcagtagggggttacaagcgtccacgcgggtgagggaagcgagcggccccaagagagcgcctgtcccgtcctcggtcccgcacggccaaccttctctaagaaggccctggtccttccttttatagtcgtaaggagaggatccaggtgtacaatgggggtgtagcagagtgctacgtgtctagcggagggagagctagcgcc

SEQ ID NO: 5305 - DNA, 1208 bp, Zea mays
  Zm_smallRNAprecursor_794
aggggggcctcgggcgagacggaaatccctcggggtcggctgcccttgtccgaggctaggctcgggcgaggcgtgatcaagtcgctcgtatggactgatccctgacttaatcgcacccatcaggcctctgcagctttatgctgatgggggttaccagctgagaattaggcgtcttgagggtacccctaattatggtccccgacagcactgaacatctttcttccgcacaaagtacccgaaaaatgcccaaaacgccccttaaaacaaataataaaacaaaaaaggtaatttaacacgaggacggtcgcacatttttactatggtttggtgttcgaaaaacaaccaaaaataaaaccaaaaaaggaatgcaacacgagtacttcccaggaggtcacccatcctagtactactctcgccctagcacgtttaacttcgaagttctgatgggatccgatgctttagtgctggtatgatcgcatccgtcatatcatgcgtcctccttcctcttatgcccacacctccgtgctcggctcgcccacggcactgaacatccttcttccgcacaaagtacccgaaaaatgcccaaaacgccccttaaaacaaataaaaccaaaaaaggtaatttaacacgaggacgatcgcacatttttactatgttttggtgttcgaaaaacaaataaaaataaaaccaaaaaaaggaatgcaacacgaggacttcccaggaggtaacccatcctaatactactctcacccaagcacgcttaacttcggagtttcgatgggatctggtgctttagtgttggtatgatcgcatctatcatatcctgcgtcctccttcctcttatgcccacgacactggagatcgttcctccgcacaaagtacccgaaaaatgcccaaaacgccccttaaaacaaataaaaggtaatttaacacgaggacggtcgcccatttttactatggtttggtgttcgaaaaacaaacaaaaataaaaccaaaaaaaggaatgcaacacgaggacttctcaggaggtcacccatcctagtactactctcgcccaagcacgcttaacttcagagttctgatgggatctggtgcttttagtgctggtatgatcgcatccgtcatatcctgcgtcctccttcctcttatgcccacacctccgtgctcggctcgcccacggcactggacatccttcctccgcacaaag

SEQ ID NO: 5306 - DNA, 1042 bp, Zea mays
  Zm_smallRNAprecursor_795
acgacactggagatcgttcctccgcacaaagtacccgaaaaatgcccaaaacgccccttaaaacaaataaaaggtaatttaacacgaggacggtcgcccatttttactatggtttggtgttcgaaaaacaaacaaaaataaaaccaaaaaaaggaatgcaacacgaggacttctcaggaggtcacccatcctagtactactctcgcccaagcacgcttaacttcagagttctgatgggatctggtgcttttagtgctggtatgatcgcatccgtcatatcctgcgtcctccttcctcttatgcccacacctccgtgctcggctcgcccacggcactggacatccttcctccgcacaaagtacccgaaaaacgccccttaaaacaaataaaaggtaatttaacacgagaacggtcacccatttttactatggtttggtgttcgaaaaacaaacaaaaataaaacaaaaaaaaggaatgcaacacgaggacttcctaggaggtcacccatcctagtactactctcgcccaagcacgcttaacttcggagttctaatgggatccggtgctttagtgctggtatgatcgcatccgtcataacctgcgtcctccttcctcttatgcccacacctccgtgctcggctcgcccacggcactggacatccttcctccgcacaaagtacccgaaaaacgccccttaaaacaaataaaatgtaatttaacacgagaacggtcacccatttttactatggtttggtgttcgaaaaacaaacaaaaataaaaccaaaaaaaaggaatgcaacacgaggacttccgaggaggtcacccatcctagtactactctcgcccaagcacgcttcgcttcggagttctgatgggatccggtgctttagtgctggtatgatcgcatctgtcatatcatgcatcctccttcctcttatgcccacacctccgtgctcggctcgcccacggcactggacatccttcctccgcacaaagtacccgaaaaacgccccttaaaacaaataaaaggtaatttaacacg

SEQ ID NO: 5307 - DNA, 1047 bp, Zea mays
  Zm_smallRNAprecursor_796
cgttcctccgcacaaagtacccgaaaaatgcccaaaacgccccttaaaacaaataaaaggtaatttaacacgaggacggtcgcccatttttactatggtttggtgttcgaaaaacaaacaaaaataaaaccaaaaaaaggaatgcaacacgaggacttctcaggaggtcacccatcctagtactactctcgcccaagcacgcttaacttcagagttctgatgggatctggtgcttttagtgctggtatgatcgcatccgtcatatcctgcgtcctccttcctcttatgcccacacctccgtgctcggctcgcccacggcactggacatccttcctccgcacaaagtacccgaaaaacgccccttaaaacaaataaaaggtaatttaacacgagaacggtcacccatttttactatggtttggtgttcgaaaaacaaacaaaaataaaacaaaaaaaaggaatgcaacacgaggacttcctaggaggtcacccatcctagtactactctcgcccaagcacgcttaacttcggagttctaatgggatccggtgctttagtgctggtatgatcgcatccgtcataacctgcgtcctccttcctcttatgcccacacctccgtgctcggctcgcccacggcactggacatccttcctccgcacaaagtacccgaaaaacgccccttaaaacaaataaaatgtaatttaacacgagaacggtcacccatttttactatggtttggtgttcgaaaaacaaacaaaaataaaaccaaaaaaaaggaatgcaacacgaggacttccgaggaggtcacccatcctagtactactctcgcccaagcacgcttcgcttcggagttctgatgggatccggtgctttagtgctggtatgatcgcatctgtcatatcatgcatcctccttcctcttatgcccacacctccgtgctcggctcgcccacggcactggacatccttcctccgcacaaagtacccgaaaaacgccccttaaaacaaataaaaggtaatttaacacgagaacggtcacccattttt

SEQ ID NO: 5308 - DNA, 1054 bp, Zea mays
  Zm_smallRNAprecursor_797
tgctcggctcgcccacggcactggacatccttcctccgcacaaagtacccgaaaaacgccccttaaaacaaataaaaggtaatttaacacgagaacggtcacccatttttactatggtttggtgttcgaaaaacaaacaaaaataaaacaaaaaaaaggaatgcaacacgaggacttcctaggaggtcacccatcctagtactactctcgcccaagcacgcttaacttcggagttctaatgggatccggtgctttagtgctggtatgatcgcatccgtcataacctgcgtcctccttcctcttatgcccacacctccgtgctcggctcgcccacggcactggacatccttcctccgcacaaagtacccgaaaaacgccccttaaaacaaataaaatgtaatttaacacgagaacggtcacccatttttactatggtttggtgttcgaaaaacaaacaaaaataaaaccaaaaaaaaggaatgcaacacgaggacttccgaggaggtcacccatcctagtactactctcgcccaagcacgcttcgcttcggagttctgatgggatccggtgctttagtgctggtatgatcgcatctgtcatatcatgcatcctccttcctcttatgcccacacctccgtgctcggctcgcccacggcactggacatccttcctccgcacaaagtacccgaaaaacgccccttaaaacaaataaaaggtaatttaacacgagaacggtcacccatttttactatggtttggtgttcgaaaaacaaacaaaaataaaaccaaaaaaaaggaatgcaacacgaggacttcccaggaggtcacccatcctagtactactctcgcccaagcacgcttaactttggagttctgatgggatccggtgctttagtgctggtatgatcgcatccgtcatatcctgcgtcctccttcctcttatgcccacacctccgtgctcggctcgcccacagcactggacatccttcctacgcacaaagtacccgaaaaacgccccttaaaacaaataaaaggtaatttaacacgagaacgg

SEQ ID NO: 5309 - DNA, 1041 bp, Zea mays
  Zm_smallRNAprecursor_798
ggctcgcccacggcactggacatccttcctccgcacaaagtacccgaaaaacgccccttaaaacaaataaaaggtaatttaacacgagaacggtcacccatttttactatggtttggtgttcgaaaaacaaacaaaaataaaacaaaaaaaaggaatgcaacacgaggacttcctaggaggtcacccatcctagtactactctcgcccaagcacgcttaacttcggagttctaatgggatccggtgctttagtgctggtatgatcgcatccgtcataacctgcgtcctccttcctcttatgcccacacctccgtgctcggctcgcccacggcactggacatccttcctccgcacaaagtacccgaaaaacgccccttaaaacaaataaaatgtaatttaacacgagaacggtcacccatttttactatggtttggtgttcgaaaaacaaacaaaaataaaaccaaaaaaaaggaatgcaacacgaggacttccgaggaggtcacccatcctagtactactctcgcccaagcacgcttcgcttcggagttctgatgggatccggtgctttagtgctggtatgatcgcatctgtcatatcatgcatcctccttcctcttatgcccacacctccgtgctcggctcgcccacggcactggacatccttcctccgcacaaagtacccgaaaaacgccccttaaaacaaataaaaggtaatttaacacgagaacggtcacccatttttactatggtttggtgttcgaaaaacaaacaaaaataaaaccaaaaaaaaggaatgcaacacgaggacttcccaggaggtcacccatcctagtactactctcgcccaagcacgcttaactttggagttctgatgggatccggtgctttagtgctggtatgatcgcatccgtcatatcctgcgtcctccttcctcttatgcccacacctccgtgctcggctcgcccacagcactggacatccttcctacgcacaaagtacccgaaaaacgccccttaaaacaaataaaaggtaatttaacac

SEQ ID NO: 5310 - DNA, 1037 bp, Zea mays
  Zm_smallRNAprecursor_799
cgcccacggcactggacatccttcctccgcacaaagtacccgaaaaacgccccttaaaacaaataaaaggtaatttaacacgagaacggtcacccatttttactatggtttggtgttcgaaaaacaaacaaaaataaaacaaaaaaaaggaatgcaacacgaggacttcctaggaggtcacccatcctagtactactctcgcccaagcacgcttaacttcggagttctaatgggatccggtgctttagtgctggtatgatcgcatccgtcataacctgcgtcctccttcctcttatgcccacacctccgtgctcggctcgcccacggcactggacatccttcctccgcacaaagtacccgaaaaacgccccttaaaacaaataaaatgtaatttaacacgagaacggtcacccatttttactatggtttggtgttcgaaaaacaaacaaaaataaaaccaaaaaaaaggaatgcaacacgaggacttccgaggaggtcacccatcctagtactactctcgcccaagcacgcttcgcttcggagttctgatgggatccggtgctttagtgctggtatgatcgcatctgtcatatcatgcatcctccttcctcttatgcccacacctccgtgctcggctcgcccacggcactggacatccttcctccgcacaaagtacccgaaaaacgccccttaaaacaaataaaaggtaatttaacacgagaacggtcacccatttttactatggtttggtgttcgaaaaacaaacaaaaataaaaccaaaaaaaaggaatgcaacacgaggacttcccaggaggtcacccatcctagtactactctcgcccaagcacgcttaactttggagttctgatgggatccggtgctttagtgctggtatgatcgcatccgtcatatcctgcgtcctccttcctcttatgcccacacctccgtgctcggctcgcccacagcactggacatccttcctacgcacaaagtacccgaaaaacgccccttaaaacaaataaaaggtaatttaacac

SEQ ID NO: 5311 - DNA, 1047 bp, Zea mays
  Zm_smallRNAprecursor_800
actggacatccttcctccgcacaaagtacccgaaaaacgccccttaaaacaaataaaaggtaatttaacacgagaacggtcacccatttttactatggtttggtgttcgaaaaacaaacaaaaataaaacaaaaaaaaggaatgcaacacgaggacttcctaggaggtcacccatcctagtactactctcgcccaagcacgcttaacttcggagttctaatgggatccggtgctttagtgctggtatgatcgcatccgtcataacctgcgtcctccttcctcttatgcccacacctccgtgctcggctcgcccacggcactggacatccttcctccgcacaaagtacccgaaaaacgccccttaaaacaaataaaatgtaatttaacacgagaacggtcacccatttttactatggtttggtgttcgaaaaacaaacaaaaataaaaccaaaaaaaaggaatgcaacacgaggacttccgaggaggtcacccatcctagtactactctcgcccaagcacgcttcgcttcggagttctgatgggatccggtgctttagtgctggtatgatcgcatctgtcatatcatgcatcctccttcctcttatgcccacacctccgtgctcggctcgcccacggcactggacatccttcctccgcacaaagtacccgaaaaacgccccttaaaacaaataaaaggtaatttaacacgagaacggtcacccatttttactatggtttggtgttcgaaaaacaaacaaaaataaaaccaaaaaaaaggaatgcaacacgaggacttcccaggaggtcacccatcctagtactactctcgcccaagcacgcttaactttggagttctgatgggatccggtgctttagtgctggtatgatcgcatccgtcatatcctgcgtcctccttcctcttatgcccacacctccgtgctcggctcgcccacagcactggacatccttcctacgcacaaagtacccgaaaaacgccccttaaaacaaataaaaggtaatttaacacgagaacggtcacccattttt

SEQ ID NO: 5312 - DNA, 1192 bp, Zea mays
  Zm_smallRNAprecursor_801
tggtttggtgttcgaaaaacaaacaaaaataaaacaaaaaaaaggaatgcaacacgaggacttcctaggaggtcacccatcctagtactactctcgcccaagcacgcttaacttcggagttctaatgggatccggtgctttagtgctggtatgatcgcatccgtcataacctgcgtcctccttcctcttatgcccacacctccgtgctcggctcgcccacggcactggacatccttcctccgcacaaagtacccgaaaaacgccccttaaaacaaataaaatgtaatttaacacgagaacggtcacccatttttactatggtttggtgttcgaaaaacaaacaaaaataaaaccaaaaaaaaggaatgcaacacgaggacttccgaggaggtcacccatcctagtactactctcgcccaagcacgcttcgcttcggagttctgatgggatccggtgctttagtgctggtatgatcgcatctgtcatatcatgcatcctccttcctcttatgcccacacctccgtgctcggctcgcccacggcactggacatccttcctccgcacaaagtacccgaaaaacgccccttaaaacaaataaaaggtaatttaacacgagaacggtcacccatttttactatggtttggtgttcgaaaaacaaacaaaaataaaaccaaaaaaaaggaatgcaacacgaggacttcccaggaggtcacccatcctagtactactctcgcccaagcacgcttaactttggagttctgatgggatccggtgctttagtgctggtatgatcgcatccgtcatatcctgcgtcctccttcctcttatgcccacacctccgtgctcggctcgcccacagcactggacatccttcctacgcacaaagtacccgaaaaacgccccttaaaacaaataaaaggtaatttaacacgagaacggtcacccatttttactatggtttggtgttcgaaaaacaaacaaaaataaaaccaaaaaaaaggaatgcaacacgaggacttcccaggaggtcacccatcctagtactactctcgcccaagcacgcttaacttcggagttctaatgggatccggtgctttagtgctgatatgatcgcatccgtcatatcctgcgtcctccttcctcttatgcccacacctccgtgctcggctcgcccacggcattggacatcct

SEQ ID NO: 5313 - DNA, 1129 bp, Zea mays
  Zm_smallRNAprecursor_802
gcccacacctccgtgctcggctcgcccacggcactggacatccttcctccgcacaaagtacccgaaaaacgccccttaaaacaaataaaatgtaatttaacacgagaacggtcacccatttttactatggtttggtgttcgaaaaacaaacaaaaataaaaccaaaaaaaaggaatgcaacacgaggacttccgaggaggtcacccatcctagtactactctcgcccaagcacgcttcgcttcggagttctgatgggatccggtgctttagtgctggtatgatcgcatctgtcatatcatgcatcctccttcctcttatgcccacacctccgtgctcggctcgcccacggcactggacatccttcctccgcacaaagtacccgaaaaacgccccttaaaacaaataaaaggtaatttaacacgagaacggtcacccatttttactatggtttggtgttcgaaaaacaaacaaaaataaaaccaaaaaaaaggaatgcaacacgaggacttcccaggaggtcacccatcctagtactactctcgcccaagcacgcttaactttggagttctgatgggatccggtgctttagtgctggtatgatcgcatccgtcatatcctgcgtcctccttcctcttatgcccacacctccgtgctcggctcgcccacagcactggacatccttcctacgcacaaagtacccgaaaaacgccccttaaaacaaataaaaggtaatttaacacgagaacggtcacccatttttactatggtttggtgttcgaaaaacaaacaaaaataaaaccaaaaaaaaggaatgcaacacgaggacttcccaggaggtcacccatcctagtactactctcgcccaagcacgcttaacttcggagttctaatgggatccggtgctttagtgctgatatgatcgcatccgtcatatcctgcgtcctccttcctcttatgcccacacctccgtgctcggctcgcccacggcattggacatccttcctccgcacaaagtacccgaaaaacgccccttaaaacaaataaaaggtaatttaacacgagaacggtcacccatttttactatggtttggtgttcgaaaaacaaacaaaaataaaaccaaaaaaaag

SEQ ID NO: 5314 - DNA, 1054 bp, Zea mays
  Zm_smallRNAprecursor_803
gctcggctcgcccacggcactggacatccttcctccgcacaaagtacccgaaaaacgccccttaaaacaaataaaatgtaatttaacacgagaacggtcacccatttttactatggtttggtgttcgaaaaacaaacaaaaataaaaccaaaaaaaaggaatgcaacacgaggacttccgaggaggtcacccatcctagtactactctcgcccaagcacgcttcgcttcggagttctgatgggatccggtgctttagtgctggtatgatcgcatctgtcatatcatgcatcctccttcctcttatgcccacacctccgtgctcggctcgcccacggcactggacatccttcctccgcacaaagtacccgaaaaacgccccttaaaacaaataaaaggtaatttaacacgagaacggtcacccatttttactatggtttggtgttcgaaaaacaaacaaaaataaaaccaaaaaaaaggaatgcaacacgaggacttcccaggaggtcacccatcctagtactactctcgcccaagcacgcttaactttggagttctgatgggatccggtgctttagtgctggtatgatcgcatccgtcatatcctgcgtcctccttcctcttatgcccacacctccgtgctcggctcgcccacagcactggacatccttcctacgcacaaagtacccgaaaaacgccccttaaaacaaataaaaggtaatttaacacgagaacggtcacccatttttactatggtttggtgttcgaaaaacaaacaaaaataaaaccaaaaaaaaggaatgcaacacgaggacttcccaggaggtcacccatcctagtactactctcgcccaagcacgcttaacttcggagttctaatgggatccggtgctttagtgctgatatgatcgcatccgtcatatcctgcgtcctccttcctcttatgcccacacctccgtgctcggctcgcccacggcattggacatccttcctccgcacaaagtacccgaaaaacgccccttaaaacaaataaaaggtaatttaacacgagaacgg

SEQ ID NO: 5315 - DNA, 1047 bp, Zea mays
  Zm_smallRNAprecursor_804
ctggacatccttcctccgcacaaagtacccgaaaaacgccccttaaaacaaataaaatgtaatttaacacgagaacggtcacccatttttactatggtttggtgttcgaaaaacaaacaaaaataaaaccaaaaaaaaggaatgcaacacgaggacttccgaggaggtcacccatcctagtactactctcgcccaagcacgcttcgcttcggagttctgatgggatccggtgctttagtgctggtatgatcgcatctgtcatatcatgcatcctccttcctcttatgcccacacctccgtgctcggctcgcccacggcactggacatccttcctccgcacaaagtacccgaaaaacgccccttaaaacaaataaaaggtaatttaacacgagaacggtcacccatttttactatggtttggtgttcgaaaaacaaacaaaaataaaaccaaaaaaaaggaatgcaacacgaggacttcccaggaggtcacccatcctagtactactctcgcccaagcacgcttaactttggagttctgatgggatccggtgctttagtgctggtatgatcgcatccgtcatatcctgcgtcctccttcctcttatgcccacacctccgtgctcggctcgcccacagcactggacatccttcctacgcacaaagtacccgaaaaacgccccttaaaacaaataaaaggtaatttaacacgagaacggtcacccatttttactatggtttggtgttcgaaaaacaaacaaaaataaaaccaaaaaaaaggaatgcaacacgaggacttcccaggaggtcacccatcctagtactactctcgcccaagcacgcttaacttcggagttctaatgggatccggtgctttagtgctgatatgatcgcatccgtcatatcctgcgtcctccttcctcttatgcccacacctccgtgctcggctcgcccacggcattggacatccttcctccgcacaaagtacccgaaaaacgccccttaaaacaaataaaaggtaatttaacacgagaacggtcacccattttt

SEQ ID NO: 5316 - DNA, 1192 bp, Zea mays
  Zm_smallRNAprecursor_805
ggtttggtgttcgaaaaacaaacaaaaataaaaccaaaaaaaaggaatgcaacacgaggacttccgaggaggtcacccatcctagtactactctcgcccaagcacgcttcgcttcggagttctgatgggatccggtgctttagtgctggtatgatcgcatctgtcatatcatgcatcctccttcctcttatgcccacacctccgtgctcggctcgcccacggcactggacatccttcctccgcacaaagtacccgaaaaacgccccttaaaacaaataaaaggtaatttaacacgagaacggtcacccatttttactatggtttggtgttcgaaaaacaaacaaaaataaaaccaaaaaaaaggaatgcaacacgaggacttcccaggaggtcacccatcctagtactactctcgcccaagcacgcttaactttggagttctgatgggatccggtgctttagtgctggtatgatcgcatccgtcatatcctgcgtcctccttcctcttatgcccacacctccgtgctcggctcgcccacagcactggacatccttcctacgcacaaagtacccgaaaaacgccccttaaaacaaataaaaggtaatttaacacgagaacggtcacccatttttactatggtttggtgttcgaaaaacaaacaaaaataaaaccaaaaaaaaggaatgcaacacgaggacttcccaggaggtcacccatcctagtactactctcgcccaagcacgcttaacttcggagttctaatgggatccggtgctttagtgctgatatgatcgcatccgtcatatcctgcgtcctccttcctcttatgcccacacctccgtgctcggctcgcccacggcattggacatccttcctccgcacaaagtacccgaaaaacgccccttaaaacaaataaaaggtaatttaacacgagaacggtcacccatttttactatggtttggtgttcgaaaaacaaacaaaaataaaaccaaaaaaaaggaatgcaacacgaggacttcccaggaggtcacccatcctagtactactctcgcccaagcacgcttaacttcggagttctgatgggatccggtgctttagtgctggtatgatcgcatccgtcatatcctgcgtcctccttcctcttatgcccacacctccgtgctcggctcgcccacggcactggacatcct

SEQ ID NO: 5317 - DNA, 1129 bp, Zea mays
  Zm_smallRNAprecursor_806
gcccacacctccgtgctcggctcgcccacggcactggacatccttcctccgcacaaagtacccgaaaaacgccccttaaaacaaataaaaggtaatttaacacgagaacggtcacccatttttactatggtttggtgttcgaaaaacaaacaaaaataaaaccaaaaaaaaggaatgcaacacgaggacttcccaggaggtcacccatcctagtactactctcgcccaagcacgcttaactttggagttctgatgggatccggtgctttagtgctggtatgatcgcatccgtcatatcctgcgtcctccttcctcttatgcccacacctccgtgctcggctcgcccacagcactggacatccttcctacgcacaaagtacccgaaaaacgccccttaaaacaaataaaaggtaatttaacacgagaacggtcacccatttttactatggtttggtgttcgaaaaacaaacaaaaataaaaccaaaaaaaaggaatgcaacacgaggacttcccaggaggtcacccatcctagtactactctcgcccaagcacgcttaacttcggagttctaatgggatccggtgctttagtgctgatatgatcgcatccgtcatatcctgcgtcctccttcctcttatgcccacacctccgtgctcggctcgcccacggcattggacatccttcctccgcacaaagtacccgaaaaacgccccttaaaacaaataaaaggtaatttaacacgagaacggtcacccatttttactatggtttggtgttcgaaaaacaaacaaaaataaaaccaaaaaaaaggaatgcaacacgaggacttcccaggaggtcacccatcctagtactactctcgcccaagcacgcttaacttcggagttctgatgggatccggtgctttagtgctggtatgatcgcatccgtcatatcctgcgtcctccttcctcttatgcccacacctccgtgctcggctcgcccacggcactggacatccttcctccgcacaaagtacccgaaaaacgccccttaaaacaaataaaaggtaatttaacacgagaacggtcacccatttttactatggtttggtgttcgaaaaacaaacaaaaataaaaccaaaataagg

SEQ ID NO: 5318 - DNA, 1058 bp, Zea mays
  Zm_smallRNAprecursor_807
cacacctccgtgctcggctcgcccacggcactggacatccttcctccgcacaaagtacccgaaaaacgccccttaaaacaaataaaaggtaatttaacacgagaacggtcacccatttttactatggtttggtgttcgaaaaacaaacaaaaataaaaccaaaaaaaaggaatgcaacacgaggacttcccaggaggtcacccatcctagtactactctcgcccaagcacgcttaactttggagttctgatgggatccggtgctttagtgctggtatgatcgcatccgtcatatcctgcgtcctccttcctcttatgcccacacctccgtgctcggctcgcccacagcactggacatccttcctacgcacaaagtacccgaaaaacgccccttaaaacaaataaaaggtaatttaacacgagaacggtcacccatttttactatggtttggtgttcgaaaaacaaacaaaaataaaaccaaaaaaaaggaatgcaacacgaggacttcccaggaggtcacccatcctagtactactctcgcccaagcacgcttaacttcggagttctaatgggatccggtgctttagtgctgatatgatcgcatccgtcatatcctgcgtcctccttcctcttatgcccacacctccgtgctcggctcgcccacggcattggacatccttcctccgcacaaagtacccgaaaaacgccccttaaaacaaataaaaggtaatttaacacgagaacggtcacccatttttactatggtttggtgttcgaaaaacaaacaaaaataaaaccaaaaaaaaggaatgcaacacgaggacttcccaggaggtcacccatcctagtactactctcgcccaagcacgcttaacttcggagttctgatgggatccggtgctttagtgctggtatgatcgcatccgtcatatcctgcgtcctccttcctcttatgcccacacctccgtgctcggctcgcccacggcactggacatccttcctccgcacaaagtacccgaaaaacgccccttaaaacaaataaaaggtaatttaacacg

SEQ ID NO: 5319 - DNA, 1042 bp, Zea mays
  Zm_smallRNAprecursor_808
gctcgcccacggcactggacatccttcctccgcacaaagtacccgaaaaacgccccttaaaacaaataaaaggtaatttaacacgagaacggtcacccatttttactatggtttggtgttcgaaaaacaaacaaaaataaaaccaaaaaaaaggaatgcaacacgaggacttcccaggaggtcacccatcctagtactactctcgcccaagcacgcttaactttggagttctgatgggatccggtgctttagtgctggtatgatcgcatccgtcatatcctgcgtcctccttcctcttatgcccacacctccgtgctcggctcgcccacagcactggacatccttcctacgcacaaagtacccgaaaaacgccccttaaaacaaataaaaggtaatttaacacgagaacggtcacccatttttactatggtttggtgttcgaaaaacaaacaaaaataaaaccaaaaaaaaggaatgcaacacgaggacttcccaggaggtcacccatcctagtactactctcgcccaagcacgcttaacttcggagttctaatgggatccggtgctttagtgctgatatgatcgcatccgtcatatcctgcgtcctccttcctcttatgcccacacctccgtgctcggctcgcccacggcattggacatccttcctccgcacaaagtacccgaaaaacgccccttaaaacaaataaaaggtaatttaacacgagaacggtcacccatttttactatggtttggtgttcgaaaaacaaacaaaaataaaaccaaaaaaaaggaatgcaacacgaggacttcccaggaggtcacccatcctagtactactctcgcccaagcacgcttaacttcggagttctgatgggatccggtgctttagtgctggtatgatcgcatccgtcatatcctgcgtcctccttcctcttatgcccacacctccgtgctcggctcgcccacggcactggacatccttcctccgcacaaagtacccgaaaaacgccccttaaaacaaataaaaggtaatttaacacg

SEQ ID NO: 5320 - DNA, 1192 bp, Zea mays
  Zm_smallRNAprecursor_809
ggtttggtgttcgaaaaacaaacaaaaataaaaccaaaaaaaaggaatgcaacacgaggacttcccaggaggtcacccatcctagtactactctcgcccaagcacgcttaactttggagttctgatgggatccggtgctttagtgctggtatgatcgcatccgtcatatcctgcgtcctccttcctcttatgcccacacctccgtgctcggctcgcccacagcactggacatccttcctacgcacaaagtacccgaaaaacgccccttaaaacaaataaaaggtaatttaacacgagaacggtcacccatttttactatggtttggtgttcgaaaaacaaacaaaaataaaaccaaaaaaaaggaatgcaacacgaggacttcccaggaggtcacccatcctagtactactctcgcccaagcacgcttaacttcggagttctaatgggatccggtgctttagtgctgatatgatcgcatccgtcatatcctgcgtcctccttcctcttatgcccacacctccgtgctcggctcgcccacggcattggacatccttcctccgcacaaagtacccgaaaaacgccccttaaaacaaataaaaggtaatttaacacgagaacggtcacccatttttactatggtttggtgttcgaaaaacaaacaaaaataaaaccaaaaaaaaggaatgcaacacgaggacttcccaggaggtcacccatcctagtactactctcgcccaagcacgcttaacttcggagttctgatgggatccggtgctttagtgctggtatgatcgcatccgtcatatcctgcgtcctccttcctcttatgcccacacctccgtgctcggctcgcccacggcactggacatccttcctccgcacaaagtacccgaaaaacgccccttaaaacaaataaaaggtaatttaacacgagaacggtcacccatttttactatggtttggtgttcgaaaaacaaacaaaaataaaaccaaaataaggaatgcaacacgaggacttcccaggaggtcacccatcctagtactactctagcccaagcacgcttaacttcggagttctgatgggatccggtgctttagtgcttgtatgatcgcatccgtcaaatcttgggtcctccttcctcttatgcccacacctccgtgctcggctcgcccacggcactggacatcctt

SEQ ID NO: 5321 - DNA, 1129 bp, Zea mays
  Zm_smallRNAprecursor_810
gcccacacctccgtgctcggctcgcccacagcactggacatccttcctacgcacaaagtacccgaaaaacgccccttaaaacaaataaaaggtaatttaacacgagaacggtcacccatttttactatggtttggtgttcgaaaaacaaacaaaaataaaaccaaaaaaaaggaatgcaacacgaggacttcccaggaggtcacccatcctagtactactctcgcccaagcacgcttaacttcggagttctaatgggatccggtgctttagtgctgatatgatcgcatccgtcatatcctgcgtcctccttcctcttatgcccacacctccgtgctcggctcgcccacggcattggacatccttcctccgcacaaagtacccgaaaaacgccccttaaaacaaataaaaggtaatttaacacgagaacggtcacccatttttactatggtttggtgttcgaaaaacaaacaaaaataaaaccaaaaaaaaggaatgcaacacgaggacttcccaggaggtcacccatcctagtactactctcgcccaagcacgcttaacttcggagttctgatgggatccggtgctttagtgctggtatgatcgcatccgtcatatcctgcgtcctccttcctcttatgcccacacctccgtgctcggctcgcccacggcactggacatccttcctccgcacaaagtacccgaaaaacgccccttaaaacaaataaaaggtaatttaacacgagaacggtcacccatttttactatggtttggtgttcgaaaaacaaacaaaaataaaaccaaaataaggaatgcaacacgaggacttcccaggaggtcacccatcctagtactactctagcccaagcacgcttaacttcggagttctgatgggatccggtgctttagtgcttgtatgatcgcatccgtcaaatcttgggtcctccttcctcttatgcccacacctccgtgctcggctcgcccacggcactggacatccttcctccgcacaaagtacccgaaaaacgccccttaaaacaaataaaaggtaatttaacacgagaacggtcacccatttttactatggtttggtgttcgaaaaacaaacaaaaataaaacaaaaaaaagga

SEQ ID NO: 5322 - DNA, 1054 bp, Zea mays
  Zm_smallRNAprecursor_811
gctcggctcgcccacagcactggacatccttcctacgcacaaagtacccgaaaaacgccccttaaaacaaataaaaggtaatttaacacgagaacggtcacccatttttactatggtttggtgttcgaaaaacaaacaaaaataaaaccaaaaaaaaggaatgcaacacgaggacttcccaggaggtcacccatcctagtactactctcgcccaagcacgcttaacttcggagttctaatgggatccggtgctttagtgctgatatgatcgcatccgtcatatcctgcgtcctccttcctcttatgcccacacctccgtgctcggctcgcccacggcattggacatccttcctccgcacaaagtacccgaaaaacgccccttaaaacaaataaaaggtaatttaacacgagaacggtcacccatttttactatggtttggtgttcgaaaaacaaacaaaaataaaaccaaaaaaaaggaatgcaacacgaggacttcccaggaggtcacccatcctagtactactctcgcccaagcacgcttaacttcggagttctgatgggatccggtgctttagtgctggtatgatcgcatccgtcatatcctgcgtcctccttcctcttatgcccacacctccgtgctcggctcgcccacggcactggacatccttcctccgcacaaagtacccgaaaaacgccccttaaaacaaataaaaggtaatttaacacgagaacggtcacccatttttactatggtttggtgttcgaaaaacaaacaaaaataaaaccaaaataaggaatgcaacacgaggacttcccaggaggtcacccatcctagtactactctagcccaagcacgcttaacttcggagttctgatgggatccggtgctttagtgcttgtatgatcgcatccgtcaaatcttgggtcctccttcctcttatgcccacacctccgtgctcggctcgcccacggcactggacatccttcctccgcacaaagtacccgaaaaacgccccttaaaacaaataaaaggtaatttaacacgagaacggt

SEQ ID NO: 5323 - DNA, 1041 bp, Zea mays
  Zm_smallRNAprecursor_812
gctcgcccacagcactggacatccttcctacgcacaaagtacccgaaaaacgccccttaaaacaaataaaaggtaatttaacacgagaacggtcacccatttttactatggtttggtgttcgaaaaacaaacaaaaataaaaccaaaaaaaaggaatgcaacacgaggacttcccaggaggtcacccatcctagtactactctcgcccaagcacgcttaacttcggagttctaatgggatccggtgctttagtgctgatatgatcgcatccgtcatatcctgcgtcctccttcctcttatgcccacacctccgtgctcggctcgcccacggcattggacatccttcctccgcacaaagtacccgaaaaacgccccttaaaacaaataaaaggtaatttaacacgagaacggtcacccatttttactatggtttggtgttcgaaaaacaaacaaaaataaaaccaaaaaaaaggaatgcaacacgaggacttcccaggaggtcacccatcctagtactactctcgcccaagcacgcttaacttcggagttctgatgggatccggtgctttagtgctggtatgatcgcatccgtcatatcctgcgtcctccttcctcttatgcccacacctccgtgctcggctcgcccacggcactggacatccttcctccgcacaaagtacccgaaaaacgccccttaaaacaaataaaaggtaatttaacacgagaacggtcacccatttttactatggtttggtgttcgaaaaacaaacaaaaataaaaccaaaataaggaatgcaacacgaggacttcccaggaggtcacccatcctagtactactctagcccaagcacgcttaacttcggagttctgatgggatccggtgctttagtgcttgtatgatcgcatccgtcaaatcttgggtcctccttcctcttatgcccacacctccgtgctcggctcgcccacggcactggacatccttcctccgcacaaagtacccgaaaaacgccccttaaaacaaataaaaggtaatttaacacg

SEQ ID NO: 5324 - DNA, 1037 bp, Zea mays
  Zm_smallRNAprecursor_813
gcccacagcactggacatccttcctacgcacaaagtacccgaaaaacgccccttaaaacaaataaaaggtaatttaacacgagaacggtcacccatttttactatggtttggtgttcgaaaaacaaacaaaaataaaaccaaaaaaaaggaatgcaacacgaggacttcccaggaggtcacccatcctagtactactctcgcccaagcacgcttaacttcggagttctaatgggatccggtgctttagtgctgatatgatcgcatccgtcatatcctgcgtcctccttcctcttatgcccacacctccgtgctcggctcgcccacggcattggacatccttcctccgcacaaagtacccgaaaaacgccccttaaaacaaataaaaggtaatttaacacgagaacggtcacccatttttactatggtttggtgttcgaaaaacaaacaaaaataaaaccaaaaaaaaggaatgcaacacgaggacttcccaggaggtcacccatcctagtactactctcgcccaagcacgcttaacttcggagttctgatgggatccggtgctttagtgctggtatgatcgcatccgtcatatcctgcgtcctccttcctcttatgcccacacctccgtgctcggctcgcccacggcactggacatccttcctccgcacaaagtacccgaaaaacgccccttaaaacaaataaaaggtaatttaacacgagaacggtcacccatttttactatggtttggtgttcgaaaaacaaacaaaaataaaaccaaaataaggaatgcaacacgaggacttcccaggaggtcacccatcctagtactactctagcccaagcacgcttaacttcggagttctgatgggatccggtgctttagtgcttgtatgatcgcatccgtcaaatcttgggtcctccttcctcttatgcccacacctccgtgctcggctcgcccacggcactggacatccttcctccgcacaaagtacccgaaaaacgccccttaaaacaaataaaaggtaatttaacacg

SEQ ID NO: 5325 - DNA, 1047 bp, Zea mays
  Zm_smallRNAprecursor_814
ctggacatccttcctacgcacaaagtacccgaaaaacgccccttaaaacaaataaaaggtaatttaacacgagaacggtcacccatttttactatggtttggtgttcgaaaaacaaacaaaaataaaaccaaaaaaaaggaatgcaacacgaggacttcccaggaggtcacccatcctagtactactctcgcccaagcacgcttaacttcggagttctaatgggatccggtgctttagtgctgatatgatcgcatccgtcatatcctgcgtcctccttcctcttatgcccacacctccgtgctcggctcgcccacggcattggacatccttcctccgcacaaagtacccgaaaaacgccccttaaaacaaataaaaggtaatttaacacgagaacggtcacccatttttactatggtttggtgttcgaaaaacaaacaaaaataaaaccaaaaaaaaggaatgcaacacgaggacttcccaggaggtcacccatcctagtactactctcgcccaagcacgcttaacttcggagttctgatgggatccggtgctttagtgctggtatgatcgcatccgtcatatcctgcgtcctccttcctcttatgcccacacctccgtgctcggctcgcccacggcactggacatccttcctccgcacaaagtacccgaaaaacgccccttaaaacaaataaaaggtaatttaacacgagaacggtcacccatttttactatggtttggtgttcgaaaaacaaacaaaaataaaaccaaaataaggaatgcaacacgaggacttcccaggaggtcacccatcctagtactactctagcccaagcacgcttaacttcggagttctgatgggatccggtgctttagtgcttgtatgatcgcatccgtcaaatcttgggtcctccttcctcttatgcccacacctccgtgctcggctcgcccacggcactggacatccttcctccgcacaaagtacccgaaaaacgccccttaaaacaaataaaaggtaatttaacacgagaacggtcacccattttta

SEQ ID NO: 5326 - DNA, 1191 bp, Zea mays
  Zm_smallRNAprecursor_815
ggtttggtgttcgaaaaacaaacaaaaataaaaccaaaaaaaaggaatgcaacacgaggacttcccaggaggtcacccatcctagtactactctcgcccaagcacgcttaacttcggagttctaatgggatccggtgctttagtgctgatatgatcgcatccgtcatatcctgcgtcctccttcctcttatgcccacacctccgtgctcggctcgcccacggcattggacatccttcctccgcacaaagtacccgaaaaacgccccttaaaacaaataaaaggtaatttaacacgagaacggtcacccatttttactatggtttggtgttcgaaaaacaaacaaaaataaaaccaaaaaaaaggaatgcaacacgaggacttcccaggaggtcacccatcctagtactactctcgcccaagcacgcttaacttcggagttctgatgggatccggtgctttagtgctggtatgatcgcatccgtcatatcctgcgtcctccttcctcttatgcccacacctccgtgctcggctcgcccacggcactggacatccttcctccgcacaaagtacccgaaaaacgccccttaaaacaaataaaaggtaatttaacacgagaacggtcacccatttttactatggtttggtgttcgaaaaacaaacaaaaataaaaccaaaataaggaatgcaacacgaggacttcccaggaggtcacccatcctagtactactctagcccaagcacgcttaacttcggagttctgatgggatccggtgctttagtgcttgtatgatcgcatccgtcaaatcttgggtcctccttcctcttatgcccacacctccgtgctcggctcgcccacggcactggacatccttcctccgcacaaagtacccgaaaaacgccccttaaaacaaataaaaggtaatttaacacgagaacggtcacccatttttactatggtttggtgttcgaaaaacaaacaaaaataaaacaaaaaaaaggaatgcaacacgaggacttcccaggaggtcacccatcctagtactactctcgcccaagcacgcttatctttgaagttctgatgggatccggtgctttagtgctggtatgatcgcatccgtcatatcttgcgttctccttcctcttatgcccacacctccgtgctcggctcggccacggcactggacatcctt

SEQ ID NO: 5327 - DNA, 1129 bp, Zea mays
  Zm_smallRNAprecursor_816
tgcccacacctccgtgctcggctcgcccacggcattggacatccttcctccgcacaaagtacccgaaaaacgccccttaaaacaaataaaaggtaatttaacacgagaacggtcacccatttttactatggtttggtgttcgaaaaacaaacaaaaataaaaccaaaaaaaaggaatgcaacacgaggacttcccaggaggtcacccatcctagtactactctcgcccaagcacgcttaacttcggagttctgatgggatccggtgctttagtgctggtatgatcgcatccgtcatatcctgcgtcctccttcctcttatgcccacacctccgtgctcggctcgcccacggcactggacatccttcctccgcacaaagtacccgaaaaacgccccttaaaacaaataaaaggtaatttaacacgagaacggtcacccatttttactatggtttggtgttcgaaaaacaaacaaaaataaaaccaaaataaggaatgcaacacgaggacttcccaggaggtcacccatcctagtactactctagcccaagcacgcttaacttcggagttctgatgggatccggtgctttagtgcttgtatgatcgcatccgtcaaatcttgggtcctccttcctcttatgcccacacctccgtgctcggctcgcccacggcactggacatccttcctccgcacaaagtacccgaaaaacgccccttaaaacaaataaaaggtaatttaacacgagaacggtcacccatttttactatggtttggtgttcgaaaaacaaacaaaaataaaacaaaaaaaaggaatgcaacacgaggacttcccaggaggtcacccatcctagtactactctcgcccaagcacgcttatctttgaagttctgatgggatccggtgctttagtgctggtatgatcgcatccgtcatatcttgcgttctccttcctcttatgcccacacctccgtgctcggctcggccacggcactggacatccttcctccgcacaaagtacccgaaaaacgccccttaaaacaaataaaaggtaatttaacacgagaacggtcacccatttttactatgttttggtgttcgaaaaacaaacaaaaataaaaccaaaaaaaagg

SEQ ID NO: 5328 - DNA, 1054 bp, Zea mays
  Zm_smallRNAprecursor_817
tgctcggctcgcccacggcattggacatccttcctccgcacaaagtacccgaaaaacgccccttaaaacaaataaaaggtaatttaacacgagaacggtcacccatttttactatggtttggtgttcgaaaaacaaacaaaaataaaaccaaaaaaaaggaatgcaacacgaggacttcccaggaggtcacccatcctagtactactctcgcccaagcacgcttaacttcggagttctgatgggatccggtgctttagtgctggtatgatcgcatccgtcatatcctgcgtcctccttcctcttatgcccacacctccgtgctcggctcgcccacggcactggacatccttcctccgcacaaagtacccgaaaaacgccccttaaaacaaataaaaggtaatttaacacgagaacggtcacccatttttactatggtttggtgttcgaaaaacaaacaaaaataaaaccaaaataaggaatgcaacacgaggacttcccaggaggtcacccatcctagtactactctagcccaagcacgcttaacttcggagttctgatgggatccggtgctttagtgcttgtatgatcgcatccgtcaaatcttgggtcctccttcctcttatgcccacacctccgtgctcggctcgcccacggcactggacatccttcctccgcacaaagtacccgaaaaacgccccttaaaacaaataaaaggtaatttaacacgagaacggtcacccatttttactatggtttggtgttcgaaaaacaaacaaaaataaaacaaaaaaaaggaatgcaacacgaggacttcccaggaggtcacccatcctagtactactctcgcccaagcacgcttatctttgaagttctgatgggatccggtgctttagtgctggtatgatcgcatccgtcatatcttgcgttctccttcctcttatgcccacacctccgtgctcggctcggccacggcactggacatccttcctccgcacaaagtacccgaaaaacgccccttaaaacaaataaaaggtaatttaacacgagaacggt

SEQ ID NO: 5329 - DNA, 1041 bp, Zea mays
  Zm_smallRNAprecursor_818
ggctcgcccacggcattggacatccttcctccgcacaaagtacccgaaaaacgccccttaaaacaaataaaaggtaatttaacacgagaacggtcacccatttttactatggtttggtgttcgaaaaacaaacaaaaataaaaccaaaaaaaaggaatgcaacacgaggacttcccaggaggtcacccatcctagtactactctcgcccaagcacgcttaacttcggagttctgatgggatccggtgctttagtgctggtatgatcgcatccgtcatatcctgcgtcctccttcctcttatgcccacacctccgtgctcggctcgcccacggcactggacatccttcctccgcacaaagtacccgaaaaacgccccttaaaacaaataaaaggtaatttaacacgagaacggtcacccatttttactatggtttggtgttcgaaaaacaaacaaaaataaaaccaaaataaggaatgcaacacgaggacttcccaggaggtcacccatcctagtactactctagcccaagcacgcttaacttcggagttctgatgggatccggtgctttagtgcttgtatgatcgcatccgtcaaatcttgggtcctccttcctcttatgcccacacctccgtgctcggctcgcccacggcactggacatccttcctccgcacaaagtacccgaaaaacgccccttaaaacaaataaaaggtaatttaacacgagaacggtcacccatttttactatggtttggtgttcgaaaaacaaacaaaaataaaacaaaaaaaaggaatgcaacacgaggacttcccaggaggtcacccatcctagtactactctcgcccaagcacgcttatctttgaagttctgatgggatccggtgctttagtgctggtatgatcgcatccgtcatatcttgcgttctccttcctcttatgcccacacctccgtgctcggctcggccacggcactggacatccttcctccgcacaaagtacccgaaaaacgccccttaaaacaaataaaaggtaatttaacacg

SEQ ID NO: 5330 - DNA, 1191 bp, Zea mays
  Zm_smallRNAprecursor_819
tggtttggtgttcgaaaaacaaacaaaaataaaaccaaaaaaaaggaatgcaacacgaggacttcccaggaggtcacccatcctagtactactctcgcccaagcacgcttaacttcggagttctgatgggatccggtgctttagtgctggtatgatcgcatccgtcatatcctgcgtcctccttcctcttatgcccacacctccgtgctcggctcgcccacggcactggacatccttcctccgcacaaagtacccgaaaaacgccccttaaaacaaataaaaggtaatttaacacgagaacggtcacccatttttactatggtttggtgttcgaaaaacaaacaaaaataaaaccaaaataaggaatgcaacacgaggacttcccaggaggtcacccatcctagtactactctagcccaagcacgcttaacttcggagttctgatgggatccggtgctttagtgcttgtatgatcgcatccgtcaaatcttgggtcctccttcctcttatgcccacacctccgtgctcggctcgcccacggcactggacatccttcctccgcacaaagtacccgaaaaacgccccttaaaacaaataaaaggtaatttaacacgagaacggtcacccatttttactatggtttggtgttcgaaaaacaaacaaaaataaaacaaaaaaaaggaatgcaacacgaggacttcccaggaggtcacccatcctagtactactctcgcccaagcacgcttatctttgaagttctgatgggatccggtgctttagtgctggtatgatcgcatccgtcatatcttgcgttctccttcctcttatgcccacacctccgtgctcggctcggccacggcactggacatccttcctccgcacaaagtacccgaaaaacgccccttaaaacaaataaaaggtaatttaacacgagaacggtcacccatttttactatgttttggtgttcgaaaaacaaacaaaaataaaaccaaaaaaaaggaatgcaacacgaggacttcccaggaggtcacccatcctagtactactctcgcccaagcacgcttaacttcggagttctgatgggatccggtgctttattgctggtatgatcacatccatcatatcctgcgtcctccttcctcatatgcccacacctccgtgctcggctcgcccacggcactagacatcct

SEQ ID NO: 5331 - DNA, 1129 bp, Zea mays
  Zm_smallRNAprecursor_820
atgcccacacctccgtgctcggctcgcccacggcactggacatccttcctccgcacaaagtacccgaaaaacgccccttaaaacaaataaaaggtaatttaacacgagaacggtcacccatttttactatggtttggtgttcgaaaaacaaacaaaaataaaaccaaaataaggaatgcaacacgaggacttcccaggaggtcacccatcctagtactactctagcccaagcacgcttaacttcggagttctgatgggatccggtgctttagtgcttgtatgatcgcatccgtcaaatcttgggtcctccttcctcttatgcccacacctccgtgctcggctcgcccacggcactggacatccttcctccgcacaaagtacccgaaaaacgccccttaaaacaaataaaaggtaatttaacacgagaacggtcacccatttttactatggtttggtgttcgaaaaacaaacaaaaataaaacaaaaaaaaggaatgcaacacgaggacttcccaggaggtcacccatcctagtactactctcgcccaagcacgcttatctttgaagttctgatgggatccggtgctttagtgctggtatgatcgcatccgtcatatcttgcgttctccttcctcttatgcccacacctccgtgctcggctcggccacggcactggacatccttcctccgcacaaagtacccgaaaaacgccccttaaaacaaataaaaggtaatttaacacgagaacggtcacccatttttactatgttttggtgttcgaaaaacaaacaaaaataaaaccaaaaaaaaggaatgcaacacgaggacttcccaggaggtcacccatcctagtactactctcgcccaagcacgcttaacttcggagttctgatgggatccggtgctttattgctggtatgatcacatccatcatatcctgcgtcctccttcctcatatgcccacacctccgtgctcggctcgcccacggcactagacatccttcctccgcacaaagtacccgaaaaacgccccttaaaacaaataaaaggtaatttaacatgagaacggtcacccatttttactatggtttggtgttcgaaaaacaaacaaaaataaaacaaaaaaaagg

SEQ ID NO: 5332 - DNA, 1054 bp, Zea mays
  Zm_smallRNAprecursor_821
gtgctcggctcgcccacggcactggacatccttcctccgcacaaagtacccgaaaaacgccccttaaaacaaataaaaggtaatttaacacgagaacggtcacccatttttactatggtttggtgttcgaaaaacaaacaaaaataaaaccaaaataaggaatgcaacacgaggacttcccaggaggtcacccatcctagtactactctagcccaagcacgcttaacttcggagttctgatgggatccggtgctttagtgcttgtatgatcgcatccgtcaaatcttgggtcctccttcctcttatgcccacacctccgtgctcggctcgcccacggcactggacatccttcctccgcacaaagtacccgaaaaacgccccttaaaacaaataaaaggtaatttaacacgagaacggtcacccatttttactatggtttggtgttcgaaaaacaaacaaaaataaaacaaaaaaaaggaatgcaacacgaggacttcccaggaggtcacccatcctagtactactctcgcccaagcacgcttatctttgaagttctgatgggatccggtgctttagtgctggtatgatcgcatccgtcatatcttgcgttctccttcctcttatgcccacacctccgtgctcggctcggccacggcactggacatccttcctccgcacaaagtacccgaaaaacgccccttaaaacaaataaaaggtaatttaacacgagaacggtcacccatttttactatgttttggtgttcgaaaaacaaacaaaaataaaaccaaaaaaaaggaatgcaacacgaggacttcccaggaggtcacccatcctagtactactctcgcccaagcacgcttaacttcggagttctgatgggatccggtgctttattgctggtatgatcacatccatcatatcctgcgtcctccttcctcatatgcccacacctccgtgctcggctcgcccacggcactagacatccttcctccgcacaaagtacccgaaaaacgccccttaaaacaaataaaaggtaatttaacatgagaacgg

SEQ ID NO: 5333 - DNA, 1047 bp, Zea mays
  Zm_smallRNAprecursor_822
cactggacatccttcctccgcacaaagtacccgaaaaacgccccttaaaacaaataaaaggtaatttaacacgagaacggtcacccatttttactatggtttggtgttcgaaaaacaaacaaaaataaaaccaaaataaggaatgcaacacgaggacttcccaggaggtcacccatcctagtactactctagcccaagcacgcttaacttcggagttctgatgggatccggtgctttagtgcttgtatgatcgcatccgtcaaatcttgggtcctccttcctcttatgcccacacctccgtgctcggctcgcccacggcactggacatccttcctccgcacaaagtacccgaaaaacgccccttaaaacaaataaaaggtaatttaacacgagaacggtcacccatttttactatggtttggtgttcgaaaaacaaacaaaaataaaacaaaaaaaaggaatgcaacacgaggacttcccaggaggtcacccatcctagtactactctcgcccaagcacgcttatctttgaagttctgatgggatccggtgctttagtgctggtatgatcgcatccgtcatatcttgcgttctccttcctcttatgcccacacctccgtgctcggctcggccacggcactggacatccttcctccgcacaaagtacccgaaaaacgccccttaaaacaaataaaaggtaatttaacacgagaacggtcacccatttttactatgttttggtgttcgaaaaacaaacaaaaataaaaccaaaaaaaaggaatgcaacacgaggacttcccaggaggtcacccatcctagtactactctcgcccaagcacgcttaacttcggagttctgatgggatccggtgctttattgctggtatgatcacatccatcatatcctgcgtcctccttcctcatatgcccacacctccgtgctcggctcgcccacggcactagacatccttcctccgcacaaagtacccgaaaaacgccccttaaaacaaataaaaggtaatttaacatgagaacggtcacccattttt

SEQ ID NO: 5334 - DNA, 1192 bp, Zea mays
  Zm_smallRNAprecursor_823
atggtttggtgttcgaaaaacaaacaaaaataaaaccaaaataaggaatgcaacacgaggacttcccaggaggtcacccatcctagtactactctagcccaagcacgcttaacttcggagttctgatgggatccggtgctttagtgcttgtatgatcgcatccgtcaaatcttgggtcctccttcctcttatgcccacacctccgtgctcggctcgcccacggcactggacatccttcctccgcacaaagtacccgaaaaacgccccttaaaacaaataaaaggtaatttaacacgagaacggtcacccatttttactatggtttggtgttcgaaaaacaaacaaaaataaaacaaaaaaaaggaatgcaacacgaggacttcccaggaggtcacccatcctagtactactctcgcccaagcacgcttatctttgaagttctgatgggatccggtgctttagtgctggtatgatcgcatccgtcatatcttgcgttctccttcctcttatgcccacacctccgtgctcggctcggccacggcactggacatccttcctccgcacaaagtacccgaaaaacgccccttaaaacaaataaaaggtaatttaacacgagaacggtcacccatttttactatgttttggtgttcgaaaaacaaacaaaaataaaaccaaaaaaaaggaatgcaacacgaggacttcccaggaggtcacccatcctagtactactctcgcccaagcacgcttaacttcggagttctgatgggatccggtgctttattgctggtatgatcacatccatcatatcctgcgtcctccttcctcatatgcccacacctccgtgctcggctcgcccacggcactagacatccttcctccgcacaaagtacccgaaaaacgccccttaaaacaaataaaaggtaatttaacatgagaacggtcacccatttttactatggtttggtgttcgaaaaacaaacaaaaataaaacaaaaaaaaggaatgcaacacgaggacttcccaggaggtcaccaatcatagtactactctcgcccaagcacgcttaacttcagagttctgatgggatccggtgctttagtgctggtatgatcccatccgtcatatcctgcgtcctccttcctcttatgcccacacctccgtgctcggctcgcccacgacactagacatcctt

SEQ ID NO: 5335 - DNA, 1054 bp, Zea mays
  Zm_smallRNAprecursor_824
tgctcggctcgcccacggcactggacatccttcctccgcacaaagtacccgaaaaacgccccttaaaacaaataaaaggtaatttaacacgagaacggtcacccatttttactatggtttggtgttcgaaaaacaaacaaaaataaaacaaaaaaaaggaatgcaacacgaggacttcccaggaggtcacccatcctagtactactctcgcccaagcacgcttatctttgaagttctgatgggatccggtgctttagtgctggtatgatcgcatccgtcatatcttgcgttctccttcctcttatgcccacacctccgtgctcggctcggccacggcactggacatccttcctccgcacaaagtacccgaaaaacgccccttaaaacaaataaaaggtaatttaacacgagaacggtcacccatttttactatgttttggtgttcgaaaaacaaacaaaaataaaaccaaaaaaaaggaatgcaacacgaggacttcccaggaggtcacccatcctagtactactctcgcccaagcacgcttaacttcggagttctgatgggatccggtgctttattgctggtatgatcacatccatcatatcctgcgtcctccttcctcatatgcccacacctccgtgctcggctcgcccacggcactagacatccttcctccgcacaaagtacccgaaaaacgccccttaaaacaaataaaaggtaatttaacatgagaacggtcacccatttttactatggtttggtgttcgaaaaacaaacaaaaataaaacaaaaaaaaggaatgcaacacgaggacttcccaggaggtcaccaatcatagtactactctcgcccaagcacgcttaacttcagagttctgatgggatccggtgctttagtgctggtatgatcccatccgtcatatcctgcgtcctccttcctcttatgcccacacctccgtgctcggctcgcccacgacactagacatccttcctccgcacaaagtacccgaaaaacgccccttaaaacaaataaaaggtaatttaacacgagaacggt

SEQ ID NO: 5336 - DNA, 1041 bp, Zea mays
  Zm_smallRNAprecursor_825
ggctcgcccacggcactggacatccttcctccgcacaaagtacccgaaaaacgccccttaaaacaaataaaaggtaatttaacacgagaacggtcacccatttttactatggtttggtgttcgaaaaacaaacaaaaataaaacaaaaaaaaggaatgcaacacgaggacttcccaggaggtcacccatcctagtactactctcgcccaagcacgcttatctttgaagttctgatgggatccggtgctttagtgctggtatgatcgcatccgtcatatcttgcgttctccttcctcttatgcccacacctccgtgctcggctcggccacggcactggacatccttcctccgcacaaagtacccgaaaaacgccccttaaaacaaataaaaggtaatttaacacgagaacggtcacccatttttactatgttttggtgttcgaaaaacaaacaaaaataaaaccaaaaaaaaggaatgcaacacgaggacttcccaggaggtcacccatcctagtactactctcgcccaagcacgcttaacttcggagttctgatgggatccggtgctttattgctggtatgatcacatccatcatatcctgcgtcctccttcctcatatgcccacacctccgtgctcggctcgcccacggcactagacatccttcctccgcacaaagtacccgaaaaacgccccttaaaacaaataaaaggtaatttaacatgagaacggtcacccatttttactatggtttggtgttcgaaaaacaaacaaaaataaaacaaaaaaaaggaatgcaacacgaggacttcccaggaggtcaccaatcatagtactactctcgcccaagcacgcttaacttcagagttctgatgggatccggtgctttagtgctggtatgatcccatccgtcatatcctgcgtcctccttcctcttatgcccacacctccgtgctcggctcgcccacgacactagacatccttcctccgcacaaagtacccgaaaaacgccccttaaaacaaataaaaggtaatttaacacg

SEQ ID NO: 5337 - DNA, 1037 bp, Zea mays
  Zm_smallRNAprecursor_826
cgcccacggcactggacatccttcctccgcacaaagtacccgaaaaacgccccttaaaacaaataaaaggtaatttaacacgagaacggtcacccatttttactatggtttggtgttcgaaaaacaaacaaaaataaaacaaaaaaaaggaatgcaacacgaggacttcccaggaggtcacccatcctagtactactctcgcccaagcacgcttatctttgaagttctgatgggatccggtgctttagtgctggtatgatcgcatccgtcatatcttgcgttctccttcctcttatgcccacacctccgtgctcggctcggccacggcactggacatccttcctccgcacaaagtacccgaaaaacgccccttaaaacaaataaaaggtaatttaacacgagaacggtcacccatttttactatgttttggtgttcgaaaaacaaacaaaaataaaaccaaaaaaaaggaatgcaacacgaggacttcccaggaggtcacccatcctagtactactctcgcccaagcacgcttaacttcggagttctgatgggatccggtgctttattgctggtatgatcacatccatcatatcctgcgtcctccttcctcatatgcccacacctccgtgctcggctcgcccacggcactagacatccttcctccgcacaaagtacccgaaaaacgccccttaaaacaaataaaaggtaatttaacatgagaacggtcacccatttttactatggtttggtgttcgaaaaacaaacaaaaataaaacaaaaaaaaggaatgcaacacgaggacttcccaggaggtcaccaatcatagtactactctcgcccaagcacgcttaacttcagagttctgatgggatccggtgctttagtgctggtatgatcccatccgtcatatcctgcgtcctccttcctcttatgcccacacctccgtgctcggctcgcccacgacactagacatccttcctccgcacaaagtacccgaaaaacgccccttaaaacaaataaaaggtaatttaacacg

SEQ ID NO: 5338 - DNA, 1129 bp, Zea mays
  Zm_smallRNAprecursor_827
tgcccacacctccgtgctcggctcggccacggcactggacatccttcctccgcacaaagtacccgaaaaacgccccttaaaacaaataaaaggtaatttaacacgagaacggtcacccatttttactatgttttggtgttcgaaaaacaaacaaaaataaaaccaaaaaaaaggaatgcaacacgaggacttcccaggaggtcacccatcctagtactactctcgcccaagcacgcttaacttcggagttctgatgggatccggtgctttattgctggtatgatcacatccatcatatcctgcgtcctccttcctcatatgcccacacctccgtgctcggctcgcccacggcactagacatccttcctccgcacaaagtacccgaaaaacgccccttaaaacaaataaaaggtaatttaacatgagaacggtcacccatttttactatggtttggtgttcgaaaaacaaacaaaaataaaacaaaaaaaaggaatgcaacacgaggacttcccaggaggtcaccaatcatagtactactctcgcccaagcacgcttaacttcagagttctgatgggatccggtgctttagtgctggtatgatcccatccgtcatatcctgcgtcctccttcctcttatgcccacacctccgtgctcggctcgcccacgacactagacatccttcctccgcacaaagtacccgaaaaacgccccttaaaacaaataaaaggtaatttaacacgagaacggtcacccatttttactatggtttgatgttcgaaaaacaaacaaaaataaaaccaaaaaaaggaatgcaacacgaggacttcccaggaggtcacccatcctagtactactctcgcccaagctcgcttaacttcggagttctgatgggatccagtgctttagtgctggtatgatcgcatctgtcatattgtgcgtcctccttcctcttatgcccacacctccgtgctcggctcgcccacggcactggacatccttcctccgcacaaagtacccgaaaaacgccctttaaaacaaataaaaggtaatttaacacgagaacggtcacccatttttactatggtttggtgttcgaaaaacaaacaaaaataaaacaaaaaaagcaa

SEQ ID NO: 5339 - DNA, 1047 bp, Zea mays
  Zm_smallRNAprecursor_828
actggacatccttcctccgcacaaagtacccgaaaaacgccccttaaaacaaataaaaggtaatttaacacgagaacggtcacccatttttactatgttttggtgttcgaaaaacaaacaaaaataaaaccaaaaaaaaggaatgcaacacgaggacttcccaggaggtcacccatcctagtactactctcgcccaagcacgcttaacttcggagttctgatgggatccggtgctttattgctggtatgatcacatccatcatatcctgcgtcctccttcctcatatgcccacacctccgtgctcggctcgcccacggcactagacatccttcctccgcacaaagtacccgaaaaacgccccttaaaacaaataaaaggtaatttaacatgagaacggtcacccatttttactatggtttggtgttcgaaaaacaaacaaaaataaaacaaaaaaaaggaatgcaacacgaggacttcccaggaggtcaccaatcatagtactactctcgcccaagcacgcttaacttcagagttctgatgggatccggtgctttagtgctggtatgatcccatccgtcatatcctgcgtcctccttcctcttatgcccacacctccgtgctcggctcgcccacgacactagacatccttcctccgcacaaagtacccgaaaaacgccccttaaaacaaataaaaggtaatttaacacgagaacggtcacccatttttactatggtttgatgttcgaaaaacaaacaaaaataaaaccaaaaaaaggaatgcaacacgaggacttcccaggaggtcacccatcctagtactactctcgcccaagctcgcttaacttcggagttctgatgggatccagtgctttagtgctggtatgatcgcatctgtcatattgtgcgtcctccttcctcttatgcccacacctccgtgctcggctcgcccacggcactggacatccttcctccgcacaaagtacccgaaaaacgccctttaaaacaaataaaaggtaatttaacacgagaacggtcacccattttta

SEQ ID NO: 5340 - DNA, 1191 bp, Zea mays
  Zm_smallRNAprecursor_829
tgttttggtgttcgaaaaacaaacaaaaataaaaccaaaaaaaaggaatgcaacacgaggacttcccaggaggtcacccatcctagtactactctcgcccaagcacgcttaacttcggagttctgatgggatccggtgctttattgctggtatgatcacatccatcatatcctgcgtcctccttcctcatatgcccacacctccgtgctcggctcgcccacggcactagacatccttcctccgcacaaagtacccgaaaaacgccccttaaaacaaataaaaggtaatttaacatgagaacggtcacccatttttactatggtttggtgttcgaaaaacaaacaaaaataaaacaaaaaaaaggaatgcaacacgaggacttcccaggaggtcaccaatcatagtactactctcgcccaagcacgcttaacttcagagttctgatgggatccggtgctttagtgctggtatgatcccatccgtcatatcctgcgtcctccttcctcttatgcccacacctccgtgctcggctcgcccacgacactagacatccttcctccgcacaaagtacccgaaaaacgccccttaaaacaaataaaaggtaatttaacacgagaacggtcacccatttttactatggtttgatgttcgaaaaacaaacaaaaataaaaccaaaaaaaggaatgcaacacgaggacttcccaggaggtcacccatcctagtactactctcgcccaagctcgcttaacttcggagttctgatgggatccagtgctttagtgctggtatgatcgcatctgtcatattgtgcgtcctccttcctcttatgcccacacctccgtgctcggctcgcccacggcactggacatccttcctccgcacaaagtacccgaaaaacgccctttaaaacaaataaaaggtaatttaacacgagaacggtcacccatttttactatggtttggtgttcgaaaaacaaacaaaaataaaacaaaaaaagcaatgcaacacgaggacttcccaggaggtcacccatcctagtactactctcgcccaagcacgcttaacttcgaagttctgatgggatccggtgctttagtgctggtatgatcgcatccgtcatatcctgcgtcctccttcctcttatgcccacacctccgtgctcggctcgcccacggcactggacatccttc

SEQ ID NO: 5341 - DNA, 1129 bp, Zea mays
  Zm_smallRNAprecursor_830
atgcccacacctccgtgctcggctcgcccacggcactagacatccttcctccgcacaaagtacccgaaaaacgccccttaaaacaaataaaaggtaatttaacatgagaacggtcacccatttttactatggtttggtgttcgaaaaacaaacaaaaataaaacaaaaaaaaggaatgcaacacgaggacttcccaggaggtcaccaatcatagtactactctcgcccaagcacgcttaacttcagagttctgatgggatccggtgctttagtgctggtatgatcccatccgtcatatcctgcgtcctccttcctcttatgcccacacctccgtgctcggctcgcccacgacactagacatccttcctccgcacaaagtacccgaaaaacgccccttaaaacaaataaaaggtaatttaacacgagaacggtcacccatttttactatggtttgatgttcgaaaaacaaacaaaaataaaaccaaaaaaaggaatgcaacacgaggacttcccaggaggtcacccatcctagtactactctcgcccaagctcgcttaacttcggagttctgatgggatccagtgctttagtgctggtatgatcgcatctgtcatattgtgcgtcctccttcctcttatgcccacacctccgtgctcggctcgcccacggcactggacatccttcctccgcacaaagtacccgaaaaacgccctttaaaacaaataaaaggtaatttaacacgagaacggtcacccatttttactatggtttggtgttcgaaaaacaaacaaaaataaaacaaaaaaagcaatgcaacacgaggacttcccaggaggtcacccatcctagtactactctcgcccaagcacgcttaacttcgaagttctgatgggatccggtgctttagtgctggtatgatcgcatccgtcatatcctgcgtcctccttcctcttatgcccacacctccgtgctcggctcgcccacggcactggacatccttcctccgcacaaagtacccgaaaaatgccccttaaaacaaataaaaggtaatttaacacgagaacggtcacccatttttactatggtttggtgttcgaaaaacaaacaaaaataaaataaaaaaaaaagg

SEQ ID NO: 5342 - DNA, 1041 bp, Zea mays
  Zm_smallRNAprecursor_831
cggctcgcccacggcactagacatccttcctccgcacaaagtacccgaaaaacgccccttaaaacaaataaaaggtaatttaacatgagaacggtcacccatttttactatggtttggtgttcgaaaaacaaacaaaaataaaacaaaaaaaaggaatgcaacacgaggacttcccaggaggtcaccaatcatagtactactctcgcccaagcacgcttaacttcagagttctgatgggatccggtgctttagtgctggtatgatcccatccgtcatatcctgcgtcctccttcctcttatgcccacacctccgtgctcggctcgcccacgacactagacatccttcctccgcacaaagtacccgaaaaacgccccttaaaacaaataaaaggtaatttaacacgagaacggtcacccatttttactatggtttgatgttcgaaaaacaaacaaaaataaaaccaaaaaaaggaatgcaacacgaggacttcccaggaggtcacccatcctagtactactctcgcccaagctcgcttaacttcggagttctgatgggatccagtgctttagtgctggtatgatcgcatctgtcatattgtgcgtcctccttcctcttatgcccacacctccgtgctcggctcgcccacggcactggacatccttcctccgcacaaagtacccgaaaaacgccctttaaaacaaataaaaggtaatttaacacgagaacggtcacccatttttactatggtttggtgttcgaaaaacaaacaaaaataaaacaaaaaaagcaatgcaacacgaggacttcccaggaggtcacccatcctagtactactctcgcccaagcacgcttaacttcgaagttctgatgggatccggtgctttagtgctggtatgatcgcatccgtcatatcctgcgtcctccttcctcttatgcccacacctccgtgctcggctcgcccacggcactggacatccttcctccgcacaaagtacccgaaaaatgccccttaaaacaaataaaaggtaatttaacacga

SEQ ID NO: 5343 - DNA, 1037 bp, Zea mays
  Zm_smallRNAprecursor_832
tcgcccacggcactagacatccttcctccgcacaaagtacccgaaaaacgccccttaaaacaaataaaaggtaatttaacatgagaacggtcacccatttttactatggtttggtgttcgaaaaacaaacaaaaataaaacaaaaaaaaggaatgcaacacgaggacttcccaggaggtcaccaatcatagtactactctcgcccaagcacgcttaacttcagagttctgatgggatccggtgctttagtgctggtatgatcccatccgtcatatcctgcgtcctccttcctcttatgcccacacctccgtgctcggctcgcccacgacactagacatccttcctccgcacaaagtacccgaaaaacgccccttaaaacaaataaaaggtaatttaacacgagaacggtcacccatttttactatggtttgatgttcgaaaaacaaacaaaaataaaaccaaaaaaaggaatgcaacacgaggacttcccaggaggtcacccatcctagtactactctcgcccaagctcgcttaacttcggagttctgatgggatccagtgctttagtgctggtatgatcgcatctgtcatattgtgcgtcctccttcctcttatgcccacacctccgtgctcggctcgcccacggcactggacatccttcctccgcacaaagtacccgaaaaacgccctttaaaacaaataaaaggtaatttaacacgagaacggtcacccatttttactatggtttggtgttcgaaaaacaaacaaaaataaaacaaaaaaagcaatgcaacacgaggacttcccaggaggtcacccatcctagtactactctcgcccaagcacgcttaacttcgaagttctgatgggatccggtgctttagtgctggtatgatcgcatccgtcatatcctgcgtcctccttcctcttatgcccacacctccgtgctcggctcgcccacggcactggacatccttcctccgcacaaagtacccgaaaaatgccccttaaaacaaataaaaggtaatttaacacga

SEQ ID NO: 5344 - DNA, 1190 bp, Zea mays
  Zm_smallRNAprecursor_833
atggtttggtgttcgaaaaacaaacaaaaataaaacaaaaaaaaggaatgcaacacgaggacttcccaggaggtcaccaatcatagtactactctcgcccaagcacgcttaacttcagagttctgatgggatccggtgctttagtgctggtatgatcccatccgtcatatcctgcgtcctccttcctcttatgcccacacctccgtgctcggctcgcccacgacactagacatccttcctccgcacaaagtacccgaaaaacgccccttaaaacaaataaaaggtaatttaacacgagaacggtcacccatttttactatggtttgatgttcgaaaaacaaacaaaaataaaaccaaaaaaaggaatgcaacacgaggacttcccaggaggtcacccatcctagtactactctcgcccaagctcgcttaacttcggagttctgatgggatccagtgctttagtgctggtatgatcgcatctgtcatattgtgcgtcctccttcctcttatgcccacacctccgtgctcggctcgcccacggcactggacatccttcctccgcacaaagtacccgaaaaacgccctttaaaacaaataaaaggtaatttaacacgagaacggtcacccatttttactatggtttggtgttcgaaaaacaaacaaaaataaaacaaaaaaagcaatgcaacacgaggacttcccaggaggtcacccatcctagtactactctcgcccaagcacgcttaacttcgaagttctgatgggatccggtgctttagtgctggtatgatcgcatccgtcatatcctgcgtcctccttcctcttatgcccacacctccgtgctcggctcgcccacggcactggacatccttcctccgcacaaagtacccgaaaaatgccccttaaaacaaataaaaggtaatttaacacgagaacggtcacccatttttactatggtttggtgttcgaaaaacaaacaaaaataaaataaaaaaaaaaggaatgcaacacgagggcttaccaggaggtcacccatcctagtactactctcgcccaagcacgcttaacttcggagttctgaagggatccggtgctttagtgctggtatgatcgcattcgtcatatcctgcgtcctccttcctcttatgcccacacctccgtgctcggctcgcccacggcactggacatcc

SEQ ID NO: 5345 - DNA, 1129 bp, Zea mays
  Zm_smallRNAprecursor_834
tatgcccacacctccgtgctcggctcgcccacgacactagacatccttcctccgcacaaagtacccgaaaaacgccccttaaaacaaataaaaggtaatttaacacgagaacggtcacccatttttactatggtttgatgttcgaaaaacaaacaaaaataaaaccaaaaaaaggaatgcaacacgaggacttcccaggaggtcacccatcctagtactactctcgcccaagctcgcttaacttcggagttctgatgggatccagtgctttagtgctggtatgatcgcatctgtcatattgtgcgtcctccttcctcttatgcccacacctccgtgctcggctcgcccacggcactggacatccttcctccgcacaaagtacccgaaaaacgccctttaaaacaaataaaaggtaatttaacacgagaacggtcacccatttttactatggtttggtgttcgaaaaacaaacaaaaataaaacaaaaaaagcaatgcaacacgaggacttcccaggaggtcacccatcctagtactactctcgcccaagcacgcttaacttcgaagttctgatgggatccggtgctttagtgctggtatgatcgcatccgtcatatcctgcgtcctccttcctcttatgcccacacctccgtgctcggctcgcccacggcactggacatccttcctccgcacaaagtacccgaaaaatgccccttaaaacaaataaaaggtaatttaacacgagaacggtcacccatttttactatggtttggtgttcgaaaaacaaacaaaaataaaataaaaaaaaaaggaatgcaacacgagggcttaccaggaggtcacccatcctagtactactctcgcccaagcacgcttaacttcggagttctgaagggatccggtgctttagtgctggtatgatcgcattcgtcatatcctgcgtcctccttcctcttatgcccacacctccgtgctcggctcgcccacggcactggacatccttcctccgcacaaagtacccgaaaaacgccccttaaaacaaataaaaggtaatttaacacgagaacggtcacccatttttactgtggtttggtgttcgaaaaacaaacaaaaataaaaccaaaaaaaa

SEQ ID NO: 5346 - DNA, 1054 bp, Zea mays
  Zm_smallRNAprecursor_835
cgtgctcggctcgcccacgacactagacatccttcctccgcacaaagtacccgaaaaacgccccttaaaacaaataaaaggtaatttaacacgagaacggtcacccatttttactatggtttgatgttcgaaaaacaaacaaaaataaaaccaaaaaaaggaatgcaacacgaggacttcccaggaggtcacccatcctagtactactctcgcccaagctcgcttaacttcggagttctgatgggatccagtgctttagtgctggtatgatcgcatctgtcatattgtgcgtcctccttcctcttatgcccacacctccgtgctcggctcgcccacggcactggacatccttcctccgcacaaagtacccgaaaaacgccctttaaaacaaataaaaggtaatttaacacgagaacggtcacccatttttactatggtttggtgttcgaaaaacaaacaaaaataaaacaaaaaaagcaatgcaacacgaggacttcccaggaggtcacccatcctagtactactctcgcccaagcacgcttaacttcgaagttctgatgggatccggtgctttagtgctggtatgatcgcatccgtcatatcctgcgtcctccttcctcttatgcccacacctccgtgctcggctcgcccacggcactggacatccttcctccgcacaaagtacccgaaaaatgccccttaaaacaaataaaaggtaatttaacacgagaacggtcacccatttttactatggtttggtgttcgaaaaacaaacaaaaataaaataaaaaaaaaaggaatgcaacacgagggcttaccaggaggtcacccatcctagtactactctcgcccaagcacgcttaacttcggagttctgaagggatccggtgctttagtgctggtatgatcgcattcgtcatatcctgcgtcctccttcctcttatgcccacacctccgtgctcggctcgcccacggcactggacatccttcctccgcacaaagtacccgaaaaacgccccttaaaacaaataaaaggtaatttaacacgagaacg

SEQ ID NO: 5347 - DNA, 1047 bp, Zea mays
  Zm_smallRNAprecursor_836
acactagacatccttcctccgcacaaagtacccgaaaaacgccccttaaaacaaataaaaggtaatttaacacgagaacggtcacccatttttactatggtttgatgttcgaaaaacaaacaaaaataaaaccaaaaaaaggaatgcaacacgaggacttcccaggaggtcacccatcctagtactactctcgcccaagctcgcttaacttcggagttctgatgggatccagtgctttagtgctggtatgatcgcatctgtcatattgtgcgtcctccttcctcttatgcccacacctccgtgctcggctcgcccacggcactggacatccttcctccgcacaaagtacccgaaaaacgccctttaaaacaaataaaaggtaatttaacacgagaacggtcacccatttttactatggtttggtgttcgaaaaacaaacaaaaataaaacaaaaaaagcaatgcaacacgaggacttcccaggaggtcacccatcctagtactactctcgcccaagcacgcttaacttcgaagttctgatgggatccggtgctttagtgctggtatgatcgcatccgtcatatcctgcgtcctccttcctcttatgcccacacctccgtgctcggctcgcccacggcactggacatccttcctccgcacaaagtacccgaaaaatgccccttaaaacaaataaaaggtaatttaacacgagaacggtcacccatttttactatggtttggtgttcgaaaaacaaacaaaaataaaataaaaaaaaaaggaatgcaacacgagggcttaccaggaggtcacccatcctagtactactctcgcccaagcacgcttaacttcggagttctgaagggatccggtgctttagtgctggtatgatcgcattcgtcatatcctgcgtcctccttcctcttatgcccacacctccgtgctcggctcgcccacggcactggacatccttcctccgcacaaagtacccgaaaaacgccccttaaaacaaataaaaggtaatttaacacgagaacggtcacccatttt

SEQ ID NO: 5348 - DNA, 1047 bp, Zea mays
  Zm_smallRNAprecursor_837
actggacatccttcctccgcacaaagtacccgaaaaacgccctttaaaacaaataaaaggtaatttaacacgagaacggtcacccatttttactatggtttggtgttcgaaaaacaaacaaaaataaaacaaaaaaagcaatgcaacacgaggacttcccaggaggtcacccatcctagtactactctcgcccaagcacgcttaacttcgaagttctgatgggatccggtgctttagtgctggtatgatcgcatccgtcatatcctgcgtcctccttcctcttatgcccacacctccgtgctcggctcgcccacggcactggacatccttcctccgcacaaagtacccgaaaaatgccccttaaaacaaataaaaggtaatttaacacgagaacggtcacccatttttactatggtttggtgttcgaaaaacaaacaaaaataaaataaaaaaaaaaggaatgcaacacgagggcttaccaggaggtcacccatcctagtactactctcgcccaagcacgcttaacttcggagttctgaagggatccggtgctttagtgctggtatgatcgcattcgtcatatcctgcgtcctccttcctcttatgcccacacctccgtgctcggctcgcccacggcactggacatccttcctccgcacaaagtacccgaaaaacgccccttaaaacaaataaaaggtaatttaacacgagaacggtcacccatttttactgtggtttggtgttcgaaaaacaaacaaaaataaaaccaaaaaaaaaaggaatgcaacacgaggacttcccaggaggtcacccatcctactactactcttgcccaagcacgcttaactttggagttctgatgggatccgatactttagtgctggtatgatcgcatctgtcatatcatgcgtcctccttcctcttatgcccacacctccgtgctcggctcgcccacggcactggacatccttcctccgcacaaagtacccgaaaaacgccccttaaaacaaataaaagctaatttaacacgagaacggtcacccattt

SEQ ID NO: 5349 - DNA, 1194 bp, Zea mays
  Zm_smallRNAprecursor_838
tggtttggtgttcgaaaaacaaacaaaaataaaacaaaaaaagcaatgcaacacgaggacttcccaggaggtcacccatcctagtactactctcgcccaagcacgcttaacttcgaagttctgatgggatccggtgctttagtgctggtatgatcgcatccgtcatatcctgcgtcctccttcctcttatgcccacacctccgtgctcggctcgcccacggcactggacatccttcctccgcacaaagtacccgaaaaatgccccttaaaacaaataaaaggtaatttaacacgagaacggtcacccatttttactatggtttggtgttcgaaaaacaaacaaaaataaaataaaaaaaaaaggaatgcaacacgagggcttaccaggaggtcacccatcctagtactactctcgcccaagcacgcttaacttcggagttctgaagggatccggtgctttagtgctggtatgatcgcattcgtcatatcctgcgtcctccttcctcttatgcccacacctccgtgctcggctcgcccacggcactggacatccttcctccgcacaaagtacccgaaaaacgccccttaaaacaaataaaaggtaatttaacacgagaacggtcacccatttttactgtggtttggtgttcgaaaaacaaacaaaaataaaaccaaaaaaaaaaggaatgcaacacgaggacttcccaggaggtcacccatcctactactactcttgcccaagcacgcttaactttggagttctgatgggatccgatactttagtgctggtatgatcgcatctgtcatatcatgcgtcctccttcctcttatgcccacacctccgtgctcggctcgcccacggcactggacatccttcctccgcacaaagtacccgaaaaacgccccttaaaacaaataaaagctaatttaacacgagaacggtcacccatttttactatggtttggtgttcgaaaaacaaacaaaaataaaaccaaaaaaaggaatgcaacacgaggacttcccaggaggtcacccatcctagtactactctcgcccaagcacgcttaacttcggagttctgatgggatccggtgctttagtgctggtatgatcgcatccatcatatcctacgtcctccttactcttatgcccacacctccgtgctcggctcgcccacggcactggacatcctt

SEQ ID NO: 5350 - DNA, 1129 bp, Zea mays
  Zm_smallRNAprecursor_839
cacacctccgtgctcggctcgcccacggcactggacatccttcctccgcacaaagtacccgaaaaatgccccttaaaacaaataaaaggtaatttaacacgagaacggtcacccatttttactatggtttggtgttcgaaaaacaaacaaaaataaaataaaaaaaaaaggaatgcaacacgagggcttaccaggaggtcacccatcctagtactactctcgcccaagcacgcttaacttcggagttctgaagggatccggtgctttagtgctggtatgatcgcattcgtcatatcctgcgtcctccttcctcttatgcccacacctccgtgctcggctcgcccacggcactggacatccttcctccgcacaaagtacccgaaaaacgccccttaaaacaaataaaaggtaatttaacacgagaacggtcacccatttttactgtggtttggtgttcgaaaaacaaacaaaaataaaaccaaaaaaaaaaggaatgcaacacgaggacttcccaggaggtcacccatcctactactactcttgcccaagcacgcttaactttggagttctgatgggatccgatactttagtgctggtatgatcgcatctgtcatatcatgcgtcctccttcctcttatgcccacacctccgtgctcggctcgcccacggcactggacatccttcctccgcacaaagtacccgaaaaacgccccttaaaacaaataaaagctaatttaacacgagaacggtcacccatttttactatggtttggtgttcgaaaaacaaacaaaaataaaaccaaaaaaaggaatgcaacacgaggacttcccaggaggtcacccatcctagtactactctcgcccaagcacgcttaacttcggagttctgatgggatccggtgctttagtgctggtatgatcgcatccatcatatcctacgtcctccttactcttatgcccacacctccgtgctcggctcgcccacggcactggacatccttcctccgcacaaagtacccaaaaaacgccccttaaaacaaataaaaggtaatttaacacgagaacggtcacccatttttactatggtttggtgttcgaaaaacaaacaaaaataaaaccaaataaaagg

SEQ ID NO: 5351 - DNA, 1191 bp, Zea mays
  Zm_smallRNAprecursor_840
ttggtgttcgaaaaacaaacaaaaataaaataaaaaaaaaaggaatgcaacacgagggcttaccaggaggtcacccatcctagtactactctcgcccaagcacgcttaacttcggagttctgaagggatccggtgctttagtgctggtatgatcgcattcgtcatatcctgcgtcctccttcctcttatgcccacacctccgtgctcggctcgcccacggcactggacatccttcctccgcacaaagtacccgaaaaacgccccttaaaacaaataaaaggtaatttaacacgagaacggtcacccatttttactgtggtttggtgttcgaaaaacaaacaaaaataaaaccaaaaaaaaaaggaatgcaacacgaggacttcccaggaggtcacccatcctactactactcttgcccaagcacgcttaactttggagttctgatgggatccgatactttagtgctggtatgatcgcatctgtcatatcatgcgtcctccttcctcttatgcccacacctccgtgctcggctcgcccacggcactggacatccttcctccgcacaaagtacccgaaaaacgccccttaaaacaaataaaagctaatttaacacgagaacggtcacccatttttactatggtttggtgttcgaaaaacaaacaaaaataaaaccaaaaaaaggaatgcaacacgaggacttcccaggaggtcacccatcctagtactactctcgcccaagcacgcttaacttcggagttctgatgggatccggtgctttagtgctggtatgatcgcatccatcatatcctacgtcctccttactcttatgcccacacctccgtgctcggctcgcccacggcactggacatccttcctccgcacaaagtacccaaaaaacgccccttaaaacaaataaaaggtaatttaacacgagaacggtcacccatttttactatggtttggtgttcgaaaaacaaacaaaaataaaaccaaataaaaggaatgcaacacgaggacttcccaggaggtcacccatcctagtactactctcgcccaagcacgcttaacttcggagttctgatgggatccggtgctttagtgctggtatgatcgcatccgtcatatcctgcgtcctccttcctcttatgcccacacctccgtgatcggctcgcccacggcactggacatcct

SEQ ID NO: 5352 - DNA, 1054 bp, Zea mays
  Zm_smallRNAprecursor_841
ctcggctcgcccacggcactggacatccttcctccgcacaaagtacccgaaaaacgccccttaaaacaaataaaaggtaatttaacacgagaacggtcacccatttttactgtggtttggtgttcgaaaaacaaacaaaaataaaaccaaaaaaaaaaggaatgcaacacgaggacttcccaggaggtcacccatcctactactactcttgcccaagcacgcttaactttggagttctgatgggatccgatactttagtgctggtatgatcgcatctgtcatatcatgcgtcctccttcctcttatgcccacacctccgtgctcggctcgcccacggcactggacatccttcctccgcacaaagtacccgaaaaacgccccttaaaacaaataaaagctaatttaacacgagaacggtcacccatttttactatggtttggtgttcgaaaaacaaacaaaaataaaaccaaaaaaaggaatgcaacacgaggacttcccaggaggtcacccatcctagtactactctcgcccaagcacgcttaacttcggagttctgatgggatccggtgctttagtgctggtatgatcgcatccatcatatcctacgtcctccttactcttatgcccacacctccgtgctcggctcgcccacggcactggacatccttcctccgcacaaagtacccaaaaaacgccccttaaaacaaataaaaggtaatttaacacgagaacggtcacccatttttactatggtttggtgttcgaaaaacaaacaaaaataaaaccaaataaaaggaatgcaacacgaggacttcccaggaggtcacccatcctagtactactctcgcccaagcacgcttaacttcggagttctgatgggatccggtgctttagtgctggtatgatcgcatccgtcatatcctgcgtcctccttcctcttatgcccacacctccgtgatcggctcgcccacggcactggacatccttcctccgcacaaagtacccgaaaaacgccacttaaaacaaataaaaggtaatttaacacgagaacgg

SEQ ID NO: 5353 - DNA, 1041 bp, Zea mays
  Zm_smallRNAprecursor_842
ctcgcccacggcactggacatccttcctccgcacaaagtacccgaaaaacgccccttaaaacaaataaaaggtaatttaacacgagaacggtcacccatttttactgtggtttggtgttcgaaaaacaaacaaaaataaaaccaaaaaaaaaaggaatgcaacacgaggacttcccaggaggtcacccatcctactactactcttgcccaagcacgcttaactttggagttctgatgggatccgatactttagtgctggtatgatcgcatctgtcatatcatgcgtcctccttcctcttatgcccacacctccgtgctcggctcgcccacggcactggacatccttcctccgcacaaagtacccgaaaaacgccccttaaaacaaataaaagctaatttaacacgagaacggtcacccatttttactatggtttggtgttcgaaaaacaaacaaaaataaaaccaaaaaaaggaatgcaacacgaggacttcccaggaggtcacccatcctagtactactctcgcccaagcacgcttaacttcggagttctgatgggatccggtgctttagtgctggtatgatcgcatccatcatatcctacgtcctccttactcttatgcccacacctccgtgctcggctcgcccacggcactggacatccttcctccgcacaaagtacccaaaaaacgccccttaaaacaaataaaaggtaatttaacacgagaacggtcacccatttttactatggtttggtgttcgaaaaacaaacaaaaataaaaccaaataaaaggaatgcaacacgaggacttcccaggaggtcacccatcctagtactactctcgcccaagcacgcttaacttcggagttctgatgggatccggtgctttagtgctggtatgatcgcatccgtcatatcctgcgtcctccttcctcttatgcccacacctccgtgatcggctcgcccacggcactggacatccttcctccgcacaaagtacccgaaaaacgccacttaaaacaaataaaaggtaatttaacac

SEQ ID NO: 5354 - DNA, 1037 bp, Zea mays
  Zm_smallRNAprecursor_843
cccacggcactggacatccttcctccgcacaaagtacccgaaaaacgccccttaaaacaaataaaaggtaatttaacacgagaacggtcacccatttttactgtggtttggtgttcgaaaaacaaacaaaaataaaaccaaaaaaaaaaggaatgcaacacgaggacttcccaggaggtcacccatcctactactactcttgcccaagcacgcttaactttggagttctgatgggatccgatactttagtgctggtatgatcgcatctgtcatatcatgcgtcctccttcctcttatgcccacacctccgtgctcggctcgcccacggcactggacatccttcctccgcacaaagtacccgaaaaacgccccttaaaacaaataaaagctaatttaacacgagaacggtcacccatttttactatggtttggtgttcgaaaaacaaacaaaaataaaaccaaaaaaaggaatgcaacacgaggacttcccaggaggtcacccatcctagtactactctcgcccaagcacgcttaacttcggagttctgatgggatccggtgctttagtgctggtatgatcgcatccatcatatcctacgtcctccttactcttatgcccacacctccgtgctcggctcgcccacggcactggacatccttcctccgcacaaagtacccaaaaaacgccccttaaaacaaataaaaggtaatttaacacgagaacggtcacccatttttactatggtttggtgttcgaaaaacaaacaaaaataaaaccaaataaaaggaatgcaacacgaggacttcccaggaggtcacccatcctagtactactctcgcccaagcacgcttaacttcggagttctgatgggatccggtgctttagtgctggtatgatcgcatccgtcatatcctgcgtcctccttcctcttatgcccacacctccgtgatcggctcgcccacggcactggacatccttcctccgcacaaagtacccgaaaaacgccacttaaaacaaataaaaggtaatttaacac

SEQ ID NO: 5355 - DNA, 1047 bp, Zea mays
  Zm_smallRNAprecursor_844
tggacatccttcctccgcacaaagtacccgaaaaacgccccttaaaacaaataaaaggtaatttaacacgagaacggtcacccatttttactgtggtttggtgttcgaaaaacaaacaaaaataaaaccaaaaaaaaaaggaatgcaacacgaggacttcccaggaggtcacccatcctactactactcttgcccaagcacgcttaactttggagttctgatgggatccgatactttagtgctggtatgatcgcatctgtcatatcatgcgtcctccttcctcttatgcccacacctccgtgctcggctcgcccacggcactggacatccttcctccgcacaaagtacccgaaaaacgccccttaaaacaaataaaagctaatttaacacgagaacggtcacccatttttactatggtttggtgttcgaaaaacaaacaaaaataaaaccaaaaaaaggaatgcaacacgaggacttcccaggaggtcacccatcctagtactactctcgcccaagcacgcttaacttcggagttctgatgggatccggtgctttagtgctggtatgatcgcatccatcatatcctacgtcctccttactcttatgcccacacctccgtgctcggctcgcccacggcactggacatccttcctccgcacaaagtacccaaaaaacgccccttaaaacaaataaaaggtaatttaacacgagaacggtcacccatttttactatggtttggtgttcgaaaaacaaacaaaaataaaaccaaataaaaggaatgcaacacgaggacttcccaggaggtcacccatcctagtactactctcgcccaagcacgcttaacttcggagttctgatgggatccggtgctttagtgctggtatgatcgcatccgtcatatcctgcgtcctccttcctcttatgcccacacctccgtgatcggctcgcccacggcactggacatccttcctccgcacaaagtacccgaaaaacgccacttaaaacaaataaaaggtaatttaacacgagaacggtcacccattttt

SEQ ID NO: 5356 - DNA, 1129 bp, Zea mays
  Zm_smallRNAprecursor_845
tgcccacacctccgtgctcggctcgcccacggcactggacatccttcctccgcacaaagtacccgaaaaacgccccttaaaacaaataaaagctaatttaacacgagaacggtcacccatttttactatggtttggtgttcgaaaaacaaacaaaaataaaaccaaaaaaaggaatgcaacacgaggacttcccaggaggtcacccatcctagtactactctcgcccaagcacgcttaacttcggagttctgatgggatccggtgctttagtgctggtatgatcgcatccatcatatcctacgtcctccttactcttatgcccacacctccgtgctcggctcgcccacggcactggacatccttcctccgcacaaagtacccaaaaaacgccccttaaaacaaataaaaggtaatttaacacgagaacggtcacccatttttactatggtttggtgttcgaaaaacaaacaaaaataaaaccaaataaaaggaatgcaacacgaggacttcccaggaggtcacccatcctagtactactctcgcccaagcacgcttaacttcggagttctgatgggatccggtgctttagtgctggtatgatcgcatccgtcatatcctgcgtcctccttcctcttatgcccacacctccgtgatcggctcgcccacggcactggacatccttcctccgcacaaagtacccgaaaaacgccacttaaaacaaataaaaggtaatttaacacgagaacggtcacccatttttactatggtttggtgttcgaaaaacaaacaaaaataaaaccaaaaaaaaggaatgcaacccgaggacttcccaggaggtcacccatcctagtactactctcgcccaagcacgcttaacttcggatttctgatgggatccggcgttttagtgctggtatgatcgcatctgtcatatcctgcgtcctccttcatcttatgcccacacctccgtgctcggctcgcccacgacactagacatccttcctccgcacaaagtacccgaaaaacgccccttaaaacaaataaaaggtaatttaacacgagaacggtcacccatttttactatggtttgatgttcgaaaaacaaacaaaaataaaaccaaaaaaagg

SEQ ID NO: 5357 - DNA, 1054 bp, Zea mays
  Zm_smallRNAprecursor_846
tgctcggctcgcccacggcactggacatccttcctccgcacaaagtacccgaaaaacgccccttaaaacaaataaaagctaatttaacacgagaacggtcacccatttttactatggtttggtgttcgaaaaacaaacaaaaataaaaccaaaaaaaggaatgcaacacgaggacttcccaggaggtcacccatcctagtactactctcgcccaagcacgcttaacttcggagttctgatgggatccggtgctttagtgctggtatgatcgcatccatcatatcctacgtcctccttactcttatgcccacacctccgtgctcggctcgcccacggcactggacatccttcctccgcacaaagtacccaaaaaacgccccttaaaacaaataaaaggtaatttaacacgagaacggtcacccatttttactatggtttggtgttcgaaaaacaaacaaaaataaaaccaaataaaaggaatgcaacacgaggacttcccaggaggtcacccatcctagtactactctcgcccaagcacgcttaacttcggagttctgatgggatccggtgctttagtgctggtatgatcgcatccgtcatatcctgcgtcctccttcctcttatgcccacacctccgtgatcggctcgcccacggcactggacatccttcctccgcacaaagtacccgaaaaacgccacttaaaacaaataaaaggtaatttaacacgagaacggtcacccatttttactatggtttggtgttcgaaaaacaaacaaaaataaaaccaaaaaaaaggaatgcaacccgaggacttcccaggaggtcacccatcctagtactactctcgcccaagcacgcttaacttcggatttctgatgggatccggcgttttagtgctggtatgatcgcatctgtcatatcctgcgtcctccttcatcttatgcccacacctccgtgctcggctcgcccacgacactagacatccttcctccgcacaaagtacccgaaaaacgccccttaaaacaaataaaaggtaatttaacacgagaacgg

SEQ ID NO: 5358 - DNA, 1041 bp, Zea mays
  Zm_smallRNAprecursor_847
ggctcgcccacggcactggacatccttcctccgcacaaagtacccgaaaaacgccccttaaaacaaataaaagctaatttaacacgagaacggtcacccatttttactatggtttggtgttcgaaaaacaaacaaaaataaaaccaaaaaaaggaatgcaacacgaggacttcccaggaggtcacccatcctagtactactctcgcccaagcacgcttaacttcggagttctgatgggatccggtgctttagtgctggtatgatcgcatccatcatatcctacgtcctccttactcttatgcccacacctccgtgctcggctcgcccacggcactggacatccttcctccgcacaaagtacccaaaaaacgccccttaaaacaaataaaaggtaatttaacacgagaacggtcacccatttttactatggtttggtgttcgaaaaacaaacaaaaataaaaccaaataaaaggaatgcaacacgaggacttcccaggaggtcacccatcctagtactactctcgcccaagcacgcttaacttcggagttctgatgggatccggtgctttagtgctggtatgatcgcatccgtcatatcctgcgtcctccttcctcttatgcccacacctccgtgatcggctcgcccacggcactggacatccttcctccgcacaaagtacccgaaaaacgccacttaaaacaaataaaaggtaatttaacacgagaacggtcacccatttttactatggtttggtgttcgaaaaacaaacaaaaataaaaccaaaaaaaaggaatgcaacccgaggacttcccaggaggtcacccatcctagtactactctcgcccaagcacgcttaacttcggatttctgatgggatccggcgttttagtgctggtatgatcgcatctgtcatatcctgcgtcctccttcatcttatgcccacacctccgtgctcggctcgcccacgacactagacatccttcctccgcacaaagtacccgaaaaacgccccttaaaacaaataaaaggtaatttaacac

SEQ ID NO: 5359 - DNA, 1037 bp, Zea mays
  Zm_smallRNAprecursor_848
cgcccacggcactggacatccttcctccgcacaaagtacccgaaaaacgccccttaaaacaaataaaagctaatttaacacgagaacggtcacccatttttactatggtttggtgttcgaaaaacaaacaaaaataaaaccaaaaaaaggaatgcaacacgaggacttcccaggaggtcacccatcctagtactactctcgcccaagcacgcttaacttcggagttctgatgggatccggtgctttagtgctggtatgatcgcatccatcatatcctacgtcctccttactcttatgcccacacctccgtgctcggctcgcccacggcactggacatccttcctccgcacaaagtacccaaaaaacgccccttaaaacaaataaaaggtaatttaacacgagaacggtcacccatttttactatggtttggtgttcgaaaaacaaacaaaaataaaaccaaataaaaggaatgcaacacgaggacttcccaggaggtcacccatcctagtactactctcgcccaagcacgcttaacttcggagttctgatgggatccggtgctttagtgctggtatgatcgcatccgtcatatcctgcgtcctccttcctcttatgcccacacctccgtgatcggctcgcccacggcactggacatccttcctccgcacaaagtacccgaaaaacgccacttaaaacaaataaaaggtaatttaacacgagaacggtcacccatttttactatggtttggtgttcgaaaaacaaacaaaaataaaaccaaaaaaaaggaatgcaacccgaggacttcccaggaggtcacccatcctagtactactctcgcccaagcacgcttaacttcggatttctgatgggatccggcgttttagtgctggtatgatcgcatctgtcatatcctgcgtcctccttcatcttatgcccacacctccgtgctcggctcgcccacgacactagacatccttcctccgcacaaagtacccgaaaaacgccccttaaaacaaataaaaggtaatttaacac

SEQ ID NO: 5360 - DNA, 1047 bp, Zea mays
  Zm_smallRNAprecursor_849
actggacatccttcctccgcacaaagtacccgaaaaacgccccttaaaacaaataaaagctaatttaacacgagaacggtcacccatttttactatggtttggtgttcgaaaaacaaacaaaaataaaaccaaaaaaaggaatgcaacacgaggacttcccaggaggtcacccatcctagtactactctcgcccaagcacgcttaacttcggagttctgatgggatccggtgctttagtgctggtatgatcgcatccatcatatcctacgtcctccttactcttatgcccacacctccgtgctcggctcgcccacggcactggacatccttcctccgcacaaagtacccaaaaaacgccccttaaaacaaataaaaggtaatttaacacgagaacggtcacccatttttactatggtttggtgttcgaaaaacaaacaaaaataaaaccaaataaaaggaatgcaacacgaggacttcccaggaggtcacccatcctagtactactctcgcccaagcacgcttaacttcggagttctgatgggatccggtgctttagtgctggtatgatcgcatccgtcatatcctgcgtcctccttcctcttatgcccacacctccgtgatcggctcgcccacggcactggacatccttcctccgcacaaagtacccgaaaaacgccacttaaaacaaataaaaggtaatttaacacgagaacggtcacccatttttactatggtttggtgttcgaaaaacaaacaaaaataaaaccaaaaaaaaggaatgcaacccgaggacttcccaggaggtcacccatcctagtactactctcgcccaagcacgcttaacttcggatttctgatgggatccggcgttttagtgctggtatgatcgcatctgtcatatcctgcgtcctccttcatcttatgcccacacctccgtgctcggctcgcccacgacactagacatccttcctccgcacaaagtacccgaaaaacgccccttaaaacaaataaaaggtaatttaacacgagaacggtcacccattttt

SEQ ID NO: 5361 - DNA, 1129 bp, Zea mays
  Zm_smallRNAprecursor_850
tgcccacacctccgtgatcggctcgcccacggcactggacatccttcctccgcacaaagtacccgaaaaacgccacttaaaacaaataaaaggtaatttaacacgagaacggtcacccatttttactatggtttggtgttcgaaaaacaaacaaaaataaaaccaaaaaaaaggaatgcaacccgaggacttcccaggaggtcacccatcctagtactactctcgcccaagcacgcttaacttcggatttctgatgggatccggcgttttagtgctggtatgatcgcatctgtcatatcctgcgtcctccttcatcttatgcccacacctccgtgctcggctcgcccacgacactagacatccttcctccgcacaaagtacccgaaaaacgccccttaaaacaaataaaaggtaatttaacacgagaacggtcacccatttttactatggtttgatgttcgaaaaacaaacaaaaataaaaccaaaaaaaggaatgcaacacgaggacttcccaggaggtcacccatcctagtactactctcgcccaagctcgcttaacttcggagttctgatgggatccagtgctttagtgctggtatgatcgcatctgtcatattgtgcgtcctccttcctcttatgcccacacctccgtgctcggctcgcccacggcactggacatccttcctccgcacaaagtacccgaaaaatgcccaaaacgccaccttttttttgaaaaacaaacaaaaaaaccaaaaaaaggaatgcaacacgaggacttcccatgaggtcacccatcctagtactactctcacccaagcacgcttaacttcggagttctgatgggatccagtgctttagtgctggtatgatcgcatccatcatatcctgcgtcctccttcctcttatgcccacacctccgtgctcggttcgcccacgacactaaacatccttcctccacacaaagtacccgaaaaatgcccaacacgcctctttttttttgaaaaacaaacaaaaaaaccaaaaaaggaatccaacacgaggacttatcaggaggtcatccatcatagtactactatcgcccaagcacgcttaacttcggagttctgatgggatctggtgctttagtgct

SEQ ID NO: 5362 - DNA, 1041 bp, Zea mays
  Zm_smallRNAprecursor_851
ggctcgcccacggcactggacatccttcctccgcacaaagtacccgaaaaacgccacttaaaacaaataaaaggtaatttaacacgagaacggtcacccatttttactatggtttggtgttcgaaaaacaaacaaaaataaaaccaaaaaaaaggaatgcaacccgaggacttcccaggaggtcacccatcctagtactactctcgcccaagcacgcttaacttcggatttctgatgggatccggcgttttagtgctggtatgatcgcatctgtcatatcctgcgtcctccttcatcttatgcccacacctccgtgctcggctcgcccacgacactagacatccttcctccgcacaaagtacccgaaaaacgccccttaaaacaaataaaaggtaatttaacacgagaacggtcacccatttttactatggtttgatgttcgaaaaacaaacaaaaataaaaccaaaaaaaggaatgcaacacgaggacttcccaggaggtcacccatcctagtactactctcgcccaagctcgcttaacttcggagttctgatgggatccagtgctttagtgctggtatgatcgcatctgtcatattgtgcgtcctccttcctcttatgcccacacctccgtgctcggctcgcccacggcactggacatccttcctccgcacaaagtacccgaaaaatgcccaaaacgccaccttttttttgaaaaacaaacaaaaaaaccaaaaaaaggaatgcaacacgaggacttcccatgaggtcacccatcctagtactactctcacccaagcacgcttaacttcggagttctgatgggatccagtgctttagtgctggtatgatcgcatccatcatatcctgcgtcctccttcctcttatgcccacacctccgtgctcggttcgcccacgacactaaacatccttcctccacacaaagtacccgaaaaatgcccaacacgcctctttttttttgaaaaacaaacaaaaaaaccaaaaaaggaatccaacacgaggacttatcaggaggtcatcc

SEQ ID NO: 5363 - DNA, 1037 bp, Zea mays
  Zm_smallRNAprecursor_852
cgcccacggcactggacatccttcctccgcacaaagtacccgaaaaacgccacttaaaacaaataaaaggtaatttaacacgagaacggtcacccatttttactatggtttggtgttcgaaaaacaaacaaaaataaaaccaaaaaaaaggaatgcaacccgaggacttcccaggaggtcacccatcctagtactactctcgcccaagcacgcttaacttcggatttctgatgggatccggcgttttagtgctggtatgatcgcatctgtcatatcctgcgtcctccttcatcttatgcccacacctccgtgctcggctcgcccacgacactagacatccttcctccgcacaaagtacccgaaaaacgccccttaaaacaaataaaaggtaatttaacacgagaacggtcacccatttttactatggtttgatgttcgaaaaacaaacaaaaataaaaccaaaaaaaggaatgcaacacgaggacttcccaggaggtcacccatcctagtactactctcgcccaagctcgcttaacttcggagttctgatgggatccagtgctttagtgctggtatgatcgcatctgtcatattgtgcgtcctccttcctcttatgcccacacctccgtgctcggctcgcccacggcactggacatccttcctccgcacaaagtacccgaaaaatgcccaaaacgccaccttttttttgaaaaacaaacaaaaaaaccaaaaaaaggaatgcaacacgaggacttcccatgaggtcacccatcctagtactactctcacccaagcacgcttaacttcggagttctgatgggatccagtgctttagtgctggtatgatcgcatccatcatatcctgcgtcctccttcctcttatgcccacacctccgtgctcggttcgcccacgacactaaacatccttcctccacacaaagtacccgaaaaatgcccaacacgcctctttttttttgaaaaacaaacaaaaaaaccaaaaaaggaatccaacacgaggacttatcaggaggtcatcc

SEQ ID NO: 5364 - DNA, 1041 bp, Zea mays
  Zm_smallRNAprecursor_853
atctgtcatatcctgcgtcctccttcatcttatgcccacacctccgtgctcggctcgcccacgacactagacatccttcctccgcacaaagtacccgaaaaacgccccttaaaacaaataaaaggtaatttaacacgagaacggtcacccatttttactatggtttgatgttcgaaaaacaaacaaaaataaaaccaaaaaaaggaatgcaacacgaggacttcccaggaggtcacccatcctagtactactctcgcccaagctcgcttaacttcggagttctgatgggatccagtgctttagtgctggtatgatcgcatctgtcatattgtgcgtcctccttcctcttatgcccacacctccgtgctcggctcgcccacggcactggacatccttcctccgcacaaagtacccgaaaaatgcccaaaacgccaccttttttttgaaaaacaaacaaaaaaaccaaaaaaaggaatgcaacacgaggacttcccatgaggtcacccatcctagtactactctcacccaagcacgcttaacttcggagttctgatgggatccagtgctttagtgctggtatgatcgcatccatcatatcctgcgtcctccttcctcttatgcccacacctccgtgctcggttcgcccacgacactaaacatccttcctccacacaaagtacccgaaaaatgcccaacacgcctctttttttttgaaaaacaaacaaaaaaaccaaaaaaggaatccaacacgaggacttatcaggaggtcatccatcatagtactactatcgcccaagcacgcttaacttcggagttctgatgggatctggtgctttagtgctggtatgatcacatccgtcatatccaacgtcctcctttctcttatgcccacacctccgtgctcggctcgcccacggcactgaacatcctttctccgcacaaagtacccgaaaatgcccaaaacgccccctttttttgaaaaacaaacaaaaaaaccaaaaaaaggaatgcaacatgaggacttcccaggaggtcacccat

SEQ ID NO: 5365 - DNA, 1047 bp, Zea mays
  Zm_smallRNAprecursor_854
ttctgatgggatccagtgctttagtgctggtatgatcgcatccatcatatcctgcgtcctccttcctcttatgcccacacctccgtgctcggttcgcccacgacactaaacatccttcctccacacaaagtacccgaaaaatgcccaacacgcctctttttttttgaaaaacaaacaaaaaaaccaaaaaaggaatccaacacgaggacttatcaggaggtcatccatcatagtactactatcgcccaagcacgcttaacttcggagttctgatgggatctggtgctttagtgctggtatgatcacatccgtcatatccaacgtcctcctttctcttatgcccacacctccgtgctcggctcgcccacggcactgaacatcctttctccgcacaaagtacccgaaaatgcccaaaacgccccctttttttgaaaaacaaacaaaaaaaccaaaaaaaggaatgcaacatgaggacttcccaggaggtcacccatcttagtactactctcgcccaagcacgcttaaattcggggttctgattggattcggtgctttagtgctggtatgattgcatccgtcatatcctgcgtcctccttcctcttatgcccacaccttcgtgctcggctcgcccacggcactgagcatcattcctccgcacaaagtacccaaaaaatgcccaaaatgccccttttttgaaaaacaaacaaaaaaaaacaaaaaaccgaaagcaacacgaggacttcccaggaggtcactcaacctagtactactctcgcccaagcacgcttaacttcagagttctgatgggatccagtgctttagtgctggtatgatcgcatctgtcatatcctgcgtccttcttcctcttatgcccaaacctccgtgctcggctcgcccacggcactgaacatccttcctccgcacaaagtacccgaaaaaatgcccaaaacgcctcttttttgaaaaacaaacaaaaaaagacaaaaaaagaatgcgacacaaggacatcccaggaggtcacccatcctagtactactctcgcccaa

SEQ ID NO: 5366 - DNA, 1221 bp, Zea mays
  Zm_smallRNAprecursor_855
atatcctgcgtcctccttcctcttatgcccacacctccgtgctcggttcgcccacgacactaaacatccttcctccacacaaagtacccgaaaaatgcccaacacgcctctttttttttgaaaaacaaacaaaaaaaccaaaaaaggaatccaacacgaggacttatcaggaggtcatccatcatagtactactatcgcccaagcacgcttaacttcggagttctgatgggatctggtgctttagtgctggtatgatcacatccgtcatatccaacgtcctcctttctcttatgcccacacctccgtgctcggctcgcccacggcactgaacatcctttctccgcacaaagtacccgaaaatgcccaaaacgccccctttttttgaaaaacaaacaaaaaaaccaaaaaaaggaatgcaacatgaggacttcccaggaggtcacccatcttagtactactctcgcccaagcacgcttaaattcggggttctgattggattcggtgctttagtgctggtatgattgcatccgtcatatcctgcgtcctccttcctcttatgcccacaccttcgtgctcggctcgcccacggcactgagcatcattcctccgcacaaagtacccaaaaaatgcccaaaatgccccttttttgaaaaacaaacaaaaaaaaacaaaaaaccgaaagcaacacgaggacttcccaggaggtcactcaacctagtactactctcgcccaagcacgcttaacttcagagttctgatgggatccagtgctttagtgctggtatgatcgcatctgtcatatcctgcgtccttcttcctcttatgcccaaacctccgtgctcggctcgcccacggcactgaacatccttcctccgcacaaagtacccgaaaaaatgcccaaaacgcctcttttttgaaaaacaaacaaaaaaagacaaaaaaagaatgcgacacaaggacatcccaggaggtcacccatcctagtactactctcgcccaagcacgcttaactttggagttctaatgggatctggtgctttagtgctagtatgatcgcatccgtcgtatcttgcgtcctctttccttttatgccacacctccgtgctcggctcgcccacgacactgaacatccttcctccgcaataagtacccgaaaatgcccaaaacgcccccttttttgaaaaacaaacaataaaaccaaaaaaagaatgcaacacgag

SEQ ID NO: 5367 - DNA, 1047 bp, Zea mays
  Zm_smallRNAprecursor_856
ggtcacaccagacagtctggtgtgcaccggacaatgtccggtgactgaccggacagtccggtgaattatagcggagtggattcccgaaggcggcgagttcagagttgctcttccttggggcaccggacactgtccggtggtgcaccagacagtccggtgaattatagcggagctcctctaaaaattcccgaaggtgaagagttgggcgtcgagttccctggtgcaccggacactgtctggtggcacaccggacagtccggtgcgccagaccagggtgcctttcgggttgtcttttgctctcttgtttgaacccttttcttggcctttttattggcttattgtgaacctttgacacctgtaaaacttatagactagagcaaactagttagtccaattatttgtgttgggcaattcaaccaccaaaatcaattaggaaaaaggtgtaagcctaattccctttcagcaacacgaggacttcctaggaggtcaccaatcctagtactactctcgcccaagcacgcttaacttcggagttctgatgggatccggtgctttagtgctggtatgatcgcatccgtcatatcatgcgtcctccttcctcttatgcccacatctttgtgctcggttcgcccacagcactgaacatccttcctccgcacaaagtacccaaaaaatgcccaaaaagccctttttttgaaaaacaaacaaaaaaacaaaaaaaaacgaatgcaacacgaggacttccgaggaggtcactcatcctaatactactctcgcccaagcacacttaacttcagaattttgatgtgatccggtgctttagtgctggtatgatcgcatccgtcatatcctgcgtcctcctttctcttatgcccacacctccgtgctcggctcgcccacggcactgaacatctttcctccacacaaagtacccgaaaaagcccaaaacgcccctttttttttgaaaaacaaaaaaaccaaaaaaaggaatgcaacacgaggacttcccaggaggccaaccatcctagtactactctcgcccaagca

SEQ ID NO: 5368 - DNA, 1221 bp, Zea mays
  Zm_smallRNAprecursor_857
gaccggacagtccggtgaattatagcggagtggattcccgaaggcggcgagttcagagttgctcttccttggggcaccggacactgtccggtggtgcaccagacagtccggtgaattatagcggagctcctctaaaaattcccgaaggtgaagagttgggcgtcgagttccctggtgcaccggacactgtctggtggcacaccggacagtccggtgcgccagaccagggtgcctttcgggttgtcttttgctctcttgtttgaacccttttcttggcctttttattggcttattgtgaacctttgacacctgtaaaacttatagactagagcaaactagttagtccaattatttgtgttgggcaattcaaccaccaaaatcaattaggaaaaaggtgtaagcctaattccctttcagcaacacgaggacttcctaggaggtcaccaatcctagtactactctcgcccaagcacgcttaacttcggagttctgatgggatccggtgctttagtgctggtatgatcgcatccgtcatatcatgcgtcctccttcctcttatgcccacatctttgtgctcggttcgcccacagcactgaacatccttcctccgcacaaagtacccaaaaaatgcccaaaaagccctttttttgaaaaacaaacaaaaaaacaaaaaaaaacgaatgcaacacgaggacttccgaggaggtcactcatcctaatactactctcgcccaagcacacttaacttcagaattttgatgtgatccggtgctttagtgctggtatgatcgcatccgtcatatcctgcgtcctcctttctcttatgcccacacctccgtgctcggctcgcccacggcactgaacatctttcctccacacaaagtacccgaaaaagcccaaaacgcccctttttttttgaaaaacaaaaaaaccaaaaaaaggaatgcaacacgaggacttcccaggaggccaaccatcctagtactactctcgcccaagcacgcttaacttcggagctctgatgagatccgttgctttagtgctggtatgatcgcatcagtcatatcatgtgtcctccttcctcttatgcccacacctccgtgcttggctcgcccacggcactgaacatccttcctccgcacaaagtacccaaaaaatgcccaaaacaccccttaaaacaaataaaacaaaaaaggaaatttaacacgaggacggttaccc

SEQ ID NO: 5369 - DNA, 1047 bp, Zea mays
  Zm_smallRNAprecursor_858
agaccagggtgcctttcgggttgtcttttgctctcttgtttgaacccttttcttggcctttttattggcttattgtgaacctttgacacctgtaaaacttatagactagagcaaactagttagtccaattatttgtgttgggcaattcaaccaccaaaatcaattaggaaaaaggtgtaagcctaattccctttcagcaacacgaggacttcctaggaggtcaccaatcctagtactactctcgcccaagcacgcttaacttcggagttctgatgggatccggtgctttagtgctggtatgatcgcatccgtcatatcatgcgtcctccttcctcttatgcccacatctttgtgctcggttcgcccacagcactgaacatccttcctccgcacaaagtacccaaaaaatgcccaaaaagccctttttttgaaaaacaaacaaaaaaacaaaaaaaaacgaatgcaacacgaggacttccgaggaggtcactcatcctaatactactctcgcccaagcacacttaacttcagaattttgatgtgatccggtgctttagtgctggtatgatcgcatccgtcatatcctgcgtcctcctttctcttatgcccacacctccgtgctcggctcgcccacggcactgaacatctttcctccacacaaagtacccgaaaaagcccaaaacgcccctttttttttgaaaaacaaaaaaaccaaaaaaaggaatgcaacacgaggacttcccaggaggccaaccatcctagtactactctcgcccaagcacgcttaacttcggagctctgatgagatccgttgctttagtgctggtatgatcgcatcagtcatatcatgtgtcctccttcctcttatgcccacacctccgtgcttggctcgcccacggcactgaacatccttcctccgcacaaagtacccaaaaaatgcccaaaacaccccttaaaacaaataaaacaaaaaaggaaatttaacacgaggacggttacccatttttactatggtttggtgttcgaaaaacacaaaaataaaaccaa

SEQ ID NO: 5370 - DNA, 1218 bp, Zea mays
  Zm_smallRNAprecursor_859
cttttcttggcctttttattggcttattgtgaacctttgacacctgtaaaacttatagactagagcaaactagttagtccaattatttgtgttgggcaattcaaccaccaaaatcaattaggaaaaaggtgtaagcctaattccctttcagcaacacgaggacttcctaggaggtcaccaatcctagtactactctcgcccaagcacgcttaacttcggagttctgatgggatccggtgctttagtgctggtatgatcgcatccgtcatatcatgcgtcctccttcctcttatgcccacatctttgtgctcggttcgcccacagcactgaacatccttcctccgcacaaagtacccaaaaaatgcccaaaaagccctttttttgaaaaacaaacaaaaaaacaaaaaaaaacgaatgcaacacgaggacttccgaggaggtcactcatcctaatactactctcgcccaagcacacttaacttcagaattttgatgtgatccggtgctttagtgctggtatgatcgcatccgtcatatcctgcgtcctcctttctcttatgcccacacctccgtgctcggctcgcccacggcactgaacatctttcctccacacaaagtacccgaaaaagcccaaaacgcccctttttttttgaaaaacaaaaaaaccaaaaaaaggaatgcaacacgaggacttcccaggaggccaaccatcctagtactactctcgcccaagcacgcttaacttcggagctctgatgagatccgttgctttagtgctggtatgatcgcatcagtcatatcatgtgtcctccttcctcttatgcccacacctccgtgcttggctcgcccacggcactgaacatccttcctccgcacaaagtacccaaaaaatgcccaaaacaccccttaaaacaaataaaacaaaaaaggaaatttaacacgaggacggttacccatttttactatggtttggtgttcgaaaaacacaaaaataaaaccaaaaaagggaatgcaaacgaggacttcctaggaggtcacccatcctagtactactctcgcccaagcacgcttaacctcggagttctgatgagatccggtgctttagtgctagtatgatcgcatccgtcatatcttgcgtcctccttcctcttatgtccacacctccgtgctcggctcgcccacggcactgaacatccttcctccgcacaaagtacccga

SEQ ID NO: 5371 - DNA, 1129 bp, Zea mays
  Zm_smallRNAprecursor_860
tagtactactctcgcccaagcacgcttaacttcggagttctgatgggatccggtgctttagtgctggtatgatcgcatccgtcatatcatgcgtcctccttcctcttatgcccacatctttgtgctcggttcgcccacagcactgaacatccttcctccgcacaaagtacccaaaaaatgcccaaaaagccctttttttgaaaaacaaacaaaaaaacaaaaaaaaacgaatgcaacacgaggacttccgaggaggtcactcatcctaatactactctcgcccaagcacacttaacttcagaattttgatgtgatccggtgctttagtgctggtatgatcgcatccgtcatatcctgcgtcctcctttctcttatgcccacacctccgtgctcggctcgcccacggcactgaacatctttcctccacacaaagtacccgaaaaagcccaaaacgcccctttttttttgaaaaacaaaaaaaccaaaaaaaggaatgcaacacgaggacttcccaggaggccaaccatcctagtactactctcgcccaagcacgcttaacttcggagctctgatgagatccgttgctttagtgctggtatgatcgcatcagtcatatcatgtgtcctccttcctcttatgcccacacctccgtgcttggctcgcccacggcactgaacatccttcctccgcacaaagtacccaaaaaatgcccaaaacaccccttaaaacaaataaaacaaaaaaggaaatttaacacgaggacggttacccatttttactatggtttggtgttcgaaaaacacaaaaataaaaccaaaaaagggaatgcaaacgaggacttcctaggaggtcacccatcctagtactactctcgcccaagcacgcttaacctcggagttctgatgagatccggtgctttagtgctagtatgatcgcatccgtcatatcttgcgtcctccttcctcttatgtccacacctccgtgctcggctcgcccacggcactgaacatccttcctccgcacaaagtacccgaaaaatgcccaaaacgccccttaaaacaaaaaaaagtaatttaacacgaggacggtcacccatttttactatggtttgttgttcgaaaaacaaaca

SEQ ID NO: 5372 - DNA, 1041 bp, Zea mays
  Zm_smallRNAprecursor_861
tccttcctccgcacaaagtacccgaaaaatgcccaaaacgccccttaaaacaaaaaaaagtaatttaacacgaggacggtcacccatttttactatggtttgttgttcgaaaaacaaacaaaaataaaaccaaaaaaggaatgcaacacgaggacttcccaggaggtcacccatcctagtactactctcgcccaagcacgcttaacttcaaagttctgataggatctcgtgctttagtgttggtatgatcgcatccgtcatatgttgcgtcctccttccttttatgcccacacctccgtgctcggctcgcccacggcactgaacatccttcctccgcacaaagtacccgaaaaatacccaaaatgccccttaaaacaaataaaacaaaaaaggtaatttaacacgaagacggtcacccatttttactatggtttggtgttcgaaaaacaaacaaaaataaaaccaaaaaaaggaatgcaacacgaggacttcgtaggaggtcacccatcctagtactactctcgcccaagcacacttaacttcggagttctgatgggatccgatactttagtgctagtatgatcgcatccatcatatcctgcgtcctccttcctcttatgcccacacctccgtgctcggtttgcccacggcactgaacatccttcctccgcacaaagtacccgaaaaatacccaaaacgccccttaaacaaataaaacaaaaaaatggtaatttaacacgaggacggtcacccatttttactatggtttggtgtttgaaaaacaaacaaaaataaaacaaaaaaaggaatgtaacacgaggactttacaggaggtcaaccatcctagtactactctcgcccaagcacgcttaacttcggagttctgatggcatctggtgctttagtgctggtatgatcgcattcgtcatatcctgcgtcctccttcctcttatgcccacacctccgtgctcggctcgcctacggctctgaacatccttcctccgcacaaagtacttcgaaaaaatgcctaaaacgcccctt

SEQ ID NO: 5373 - DNA, 1037 bp, Zea mays
  Zm_smallRNAprecursor_862
tcctccgcacaaagtacccgaaaaatgcccaaaacgccccttaaaacaaaaaaaagtaatttaacacgaggacggtcacccatttttactatggtttgttgttcgaaaaacaaacaaaaataaaaccaaaaaaggaatgcaacacgaggacttcccaggaggtcacccatcctagtactactctcgcccaagcacgcttaacttcaaagttctgataggatctcgtgctttagtgttggtatgatcgcatccgtcatatgttgcgtcctccttccttttatgcccacacctccgtgctcggctcgcccacggcactgaacatccttcctccgcacaaagtacccgaaaaatacccaaaatgccccttaaaacaaataaaacaaaaaaggtaatttaacacgaagacggtcacccatttttactatggtttggtgttcgaaaaacaaacaaaaataaaaccaaaaaaaggaatgcaacacgaggacttcgtaggaggtcacccatcctagtactactctcgcccaagcacacttaacttcggagttctgatgggatccgatactttagtgctagtatgatcgcatccatcatatcctgcgtcctccttcctcttatgcccacacctccgtgctcggtttgcccacggcactgaacatccttcctccgcacaaagtacccgaaaaatacccaaaacgccccttaaacaaataaaacaaaaaaatggtaatttaacacgaggacggtcacccatttttactatggtttggtgtttgaaaaacaaacaaaaataaaacaaaaaaaggaatgtaacacgaggactttacaggaggtcaaccatcctagtactactctcgcccaagcacgcttaacttcggagttctgatggcatctggtgctttagtgctggtatgatcgcattcgtcatatcctgcgtcctccttcctcttatgcccacacctccgtgctcggctcgcctacggctctgaacatccttcctccgcacaaagtacttcgaaaaaatgcctaaaacgcccctt

SEQ ID NO: 5374 - DNA, 1129 bp, Zea mays
  Zm_smallRNAprecursor_863
cgcccacggcactgaacatccttcctccgcacgaagtacccaaaaatgcccaaaacgccccttaaaacaaataaaacaaaaaaggtaatttaacacgaggacggtcacccatttttactatggtttggtgttcgaaaaacaaacaaaaataaaaccaaaaaaaggaatgcaacacgaggacttcccatgaggtcacccatcctagtactactcttgcccaagcacgcttaacttcgaagttctaatgggatccagtgctttagtgctggtatgatcgcatccgtcatatcttgcgtcctccttccccttatgcccacacctccgtgctcggctcgcccacggcactggacatgcttcctccgcacaaagttcccgaaaaatgcccaaaactccccttaaaacaaataaaaggtaatttaacacgaggacggtcacccatttttactatggtttggtgttcgaaaaacaaacaaaaataaaaccaaaaaaaggaatgcaacacgaggacttcccaggaggtcacccatcctagtactactctcgcccaagcacgcttaacttcgaagttctaatgggatctggtgctttagcgctggtataatcgcatccgtcatatcttgcgtcctccttcctcttatgcccacacctccgtgctcggctcgcccacgacactgaacatgcttcctccgcacaaagtacccgaaaaatgcccaaaacgccccttaaaacaaataaaaggtaatttaacacgagaactgtcacccatttttactatggtttggtgttcgaaaaacaaacaaaaataaaaccaaaaaaaggaatgcaacgcgaggacttcccaggaggtcacccatcctagtactactctcgcccaagcacgcttaacttcggagttctgatgggatccggtgctttagtgctggtatgatcgcatccgtcatatcctgcgtcctccttcctcttatgcccgcacctaaaaaaaaaaaaatcgcccacagcactcgacatccttcctacgcacaaagtacccgaaaaacgccccttaaaacaaataaaaggtaatttaacacgagaacggtcacccatttttactatggtttggtgttcgaaaaacaaacaaaaataaaac

SEQ ID NO: 5375 - DNA, 1054 bp, Zea mays
  Zm_smallRNAprecursor_864
gcactggacatgcttcctccgcacaaagttcccgaaaaatgcccaaaactccccttaaaacaaataaaaggtaatttaacacgaggacggtcacccatttttactatggtttggtgttcgaaaaacaaacaaaaataaaaccaaaaaaaggaatgcaacacgaggacttcccaggaggtcacccatcctagtactactctcgcccaagcacgcttaacttcgaagttctaatgggatctggtgctttagcgctggtataatcgcatccgtcatatcttgcgtcctccttcctcttatgcccacacctccgtgctcggctcgcccacgacactgaacatgcttcctccgcacaaagtacccgaaaaatgcccaaaacgccccttaaaacaaataaaaggtaatttaacacgagaactgtcacccatttttactatggtttggtgttcgaaaaacaaacaaaaataaaaccaaaaaaaggaatgcaacgcgaggacttcccaggaggtcacccatcctagtactactctcgcccaagcacgcttaacttcggagttctgatgggatccggtgctttagtgctggtatgatcgcatccgtcatatcctgcgtcctccttcctcttatgcccgcacctaaaaaaaaaaaaatcgcccacagcactcgacatccttcctacgcacaaagtacccgaaaaacgccccttaaaacaaataaaaggtaatttaacacgagaacggtcacccatttttactatggtttggtgttcgaaaaacaaacaaaaataaaaccaaaaaaaaggaatgcaacacgaggacttcccaggaggtcacccatcctagtactactctcgcccaagcacgcttaacttcggagttctaatgggatccggtgctttagtgctgatatgatcgcatccgtcatatcctgcgtcctccttcctcttatgcccacacctccgtgctcggctcgcccacggcatgggacatcctttcctccgcacaaagtacccgaaaaacgccccttaaaacaaataaaaggtaatttaacacgagaa

SEQ ID NO: 5376 - DNA, 1041 bp, Zea mays
  Zm_smallRNAprecursor_865
ggacatgcttcctccgcacaaagttcccgaaaaatgcccaaaactccccttaaaacaaataaaaggtaatttaacacgaggacggtcacccatttttactatggtttggtgttcgaaaaacaaacaaaaataaaaccaaaaaaaggaatgcaacacgaggacttcccaggaggtcacccatcctagtactactctcgcccaagcacgcttaacttcgaagttctaatgggatctggtgctttagcgctggtataatcgcatccgtcatatcttgcgtcctccttcctcttatgcccacacctccgtgctcggctcgcccacgacactgaacatgcttcctccgcacaaagtacccgaaaaatgcccaaaacgccccttaaaacaaataaaaggtaatttaacacgagaactgtcacccatttttactatggtttggtgttcgaaaaacaaacaaaaataaaaccaaaaaaaggaatgcaacgcgaggacttcccaggaggtcacccatcctagtactactctcgcccaagcacgcttaacttcggagttctgatgggatccggtgctttagtgctggtatgatcgcatccgtcatatcctgcgtcctccttcctcttatgcccgcacctaaaaaaaaaaaaatcgcccacagcactcgacatccttcctacgcacaaagtacccgaaaaacgccccttaaaacaaataaaaggtaatttaacacgagaacggtcacccatttttactatggtttggtgttcgaaaaacaaacaaaaataaaaccaaaaaaaaggaatgcaacacgaggacttcccaggaggtcacccatcctagtactactctcgcccaagcacgcttaacttcggagttctaatgggatccggtgctttagtgctgatatgatcgcatccgtcatatcctgcgtcctccttcctcttatgcccacacctccgtgctcggctcgcccacggcatgggacatcctttcctccgcacaaagtacccgaaaaacgccccttaaaacaaataaaaggtaatttaa

SEQ ID NO: 5377 - DNA, 1037 bp, Zea mays
  Zm_smallRNAprecursor_866
atgcttcctccgcacaaagttcccgaaaaatgcccaaaactccccttaaaacaaataaaaggtaatttaacacgaggacggtcacccatttttactatggtttggtgttcgaaaaacaaacaaaaataaaaccaaaaaaaggaatgcaacacgaggacttcccaggaggtcacccatcctagtactactctcgcccaagcacgcttaacttcgaagttctaatgggatctggtgctttagcgctggtataatcgcatccgtcatatcttgcgtcctccttcctcttatgcccacacctccgtgctcggctcgcccacgacactgaacatgcttcctccgcacaaagtacccgaaaaatgcccaaaacgccccttaaaacaaataaaaggtaatttaacacgagaactgtcacccatttttactatggtttggtgttcgaaaaacaaacaaaaataaaaccaaaaaaaggaatgcaacgcgaggacttcccaggaggtcacccatcctagtactactctcgcccaagcacgcttaacttcggagttctgatgggatccggtgctttagtgctggtatgatcgcatccgtcatatcctgcgtcctccttcctcttatgcccgcacctaaaaaaaaaaaaatcgcccacagcactcgacatccttcctacgcacaaagtacccgaaaaacgccccttaaaacaaataaaaggtaatttaacacgagaacggtcacccatttttactatggtttggtgttcgaaaaacaaacaaaaataaaaccaaaaaaaaggaatgcaacacgaggacttcccaggaggtcacccatcctagtactactctcgcccaagcacgcttaacttcggagttctaatgggatccggtgctttagtgctgatatgatcgcatccgtcatatcctgcgtcctccttcctcttatgcccacacctccgtgctcggctcgcccacggcatgggacatcctttcctccgcacaaagtacccgaaaaacgccccttaaaacaaataaaaggtaatttaa

SEQ ID NO: 5378 - DNA, 1047 bp, Zea mays
  Zm_smallRNAprecursor_867
cgcacaaagttcccgaaaaatgcccaaaactccccttaaaacaaataaaaggtaatttaacacgaggacggtcacccatttttactatggtttggtgttcgaaaaacaaacaaaaataaaaccaaaaaaaggaatgcaacacgaggacttcccaggaggtcacccatcctagtactactctcgcccaagcacgcttaacttcgaagttctaatgggatctggtgctttagcgctggtataatcgcatccgtcatatcttgcgtcctccttcctcttatgcccacacctccgtgctcggctcgcccacgacactgaacatgcttcctccgcacaaagtacccgaaaaatgcccaaaacgccccttaaaacaaataaaaggtaatttaacacgagaactgtcacccatttttactatggtttggtgttcgaaaaacaaacaaaaataaaaccaaaaaaaggaatgcaacgcgaggacttcccaggaggtcacccatcctagtactactctcgcccaagcacgcttaacttcggagttctgatgggatccggtgctttagtgctggtatgatcgcatccgtcatatcctgcgtcctccttcctcttatgcccgcacctaaaaaaaaaaaaatcgcccacagcactcgacatccttcctacgcacaaagtacccgaaaaacgccccttaaaacaaataaaaggtaatttaacacgagaacggtcacccatttttactatggtttggtgttcgaaaaacaaacaaaaataaaaccaaaaaaaaggaatgcaacacgaggacttcccaggaggtcacccatcctagtactactctcgcccaagcacgcttaacttcggagttctaatgggatccggtgctttagtgctgatatgatcgcatccgtcatatcctgcgtcctccttcctcttatgcccacacctccgtgctcggctcgcccacggcatgggacatcctttcctccgcacaaagtacccgaaaaacgccccttaaaacaaataaaaggtaatttaacacgagaacggtcacccatt

SEQ ID NO: 5379 - DNA, 1129 bp, Zea mays
  Zm_smallRNAprecursor_868
ccgtgctcggctcgcccacgacactgaacatgcttcctccgcacaaagtacccgaaaaatgcccaaaacgccccttaaaacaaataaaaggtaatttaacacgagaactgtcacccatttttactatggtttggtgttcgaaaaacaaacaaaaataaaaccaaaaaaaggaatgcaacgcgaggacttcccaggaggtcacccatcctagtactactctcgcccaagcacgcttaacttcggagttctgatgggatccggtgctttagtgctggtatgatcgcatccgtcatatcctgcgtcctccttcctcttatgcccgcacctaaaaaaaaaaaaatcgcccacagcactcgacatccttcctacgcacaaagtacccgaaaaacgccccttaaaacaaataaaaggtaatttaacacgagaacggtcacccatttttactatggtttggtgttcgaaaaacaaacaaaaataaaaccaaaaaaaaggaatgcaacacgaggacttcccaggaggtcacccatcctagtactactctcgcccaagcacgcttaacttcggagttctaatgggatccggtgctttagtgctgatatgatcgcatccgtcatatcctgcgtcctccttcctcttatgcccacacctccgtgctcggctcgcccacggcatgggacatcctttcctccgcacaaagtacccgaaaaacgccccttaaaacaaataaaaggtaatttaacacgagaacggtcacccatttttactatggttggtgttcgaaaaacaaacaaaaataaaaccaaaaaaaaggaatgcaacccgaggacttcctaggaggtcaccccccctatcactactctcgcccaggcacgcttaagttcggagttctgatgggatccggtgctttagtgctggtatgatcgcatccatcatatcctgcgtcctccttcctcttatgcccacacctccgtgctcggctcgcccacggcactggacatccttcctccgcataaagtacccgaaaaacgccccttaaaacaaataaaaggtaatttaacacgagaacggtcacccatttttactatggtttggtgttcgaaaaacaaacaaaaataaaaccaaaaaaaag

SEQ ID NO: 5380 - DNA, 1058 bp, Zea mays
  Zm_smallRNAprecursor_869
tgctcggctcgcccacgacactgaacatgcttcctccgcacaaagtacccgaaaaatgcccaaaacgccccttaaaacaaataaaaggtaatttaacacgagaactgtcacccatttttactatggtttggtgttcgaaaaacaaacaaaaataaaaccaaaaaaaggaatgcaacgcgaggacttcccaggaggtcacccatcctagtactactctcgcccaagcacgcttaacttcggagttctgatgggatccggtgctttagtgctggtatgatcgcatccgtcatatcctgcgtcctccttcctcttatgcccgcacctaaaaaaaaaaaaatcgcccacagcactcgacatccttcctacgcacaaagtacccgaaaaacgccccttaaaacaaataaaaggtaatttaacacgagaacggtcacccatttttactatggtttggtgttcgaaaaacaaacaaaaataaaaccaaaaaaaaggaatgcaacacgaggacttcccaggaggtcacccatcctagtactactctcgcccaagcacgcttaacttcggagttctaatgggatccggtgctttagtgctgatatgatcgcatccgtcatatcctgcgtcctccttcctcttatgcccacacctccgtgctcggctcgcccacggcatgggacatcctttcctccgcacaaagtacccgaaaaacgccccttaaaacaaataaaaggtaatttaacacgagaacggtcacccatttttactatggttggtgttcgaaaaacaaacaaaaataaaaccaaaaaaaaggaatgcaacccgaggacttcctaggaggtcaccccccctatcactactctcgcccaggcacgcttaagttcggagttctgatgggatccggtgctttagtgctggtatgatcgcatccatcatatcctgcgtcctccttcctcttatgcccacacctccgtgctcggctcgcccacggcactggacatccttcctccgcataaagtacccgaaaaacgccccttaaaacaaataaaaggtaatttaacacg

SEQ ID NO: 5381 - DNA, 1042 bp, Zea mays
  Zm_smallRNAprecursor_870
gacactgaacatgcttcctccgcacaaagtacccgaaaaatgcccaaaacgccccttaaaacaaataaaaggtaatttaacacgagaactgtcacccatttttactatggtttggtgttcgaaaaacaaacaaaaataaaaccaaaaaaaggaatgcaacgcgaggacttcccaggaggtcacccatcctagtactactctcgcccaagcacgcttaacttcggagttctgatgggatccggtgctttagtgctggtatgatcgcatccgtcatatcctgcgtcctccttcctcttatgcccgcacctaaaaaaaaaaaaatcgcccacagcactcgacatccttcctacgcacaaagtacccgaaaaacgccccttaaaacaaataaaaggtaatttaacacgagaacggtcacccatttttactatggtttggtgttcgaaaaacaaacaaaaataaaaccaaaaaaaaggaatgcaacacgaggacttcccaggaggtcacccatcctagtactactctcgcccaagcacgcttaacttcggagttctaatgggatccggtgctttagtgctgatatgatcgcatccgtcatatcctgcgtcctccttcctcttatgcccacacctccgtgctcggctcgcccacggcatgggacatcctttcctccgcacaaagtacccgaaaaacgccccttaaaacaaataaaaggtaatttaacacgagaacggtcacccatttttactatggttggtgttcgaaaaacaaacaaaaataaaaccaaaaaaaaggaatgcaacccgaggacttcctaggaggtcaccccccctatcactactctcgcccaggcacgcttaagttcggagttctgatgggatccggtgctttagtgctggtatgatcgcatccatcatatcctgcgtcctccttcctcttatgcccacacctccgtgctcggctcgcccacggcactggacatccttcctccgcataaagtacccgaaaaacgccccttaaaacaaataaaaggtaatttaacacg

SEQ ID NO: 5382 - DNA, 1192 bp, Zea mays
  Zm_smallRNAprecursor_871
ggtttggtgttcgaaaaacaaacaaaaataaaaccaaaaaaaaggaatgcaacacgaggacttcccaggaggtcacccatcctagtactactctcgcccaagcacgcttaacttcggagttctaatgggatccggtgctttagtgctgatatgatcgcatccgtcatatcctgcgtcctccttcctcttatgcccacacctccgtgctcggctcgcccacggcatgggacatcctttcctccgcacaaagtacccgaaaaacgccccttaaaacaaataaaaggtaatttaacacgagaacggtcacccatttttactatggttggtgttcgaaaaacaaacaaaaataaaaccaaaaaaaaggaatgcaacccgaggacttcctaggaggtcaccccccctatcactactctcgcccaggcacgcttaagttcggagttctgatgggatccggtgctttagtgctggtatgatcgcatccatcatatcctgcgtcctccttcctcttatgcccacacctccgtgctcggctcgcccacggcactggacatccttcctccgcataaagtacccgaaaaacgccccttaaaacaaataaaaggtaatttaacacgagaacggtcacccatttttactatggtttggtgttcgaaaaacaaacaaaaataaaaccaaaaaaaaggaatgcaacacgaggacttcccaggaggtcacccatcctagtactactctcgcccaagcacgcttaacttcggagttctgatgggatccggtgctttagtgctggtatgatcgcatccgtcatatcctgcgtcctccttcctcttatgcccacacctccgtgctcggctcgcccacggcactggacatccttcctccgcacaaagtacccgaaaaacgccccttaaaacaaataaaaggtaatttaacacgagaacggtcacccatttttactatggtttggtgttcgaaaaacaaacaaaaataaaaccaaaaaaaaatgaatgcaacacgaggacttctcaggaggtcacccatcctagtactactctcgcccaagcacgcttaacttcggagttctgatggaatccgatgctttagtgctggtatgatcgcatccgtcatatcctgcgtcctccttcctcttatgcccacacctccgtgctcggttcgcccacggcactggacatcc

SEQ ID NO: 5383 - DNA, 1129 bp, Zea mays
  Zm_smallRNAprecursor_872
gcccacacctccgtgctcggctcgcccacggcatgggacatcctttcctccgcacaaagtacccgaaaaacgccccttaaaacaaataaaaggtaatttaacacgagaacggtcacccatttttactatggttggtgttcgaaaaacaaacaaaaataaaaccaaaaaaaaggaatgcaacccgaggacttcctaggaggtcaccccccctatcactactctcgcccaggcacgcttaagttcggagttctgatgggatccggtgctttagtgctggtatgatcgcatccatcatatcctgcgtcctccttcctcttatgcccacacctccgtgctcggctcgcccacggcactggacatccttcctccgcataaagtacccgaaaaacgccccttaaaacaaataaaaggtaatttaacacgagaacggtcacccatttttactatggtttggtgttcgaaaaacaaacaaaaataaaaccaaaaaaaaggaatgcaacacgaggacttcccaggaggtcacccatcctagtactactctcgcccaagcacgcttaacttcggagttctgatgggatccggtgctttagtgctggtatgatcgcatccgtcatatcctgcgtcctccttcctcttatgcccacacctccgtgctcggctcgcccacggcactggacatccttcctccgcacaaagtacccgaaaaacgccccttaaaacaaataaaaggtaatttaacacgagaacggtcacccatttttactatggtttggtgttcgaaaaacaaacaaaaataaaaccaaaaaaaaatgaatgcaacacgaggacttctcaggaggtcacccatcctagtactactctcgcccaagcacgcttaacttcggagttctgatggaatccgatgctttagtgctggtatgatcgcatccgtcatatcctgcgtcctccttcctcttatgcccacacctccgtgctcggttcgcccacggcactggacatccttcctccgcacaaagtacccgaaaaacgccccttaaaacaaataaaaggtaatttaacacgagaacggtcacccatttttactatggtttggtgttcgaaaaacaaacaaaaataaaaccaaaaaaaa

SEQ ID NO: 5384 - DNA, 1054 bp, Zea mays
  Zm_smallRNAprecursor_873
gctcggctcgcccacggcatgggacatcctttcctccgcacaaagtacccgaaaaacgccccttaaaacaaataaaaggtaatttaacacgagaacggtcacccatttttactatggttggtgttcgaaaaacaaacaaaaataaaaccaaaaaaaaggaatgcaacccgaggacttcctaggaggtcaccccccctatcactactctcgcccaggcacgcttaagttcggagttctgatgggatccggtgctttagtgctggtatgatcgcatccatcatatcctgcgtcctccttcctcttatgcccacacctccgtgctcggctcgcccacggcactggacatccttcctccgcataaagtacccgaaaaacgccccttaaaacaaataaaaggtaatttaacacgagaacggtcacccatttttactatggtttggtgttcgaaaaacaaacaaaaataaaaccaaaaaaaaggaatgcaacacgaggacttcccaggaggtcacccatcctagtactactctcgcccaagcacgcttaacttcggagttctgatgggatccggtgctttagtgctggtatgatcgcatccgtcatatcctgcgtcctccttcctcttatgcccacacctccgtgctcggctcgcccacggcactggacatccttcctccgcacaaagtacccgaaaaacgccccttaaaacaaataaaaggtaatttaacacgagaacggtcacccatttttactatggtttggtgttcgaaaaacaaacaaaaataaaaccaaaaaaaaatgaatgcaacacgaggacttctcaggaggtcacccatcctagtactactctcgcccaagcacgcttaacttcggagttctgatggaatccgatgctttagtgctggtatgatcgcatccgtcatatcctgcgtcctccttcctcttatgcccacacctccgtgctcggttcgcccacggcactggacatccttcctccgcacaaagtacccgaaaaacgccccttaaaacaaataaaaggtaatttaacacgagaacg

SEQ ID NO: 5385 - DNA, 1041 bp, Zea mays
  Zm_smallRNAprecursor_874
gctcgcccacggcatgggacatcctttcctccgcacaaagtacccgaaaaacgccccttaaaacaaataaaaggtaatttaacacgagaacggtcacccatttttactatggttggtgttcgaaaaacaaacaaaaataaaaccaaaaaaaaggaatgcaacccgaggacttcctaggaggtcaccccccctatcactactctcgcccaggcacgcttaagttcggagttctgatgggatccggtgctttagtgctggtatgatcgcatccatcatatcctgcgtcctccttcctcttatgcccacacctccgtgctcggctcgcccacggcactggacatccttcctccgcataaagtacccgaaaaacgccccttaaaacaaataaaaggtaatttaacacgagaacggtcacccatttttactatggtttggtgttcgaaaaacaaacaaaaataaaaccaaaaaaaaggaatgcaacacgaggacttcccaggaggtcacccatcctagtactactctcgcccaagcacgcttaacttcggagttctgatgggatccggtgctttagtgctggtatgatcgcatccgtcatatcctgcgtcctccttcctcttatgcccacacctccgtgctcggctcgcccacggcactggacatccttcctccgcacaaagtacccgaaaaacgccccttaaaacaaataaaaggtaatttaacacgagaacggtcacccatttttactatggtttggtgttcgaaaaacaaacaaaaataaaaccaaaaaaaaatgaatgcaacacgaggacttctcaggaggtcacccatcctagtactactctcgcccaagcacgcttaacttcggagttctgatggaatccgatgctttagtgctggtatgatcgcatccgtcatatcctgcgtcctccttcctcttatgcccacacctccgtgctcggttcgcccacggcactggacatccttcctccgcacaaagtacccgaaaaacgccccttaaaacaaataaaaggtaatttaaca

SEQ ID NO: 5386 - DNA, 1037 bp, Zea mays
  Zm_smallRNAprecursor_875
gcccacggcatgggacatcctttcctccgcacaaagtacccgaaaaacgccccttaaaacaaataaaaggtaatttaacacgagaacggtcacccatttttactatggttggtgttcgaaaaacaaacaaaaataaaaccaaaaaaaaggaatgcaacccgaggacttcctaggaggtcaccccccctatcactactctcgcccaggcacgcttaagttcggagttctgatgggatccggtgctttagtgctggtatgatcgcatccatcatatcctgcgtcctccttcctcttatgcccacacctccgtgctcggctcgcccacggcactggacatccttcctccgcataaagtacccgaaaaacgccccttaaaacaaataaaaggtaatttaacacgagaacggtcacccatttttactatggtttggtgttcgaaaaacaaacaaaaataaaaccaaaaaaaaggaatgcaacacgaggacttcccaggaggtcacccatcctagtactactctcgcccaagcacgcttaacttcggagttctgatgggatccggtgctttagtgctggtatgatcgcatccgtcatatcctgcgtcctccttcctcttatgcccacacctccgtgctcggctcgcccacggcactggacatccttcctccgcacaaagtacccgaaaaacgccccttaaaacaaataaaaggtaatttaacacgagaacggtcacccatttttactatggtttggtgttcgaaaaacaaacaaaaataaaaccaaaaaaaaatgaatgcaacacgaggacttctcaggaggtcacccatcctagtactactctcgcccaagcacgcttaacttcggagttctgatggaatccgatgctttagtgctggtatgatcgcatccgtcatatcctgcgtcctccttcctcttatgcccacacctccgtgctcggttcgcccacggcactggacatccttcctccgcacaaagtacccgaaaaacgccccttaaaacaaataaaaggtaatttaaca

SEQ ID NO: 5387 - DNA, 1047 bp, Zea mays
  Zm_smallRNAprecursor_876
tgggacatcctttcctccgcacaaagtacccgaaaaacgccccttaaaacaaataaaaggtaatttaacacgagaacggtcacccatttttactatggttggtgttcgaaaaacaaacaaaaataaaaccaaaaaaaaggaatgcaacccgaggacttcctaggaggtcaccccccctatcactactctcgcccaggcacgcttaagttcggagttctgatgggatccggtgctttagtgctggtatgatcgcatccatcatatcctgcgtcctccttcctcttatgcccacacctccgtgctcggctcgcccacggcactggacatccttcctccgcataaagtacccgaaaaacgccccttaaaacaaataaaaggtaatttaacacgagaacggtcacccatttttactatggtttggtgttcgaaaaacaaacaaaaataaaaccaaaaaaaaggaatgcaacacgaggacttcccaggaggtcacccatcctagtactactctcgcccaagcacgcttaacttcggagttctgatgggatccggtgctttagtgctggtatgatcgcatccgtcatatcctgcgtcctccttcctcttatgcccacacctccgtgctcggctcgcccacggcactggacatccttcctccgcacaaagtacccgaaaaacgccccttaaaacaaataaaaggtaatttaacacgagaacggtcacccatttttactatggtttggtgttcgaaaaacaaacaaaaataaaaccaaaaaaaaatgaatgcaacacgaggacttctcaggaggtcacccatcctagtactactctcgcccaagcacgcttaacttcggagttctgatggaatccgatgctttagtgctggtatgatcgcatccgtcatatcctgcgtcctccttcctcttatgcccacacctccgtgctcggttcgcccacggcactggacatccttcctccgcacaaagtacccgaaaaacgccccttaaaacaaataaaaggtaatttaacacgagaacggtcacccatttt

SEQ ID NO: 5388 - DNA, 1193 bp, Zea mays
  Zm_smallRNAprecursor_877
gtttggtgttcgaaaaacaaacaaaaataaaaccaaaaaaaaggaatgcaacacgaggacttcccaggaggtcacccatcctagtactactctcgcccaagcacgcttaacttcggagttctgatgggatccggtgctttagtgctggtatgatcgcatccgtcatatcctgcgtcctccttcctcttatgcccacacctccgtgctcggctcgcccacggcactggacatccttcctccgcacaaagtacccgaaaaacgccccttaaaacaaataaaaggtaatttaacacgagaacggtcacccatttttactatggtttggtgttcgaaaaacaaacaaaaataaaaccaaaaaaaaatgaatgcaacacgaggacttctcaggaggtcacccatcctagtactactctcgcccaagcacgcttaacttcggagttctgatggaatccgatgctttagtgctggtatgatcgcatccgtcatatcctgcgtcctccttcctcttatgcccacacctccgtgctcggttcgcccacggcactggacatccttcctccgcacaaagtacccgaaaaacgccccttaaaacaaataaaaggtaatttaacacgagaacggtcacccatttttactatggtttggtgttcgaaaaacaaacaaaaataaaaccaaaaaaaaaggaatgcaacacgaggacttcccaggaggtcacccatcctagtactactttcgcccaacctcgcttaacttcggagttctgatgggatccggtgctttagtgctgggtatgatcgcatccgtcatatcctgcgtcctccttcctcttatgcccacacctccgtgctcggctcgcccacggcactggacatccttcctccgcacaaagtacccgaaaaacgccccttaaaacaaataaaaggtaatttaacacgagaacggtcacccatttttactatggtttggtgttcgaaaaacaaacaaaaataaaaccaaaaaaaaaggaatgcaacacgaggacttcccaggaggtcacccatcctagtactactctcgcccaagcacgcttaacttcggagttctgatgggatccggtgctttagtgctggtatgatcgcatccgtcatatcctgcgtcctccttcctcttatgcccacacctccgtgctcggctcgcccacggcactggacatc

SEQ ID NO: 5389 - DNA, 1130 bp, Zea mays
  Zm_smallRNAprecursor_878
ccacacctccgtgctcggctcgcccacggcactggacatccttcctccgcacaaagtacccgaaaaacgccccttaaaacaaataaaaggtaatttaacacgagaacggtcacccatttttactatggtttggtgttcgaaaaacaaacaaaaataaaaccaaaaaaaaatgaatgcaacacgaggacttctcaggaggtcacccatcctagtactactctcgcccaagcacgcttaacttcggagttctgatggaatccgatgctttagtgctggtatgatcgcatccgtcatatcctgcgtcctccttcctcttatgcccacacctccgtgctcggttcgcccacggcactggacatccttcctccgcacaaagtacccgaaaaacgccccttaaaacaaataaaaggtaatttaacacgagaacggtcacccatttttactatggtttggtgttcgaaaaacaaacaaaaataaaaccaaaaaaaaaggaatgcaacacgaggacttcccaggaggtcacccatcctagtactactttcgcccaacctcgcttaacttcggagttctgatgggatccggtgctttagtgctgggtatgatcgcatccgtcatatcctgcgtcctccttcctcttatgcccacacctccgtgctcggctcgcccacggcactggacatccttcctccgcacaaagtacccgaaaaacgccccttaaaacaaataaaaggtaatttaacacgagaacggtcacccatttttactatggtttggtgttcgaaaaacaaacaaaaataaaaccaaaaaaaaaggaatgcaacacgaggacttcccaggaggtcacccatcctagtactactctcgcccaagcacgcttaacttcggagttctgatgggatccggtgctttagtgctggtatgatcgcatccgtcatatcctgcgtcctccttcctcttatgcccacacctccgtgctcggctcgcccacggcactggacatccttcctccgcacaaagtacccgaaaaacgccccttaaaacaaataaaaggtaatttaacacgagaacggtcacccatttttactatggtttggtgttcgaaaaacaaacaaaaataaaacaaaaaaaag

SEQ ID NO: 5390 - DNA, 1054 bp, Zea mays
  Zm_smallRNAprecursor_879
tcggctcgcccacggcactggacatccttcctccgcacaaagtacccgaaaaacgccccttaaaacaaataaaaggtaatttaacacgagaacggtcacccatttttactatggtttggtgttcgaaaaacaaacaaaaataaaaccaaaaaaaaatgaatgcaacacgaggacttctcaggaggtcacccatcctagtactactctcgcccaagcacgcttaacttcggagttctgatggaatccgatgctttagtgctggtatgatcgcatccgtcatatcctgcgtcctccttcctcttatgcccacacctccgtgctcggttcgcccacggcactggacatccttcctccgcacaaagtacccgaaaaacgccccttaaaacaaataaaaggtaatttaacacgagaacggtcacccatttttactatggtttggtgttcgaaaaacaaacaaaaataaaaccaaaaaaaaaggaatgcaacacgaggacttcccaggaggtcacccatcctagtactactttcgcccaacctcgcttaacttcggagttctgatgggatccggtgctttagtgctgggtatgatcgcatccgtcatatcctgcgtcctccttcctcttatgcccacacctccgtgctcggctcgcccacggcactggacatccttcctccgcacaaagtacccgaaaaacgccccttaaaacaaataaaaggtaatttaacacgagaacggtcacccatttttactatggtttggtgttcgaaaaacaaacaaaaataaaaccaaaaaaaaaggaatgcaacacgaggacttcccaggaggtcacccatcctagtactactctcgcccaagcacgcttaacttcggagttctgatgggatccggtgctttagtgctggtatgatcgcatccgtcatatcctgcgtcctccttcctcttatgcccacacctccgtgctcggctcgcccacggcactggacatccttcctccgcacaaagtacccgaaaaacgccccttaaaacaaataaaaggtaatttaacacgagaac

SEQ ID NO: 5391 - DNA, 1041 bp, Zea mays
  Zm_smallRNAprecursor_880
tcgcccacggcactggacatccttcctccgcacaaagtacccgaaaaacgccccttaaaacaaataaaaggtaatttaacacgagaacggtcacccatttttactatggtttggtgttcgaaaaacaaacaaaaataaaaccaaaaaaaaatgaatgcaacacgaggacttctcaggaggtcacccatcctagtactactctcgcccaagcacgcttaacttcggagttctgatggaatccgatgctttagtgctggtatgatcgcatccgtcatatcctgcgtcctccttcctcttatgcccacacctccgtgctcggttcgcccacggcactggacatccttcctccgcacaaagtacccgaaaaacgccccttaaaacaaataaaaggtaatttaacacgagaacggtcacccatttttactatggtttggtgttcgaaaaacaaacaaaaataaaaccaaaaaaaaaggaatgcaacacgaggacttcccaggaggtcacccatcctagtactactttcgcccaacctcgcttaacttcggagttctgatgggatccggtgctttagtgctgggtatgatcgcatccgtcatatcctgcgtcctccttcctcttatgcccacacctccgtgctcggctcgcccacggcactggacatccttcctccgcacaaagtacccgaaaaacgccccttaaaacaaataaaaggtaatttaacacgagaacggtcacccatttttactatggtttggtgttcgaaaaacaaacaaaaataaaaccaaaaaaaaaggaatgcaacacgaggacttcccaggaggtcacccatcctagtactactctcgcccaagcacgcttaacttcggagttctgatgggatccggtgctttagtgctggtatgatcgcatccgtcatatcctgcgtcctccttcctcttatgcccacacctccgtgctcggctcgcccacggcactggacatccttcctccgcacaaagtacccgaaaaacgccccttaaaacaaataaaaggtaatttaac

SEQ ID NO: 5392 - DNA, 1193 bp, Zea mays
  Zm_smallRNAprecursor_881
ttggtgttcgaaaaacaaacaaaaataaaaccaaaaaaaaatgaatgcaacacgaggacttctcaggaggtcacccatcctagtactactctcgcccaagcacgcttaacttcggagttctgatggaatccgatgctttagtgctggtatgatcgcatccgtcatatcctgcgtcctccttcctcttatgcccacacctccgtgctcggttcgcccacggcactggacatccttcctccgcacaaagtacccgaaaaacgccccttaaaacaaataaaaggtaatttaacacgagaacggtcacccatttttactatggtttggtgttcgaaaaacaaacaaaaataaaaccaaaaaaaaaggaatgcaacacgaggacttcccaggaggtcacccatcctagtactactttcgcccaacctcgcttaacttcggagttctgatgggatccggtgctttagtgctgggtatgatcgcatccgtcatatcctgcgtcctccttcctcttatgcccacacctccgtgctcggctcgcccacggcactggacatccttcctccgcacaaagtacccgaaaaacgccccttaaaacaaataaaaggtaatttaacacgagaacggtcacccatttttactatggtttggtgttcgaaaaacaaacaaaaataaaaccaaaaaaaaaggaatgcaacacgaggacttcccaggaggtcacccatcctagtactactctcgcccaagcacgcttaacttcggagttctgatgggatccggtgctttagtgctggtatgatcgcatccgtcatatcctgcgtcctccttcctcttatgcccacacctccgtgctcggctcgcccacggcactggacatccttcctccgcacaaagtacccgaaaaacgccccttaaaacaaataaaaggtaatttaacacgagaacggtcacccatttttactatggtttggtgttcgaaaaacaaacaaaaataaaacaaaaaaaaggaatgcaacacgaggacttcccaggaggtcacccatcctagtactactctcgcccaagcacgcttaacttcggagttctgatgggatccgatgctttagtgctggtatgatcgcatccgtcatatcctgcgtcctccttcctcttatgcccacacctccgtgctcggctcgcccacggcactggacatccat

SEQ ID NO: 5393 - DNA, 1129 bp, Zea mays
  Zm_smallRNAprecursor_882
cacacctccgtgctcggttcgcccacggcactggacatccttcctccgcacaaagtacccgaaaaacgccccttaaaacaaataaaaggtaatttaacacgagaacggtcacccatttttactatggtttggtgttcgaaaaacaaacaaaaataaaaccaaaaaaaaaggaatgcaacacgaggacttcccaggaggtcacccatcctagtactactttcgcccaacctcgcttaacttcggagttctgatgggatccggtgctttagtgctgggtatgatcgcatccgtcatatcctgcgtcctccttcctcttatgcccacacctccgtgctcggctcgcccacggcactggacatccttcctccgcacaaagtacccgaaaaacgccccttaaaacaaataaaaggtaatttaacacgagaacggtcacccatttttactatggtttggtgttcgaaaaacaaacaaaaataaaaccaaaaaaaaaggaatgcaacacgaggacttcccaggaggtcacccatcctagtactactctcgcccaagcacgcttaacttcggagttctgatgggatccggtgctttagtgctggtatgatcgcatccgtcatatcctgcgtcctccttcctcttatgcccacacctccgtgctcggctcgcccacggcactggacatccttcctccgcacaaagtacccgaaaaacgccccttaaaacaaataaaaggtaatttaacacgagaacggtcacccatttttactatggtttggtgttcgaaaaacaaacaaaaataaaacaaaaaaaaggaatgcaacacgaggacttcccaggaggtcacccatcctagtactactctcgcccaagcacgcttaacttcggagttctgatgggatccgatgctttagtgctggtatgatcgcatccgtcatatcctgcgtcctccttcctcttatgcccacacctccgtgctcggctcgcccacggcactggacatccatcctctgcacaaagtacccgaaaaacgccccttaaaacaaataaaaggtaatttaacacgagaacgatcacccatttttactatggtttggtgttcgaaaaacaaacaaaaaacaaaaccaaaaaaaaa

SEQ ID NO: 5394 - DNA, 1054 bp, Zea mays
  Zm_smallRNAprecursor_883
cggttcgcccacggcactggacatccttcctccgcacaaagtacccgaaaaacgccccttaaaacaaataaaaggtaatttaacacgagaacggtcacccatttttactatggtttggtgttcgaaaaacaaacaaaaataaaaccaaaaaaaaaggaatgcaacacgaggacttcccaggaggtcacccatcctagtactactttcgcccaacctcgcttaacttcggagttctgatgggatccggtgctttagtgctgggtatgatcgcatccgtcatatcctgcgtcctccttcctcttatgcccacacctccgtgctcggctcgcccacggcactggacatccttcctccgcacaaagtacccgaaaaacgccccttaaaacaaataaaaggtaatttaacacgagaacggtcacccatttttactatggtttggtgttcgaaaaacaaacaaaaataaaaccaaaaaaaaaggaatgcaacacgaggacttcccaggaggtcacccatcctagtactactctcgcccaagcacgcttaacttcggagttctgatgggatccggtgctttagtgctggtatgatcgcatccgtcatatcctgcgtcctccttcctcttatgcccacacctccgtgctcggctcgcccacggcactggacatccttcctccgcacaaagtacccgaaaaacgccccttaaaacaaataaaaggtaatttaacacgagaacggtcacccatttttactatggtttggtgttcgaaaaacaaacaaaaataaaacaaaaaaaaggaatgcaacacgaggacttcccaggaggtcacccatcctagtactactctcgcccaagcacgcttaacttcggagttctgatgggatccgatgctttagtgctggtatgatcgcatccgtcatatcctgcgtcctccttcctcttatgcccacacctccgtgctcggctcgcccacggcactggacatccatcctctgcacaaagtacccgaaaaacgccccttaaaacaaataaaaggtaatttaacacgagaacgat

SEQ ID NO: 5395 - DNA, 1041 bp, Zea mays
  Zm_smallRNAprecursor_884
cgcccacggcactggacatccttcctccgcacaaagtacccgaaaaacgccccttaaaacaaataaaaggtaatttaacacgagaacggtcacccatttttactatggtttggtgttcgaaaaacaaacaaaaataaaaccaaaaaaaaaggaatgcaacacgaggacttcccaggaggtcacccatcctagtactactttcgcccaacctcgcttaacttcggagttctgatgggatccggtgctttagtgctgggtatgatcgcatccgtcatatcctgcgtcctccttcctcttatgcccacacctccgtgctcggctcgcccacggcactggacatccttcctccgcacaaagtacccgaaaaacgccccttaaaacaaataaaaggtaatttaacacgagaacggtcacccatttttactatggtttggtgttcgaaaaacaaacaaaaataaaaccaaaaaaaaaggaatgcaacacgaggacttcccaggaggtcacccatcctagtactactctcgcccaagcacgcttaacttcggagttctgatgggatccggtgctttagtgctggtatgatcgcatccgtcatatcctgcgtcctccttcctcttatgcccacacctccgtgctcggctcgcccacggcactggacatccttcctccgcacaaagtacccgaaaaacgccccttaaaacaaataaaaggtaatttaacacgagaacggtcacccatttttactatggtttggtgttcgaaaaacaaacaaaaataaaacaaaaaaaaggaatgcaacacgaggacttcccaggaggtcacccatcctagtactactctcgcccaagcacgcttaacttcggagttctgatgggatccgatgctttagtgctggtatgatcgcatccgtcatatcctgcgtcctccttcctcttatgcccacacctccgtgctcggctcgcccacggcactggacatccatcctctgcacaaagtacccgaaaaacgccccttaaaacaaataaaaggtaatttaacacg

SEQ ID NO: 5396 - DNA, 1037 bp, Zea mays
  Zm_smallRNAprecursor_885
cacggcactggacatccttcctccgcacaaagtacccgaaaaacgccccttaaaacaaataaaaggtaatttaacacgagaacggtcacccatttttactatggtttggtgttcgaaaaacaaacaaaaataaaaccaaaaaaaaaggaatgcaacacgaggacttcccaggaggtcacccatcctagtactactttcgcccaacctcgcttaacttcggagttctgatgggatccggtgctttagtgctgggtatgatcgcatccgtcatatcctgcgtcctccttcctcttatgcccacacctccgtgctcggctcgcccacggcactggacatccttcctccgcacaaagtacccgaaaaacgccccttaaaacaaataaaaggtaatttaacacgagaacggtcacccatttttactatggtttggtgttcgaaaaacaaacaaaaataaaaccaaaaaaaaaggaatgcaacacgaggacttcccaggaggtcacccatcctagtactactctcgcccaagcacgcttaacttcggagttctgatgggatccggtgctttagtgctggtatgatcgcatccgtcatatcctgcgtcctccttcctcttatgcccacacctccgtgctcggctcgcccacggcactggacatccttcctccgcacaaagtacccgaaaaacgccccttaaaacaaataaaaggtaatttaacacgagaacggtcacccatttttactatggtttggtgttcgaaaaacaaacaaaaataaaacaaaaaaaaggaatgcaacacgaggacttcccaggaggtcacccatcctagtactactctcgcccaagcacgcttaacttcggagttctgatgggatccgatgctttagtgctggtatgatcgcatccgtcatatcctgcgtcctccttcctcttatgcccacacctccgtgctcggctcgcccacggcactggacatccatcctctgcacaaagtacccgaaaaacgccccttaaaacaaataaaaggtaatttaacacg

SEQ ID NO: 5397 - DNA, 1047 bp, Zea mays
  Zm_smallRNAprecursor_886
gacatccttcctccgcacaaagtacccgaaaaacgccccttaaaacaaataaaaggtaatttaacacgagaacggtcacccatttttactatggtttggtgttcgaaaaacaaacaaaaataaaaccaaaaaaaaaggaatgcaacacgaggacttcccaggaggtcacccatcctagtactactttcgcccaacctcgcttaacttcggagttctgatgggatccggtgctttagtgctgggtatgatcgcatccgtcatatcctgcgtcctccttcctcttatgcccacacctccgtgctcggctcgcccacggcactggacatccttcctccgcacaaagtacccgaaaaacgccccttaaaacaaataaaaggtaatttaacacgagaacggtcacccatttttactatggtttggtgttcgaaaaacaaacaaaaataaaaccaaaaaaaaaggaatgcaacacgaggacttcccaggaggtcacccatcctagtactactctcgcccaagcacgcttaacttcggagttctgatgggatccggtgctttagtgctggtatgatcgcatccgtcatatcctgcgtcctccttcctcttatgcccacacctccgtgctcggctcgcccacggcactggacatccttcctccgcacaaagtacccgaaaaacgccccttaaaacaaataaaaggtaatttaacacgagaacggtcacccatttttactatggtttggtgttcgaaaaacaaacaaaaataaaacaaaaaaaaggaatgcaacacgaggacttcccaggaggtcacccatcctagtactactctcgcccaagcacgcttaacttcggagttctgatgggatccgatgctttagtgctggtatgatcgcatccgtcatatcctgcgtcctccttcctcttatgcccacacctccgtgctcggctcgcccacggcactggacatccatcctctgcacaaagtacccgaaaaacgccccttaaaacaaataaaaggtaatttaacacgagaacgatcacccattttta

SEQ ID NO: 5398 - DNA, 1191 bp, Zea mays
  Zm_smallRNAprecursor_887
ttggtgttcgaaaaacaaacaaaaataaaaccaaaaaaaaaggaatgcaacacgaggacttcccaggaggtcacccatcctagtactactttcgcccaacctcgcttaacttcggagttctgatgggatccggtgctttagtgctgggtatgatcgcatccgtcatatcctgcgtcctccttcctcttatgcccacacctccgtgctcggctcgcccacggcactggacatccttcctccgcacaaagtacccgaaaaacgccccttaaaacaaataaaaggtaatttaacacgagaacggtcacccatttttactatggtttggtgttcgaaaaacaaacaaaaataaaaccaaaaaaaaaggaatgcaacacgaggacttcccaggaggtcacccatcctagtactactctcgcccaagcacgcttaacttcggagttctgatgggatccggtgctttagtgctggtatgatcgcatccgtcatatcctgcgtcctccttcctcttatgcccacacctccgtgctcggctcgcccacggcactggacatccttcctccgcacaaagtacccgaaaaacgccccttaaaacaaataaaaggtaatttaacacgagaacggtcacccatttttactatggtttggtgttcgaaaaacaaacaaaaataaaacaaaaaaaaggaatgcaacacgaggacttcccaggaggtcacccatcctagtactactctcgcccaagcacgcttaacttcggagttctgatgggatccgatgctttagtgctggtatgatcgcatccgtcatatcctgcgtcctccttcctcttatgcccacacctccgtgctcggctcgcccacggcactggacatccatcctctgcacaaagtacccgaaaaacgccccttaaaacaaataaaaggtaatttaacacgagaacgatcacccatttttactatggtttggtgttcgaaaaacaaacaaaaaacaaaaccaaaaaaaaaggaatgcaacacgaggacttcccaggaggtcacccatcctagtactactctcgcccaagcacgcttatcttcggagttctgatgggatccggtgctttagtgctggtatgatcacatccgtcatatcctgcgtcctccttcctcttatgcccacacctccgtgctcggctcgcccacggcactggacatc

SEQ ID NO: 5399 - DNA, 1129 bp, Zea mays
  Zm_smallRNAprecursor_888
gcccacacctccgtgctcggctcgcccacggcactggacatccttcctccgcacaaagtacccgaaaaacgccccttaaaacaaataaaaggtaatttaacacgagaacggtcacccatttttactatggtttggtgttcgaaaaacaaacaaaaataaaaccaaaaaaaaaggaatgcaacacgaggacttcccaggaggtcacccatcctagtactactctcgcccaagcacgcttaacttcggagttctgatgggatccggtgctttagtgctggtatgatcgcatccgtcatatcctgcgtcctccttcctcttatgcccacacctccgtgctcggctcgcccacggcactggacatccttcctccgcacaaagtacccgaaaaacgccccttaaaacaaataaaaggtaatttaacacgagaacggtcacccatttttactatggtttggtgttcgaaaaacaaacaaaaataaaacaaaaaaaaggaatgcaacacgaggacttcccaggaggtcacccatcctagtactactctcgcccaagcacgcttaacttcggagttctgatgggatccgatgctttagtgctggtatgatcgcatccgtcatatcctgcgtcctccttcctcttatgcccacacctccgtgctcggctcgcccacggcactggacatccatcctctgcacaaagtacccgaaaaacgccccttaaaacaaataaaaggtaatttaacacgagaacgatcacccatttttactatggtttggtgttcgaaaaacaaacaaaaaacaaaaccaaaaaaaaaggaatgcaacacgaggacttcccaggaggtcacccatcctagtactactctcgcccaagcacgcttatcttcggagttctgatgggatccggtgctttagtgctggtatgatcacatccgtcatatcctgcgtcctccttcctcttatgcccacacctccgtgctcggctcgcccacggcactggacatccttcctccgcacaaagtacccgaaaaacgccccttaaaactaataaaaggtaatttaacacgagaacggtcacccatttttactatggtttggtgttcgaaaaacaaacaaaaataaaaccaaaaaaa

SEQ ID NO: 5400 - DNA, 1041 bp, Zea mays
  Zm_smallRNAprecursor_889
gctcgcccacggcactggacatccttcctccgcacaaagtacccgaaaaacgccccttaaaacaaataaaaggtaatttaacacgagaacggtcacccatttttactatggtttggtgttcgaaaaacaaacaaaaataaaaccaaaaaaaaaggaatgcaacacgaggacttcccaggaggtcacccatcctagtactactctcgcccaagcacgcttaacttcggagttctgatgggatccggtgctttagtgctggtatgatcgcatccgtcatatcctgcgtcctccttcctcttatgcccacacctccgtgctcggctcgcccacggcactggacatccttcctccgcacaaagtacccgaaaaacgccccttaaaacaaataaaaggtaatttaacacgagaacggtcacccatttttactatggtttggtgttcgaaaaacaaacaaaaataaaacaaaaaaaaggaatgcaacacgaggacttcccaggaggtcacccatcctagtactactctcgcccaagcacgcttaacttcggagttctgatgggatccgatgctttagtgctggtatgatcgcatccgtcatatcctgcgtcctccttcctcttatgcccacacctccgtgctcggctcgcccacggcactggacatccatcctctgcacaaagtacccgaaaaacgccccttaaaacaaataaaaggtaatttaacacgagaacgatcacccatttttactatggtttggtgttcgaaaaacaaacaaaaaacaaaaccaaaaaaaaaggaatgcaacacgaggacttcccaggaggtcacccatcctagtactactctcgcccaagcacgcttatcttcggagttctgatgggatccggtgctttagtgctggtatgatcacatccgtcatatcctgcgtcctccttcctcttatgcccacacctccgtgctcggctcgcccacggcactggacatccttcctccgcacaaagtacccgaaaaacgccccttaaaactaataaaaggtaatttaac

SEQ ID NO: 5401 - DNA, 1037 bp, Zea mays
  Zm_smallRNAprecursor_890
gcccacggcactggacatccttcctccgcacaaagtacccgaaaaacgccccttaaaacaaataaaaggtaatttaacacgagaacggtcacccatttttactatggtttggtgttcgaaaaacaaacaaaaataaaaccaaaaaaaaaggaatgcaacacgaggacttcccaggaggtcacccatcctagtactactctcgcccaagcacgcttaacttcggagttctgatgggatccggtgctttagtgctggtatgatcgcatccgtcatatcctgcgtcctccttcctcttatgcccacacctccgtgctcggctcgcccacggcactggacatccttcctccgcacaaagtacccgaaaaacgccccttaaaacaaataaaaggtaatttaacacgagaacggtcacccatttttactatggtttggtgttcgaaaaacaaacaaaaataaaacaaaaaaaaggaatgcaacacgaggacttcccaggaggtcacccatcctagtactactctcgcccaagcacgcttaacttcggagttctgatgggatccgatgctttagtgctggtatgatcgcatccgtcatatcctgcgtcctccttcctcttatgcccacacctccgtgctcggctcgcccacggcactggacatccatcctctgcacaaagtacccgaaaaacgccccttaaaacaaataaaaggtaatttaacacgagaacgatcacccatttttactatggtttggtgttcgaaaaacaaacaaaaaacaaaaccaaaaaaaaaggaatgcaacacgaggacttcccaggaggtcacccatcctagtactactctcgcccaagcacgcttatcttcggagttctgatgggatccggtgctttagtgctggtatgatcacatccgtcatatcctgcgtcctccttcctcttatgcccacacctccgtgctcggctcgcccacggcactggacatccttcctccgcacaaagtacccgaaaaacgccccttaaaactaataaaaggtaatttaac

SEQ ID NO: 5402 - DNA, 1194 bp, Zea mays
  Zm_smallRNAprecursor_891
ggtttggtgttcgaaaaacaaacaaaaataaaaccaaaaaaaaaggaatgcaacacgaggacttcccaggaggtcacccatcctagtactactctcgcccaagcacgcttaacttcggagttctgatgggatccggtgctttagtgctggtatgatcgcatccgtcatatcctgcgtcctccttcctcttatgcccacacctccgtgctcggctcgcccacggcactggacatccttcctccgcacaaagtacccgaaaaacgccccttaaaacaaataaaaggtaatttaacacgagaacggtcacccatttttactatggtttggtgttcgaaaaacaaacaaaaataaaacaaaaaaaaggaatgcaacacgaggacttcccaggaggtcacccatcctagtactactctcgcccaagcacgcttaacttcggagttctgatgggatccgatgctttagtgctggtatgatcgcatccgtcatatcctgcgtcctccttcctcttatgcccacacctccgtgctcggctcgcccacggcactggacatccatcctctgcacaaagtacccgaaaaacgccccttaaaacaaataaaaggtaatttaacacgagaacgatcacccatttttactatggtttggtgttcgaaaaacaaacaaaaaacaaaaccaaaaaaaaaggaatgcaacacgaggacttcccaggaggtcacccatcctagtactactctcgcccaagcacgcttatcttcggagttctgatgggatccggtgctttagtgctggtatgatcacatccgtcatatcctgcgtcctccttcctcttatgcccacacctccgtgctcggctcgcccacggcactggacatccttcctccgcacaaagtacccgaaaaacgccccttaaaactaataaaaggtaatttaacacgagaacggtcacccatttttactatggtttggtgttcgaaaaacaaacaaaaataaaaccaaaaaaaaggaatgcaacacgaggacttcctaggaggtcacccatcctagtactactctcgcccaagcacgcttaacttcggagttctgatgggatccggtgctttagtgctggtatgatcgcatccgtcatatcctgcgtcctccttcctcttatgcccacacctccgtgctcggctcgcccacggcactggacatcct

SEQ ID NO: 5403 - DNA, 1129 bp, Zea mays
  Zm_smallRNAprecursor_892
cccacacctccgtgctcggctcgcccacggcactggacatccttcctccgcacaaagtacccgaaaaacgccccttaaaacaaataaaaggtaatttaacacgagaacggtcacccatttttactatggtttggtgttcgaaaaacaaacaaaaataaaacaaaaaaaaggaatgcaacacgaggacttcccaggaggtcacccatcctagtactactctcgcccaagcacgcttaacttcggagttctgatgggatccgatgctttagtgctggtatgatcgcatccgtcatatcctgcgtcctccttcctcttatgcccacacctccgtgctcggctcgcccacggcactggacatccatcctctgcacaaagtacccgaaaaacgccccttaaaacaaataaaaggtaatttaacacgagaacgatcacccatttttactatggtttggtgttcgaaaaacaaacaaaaaacaaaaccaaaaaaaaaggaatgcaacacgaggacttcccaggaggtcacccatcctagtactactctcgcccaagcacgcttatcttcggagttctgatgggatccggtgctttagtgctggtatgatcacatccgtcatatcctgcgtcctccttcctcttatgcccacacctccgtgctcggctcgcccacggcactggacatccttcctccgcacaaagtacccgaaaaacgccccttaaaactaataaaaggtaatttaacacgagaacggtcacccatttttactatggtttggtgttcgaaaaacaaacaaaaataaaaccaaaaaaaaggaatgcaacacgaggacttcctaggaggtcacccatcctagtactactctcgcccaagcacgcttaacttcggagttctgatgggatccggtgctttagtgctggtatgatcgcatccgtcatatcctgcgtcctccttcctcttatgcccacacctccgtgctcggctcgcccacggcactggacatccttcctccgcacaaagtacccgaaaaacgccccttgaaacaaataaaaggtaatttaacacgagaacggtcacccatttttactatggtttggtgttcgaaaaacaaacaaaaataaaaccaaaaaaaag

SEQ ID NO: 5404 - DNA, 1054 bp, Zea mays
  Zm_smallRNAprecursor_893
ctcggctcgcccacggcactggacatccttcctccgcacaaagtacccgaaaaacgccccttaaaacaaataaaaggtaatttaacacgagaacggtcacccatttttactatggtttggtgttcgaaaaacaaacaaaaataaaacaaaaaaaaggaatgcaacacgaggacttcccaggaggtcacccatcctagtactactctcgcccaagcacgcttaacttcggagttctgatgggatccgatgctttagtgctggtatgatcgcatccgtcatatcctgcgtcctccttcctcttatgcccacacctccgtgctcggctcgcccacggcactggacatccatcctctgcacaaagtacccgaaaaacgccccttaaaacaaataaaaggtaatttaacacgagaacgatcacccatttttactatggtttggtgttcgaaaaacaaacaaaaaacaaaaccaaaaaaaaaggaatgcaacacgaggacttcccaggaggtcacccatcctagtactactctcgcccaagcacgcttatcttcggagttctgatgggatccggtgctttagtgctggtatgatcacatccgtcatatcctgcgtcctccttcctcttatgcccacacctccgtgctcggctcgcccacggcactggacatccttcctccgcacaaagtacccgaaaaacgccccttaaaactaataaaaggtaatttaacacgagaacggtcacccatttttactatggtttggtgttcgaaaaacaaacaaaaataaaaccaaaaaaaaggaatgcaacacgaggacttcctaggaggtcacccatcctagtactactctcgcccaagcacgcttaacttcggagttctgatgggatccggtgctttagtgctggtatgatcgcatccgtcatatcctgcgtcctccttcctcttatgcccacacctccgtgctcggctcgcccacggcactggacatccttcctccgcacaaagtacccgaaaaacgccccttgaaacaaataaaaggtaatttaacacgagaacgg

SEQ ID NO: 5405 - DNA, 1041 bp, Zea mays
  Zm_smallRNAprecursor_894
ctcgcccacggcactggacatccttcctccgcacaaagtacccgaaaaacgccccttaaaacaaataaaaggtaatttaacacgagaacggtcacccatttttactatggtttggtgttcgaaaaacaaacaaaaataaaacaaaaaaaaggaatgcaacacgaggacttcccaggaggtcacccatcctagtactactctcgcccaagcacgcttaacttcggagttctgatgggatccgatgctttagtgctggtatgatcgcatccgtcatatcctgcgtcctccttcctcttatgcccacacctccgtgctcggctcgcccacggcactggacatccatcctctgcacaaagtacccgaaaaacgccccttaaaacaaataaaaggtaatttaacacgagaacgatcacccatttttactatggtttggtgttcgaaaaacaaacaaaaaacaaaaccaaaaaaaaaggaatgcaacacgaggacttcccaggaggtcacccatcctagtactactctcgcccaagcacgcttatcttcggagttctgatgggatccggtgctttagtgctggtatgatcacatccgtcatatcctgcgtcctccttcctcttatgcccacacctccgtgctcggctcgcccacggcactggacatccttcctccgcacaaagtacccgaaaaacgccccttaaaactaataaaaggtaatttaacacgagaacggtcacccatttttactatggtttggtgttcgaaaaacaaacaaaaataaaaccaaaaaaaaggaatgcaacacgaggacttcctaggaggtcacccatcctagtactactctcgcccaagcacgcttaacttcggagttctgatgggatccggtgctttagtgctggtatgatcgcatccgtcatatcctgcgtcctccttcctcttatgcccacacctccgtgctcggctcgcccacggcactggacatccttcctccgcacaaagtacccgaaaaacgccccttgaaacaaataaaaggtaatttaacac

SEQ ID NO: 5406 - DNA, 1037 bp, Zea mays
  Zm_smallRNAprecursor_895
cccacggcactggacatccttcctccgcacaaagtacccgaaaaacgccccttaaaacaaataaaaggtaatttaacacgagaacggtcacccatttttactatggtttggtgttcgaaaaacaaacaaaaataaaacaaaaaaaaggaatgcaacacgaggacttcccaggaggtcacccatcctagtactactctcgcccaagcacgcttaacttcggagttctgatgggatccgatgctttagtgctggtatgatcgcatccgtcatatcctgcgtcctccttcctcttatgcccacacctccgtgctcggctcgcccacggcactggacatccatcctctgcacaaagtacccgaaaaacgccccttaaaacaaataaaaggtaatttaacacgagaacgatcacccatttttactatggtttggtgttcgaaaaacaaacaaaaaacaaaaccaaaaaaaaaggaatgcaacacgaggacttcccaggaggtcacccatcctagtactactctcgcccaagcacgcttatcttcggagttctgatgggatccggtgctttagtgctggtatgatcacatccgtcatatcctgcgtcctccttcctcttatgcccacacctccgtgctcggctcgcccacggcactggacatccttcctccgcacaaagtacccgaaaaacgccccttaaaactaataaaaggtaatttaacacgagaacggtcacccatttttactatggtttggtgttcgaaaaacaaacaaaaataaaaccaaaaaaaaggaatgcaacacgaggacttcctaggaggtcacccatcctagtactactctcgcccaagcacgcttaacttcggagttctgatgggatccggtgctttagtgctggtatgatcgcatccgtcatatcctgcgtcctccttcctcttatgcccacacctccgtgctcggctcgcccacggcactggacatccttcctccgcacaaagtacccgaaaaacgccccttgaaacaaataaaaggtaatttaacac

SEQ ID NO: 5407 - DNA, 1047 bp, Zea mays
  Zm_smallRNAprecursor_896
tggacatccttcctccgcacaaagtacccgaaaaacgccccttaaaacaaataaaaggtaatttaacacgagaacggtcacccatttttactatggtttggtgttcgaaaaacaaacaaaaataaaacaaaaaaaaggaatgcaacacgaggacttcccaggaggtcacccatcctagtactactctcgcccaagcacgcttaacttcggagttctgatgggatccgatgctttagtgctggtatgatcgcatccgtcatatcctgcgtcctccttcctcttatgcccacacctccgtgctcggctcgcccacggcactggacatccatcctctgcacaaagtacccgaaaaacgccccttaaaacaaataaaaggtaatttaacacgagaacgatcacccatttttactatggtttggtgttcgaaaaacaaacaaaaaacaaaaccaaaaaaaaaggaatgcaacacgaggacttcccaggaggtcacccatcctagtactactctcgcccaagcacgcttatcttcggagttctgatgggatccggtgctttagtgctggtatgatcacatccgtcatatcctgcgtcctccttcctcttatgcccacacctccgtgctcggctcgcccacggcactggacatccttcctccgcacaaagtacccgaaaaacgccccttaaaactaataaaaggtaatttaacacgagaacggtcacccatttttactatggtttggtgttcgaaaaacaaacaaaaataaaaccaaaaaaaaggaatgcaacacgaggacttcctaggaggtcacccatcctagtactactctcgcccaagcacgcttaacttcggagttctgatgggatccggtgctttagtgctggtatgatcgcatccgtcatatcctgcgtcctccttcctcttatgcccacacctccgtgctcggctcgcccacggcactggacatccttcctccgcacaaagtacccgaaaaacgccccttgaaacaaataaaaggtaatttaacacgagaacggtcacccattttt

SEQ ID NO: 5408 - DNA, 1054 bp, Zea mays
  Zm_smallRNAprecursor_897
tcggctcgcccacggcactggacatccatcctctgcacaaagtacccgaaaaacgccccttaaaacaaataaaaggtaatttaacacgagaacgatcacccatttttactatggtttggtgttcgaaaaacaaacaaaaaacaaaaccaaaaaaaaaggaatgcaacacgaggacttcccaggaggtcacccatcctagtactactctcgcccaagcacgcttatcttcggagttctgatgggatccggtgctttagtgctggtatgatcacatccgtcatatcctgcgtcctccttcctcttatgcccacacctccgtgctcggctcgcccacggcactggacatccttcctccgcacaaagtacccgaaaaacgccccttaaaactaataaaaggtaatttaacacgagaacggtcacccatttttactatggtttggtgttcgaaaaacaaacaaaaataaaaccaaaaaaaaggaatgcaacacgaggacttcctaggaggtcacccatcctagtactactctcgcccaagcacgcttaacttcggagttctgatgggatccggtgctttagtgctggtatgatcgcatccgtcatatcctgcgtcctccttcctcttatgcccacacctccgtgctcggctcgcccacggcactggacatccttcctccgcacaaagtacccgaaaaacgccccttgaaacaaataaaaggtaatttaacacgagaacggtcacccatttttactatggtttggtgttcgaaaaacaaacaaaaataaaaccaaaaaaaaggaatgcaacaagaggtcttcccaggaggtcacccatcctagtactactctcacccaagcacgcttaacttcggagttctaatgagatccgatgctttagtgctggtatgattgcatccgtcatatcctgcgtccttcttcctcttatgcccacacctccgtgctcggctcgcccacggcactggacatccttcctccgcacaaagtacccgaaaaacgccccttaaaaacaaataaaaggtaatttaacacgagaacg

SEQ ID NO: 5409 - DNA, 1041 bp, Zea mays
  Zm_smallRNAprecursor_898
tcgcccacggcactggacatccatcctctgcacaaagtacccgaaaaacgccccttaaaacaaataaaaggtaatttaacacgagaacgatcacccatttttactatggtttggtgttcgaaaaacaaacaaaaaacaaaaccaaaaaaaaaggaatgcaacacgaggacttcccaggaggtcacccatcctagtactactctcgcccaagcacgcttatcttcggagttctgatgggatccggtgctttagtgctggtatgatcacatccgtcatatcctgcgtcctccttcctcttatgcccacacctccgtgctcggctcgcccacggcactggacatccttcctccgcacaaagtacccgaaaaacgccccttaaaactaataaaaggtaatttaacacgagaacggtcacccatttttactatggtttggtgttcgaaaaacaaacaaaaataaaaccaaaaaaaaggaatgcaacacgaggacttcctaggaggtcacccatcctagtactactctcgcccaagcacgcttaacttcggagttctgatgggatccggtgctttagtgctggtatgatcgcatccgtcatatcctgcgtcctccttcctcttatgcccacacctccgtgctcggctcgcccacggcactggacatccttcctccgcacaaagtacccgaaaaacgccccttgaaacaaataaaaggtaatttaacacgagaacggtcacccatttttactatggtttggtgttcgaaaaacaaacaaaaataaaaccaaaaaaaaggaatgcaacaagaggtcttcccaggaggtcacccatcctagtactactctcacccaagcacgcttaacttcggagttctaatgagatccgatgctttagtgctggtatgattgcatccgtcatatcctgcgtccttcttcctcttatgcccacacctccgtgctcggctcgcccacggcactggacatccttcctccgcacaaagtacccgaaaaacgccccttaaaaacaaataaaaggtaatttaaca

SEQ ID NO: 5410 - DNA, 1037 bp, Zea mays
  Zm_smallRNAprecursor_899
ccacggcactggacatccatcctctgcacaaagtacccgaaaaacgccccttaaaacaaataaaaggtaatttaacacgagaacgatcacccatttttactatggtttggtgttcgaaaaacaaacaaaaaacaaaaccaaaaaaaaaggaatgcaacacgaggacttcccaggaggtcacccatcctagtactactctcgcccaagcacgcttatcttcggagttctgatgggatccggtgctttagtgctggtatgatcacatccgtcatatcctgcgtcctccttcctcttatgcccacacctccgtgctcggctcgcccacggcactggacatccttcctccgcacaaagtacccgaaaaacgccccttaaaactaataaaaggtaatttaacacgagaacggtcacccatttttactatggtttggtgttcgaaaaacaaacaaaaataaaaccaaaaaaaaggaatgcaacacgaggacttcctaggaggtcacccatcctagtactactctcgcccaagcacgcttaacttcggagttctgatgggatccggtgctttagtgctggtatgatcgcatccgtcatatcctgcgtcctccttcctcttatgcccacacctccgtgctcggctcgcccacggcactggacatccttcctccgcacaaagtacccgaaaaacgccccttgaaacaaataaaaggtaatttaacacgagaacggtcacccatttttactatggtttggtgttcgaaaaacaaacaaaaataaaaccaaaaaaaaggaatgcaacaagaggtcttcccaggaggtcacccatcctagtactactctcacccaagcacgcttaacttcggagttctaatgagatccgatgctttagtgctggtatgattgcatccgtcatatcctgcgtccttcttcctcttatgcccacacctccgtgctcggctcgcccacggcactggacatccttcctccgcacaaagtacccgaaaaacgccccttaaaaacaaataaaaggtaatttaaca

SEQ ID NO: 5411 - DNA, 1047 bp, Zea mays
  Zm_smallRNAprecursor_900
ggacatccatcctctgcacaaagtacccgaaaaacgccccttaaaacaaataaaaggtaatttaacacgagaacgatcacccatttttactatggtttggtgttcgaaaaacaaacaaaaaacaaaaccaaaaaaaaaggaatgcaacacgaggacttcccaggaggtcacccatcctagtactactctcgcccaagcacgcttatcttcggagttctgatgggatccggtgctttagtgctggtatgatcacatccgtcatatcctgcgtcctccttcctcttatgcccacacctccgtgctcggctcgcccacggcactggacatccttcctccgcacaaagtacccgaaaaacgccccttaaaactaataaaaggtaatttaacacgagaacggtcacccatttttactatggtttggtgttcgaaaaacaaacaaaaataaaaccaaaaaaaaggaatgcaacacgaggacttcctaggaggtcacccatcctagtactactctcgcccaagcacgcttaacttcggagttctgatgggatccggtgctttagtgctggtatgatcgcatccgtcatatcctgcgtcctccttcctcttatgcccacacctccgtgctcggctcgcccacggcactggacatccttcctccgcacaaagtacccgaaaaacgccccttgaaacaaataaaaggtaatttaacacgagaacggtcacccatttttactatggtttggtgttcgaaaaacaaacaaaaataaaaccaaaaaaaaggaatgcaacaagaggtcttcccaggaggtcacccatcctagtactactctcacccaagcacgcttaacttcggagttctaatgagatccgatgctttagtgctggtatgattgcatccgtcatatcctgcgtccttcttcctcttatgcccacacctccgtgctcggctcgcccacggcactggacatccttcctccgcacaaagtacccgaaaaacgccccttaaaaacaaataaaaggtaatttaacacgagaacggtcacccatttt

SEQ ID NO: 5412 - DNA, 1129 bp, Zea mays
  Zm_smallRNAprecursor_901
tgcccacacctccgtgctcggctcgcccacggcactggacatccttcctccgcacaaagtacccgaaaaacgccccttaaaaacaaataaaaggtaatttaacacgagaacggtcacccatttttactatggtttggtgttcgaaaaacaaacaaaaataaaaccaaaaaaaaagaatgcaacatgaggacttcccaggaggtcacccatcctagtactactctcgcccaagcacacttaactttggagttctgatgggatccgtgctttagtgctggtatgatcgcatccgtcatatcatgtgtcctcctacctcttatgcccacacctccgtgctcggctcgcccacggcactggacatccttcctccgcacaaagtacccgaaaaacgccccttaaaacaaataaaaggtaatttaacacgagaacggtcacccatttttactatggtttggtgttcgaaaaacaaacaaaaataaaaccaaaaaaaggaatgcaacacgaggacttcccaggaggtcacccatcctagtactactctcgcccaagcacgcttaacttcggagttctgatgggatccggtgctttagtgctggtatgatcgcatccgtcatatcctgcgtcctccttcctcttatgcccacacctccgtgctcggctcgcccacgacactggacatccttcctccgcacaaagtacccgaaaaacgccccttaaaacaaataaaaggtaatttaacacgagaacggtcacccatttttactatggtttggtgttcgaaaaacaaacaaaaataaaacaaaaaaaaggaatgcaacacgaggacttcccaggaggtcacccatcctagtactactctcgcccaagcatgcttaacttcggagttctgatgggatccggtgctttagtgctggtatgatcgcatccatcatatcctgcgtcctccttcctcttatgcccacacctccgtgctcggctcgcccacggcactggacatccttcctccgcacaaagtacccgaaaaacgccccttaaaacaaataaaaggtaatttaacacgagaacggtcacccatttttactatggtttggtgttcgaaaaacaaacaaaaataaaaccaaaaaaaagg

SEQ ID NO: 5413 - DNA, 1054 bp, Zea mays
  Zm_smallRNAprecursor_902
tgctcggctcgcccacggcactggacatccttcctccgcacaaagtacccgaaaaacgccccttaaaaacaaataaaaggtaatttaacacgagaacggtcacccatttttactatggtttggtgttcgaaaaacaaacaaaaataaaaccaaaaaaaaagaatgcaacatgaggacttcccaggaggtcacccatcctagtactactctcgcccaagcacacttaactttggagttctgatgggatccgtgctttagtgctggtatgatcgcatccgtcatatcatgtgtcctcctacctcttatgcccacacctccgtgctcggctcgcccacggcactggacatccttcctccgcacaaagtacccgaaaaacgccccttaaaacaaataaaaggtaatttaacacgagaacggtcacccatttttactatggtttggtgttcgaaaaacaaacaaaaataaaaccaaaaaaaggaatgcaacacgaggacttcccaggaggtcacccatcctagtactactctcgcccaagcacgcttaacttcggagttctgatgggatccggtgctttagtgctggtatgatcgcatccgtcatatcctgcgtcctccttcctcttatgcccacacctccgtgctcggctcgcccacgacactggacatccttcctccgcacaaagtacccgaaaaacgccccttaaaacaaataaaaggtaatttaacacgagaacggtcacccatttttactatggtttggtgttcgaaaaacaaacaaaaataaaacaaaaaaaaggaatgcaacacgaggacttcccaggaggtcacccatcctagtactactctcgcccaagcatgcttaacttcggagttctgatgggatccggtgctttagtgctggtatgatcgcatccatcatatcctgcgtcctccttcctcttatgcccacacctccgtgctcggctcgcccacggcactggacatccttcctccgcacaaagtacccgaaaaacgccccttaaaacaaataaaaggtaatttaacacgagaacggt

SEQ ID NO: 5414 - DNA, 1041 bp, Zea mays
  Zm_smallRNAprecursor_903
ggctcgcccacggcactggacatccttcctccgcacaaagtacccgaaaaacgccccttaaaaacaaataaaaggtaatttaacacgagaacggtcacccatttttactatggtttggtgttcgaaaaacaaacaaaaataaaaccaaaaaaaaagaatgcaacatgaggacttcccaggaggtcacccatcctagtactactctcgcccaagcacacttaactttggagttctgatgggatccgtgctttagtgctggtatgatcgcatccgtcatatcatgtgtcctcctacctcttatgcccacacctccgtgctcggctcgcccacggcactggacatccttcctccgcacaaagtacccgaaaaacgccccttaaaacaaataaaaggtaatttaacacgagaacggtcacccatttttactatggtttggtgttcgaaaaacaaacaaaaataaaaccaaaaaaaggaatgcaacacgaggacttcccaggaggtcacccatcctagtactactctcgcccaagcacgcttaacttcggagttctgatgggatccggtgctttagtgctggtatgatcgcatccgtcatatcctgcgtcctccttcctcttatgcccacacctccgtgctcggctcgcccacgacactggacatccttcctccgcacaaagtacccgaaaaacgccccttaaaacaaataaaaggtaatttaacacgagaacggtcacccatttttactatggtttggtgttcgaaaaacaaacaaaaataaaacaaaaaaaaggaatgcaacacgaggacttcccaggaggtcacccatcctagtactactctcgcccaagcatgcttaacttcggagttctgatgggatccggtgctttagtgctggtatgatcgcatccatcatatcctgcgtcctccttcctcttatgcccacacctccgtgctcggctcgcccacggcactggacatccttcctccgcacaaagtacccgaaaaacgccccttaaaacaaataaaaggtaatttaacacg

SEQ ID NO: 5415 - DNA, 1037 bp, Zea mays
  Zm_smallRNAprecursor_904
cgcccacggcactggacatccttcctccgcacaaagtacccgaaaaacgccccttaaaaacaaataaaaggtaatttaacacgagaacggtcacccatttttactatggtttggtgttcgaaaaacaaacaaaaataaaaccaaaaaaaaagaatgcaacatgaggacttcccaggaggtcacccatcctagtactactctcgcccaagcacacttaactttggagttctgatgggatccgtgctttagtgctggtatgatcgcatccgtcatatcatgtgtcctcctacctcttatgcccacacctccgtgctcggctcgcccacggcactggacatccttcctccgcacaaagtacccgaaaaacgccccttaaaacaaataaaaggtaatttaacacgagaacggtcacccatttttactatggtttggtgttcgaaaaacaaacaaaaataaaaccaaaaaaaggaatgcaacacgaggacttcccaggaggtcacccatcctagtactactctcgcccaagcacgcttaacttcggagttctgatgggatccggtgctttagtgctggtatgatcgcatccgtcatatcctgcgtcctccttcctcttatgcccacacctccgtgctcggctcgcccacgacactggacatccttcctccgcacaaagtacccgaaaaacgccccttaaaacaaataaaaggtaatttaacacgagaacggtcacccatttttactatggtttggtgttcgaaaaacaaacaaaaataaaacaaaaaaaaggaatgcaacacgaggacttcccaggaggtcacccatcctagtactactctcgcccaagcatgcttaacttcggagttctgatgggatccggtgctttagtgctggtatgatcgcatccatcatatcctgcgtcctccttcctcttatgcccacacctccgtgctcggctcgcccacggcactggacatccttcctccgcacaaagtacccgaaaaacgccccttaaaacaaataaaaggtaatttaacacg

SEQ ID NO: 5416 - DNA, 1047 bp, Zea mays
  Zm_smallRNAprecursor_905
actggacatccttcctccgcacaaagtacccgaaaaacgccccttaaaaacaaataaaaggtaatttaacacgagaacggtcacccatttttactatggtttggtgttcgaaaaacaaacaaaaataaaaccaaaaaaaaagaatgcaacatgaggacttcccaggaggtcacccatcctagtactactctcgcccaagcacacttaactttggagttctgatgggatccgtgctttagtgctggtatgatcgcatccgtcatatcatgtgtcctcctacctcttatgcccacacctccgtgctcggctcgcccacggcactggacatccttcctccgcacaaagtacccgaaaaacgccccttaaaacaaataaaaggtaatttaacacgagaacggtcacccatttttactatggtttggtgttcgaaaaacaaacaaaaataaaaccaaaaaaaggaatgcaacacgaggacttcccaggaggtcacccatcctagtactactctcgcccaagcacgcttaacttcggagttctgatgggatccggtgctttagtgctggtatgatcgcatccgtcatatcctgcgtcctccttcctcttatgcccacacctccgtgctcggctcgcccacgacactggacatccttcctccgcacaaagtacccgaaaaacgccccttaaaacaaataaaaggtaatttaacacgagaacggtcacccatttttactatggtttggtgttcgaaaaacaaacaaaaataaaacaaaaaaaaggaatgcaacacgaggacttcccaggaggtcacccatcctagtactactctcgcccaagcatgcttaacttcggagttctgatgggatccggtgctttagtgctggtatgatcgcatccatcatatcctgcgtcctccttcctcttatgcccacacctccgtgctcggctcgcccacggcactggacatccttcctccgcacaaagtacccgaaaaacgccccttaaaacaaataaaaggtaatttaacacgagaacggtcacccattttta

SEQ ID NO: 5417 - DNA, 1191 bp, Zea mays
  Zm_smallRNAprecursor_906
atggtttggtgttcgaaaaacaaacaaaaataaaaccaaaaaaaaagaatgcaacatgaggacttcccaggaggtcacccatcctagtactactctcgcccaagcacacttaactttggagttctgatgggatccgtgctttagtgctggtatgatcgcatccgtcatatcatgtgtcctcctacctcttatgcccacacctccgtgctcggctcgcccacggcactggacatccttcctccgcacaaagtacccgaaaaacgccccttaaaacaaataaaaggtaatttaacacgagaacggtcacccatttttactatggtttggtgttcgaaaaacaaacaaaaataaaaccaaaaaaaggaatgcaacacgaggacttcccaggaggtcacccatcctagtactactctcgcccaagcacgcttaacttcggagttctgatgggatccggtgctttagtgctggtatgatcgcatccgtcatatcctgcgtcctccttcctcttatgcccacacctccgtgctcggctcgcccacgacactggacatccttcctccgcacaaagtacccgaaaaacgccccttaaaacaaataaaaggtaatttaacacgagaacggtcacccatttttactatggtttggtgttcgaaaaacaaacaaaaataaaacaaaaaaaaggaatgcaacacgaggacttcccaggaggtcacccatcctagtactactctcgcccaagcatgcttaacttcggagttctgatgggatccggtgctttagtgctggtatgatcgcatccatcatatcctgcgtcctccttcctcttatgcccacacctccgtgctcggctcgcccacggcactggacatccttcctccgcacaaagtacccgaaaaacgccccttaaaacaaataaaaggtaatttaacacgagaacggtcacccatttttactatggtttggtgttcgaaaaacaaacaaaaataaaaccaaaaaaaaggaatgcaacacgaggacttcccaggaggtcacccatcctagtactactctcgcccaagcacgcttaacttcggagttctgatgggatccggtgctttagtgctggtatgatcgcatccgtcatatcctgcgtccttgaaagggaaatgtgcccttgggccatttctaagtattttggtgattgagtgcaaa

SEQ ID NO: 5418 - DNA, 1129 bp, Zea mays
  Zm_smallRNAprecursor_907
atgcccacacctccgtgctcggctcgcccacggcactggacatccttcctccgcacaaagtacccgaaaaacgccccttaaaacaaataaaaggtaatttaacacgagaacggtcacccatttttactatggtttggtgttcgaaaaacaaacaaaaataaaaccaaaaaaaggaatgcaacacgaggacttcccaggaggtcacccatcctagtactactctcgcccaagcacgcttaacttcggagttctgatgggatccggtgctttagtgctggtatgatcgcatccgtcatatcctgcgtcctccttcctcttatgcccacacctccgtgctcggctcgcccacgacactggacatccttcctccgcacaaagtacccgaaaaacgccccttaaaacaaataaaaggtaatttaacacgagaacggtcacccatttttactatggtttggtgttcgaaaaacaaacaaaaataaaacaaaaaaaaggaatgcaacacgaggacttcccaggaggtcacccatcctagtactactctcgcccaagcatgcttaacttcggagttctgatgggatccggtgctttagtgctggtatgatcgcatccatcatatcctgcgtcctccttcctcttatgcccacacctccgtgctcggctcgcccacggcactggacatccttcctccgcacaaagtacccgaaaaacgccccttaaaacaaataaaaggtaatttaacacgagaacggtcacccatttttactatggtttggtgttcgaaaaacaaacaaaaataaaaccaaaaaaaaggaatgcaacacgaggacttcccaggaggtcacccatcctagtactactctcgcccaagcacgcttaacttcggagttctgatgggatccggtgctttagtgctggtatgatcgcatccgtcatatcctgcgtccttgaaagggaaatgtgcccttgggccatttctaagtattttggtgattgagtgcaaacacaagtgcttaaatgtgaaaatatgcccatagatgaacaaagtgcaaatcacaagtaaaggtatgtttctaagccttagtacattagttttgtgtactaacatcttgtctaagtgttagaaacagga

SEQ ID NO: 5419 - DNA, 1054 bp, Zea mays
  Zm_smallRNAprecursor_908
gtgctcggctcgcccacggcactggacatccttcctccgcacaaagtacccgaaaaacgccccttaaaacaaataaaaggtaatttaacacgagaacggtcacccatttttactatggtttggtgttcgaaaaacaaacaaaaataaaaccaaaaaaaggaatgcaacacgaggacttcccaggaggtcacccatcctagtactactctcgcccaagcacgcttaacttcggagttctgatgggatccggtgctttagtgctggtatgatcgcatccgtcatatcctgcgtcctccttcctcttatgcccacacctccgtgctcggctcgcccacgacactggacatccttcctccgcacaaagtacccgaaaaacgccccttaaaacaaataaaaggtaatttaacacgagaacggtcacccatttttactatggtttggtgttcgaaaaacaaacaaaaataaaacaaaaaaaaggaatgcaacacgaggacttcccaggaggtcacccatcctagtactactctcgcccaagcatgcttaacttcggagttctgatgggatccggtgctttagtgctggtatgatcgcatccatcatatcctgcgtcctccttcctcttatgcccacacctccgtgctcggctcgcccacggcactggacatccttcctccgcacaaagtacccgaaaaacgccccttaaaacaaataaaaggtaatttaacacgagaacggtcacccatttttactatggtttggtgttcgaaaaacaaacaaaaataaaaccaaaaaaaaggaatgcaacacgaggacttcccaggaggtcacccatcctagtactactctcgcccaagcacgcttaacttcggagttctgatgggatccggtgctttagtgctggtatgatcgcatccgtcatatcctgcgtccttgaaagggaaatgtgcccttgggccatttctaagtattttggtgattgagtgcaaacacaagtgcttaaatgtgaaaatatgcccatagatgaacaaagtgcaaatcacaagtaaaggtatgt

SEQ ID NO: 5420 - DNA, 1041 bp, Zea mays
  Zm_smallRNAprecursor_909
cggctcgcccacggcactggacatccttcctccgcacaaagtacccgaaaaacgccccttaaaacaaataaaaggtaatttaacacgagaacggtcacccatttttactatggtttggtgttcgaaaaacaaacaaaaataaaaccaaaaaaaggaatgcaacacgaggacttcccaggaggtcacccatcctagtactactctcgcccaagcacgcttaacttcggagttctgatgggatccggtgctttagtgctggtatgatcgcatccgtcatatcctgcgtcctccttcctcttatgcccacacctccgtgctcggctcgcccacgacactggacatccttcctccgcacaaagtacccgaaaaacgccccttaaaacaaataaaaggtaatttaacacgagaacggtcacccatttttactatggtttggtgttcgaaaaacaaacaaaaataaaacaaaaaaaaggaatgcaacacgaggacttcccaggaggtcacccatcctagtactactctcgcccaagcatgcttaacttcggagttctgatgggatccggtgctttagtgctggtatgatcgcatccatcatatcctgcgtcctccttcctcttatgcccacacctccgtgctcggctcgcccacggcactggacatccttcctccgcacaaagtacccgaaaaacgccccttaaaacaaataaaaggtaatttaacacgagaacggtcacccatttttactatggtttggtgttcgaaaaacaaacaaaaataaaaccaaaaaaaaggaatgcaacacgaggacttcccaggaggtcacccatcctagtactactctcgcccaagcacgcttaacttcggagttctgatgggatccggtgctttagtgctggtatgatcgcatccgtcatatcctgcgtccttgaaagggaaatgtgcccttgggccatttctaagtattttggtgattgagtgcaaacacaagtgcttaaatgtgaaaatatgcccatagatgaacaaagtgcaaatcacaagtaa

SEQ ID NO: 5421 - DNA, 1037 bp, Zea mays
  Zm_smallRNAprecursor_910
tcgcccacggcactggacatccttcctccgcacaaagtacccgaaaaacgccccttaaaacaaataaaaggtaatttaacacgagaacggtcacccatttttactatggtttggtgttcgaaaaacaaacaaaaataaaaccaaaaaaaggaatgcaacacgaggacttcccaggaggtcacccatcctagtactactctcgcccaagcacgcttaacttcggagttctgatgggatccggtgctttagtgctggtatgatcgcatccgtcatatcctgcgtcctccttcctcttatgcccacacctccgtgctcggctcgcccacgacactggacatccttcctccgcacaaagtacccgaaaaacgccccttaaaacaaataaaaggtaatttaacacgagaacggtcacccatttttactatggtttggtgttcgaaaaacaaacaaaaataaaacaaaaaaaaggaatgcaacacgaggacttcccaggaggtcacccatcctagtactactctcgcccaagcatgcttaacttcggagttctgatgggatccggtgctttagtgctggtatgatcgcatccatcatatcctgcgtcctccttcctcttatgcccacacctccgtgctcggctcgcccacggcactggacatccttcctccgcacaaagtacccgaaaaacgccccttaaaacaaataaaaggtaatttaacacgagaacggtcacccatttttactatggtttggtgttcgaaaaacaaacaaaaataaaaccaaaaaaaaggaatgcaacacgaggacttcccaggaggtcacccatcctagtactactctcgcccaagcacgcttaacttcggagttctgatgggatccggtgctttagtgctggtatgatcgcatccgtcatatcctgcgtccttgaaagggaaatgtgcccttgggccatttctaagtattttggtgattgagtgcaaacacaagtgcttaaatgtgaaaatatgcccatagatgaacaaagtgcaaatcacaagtaa

SEQ ID NO: 5422 - DNA, 1192 bp, Zea mays
  Zm_smallRNAprecursor_911
atggtttggtgttcgaaaaacaaacaaaaataaaaccaaaaaaaggaatgcaacacgaggacttcccaggaggtcacccatcctagtactactctcgcccaagcacgcttaacttcggagttctgatgggatccggtgctttagtgctggtatgatcgcatccgtcatatcctgcgtcctccttcctcttatgcccacacctccgtgctcggctcgcccacgacactggacatccttcctccgcacaaagtacccgaaaaacgccccttaaaacaaataaaaggtaatttaacacgagaacggtcacccatttttactatggtttggtgttcgaaaaacaaacaaaaataaaacaaaaaaaaggaatgcaacacgaggacttcccaggaggtcacccatcctagtactactctcgcccaagcatgcttaacttcggagttctgatgggatccggtgctttagtgctggtatgatcgcatccatcatatcctgcgtcctccttcctcttatgcccacacctccgtgctcggctcgcccacggcactggacatccttcctccgcacaaagtacccgaaaaacgccccttaaaacaaataaaaggtaatttaacacgagaacggtcacccatttttactatggtttggtgttcgaaaaacaaacaaaaataaaaccaaaaaaaaggaatgcaacacgaggacttcccaggaggtcacccatcctagtactactctcgcccaagcacgcttaacttcggagttctgatgggatccggtgctttagtgctggtatgatcgcatccgtcatatcctgcgtccttgaaagggaaatgtgcccttgggccatttctaagtattttggtgattgagtgcaaacacaagtgcttaaatgtgaaaatatgcccatagatgaacaaagtgcaaatcacaagtaaaggtatgtttctaagccttagtacattagttttgtgtactaacatcttgtctaagtgttagaaacaggagaaagaagaaaagaaaagaagtggagagtggctgtgtacagccaaaggctgcttcggactggggcaccggactgtccggtgtgcaccggacagtgtccggtgcgccagaccagcacagagcaaaccagccgctctcgggtttttctccggcgacttcggctaaaattcaccggactgtccggtgtgcaccg

SEQ ID NO: 5423 - DNA, 1054 bp, Zea mays
  Zm_smallRNAprecursor_912
tgctcggctcgcccacgacactggacatccttcctccgcacaaagtacccgaaaaacgccccttaaaacaaataaaaggtaatttaacacgagaacggtcacccatttttactatggtttggtgttcgaaaaacaaacaaaaataaaacaaaaaaaaggaatgcaacacgaggacttcccaggaggtcacccatcctagtactactctcgcccaagcatgcttaacttcggagttctgatgggatccggtgctttagtgctggtatgatcgcatccatcatatcctgcgtcctccttcctcttatgcccacacctccgtgctcggctcgcccacggcactggacatccttcctccgcacaaagtacccgaaaaacgccccttaaaacaaataaaaggtaatttaacacgagaacggtcacccatttttactatggtttggtgttcgaaaaacaaacaaaaataaaaccaaaaaaaaggaatgcaacacgaggacttcccaggaggtcacccatcctagtactactctcgcccaagcacgcttaacttcggagttctgatgggatccggtgctttagtgctggtatgatcgcatccgtcatatcctgcgtccttgaaagggaaatgtgcccttgggccatttctaagtattttggtgattgagtgcaaacacaagtgcttaaatgtgaaaatatgcccatagatgaacaaagtgcaaatcacaagtaaaggtatgtttctaagccttagtacattagttttgtgtactaacatcttgtctaagtgttagaaacaggagaaagaagaaaagaaaagaagtggagagtggctgtgtacagccaaaggctgcttcggactggggcaccggactgtccggtgtgcaccggacagtgtccggtgcgccagaccagcacagagcaaaccagccgctctcgggtttttctccggcgacttcggctaaaattcaccggactgtccggtgtgcaccggactgtccggtgagccaacggtcggccagggtcaacggtcggccgcgcgatctgcgcgagacacgtg

SEQ ID NO: 5424 - DNA, 1041 bp, Zea mays
  Zm_smallRNAprecursor_913
ggctcgcccacgacactggacatccttcctccgcacaaagtacccgaaaaacgccccttaaaacaaataaaaggtaatttaacacgagaacggtcacccatttttactatggtttggtgttcgaaaaacaaacaaaaataaaacaaaaaaaaggaatgcaacacgaggacttcccaggaggtcacccatcctagtactactctcgcccaagcatgcttaacttcggagttctgatgggatccggtgctttagtgctggtatgatcgcatccatcatatcctgcgtcctccttcctcttatgcccacacctccgtgctcggctcgcccacggcactggacatccttcctccgcacaaagtacccgaaaaacgccccttaaaacaaataaaaggtaatttaacacgagaacggtcacccatttttactatggtttggtgttcgaaaaacaaacaaaaataaaaccaaaaaaaaggaatgcaacacgaggacttcccaggaggtcacccatcctagtactactctcgcccaagcacgcttaacttcggagttctgatgggatccggtgctttagtgctggtatgatcgcatccgtcatatcctgcgtccttgaaagggaaatgtgcccttgggccatttctaagtattttggtgattgagtgcaaacacaagtgcttaaatgtgaaaatatgcccatagatgaacaaagtgcaaatcacaagtaaaggtatgtttctaagccttagtacattagttttgtgtactaacatcttgtctaagtgttagaaacaggagaaagaagaaaagaaaagaagtggagagtggctgtgtacagccaaaggctgcttcggactggggcaccggactgtccggtgtgcaccggacagtgtccggtgcgccagaccagcacagagcaaaccagccgctctcgggtttttctccggcgacttcggctaaaattcaccggactgtccggtgtgcaccggactgtccggtgagccaacggtcggccagggtcaacggtcggccgcgcgatctgcgcga

SEQ ID NO: 5425 - DNA, 1037 bp, Zea mays
  Zm_smallRNAprecursor_914
cgcccacgacactggacatccttcctccgcacaaagtacccgaaaaacgccccttaaaacaaataaaaggtaatttaacacgagaacggtcacccatttttactatggtttggtgttcgaaaaacaaacaaaaataaaacaaaaaaaaggaatgcaacacgaggacttcccaggaggtcacccatcctagtactactctcgcccaagcatgcttaacttcggagttctgatgggatccggtgctttagtgctggtatgatcgcatccatcatatcctgcgtcctccttcctcttatgcccacacctccgtgctcggctcgcccacggcactggacatccttcctccgcacaaagtacccgaaaaacgccccttaaaacaaataaaaggtaatttaacacgagaacggtcacccatttttactatggtttggtgttcgaaaaacaaacaaaaataaaaccaaaaaaaaggaatgcaacacgaggacttcccaggaggtcacccatcctagtactactctcgcccaagcacgcttaacttcggagttctgatgggatccggtgctttagtgctggtatgatcgcatccgtcatatcctgcgtccttgaaagggaaatgtgcccttgggccatttctaagtattttggtgattgagtgcaaacacaagtgcttaaatgtgaaaatatgcccatagatgaacaaagtgcaaatcacaagtaaaggtatgtttctaagccttagtacattagttttgtgtactaacatcttgtctaagtgttagaaacaggagaaagaagaaaagaaaagaagtggagagtggctgtgtacagccaaaggctgcttcggactggggcaccggactgtccggtgtgcaccggacagtgtccggtgcgccagaccagcacagagcaaaccagccgctctcgggtttttctccggcgacttcggctaaaattcaccggactgtccggtgtgcaccggactgtccggtgagccaacggtcggccagggtcaacggtcggccgcgcgatctgcgcga

SEQ ID NO: 5426 - DNA, 1047 bp, Zea mays
  Zm_smallRNAprecursor_915
actggacatccttcctccgcacaaagtacccgaaaaacgccccttaaaacaaataaaaggtaatttaacacgagaacggtcacccatttttactatggtttggtgttcgaaaaacaaacaaaaataaaacaaaaaaaaggaatgcaacacgaggacttcccaggaggtcacccatcctagtactactctcgcccaagcatgcttaacttcggagttctgatgggatccggtgctttagtgctggtatgatcgcatccatcatatcctgcgtcctccttcctcttatgcccacacctccgtgctcggctcgcccacggcactggacatccttcctccgcacaaagtacccgaaaaacgccccttaaaacaaataaaaggtaatttaacacgagaacggtcacccatttttactatggtttggtgttcgaaaaacaaacaaaaataaaaccaaaaaaaaggaatgcaacacgaggacttcccaggaggtcacccatcctagtactactctcgcccaagcacgcttaacttcggagttctgatgggatccggtgctttagtgctggtatgatcgcatccgtcatatcctgcgtccttgaaagggaaatgtgcccttgggccatttctaagtattttggtgattgagtgcaaacacaagtgcttaaatgtgaaaatatgcccatagatgaacaaagtgcaaatcacaagtaaaggtatgtttctaagccttagtacattagttttgtgtactaacatcttgtctaagtgttagaaacaggagaaagaagaaaagaaaagaagtggagagtggctgtgtacagccaaaggctgcttcggactggggcaccggactgtccggtgtgcaccggacagtgtccggtgcgccagaccagcacagagcaaaccagccgctctcgggtttttctccggcgacttcggctaaaattcaccggactgtccggtgtgcaccggactgtccggtgagccaacggtcggccagggtcaacggtcggccgcgcgatctgcgcgagacacgtggccatgccaacg

SEQ ID NO: 5427 - DNA, 1192 bp, Zea mays
  Zm_smallRNAprecursor_916
ggtttggggtcgaaaaacaaacaaaaatgaaaccaaaaaaaaggaatgcaacacgaggacttcccaggaggtcacccatccgagtactactctcgcccaagcacgcttaacttcggagttctgatgggatccggtgctttagtgctggtatgatcgcatccgtcatatcctgcgtcctccttcctcttatgcccacacctccgtgctcggctcgcccacggcactggacatccttcctccgcacaaagtacccgaaaaacgccccttaaaacaaataaaaggtaatttaacacgagaacggtcacccatttttactatggtttggtgttcgaaaaacaaacaaaaatgaaaccaaaaaaaaaggaatgcaacacgaggacttcccaggaggtcacccatcctagtactactctcgcccaagcacgcttaacttcggagttctgatgggatccggtgctttagtgctggtatgatcgcatccgtcatatcctgcgtcctccttcctcttatgcccacacctccgtgctcggctcgcccacggcactggacatccttcctccgcacaaagtacccgaaaaacgccccttaaaacaaataaaaggtaatttaacacgagaacggtcacccatttttactatggtttggtgttcggaaaacaaacaaaaataaaaccaaaaaaaaggaatgcaacacgaggacttcccaggaggtcacccatcctagtactactctcgcccaagcacgcttaacttcggagttctgatgggatccagtgctttagtgctggtatgatcgcatccgtcatatccagcgttctccttcctcttatgcccacacctccgtgctcggctcgcccacggcactggacatccttcctccgcacaaagtacccgaaaaacgccacttaaaacaaataaaaggtaatttaacacgagaacggtcacccatttttactatggtttggtgttcgaaaaacaaacaaaaataaaaccaaaaaaaaggaatgcaacacgaggacttcctaggaggtcacccatcctagtactactctcgcccaagcacgcttaacttcgtagttctgatgggatccagtgctttagtgctggtatgatcgcatccgtcatatcctgcgtcctccttcctcttatgcccacacctccgtgctcggctcgcccacggcactggacatcca

SEQ ID NO: 5428 - DNA, 1129 bp, Zea mays
  Zm_smallRNAprecursor_917
cccacacctccgtgctcggctcgcccacggcactggacatccttcctccgcacaaagtacccgaaaaacgccccttaaaacaaataaaaggtaatttaacacgagaacggtcacccatttttactatggtttggtgttcgaaaaacaaacaaaaatgaaaccaaaaaaaaaggaatgcaacacgaggacttcccaggaggtcacccatcctagtactactctcgcccaagcacgcttaacttcggagttctgatgggatccggtgctttagtgctggtatgatcgcatccgtcatatcctgcgtcctccttcctcttatgcccacacctccgtgctcggctcgcccacggcactggacatccttcctccgcacaaagtacccgaaaaacgccccttaaaacaaataaaaggtaatttaacacgagaacggtcacccatttttactatggtttggtgttcggaaaacaaacaaaaataaaaccaaaaaaaaggaatgcaacacgaggacttcccaggaggtcacccatcctagtactactctcgcccaagcacgcttaacttcggagttctgatgggatccagtgctttagtgctggtatgatcgcatccgtcatatccagcgttctccttcctcttatgcccacacctccgtgctcggctcgcccacggcactggacatccttcctccgcacaaagtacccgaaaaacgccacttaaaacaaataaaaggtaatttaacacgagaacggtcacccatttttactatggtttggtgttcgaaaaacaaacaaaaataaaaccaaaaaaaaggaatgcaacacgaggacttcctaggaggtcacccatcctagtactactctcgcccaagcacgcttaacttcgtagttctgatgggatccagtgctttagtgctggtatgatcgcatccgtcatatcctgcgtcctccttcctcttatgcccacacctccgtgctcggctcgcccacggcactggacatccatcctccgcacaaagtacccgaaaaacgccccttaaaacaaataaaaggtaatttaacacgagaaaggtcacccatttttactatggtttggtgttcgaaaaacaaacaaaaataaaacaaaaaaaaag

SEQ ID NO: 5429 - DNA, 1041 bp, Zea mays
  Zm_smallRNAprecursor_918
ctcgcccacggcactggacatccttcctccgcacaaagtacccgaaaaacgccccttaaaacaaataaaaggtaatttaacacgagaacggtcacccatttttactatggtttggtgttcgaaaaacaaacaaaaatgaaaccaaaaaaaaaggaatgcaacacgaggacttcccaggaggtcacccatcctagtactactctcgcccaagcacgcttaacttcggagttctgatgggatccggtgctttagtgctggtatgatcgcatccgtcatatcctgcgtcctccttcctcttatgcccacacctccgtgctcggctcgcccacggcactggacatccttcctccgcacaaagtacccgaaaaacgccccttaaaacaaataaaaggtaatttaacacgagaacggtcacccatttttactatggtttggtgttcggaaaacaaacaaaaataaaaccaaaaaaaaggaatgcaacacgaggacttcccaggaggtcacccatcctagtactactctcgcccaagcacgcttaacttcggagttctgatgggatccagtgctttagtgctggtatgatcgcatccgtcatatccagcgttctccttcctcttatgcccacacctccgtgctcggctcgcccacggcactggacatccttcctccgcacaaagtacccgaaaaacgccacttaaaacaaataaaaggtaatttaacacgagaacggtcacccatttttactatggtttggtgttcgaaaaacaaacaaaaataaaaccaaaaaaaaggaatgcaacacgaggacttcctaggaggtcacccatcctagtactactctcgcccaagcacgcttaacttcgtagttctgatgggatccagtgctttagtgctggtatgatcgcatccgtcatatcctgcgtcctccttcctcttatgcccacacctccgtgctcggctcgcccacggcactggacatccatcctccgcacaaagtacccgaaaaacgccccttaaaacaaataaaaggtaatttaacac

SEQ ID NO: 5430 - DNA, 1037 bp, Zea mays
  Zm_smallRNAprecursor_919
cccacggcactggacatccttcctccgcacaaagtacccgaaaaacgccccttaaaacaaataaaaggtaatttaacacgagaacggtcacccatttttactatggtttggtgttcgaaaaacaaacaaaaatgaaaccaaaaaaaaaggaatgcaacacgaggacttcccaggaggtcacccatcctagtactactctcgcccaagcacgcttaacttcggagttctgatgggatccggtgctttagtgctggtatgatcgcatccgtcatatcctgcgtcctccttcctcttatgcccacacctccgtgctcggctcgcccacggcactggacatccttcctccgcacaaagtacccgaaaaacgccccttaaaacaaataaaaggtaatttaacacgagaacggtcacccatttttactatggtttggtgttcggaaaacaaacaaaaataaaaccaaaaaaaaggaatgcaacacgaggacttcccaggaggtcacccatcctagtactactctcgcccaagcacgcttaacttcggagttctgatgggatccagtgctttagtgctggtatgatcgcatccgtcatatccagcgttctccttcctcttatgcccacacctccgtgctcggctcgcccacggcactggacatccttcctccgcacaaagtacccgaaaaacgccacttaaaacaaataaaaggtaatttaacacgagaacggtcacccatttttactatggtttggtgttcgaaaaacaaacaaaaataaaaccaaaaaaaaggaatgcaacacgaggacttcctaggaggtcacccatcctagtactactctcgcccaagcacgcttaacttcgtagttctgatgggatccagtgctttagtgctggtatgatcgcatccgtcatatcctgcgtcctccttcctcttatgcccacacctccgtgctcggctcgcccacggcactggacatccatcctccgcacaaagtacccgaaaaacgccccttaaaacaaataaaaggtaatttaacac

SEQ ID NO: 5431 - DNA, 1192 bp, Zea mays
  Zm_smallRNAprecursor_920
ggtttggtgttcggaaaacaaacaaaaataaaaccaaaaaaaaggaatgcaacacgaggacttcccaggaggtcacccatcctagtactactctcgcccaagcacgcttaacttcggagttctgatgggatccagtgctttagtgctggtatgatcgcatccgtcatatccagcgttctccttcctcttatgcccacacctccgtgctcggctcgcccacggcactggacatccttcctccgcacaaagtacccgaaaaacgccacttaaaacaaataaaaggtaatttaacacgagaacggtcacccatttttactatggtttggtgttcgaaaaacaaacaaaaataaaaccaaaaaaaaggaatgcaacacgaggacttcctaggaggtcacccatcctagtactactctcgcccaagcacgcttaacttcgtagttctgatgggatccagtgctttagtgctggtatgatcgcatccgtcatatcctgcgtcctccttcctcttatgcccacacctccgtgctcggctcgcccacggcactggacatccatcctccgcacaaagtacccgaaaaacgccccttaaaacaaataaaaggtaatttaacacgagaaaggtcacccatttttactatggtttggtgttcgaaaaacaaacaaaaataaaacaaaaaaaaagaaatgcaacacgaggacttcccaggaggtcacccatcctagtactactctcgcccaagcacgcttaactttggagttctgatgggatccggtgctttagtgctggtatgatcgcatccgtcatatcttgcgtcctccttcctcttatgcccacacctccgtgctcggctcgcccacggcactggacatctttcctccgcacaaagtacccgaaaacgccccttaaaacaaataaaaggtaatttaacacgagaacggtcacccatttttactatggtttggtgttcgaaaaacaaacaaaaataaaaccaaaaaaaaggaatgcaacacgaggacttcccaggaggtcacccatcctagtactactctcgcccaagcacgcttaacttcggagttctgatgggatccggtgctttagtgctggtatgatcgcatccatcatatcctgcgtcctccttcctcttatgcccacacctccgtgctcggctcgcccacggcactggacatcctt

SEQ ID NO: 5432 - DNA, 1129 bp, Zea mays
  Zm_smallRNAprecursor_921
gcccacacctccgtgctcggctcgcccacggcactggacatccttcctccgcacaaagtacccgaaaaacgccacttaaaacaaataaaaggtaatttaacacgagaacggtcacccatttttactatggtttggtgttcgaaaaacaaacaaaaataaaaccaaaaaaaaggaatgcaacacgaggacttcctaggaggtcacccatcctagtactactctcgcccaagcacgcttaacttcgtagttctgatgggatccagtgctttagtgctggtatgatcgcatccgtcatatcctgcgtcctccttcctcttatgcccacacctccgtgctcggctcgcccacggcactggacatccatcctccgcacaaagtacccgaaaaacgccccttaaaacaaataaaaggtaatttaacacgagaaaggtcacccatttttactatggtttggtgttcgaaaaacaaacaaaaataaaacaaaaaaaaagaaatgcaacacgaggacttcccaggaggtcacccatcctagtactactctcgcccaagcacgcttaactttggagttctgatgggatccggtgctttagtgctggtatgatcgcatccgtcatatcttgcgtcctccttcctcttatgcccacacctccgtgctcggctcgcccacggcactggacatctttcctccgcacaaagtacccgaaaacgccccttaaaacaaataaaaggtaatttaacacgagaacggtcacccatttttactatggtttggtgttcgaaaaacaaacaaaaataaaaccaaaaaaaaggaatgcaacacgaggacttcccaggaggtcacccatcctagtactactctcgcccaagcacgcttaacttcggagttctgatgggatccggtgctttagtgctggtatgatcgcatccatcatatcctgcgtcctccttcctcttatgcccacacctccgtgctcggctcgcccacggcactggacatccttcctccgcacaaagtacccgaaaaacgccccttaaaacaaataaaaggtaatttaacacgagaacggtcacccatttttactatggtttggtgttcgaaaaacaaacaaaaataaaaccaaaaaaagga

SEQ ID NO: 5433 - DNA, 1054 bp, Zea mays
  Zm_smallRNAprecursor_922
gctcggctcgcccacggcactggacatccttcctccgcacaaagtacccgaaaaacgccacttaaaacaaataaaaggtaatttaacacgagaacggtcacccatttttactatggtttggtgttcgaaaaacaaacaaaaataaaaccaaaaaaaaggaatgcaacacgaggacttcctaggaggtcacccatcctagtactactctcgcccaagcacgcttaacttcgtagttctgatgggatccagtgctttagtgctggtatgatcgcatccgtcatatcctgcgtcctccttcctcttatgcccacacctccgtgctcggctcgcccacggcactggacatccatcctccgcacaaagtacccgaaaaacgccccttaaaacaaataaaaggtaatttaacacgagaaaggtcacccatttttactatggtttggtgttcgaaaaacaaacaaaaataaaacaaaaaaaaagaaatgcaacacgaggacttcccaggaggtcacccatcctagtactactctcgcccaagcacgcttaactttggagttctgatgggatccggtgctttagtgctggtatgatcgcatccgtcatatcttgcgtcctccttcctcttatgcccacacctccgtgctcggctcgcccacggcactggacatctttcctccgcacaaagtacccgaaaacgccccttaaaacaaataaaaggtaatttaacacgagaacggtcacccatttttactatggtttggtgttcgaaaaacaaacaaaaataaaaccaaaaaaaaggaatgcaacacgaggacttcccaggaggtcacccatcctagtactactctcgcccaagcacgcttaacttcggagttctgatgggatccggtgctttagtgctggtatgatcgcatccatcatatcctgcgtcctccttcctcttatgcccacacctccgtgctcggctcgcccacggcactggacatccttcctccgcacaaagtacccgaaaaacgccccttaaaacaaataaaaggtaatttaacacgagaacggt

SEQ ID NO: 5434 - DNA, 1047 bp, Zea mays
  Zm_smallRNAprecursor_923
ctggacatccttcctccgcacaaagtacccgaaaaacgccacttaaaacaaataaaaggtaatttaacacgagaacggtcacccatttttactatggtttggtgttcgaaaaacaaacaaaaataaaaccaaaaaaaaggaatgcaacacgaggacttcctaggaggtcacccatcctagtactactctcgcccaagcacgcttaacttcgtagttctgatgggatccagtgctttagtgctggtatgatcgcatccgtcatatcctgcgtcctccttcctcttatgcccacacctccgtgctcggctcgcccacggcactggacatccatcctccgcacaaagtacccgaaaaacgccccttaaaacaaataaaaggtaatttaacacgagaaaggtcacccatttttactatggtttggtgttcgaaaaacaaacaaaaataaaacaaaaaaaaagaaatgcaacacgaggacttcccaggaggtcacccatcctagtactactctcgcccaagcacgcttaactttggagttctgatgggatccggtgctttagtgctggtatgatcgcatccgtcatatcttgcgtcctccttcctcttatgcccacacctccgtgctcggctcgcccacggcactggacatctttcctccgcacaaagtacccgaaaacgccccttaaaacaaataaaaggtaatttaacacgagaacggtcacccatttttactatggtttggtgttcgaaaaacaaacaaaaataaaaccaaaaaaaaggaatgcaacacgaggacttcccaggaggtcacccatcctagtactactctcgcccaagcacgcttaacttcggagttctgatgggatccggtgctttagtgctggtatgatcgcatccatcatatcctgcgtcctccttcctcttatgcccacacctccgtgctcggctcgcccacggcactggacatccttcctccgcacaaagtacccgaaaaacgccccttaaaacaaataaaaggtaatttaacacgagaacggtcacccattttta

SEQ ID NO: 5435 - DNA, 1191 bp, Zea mays
  Zm_smallRNAprecursor_924
ggtttggtgttcgaaaaacaaacaaaaataaaaccaaaaaaaaggaatgcaacacgaggacttcctaggaggtcacccatcctagtactactctcgcccaagcacgcttaacttcgtagttctgatgggatccagtgctttagtgctggtatgatcgcatccgtcatatcctgcgtcctccttcctcttatgcccacacctccgtgctcggctcgcccacggcactggacatccatcctccgcacaaagtacccgaaaaacgccccttaaaacaaataaaaggtaatttaacacgagaaaggtcacccatttttactatggtttggtgttcgaaaaacaaacaaaaataaaacaaaaaaaaagaaatgcaacacgaggacttcccaggaggtcacccatcctagtactactctcgcccaagcacgcttaactttggagttctgatgggatccggtgctttagtgctggtatgatcgcatccgtcatatcttgcgtcctccttcctcttatgcccacacctccgtgctcggctcgcccacggcactggacatctttcctccgcacaaagtacccgaaaacgccccttaaaacaaataaaaggtaatttaacacgagaacggtcacccatttttactatggtttggtgttcgaaaaacaaacaaaaataaaaccaaaaaaaaggaatgcaacacgaggacttcccaggaggtcacccatcctagtactactctcgcccaagcacgcttaacttcggagttctgatgggatccggtgctttagtgctggtatgatcgcatccatcatatcctgcgtcctccttcctcttatgcccacacctccgtgctcggctcgcccacggcactggacatccttcctccgcacaaagtacccgaaaaacgccccttaaaacaaataaaaggtaatttaacacgagaacggtcacccatttttactatggtttggtgttcgaaaaacaaacaaaaataaaaccaaaaaaaggaatgcaacacgaggacttcccagggaggtccacccatcctagtactactctcgcccaagcacgcttaacttcggagttctgatgggatccggtgctttagtgctggtatgatcgcatccgtcatatcctgcgtcctccttcctcttatgcccacacctccgtgctcggctcgcccacggcactggacatcc

SEQ ID NO: 5436 - DNA, 1129 bp, Zea mays
  Zm_smallRNAprecursor_925
tgcccacacctccgtgctcggctcgcccacggcactggacatccatcctccgcacaaagtacccgaaaaacgccccttaaaacaaataaaaggtaatttaacacgagaaaggtcacccatttttactatggtttggtgttcgaaaaacaaacaaaaataaaacaaaaaaaaagaaatgcaacacgaggacttcccaggaggtcacccatcctagtactactctcgcccaagcacgcttaactttggagttctgatgggatccggtgctttagtgctggtatgatcgcatccgtcatatcttgcgtcctccttcctcttatgcccacacctccgtgctcggctcgcccacggcactggacatctttcctccgcacaaagtacccgaaaacgccccttaaaacaaataaaaggtaatttaacacgagaacggtcacccatttttactatggtttggtgttcgaaaaacaaacaaaaataaaaccaaaaaaaaggaatgcaacacgaggacttcccaggaggtcacccatcctagtactactctcgcccaagcacgcttaacttcggagttctgatgggatccggtgctttagtgctggtatgatcgcatccatcatatcctgcgtcctccttcctcttatgcccacacctccgtgctcggctcgcccacggcactggacatccttcctccgcacaaagtacccgaaaaacgccccttaaaacaaataaaaggtaatttaacacgagaacggtcacccatttttactatggtttggtgttcgaaaaacaaacaaaaataaaaccaaaaaaaggaatgcaacacgaggacttcccagggaggtccacccatcctagtactactctcgcccaagcacgcttaacttcggagttctgatgggatccggtgctttagtgctggtatgatcgcatccgtcatatcctgcgtcctccttcctcttatgcccacacctccgtgctcggctcgcccacggcactggacatccttcctccgcacaaagtacccgaaaaacgccccttaaaacaaataaaaggtaatttaacacgagaacggtcacccatttttactatggtttggtgttcgaaaaacaaacaaaaataaaaccaaaaaaaa

SEQ ID NO: 5437 - DNA, 1054 bp, Zea mays
  Zm_smallRNAprecursor_926
tgctcggctcgcccacggcactggacatccatcctccgcacaaagtacccgaaaaacgccccttaaaacaaataaaaggtaatttaacacgagaaaggtcacccatttttactatggtttggtgttcgaaaaacaaacaaaaataaaacaaaaaaaaagaaatgcaacacgaggacttcccaggaggtcacccatcctagtactactctcgcccaagcacgcttaactttggagttctgatgggatccggtgctttagtgctggtatgatcgcatccgtcatatcttgcgtcctccttcctcttatgcccacacctccgtgctcggctcgcccacggcactggacatctttcctccgcacaaagtacccgaaaacgccccttaaaacaaataaaaggtaatttaacacgagaacggtcacccatttttactatggtttggtgttcgaaaaacaaacaaaaataaaaccaaaaaaaaggaatgcaacacgaggacttcccaggaggtcacccatcctagtactactctcgcccaagcacgcttaacttcggagttctgatgggatccggtgctttagtgctggtatgatcgcatccatcatatcctgcgtcctccttcctcttatgcccacacctccgtgctcggctcgcccacggcactggacatccttcctccgcacaaagtacccgaaaaacgccccttaaaacaaataaaaggtaatttaacacgagaacggtcacccatttttactatggtttggtgttcgaaaaacaaacaaaaataaaaccaaaaaaaggaatgcaacacgaggacttcccagggaggtccacccatcctagtactactctcgcccaagcacgcttaacttcggagttctgatgggatccggtgctttagtgctggtatgatcgcatccgtcatatcctgcgtcctccttcctcttatgcccacacctccgtgctcggctcgcccacggcactggacatccttcctccgcacaaagtacccgaaaaacgccccttaaaacaaataaaaggtaatttaacacgagaacg

SEQ ID NO: 5438 - DNA, 1041 bp, Zea mays
  Zm_smallRNAprecursor_927
ggctcgcccacggcactggacatccatcctccgcacaaagtacccgaaaaacgccccttaaaacaaataaaaggtaatttaacacgagaaaggtcacccatttttactatggtttggtgttcgaaaaacaaacaaaaataaaacaaaaaaaaagaaatgcaacacgaggacttcccaggaggtcacccatcctagtactactctcgcccaagcacgcttaactttggagttctgatgggatccggtgctttagtgctggtatgatcgcatccgtcatatcttgcgtcctccttcctcttatgcccacacctccgtgctcggctcgcccacggcactggacatctttcctccgcacaaagtacccgaaaacgccccttaaaacaaataaaaggtaatttaacacgagaacggtcacccatttttactatggtttggtgttcgaaaaacaaacaaaaataaaaccaaaaaaaaggaatgcaacacgaggacttcccaggaggtcacccatcctagtactactctcgcccaagcacgcttaacttcggagttctgatgggatccggtgctttagtgctggtatgatcgcatccatcatatcctgcgtcctccttcctcttatgcccacacctccgtgctcggctcgcccacggcactggacatccttcctccgcacaaagtacccgaaaaacgccccttaaaacaaataaaaggtaatttaacacgagaacggtcacccatttttactatggtttggtgttcgaaaaacaaacaaaaataaaaccaaaaaaaggaatgcaacacgaggacttcccagggaggtccacccatcctagtactactctcgcccaagcacgcttaacttcggagttctgatgggatccggtgctttagtgctggtatgatcgcatccgtcatatcctgcgtcctccttcctcttatgcccacacctccgtgctcggctcgcccacggcactggacatccttcctccgcacaaagtacccgaaaaacgccccttaaaacaaataaaaggtaatttaaca

SEQ ID NO: 5439 - DNA, 1037 bp, Zea mays
  Zm_smallRNAprecursor_928
cgcccacggcactggacatccatcctccgcacaaagtacccgaaaaacgccccttaaaacaaataaaaggtaatttaacacgagaaaggtcacccatttttactatggtttggtgttcgaaaaacaaacaaaaataaaacaaaaaaaaagaaatgcaacacgaggacttcccaggaggtcacccatcctagtactactctcgcccaagcacgcttaactttggagttctgatgggatccggtgctttagtgctggtatgatcgcatccgtcatatcttgcgtcctccttcctcttatgcccacacctccgtgctcggctcgcccacggcactggacatctttcctccgcacaaagtacccgaaaacgccccttaaaacaaataaaaggtaatttaacacgagaacggtcacccatttttactatggtttggtgttcgaaaaacaaacaaaaataaaaccaaaaaaaaggaatgcaacacgaggacttcccaggaggtcacccatcctagtactactctcgcccaagcacgcttaacttcggagttctgatgggatccggtgctttagtgctggtatgatcgcatccatcatatcctgcgtcctccttcctcttatgcccacacctccgtgctcggctcgcccacggcactggacatccttcctccgcacaaagtacccgaaaaacgccccttaaaacaaataaaaggtaatttaacacgagaacggtcacccatttttactatggtttggtgttcgaaaaacaaacaaaaataaaaccaaaaaaaggaatgcaacacgaggacttcccagggaggtccacccatcctagtactactctcgcccaagcacgcttaacttcggagttctgatgggatccggtgctttagtgctggtatgatcgcatccgtcatatcctgcgtcctccttcctcttatgcccacacctccgtgctcggctcgcccacggcactggacatccttcctccgcacaaagtacccgaaaaacgccccttaaaacaaataaaaggtaatttaaca

SEQ ID NO: 5440 - DNA, 1047 bp, Zea mays
  Zm_smallRNAprecursor_929
actggacatccatcctccgcacaaagtacccgaaaaacgccccttaaaacaaataaaaggtaatttaacacgagaaaggtcacccatttttactatggtttggtgttcgaaaaacaaacaaaaataaaacaaaaaaaaagaaatgcaacacgaggacttcccaggaggtcacccatcctagtactactctcgcccaagcacgcttaactttggagttctgatgggatccggtgctttagtgctggtatgatcgcatccgtcatatcttgcgtcctccttcctcttatgcccacacctccgtgctcggctcgcccacggcactggacatctttcctccgcacaaagtacccgaaaacgccccttaaaacaaataaaaggtaatttaacacgagaacggtcacccatttttactatggtttggtgttcgaaaaacaaacaaaaataaaaccaaaaaaaaggaatgcaacacgaggacttcccaggaggtcacccatcctagtactactctcgcccaagcacgcttaacttcggagttctgatgggatccggtgctttagtgctggtatgatcgcatccatcatatcctgcgtcctccttcctcttatgcccacacctccgtgctcggctcgcccacggcactggacatccttcctccgcacaaagtacccgaaaaacgccccttaaaacaaataaaaggtaatttaacacgagaacggtcacccatttttactatggtttggtgttcgaaaaacaaacaaaaataaaaccaaaaaaaggaatgcaacacgaggacttcccagggaggtccacccatcctagtactactctcgcccaagcacgcttaacttcggagttctgatgggatccggtgctttagtgctggtatgatcgcatccgtcatatcctgcgtcctccttcctcttatgcccacacctccgtgctcggctcgcccacggcactggacatccttcctccgcacaaagtacccgaaaaacgccccttaaaacaaataaaaggtaatttaacacgagaacggtcacccatttt

SEQ ID NO: 5441 - DNA, 1037 bp, Zea mays
  Zm_smallRNAprecursor_930
gcccacggcactggacatctttcctccgcacaaagtacccgaaaacgccccttaaaacaaataaaaggtaatttaacacgagaacggtcacccatttttactatggtttggtgttcgaaaaacaaacaaaaataaaaccaaaaaaaaggaatgcaacacgaggacttcccaggaggtcacccatcctagtactactctcgcccaagcacgcttaacttcggagttctgatgggatccggtgctttagtgctggtatgatcgcatccatcatatcctgcgtcctccttcctcttatgcccacacctccgtgctcggctcgcccacggcactggacatccttcctccgcacaaagtacccgaaaaacgccccttaaaacaaataaaaggtaatttaacacgagaacggtcacccatttttactatggtttggtgttcgaaaaacaaacaaaaataaaaccaaaaaaaggaatgcaacacgaggacttcccagggaggtccacccatcctagtactactctcgcccaagcacgcttaacttcggagttctgatgggatccggtgctttagtgctggtatgatcgcatccgtcatatcctgcgtcctccttcctcttatgcccacacctccgtgctcggctcgcccacggcactggacatccttcctccgcacaaagtacccgaaaaacgccccttaaaacaaataaaaggtaatttaacacgagaacggtcacccatttttactatggtttggtgttcgaaaaacaaacaaaaataaaaccaaaaaaaaaggaatgcaacacgaggacttcccaggaggtcacccatcctagtactactctcgcccaagcacgcttaacttcaaagttctgatgggatccggtgctttagtgctggtatgatcgcatccgtcatatcctgcgtcctccttcctcttatgcccacacctccgtgctcggctcgcccacggcactggacatccttcctccgcacaaagtacccgaaaaacgccccttaaaacaaataaaaggtaatttaaca

SEQ ID NO: 5442 - DNA, 1047 bp, Zea mays
  Zm_smallRNAprecursor_931
ctggacatctttcctccgcacaaagtacccgaaaacgccccttaaaacaaataaaaggtaatttaacacgagaacggtcacccatttttactatggtttggtgttcgaaaaacaaacaaaaataaaaccaaaaaaaaggaatgcaacacgaggacttcccaggaggtcacccatcctagtactactctcgcccaagcacgcttaacttcggagttctgatgggatccggtgctttagtgctggtatgatcgcatccatcatatcctgcgtcctccttcctcttatgcccacacctccgtgctcggctcgcccacggcactggacatccttcctccgcacaaagtacccgaaaaacgccccttaaaacaaataaaaggtaatttaacacgagaacggtcacccatttttactatggtttggtgttcgaaaaacaaacaaaaataaaaccaaaaaaaggaatgcaacacgaggacttcccagggaggtccacccatcctagtactactctcgcccaagcacgcttaacttcggagttctgatgggatccggtgctttagtgctggtatgatcgcatccgtcatatcctgcgtcctccttcctcttatgcccacacctccgtgctcggctcgcccacggcactggacatccttcctccgcacaaagtacccgaaaaacgccccttaaaacaaataaaaggtaatttaacacgagaacggtcacccatttttactatggtttggtgttcgaaaaacaaacaaaaataaaaccaaaaaaaaaggaatgcaacacgaggacttcccaggaggtcacccatcctagtactactctcgcccaagcacgcttaacttcaaagttctgatgggatccggtgctttagtgctggtatgatcgcatccgtcatatcctgcgtcctccttcctcttatgcccacacctccgtgctcggctcgcccacggcactggacatccttcctccgcacaaagtacccgaaaaacgccccttaaaacaaataaaaggtaatttaacacgagaacggtcacccatttt

SEQ ID NO: 5443 - DNA, 1193 bp, Zea mays
  Zm_smallRNAprecursor_932
gtttggtgttcgaaaaacaaacaaaaataaaaccaaaaaaaaggaatgcaacacgaggacttcccaggaggtcacccatcctagtactactctcgcccaagcacgcttaacttcggagttctgatgggatccggtgctttagtgctggtatgatcgcatccatcatatcctgcgtcctccttcctcttatgcccacacctccgtgctcggctcgcccacggcactggacatccttcctccgcacaaagtacccgaaaaacgccccttaaaacaaataaaaggtaatttaacacgagaacggtcacccatttttactatggtttggtgttcgaaaaacaaacaaaaataaaaccaaaaaaaggaatgcaacacgaggacttcccagggaggtccacccatcctagtactactctcgcccaagcacgcttaacttcggagttctgatgggatccggtgctttagtgctggtatgatcgcatccgtcatatcctgcgtcctccttcctcttatgcccacacctccgtgctcggctcgcccacggcactggacatccttcctccgcacaaagtacccgaaaaacgccccttaaaacaaataaaaggtaatttaacacgagaacggtcacccatttttactatggtttggtgttcgaaaaacaaacaaaaataaaaccaaaaaaaaaggaatgcaacacgaggacttcccaggaggtcacccatcctagtactactctcgcccaagcacgcttaacttcaaagttctgatgggatccggtgctttagtgctggtatgatcgcatccgtcatatcctgcgtcctccttcctcttatgcccacacctccgtgctcggctcgcccacggcactggacatccttcctccgcacaaagtacccgaaaaacgccccttaaaacaaataaaaggtaatttaacacgagaacggtcacccatttttactatggtttggtgttcgaaaaacaaacaaaaataaaaccaaaaaaaaaggaatgcaacacaaggactttccaggaggtcacccatcctagtactactctcgcgcaagcacgcttaacttcggagttctgatgggatccggtgctttagtgctggtatgatcgcatctgtcatattctgcgtcctccttcctcttatgcccacacctccgtgctcggctcgcccacggcactggacatcc

SEQ ID NO: 5444 - DNA, 1129 bp, Zea mays
  Zm_smallRNAprecursor_933
ccacacctccgtgctcggctcgcccacggcactggacatccttcctccgcacaaagtacccgaaaaacgccccttaaaacaaataaaaggtaatttaacacgagaacggtcacccatttttactatggtttggtgttcgaaaaacaaacaaaaataaaaccaaaaaaaggaatgcaacacgaggacttcccagggaggtccacccatcctagtactactctcgcccaagcacgcttaacttcggagttctgatgggatccggtgctttagtgctggtatgatcgcatccgtcatatcctgcgtcctccttcctcttatgcccacacctccgtgctcggctcgcccacggcactggacatccttcctccgcacaaagtacccgaaaaacgccccttaaaacaaataaaaggtaatttaacacgagaacggtcacccatttttactatggtttggtgttcgaaaaacaaacaaaaataaaaccaaaaaaaaaggaatgcaacacgaggacttcccaggaggtcacccatcctagtactactctcgcccaagcacgcttaacttcaaagttctgatgggatccggtgctttagtgctggtatgatcgcatccgtcatatcctgcgtcctccttcctcttatgcccacacctccgtgctcggctcgcccacggcactggacatccttcctccgcacaaagtacccgaaaaacgccccttaaaacaaataaaaggtaatttaacacgagaacggtcacccatttttactatggtttggtgttcgaaaaacaaacaaaaataaaaccaaaaaaaaaggaatgcaacacaaggactttccaggaggtcacccatcctagtactactctcgcgcaagcacgcttaacttcggagttctgatgggatccggtgctttagtgctggtatgatcgcatctgtcatattctgcgtcctccttcctcttatgcccacacctccgtgctcggctcgcccacggcactggacatccttcctccgcacaaagtacccgaaaaacgccccttaaaacaaataaaaggtaatttaacacgagaacggtcacccatttttactatggtttggtgttcgaaaaacaaacaaaaataaaaccaaaaaaaa

SEQ ID NO: 5445 - DNA, 1054 bp, Zea mays
  Zm_smallRNAprecursor_934
tcggctcgcccacggcactggacatccttcctccgcacaaagtacccgaaaaacgccccttaaaacaaataaaaggtaatttaacacgagaacggtcacccatttttactatggtttggtgttcgaaaaacaaacaaaaataaaaccaaaaaaaggaatgcaacacgaggacttcccagggaggtccacccatcctagtactactctcgcccaagcacgcttaacttcggagttctgatgggatccggtgctttagtgctggtatgatcgcatccgtcatatcctgcgtcctccttcctcttatgcccacacctccgtgctcggctcgcccacggcactggacatccttcctccgcacaaagtacccgaaaaacgccccttaaaacaaataaaaggtaatttaacacgagaacggtcacccatttttactatggtttggtgttcgaaaaacaaacaaaaataaaaccaaaaaaaaaggaatgcaacacgaggacttcccaggaggtcacccatcctagtactactctcgcccaagcacgcttaacttcaaagttctgatgggatccggtgctttagtgctggtatgatcgcatccgtcatatcctgcgtcctccttcctcttatgcccacacctccgtgctcggctcgcccacggcactggacatccttcctccgcacaaagtacccgaaaaacgccccttaaaacaaataaaaggtaatttaacacgagaacggtcacccatttttactatggtttggtgttcgaaaaacaaacaaaaataaaaccaaaaaaaaaggaatgcaacacaaggactttccaggaggtcacccatcctagtactactctcgcgcaagcacgcttaacttcggagttctgatgggatccggtgctttagtgctggtatgatcgcatctgtcatattctgcgtcctccttcctcttatgcccacacctccgtgctcggctcgcccacggcactggacatccttcctccgcacaaagtacccgaaaaacgccccttaaaacaaataaaaggtaatttaacacgagaacg

SEQ ID NO: 5446 - DNA, 1047 bp, Zea mays
  Zm_smallRNAprecursor_935
ggacatccttcctccgcacaaagtacccgaaaaacgccccttaaaacaaataaaaggtaatttaacacgagaacggtcacccatttttactatggtttggtgttcgaaaaacaaacaaaaataaaaccaaaaaaaggaatgcaacacgaggacttcccagggaggtccacccatcctagtactactctcgcccaagcacgcttaacttcggagttctgatgggatccggtgctttagtgctggtatgatcgcatccgtcatatcctgcgtcctccttcctcttatgcccacacctccgtgctcggctcgcccacggcactggacatccttcctccgcacaaagtacccgaaaaacgccccttaaaacaaataaaaggtaatttaacacgagaacggtcacccatttttactatggtttggtgttcgaaaaacaaacaaaaataaaaccaaaaaaaaaggaatgcaacacgaggacttcccaggaggtcacccatcctagtactactctcgcccaagcacgcttaacttcaaagttctgatgggatccggtgctttagtgctggtatgatcgcatccgtcatatcctgcgtcctccttcctcttatgcccacacctccgtgctcggctcgcccacggcactggacatccttcctccgcacaaagtacccgaaaaacgccccttaaaacaaataaaaggtaatttaacacgagaacggtcacccatttttactatggtttggtgttcgaaaaacaaacaaaaataaaaccaaaaaaaaaggaatgcaacacaaggactttccaggaggtcacccatcctagtactactctcgcgcaagcacgcttaacttcggagttctgatgggatccggtgctttagtgctggtatgatcgcatctgtcatattctgcgtcctccttcctcttatgcccacacctccgtgctcggctcgcccacggcactggacatccttcctccgcacaaagtacccgaaaaacgccccttaaaacaaataaaaggtaatttaacacgagaacggtcacccatttt

SEQ ID NO: 5447 - DNA, 1054 bp, Zea mays
  Zm_smallRNAprecursor_936
tcggctcgcccacggcactggacatccttcctccgcacaaagtacccgaaaaacgccccttaaaacaaataaaaggtaatttaacacgagaacggtcacccatttttactatggtttggtgttcgaaaaacaaacaaaaataaaaccaaaaaaaaaggaatgcaacacgaggacttcccaggaggtcacccatcctagtactactctcgcccaagcacgcttaacttcaaagttctgatgggatccggtgctttagtgctggtatgatcgcatccgtcatatcctgcgtcctccttcctcttatgcccacacctccgtgctcggctcgcccacggcactggacatccttcctccgcacaaagtacccgaaaaacgccccttaaaacaaataaaaggtaatttaacacgagaacggtcacccatttttactatggtttggtgttcgaaaaacaaacaaaaataaaaccaaaaaaaaaggaatgcaacacaaggactttccaggaggtcacccatcctagtactactctcgcgcaagcacgcttaacttcggagttctgatgggatccggtgctttagtgctggtatgatcgcatctgtcatattctgcgtcctccttcctcttatgcccacacctccgtgctcggctcgcccacggcactggacatccttcctccgcacaaagtacccgaaaaacgccccttaaaacaaataaaaggtaatttaacacgagaacggtcacccatttttactatggtttggtgttcgaaaaacaaacaaaaataaaaccaaaaaaaaggaatgcaacacgaggacttcccaggaggtcacccatcctagtactactctcgcccaagcacgcttaacttcggagttctgatgggatccggtgctttagtgctggtatgatcgcatccgtcatatcttgcgtcctccttcctcttatgcccacacctccgtgctcggctcgcccacggcactggacatccttcctccgcacaaagtacccgaaaaacgcccattaaaacaaataaaaggtaatttaacacgagaacgg

SEQ ID NO: 5448 - DNA, 1041 bp, Zea mays
  Zm_smallRNAprecursor_937
tcgcccacggcactggacatccttcctccgcacaaagtacccgaaaaacgccccttaaaacaaataaaaggtaatttaacacgagaacggtcacccatttttactatggtttggtgttcgaaaaacaaacaaaaataaaaccaaaaaaaaaggaatgcaacacgaggacttcccaggaggtcacccatcctagtactactctcgcccaagcacgcttaacttcaaagttctgatgggatccggtgctttagtgctggtatgatcgcatccgtcatatcctgcgtcctccttcctcttatgcccacacctccgtgctcggctcgcccacggcactggacatccttcctccgcacaaagtacccgaaaaacgccccttaaaacaaataaaaggtaatttaacacgagaacggtcacccatttttactatggtttggtgttcgaaaaacaaacaaaaataaaaccaaaaaaaaaggaatgcaacacaaggactttccaggaggtcacccatcctagtactactctcgcgcaagcacgcttaacttcggagttctgatgggatccggtgctttagtgctggtatgatcgcatctgtcatattctgcgtcctccttcctcttatgcccacacctccgtgctcggctcgcccacggcactggacatccttcctccgcacaaagtacccgaaaaacgccccttaaaacaaataaaaggtaatttaacacgagaacggtcacccatttttactatggtttggtgttcgaaaaacaaacaaaaataaaaccaaaaaaaaggaatgcaacacgaggacttcccaggaggtcacccatcctagtactactctcgcccaagcacgcttaacttcggagttctgatgggatccggtgctttagtgctggtatgatcgcatccgtcatatcttgcgtcctccttcctcttatgcccacacctccgtgctcggctcgcccacggcactggacatccttcctccgcacaaagtacccgaaaaacgcccattaaaacaaataaaaggtaatttaacac

SEQ ID NO: 5449 - DNA, 1037 bp, Zea mays
  Zm_smallRNAprecursor_938
ccacggcactggacatccttcctccgcacaaagtacccgaaaaacgccccttaaaacaaataaaaggtaatttaacacgagaacggtcacccatttttactatggtttggtgttcgaaaaacaaacaaaaataaaaccaaaaaaaaaggaatgcaacacgaggacttcccaggaggtcacccatcctagtactactctcgcccaagcacgcttaacttcaaagttctgatgggatccggtgctttagtgctggtatgatcgcatccgtcatatcctgcgtcctccttcctcttatgcccacacctccgtgctcggctcgcccacggcactggacatccttcctccgcacaaagtacccgaaaaacgccccttaaaacaaataaaaggtaatttaacacgagaacggtcacccatttttactatggtttggtgttcgaaaaacaaacaaaaataaaaccaaaaaaaaaggaatgcaacacaaggactttccaggaggtcacccatcctagtactactctcgcgcaagcacgcttaacttcggagttctgatgggatccggtgctttagtgctggtatgatcgcatctgtcatattctgcgtcctccttcctcttatgcccacacctccgtgctcggctcgcccacggcactggacatccttcctccgcacaaagtacccgaaaaacgccccttaaaacaaataaaaggtaatttaacacgagaacggtcacccatttttactatggtttggtgttcgaaaaacaaacaaaaataaaaccaaaaaaaaggaatgcaacacgaggacttcccaggaggtcacccatcctagtactactctcgcccaagcacgcttaacttcggagttctgatgggatccggtgctttagtgctggtatgatcgcatccgtcatatcttgcgtcctccttcctcttatgcccacacctccgtgctcggctcgcccacggcactggacatccttcctccgcacaaagtacccgaaaaacgcccattaaaacaaataaaaggtaatttaacac

SEQ ID NO: 5450 - DNA, 1192 bp, Zea mays
  Zm_smallRNAprecursor_939
tttggtgttcgaaaaacaaacaaaaataaaaccaaaaaaaaaggaatgcaacacgaggacttcccaggaggtcacccatcctagtactactctcgcccaagcacgcttaacttcaaagttctgatgggatccggtgctttagtgctggtatgatcgcatccgtcatatcctgcgtcctccttcctcttatgcccacacctccgtgctcggctcgcccacggcactggacatccttcctccgcacaaagtacccgaaaaacgccccttaaaacaaataaaaggtaatttaacacgagaacggtcacccatttttactatggtttggtgttcgaaaaacaaacaaaaataaaaccaaaaaaaaaggaatgcaacacaaggactttccaggaggtcacccatcctagtactactctcgcgcaagcacgcttaacttcggagttctgatgggatccggtgctttagtgctggtatgatcgcatctgtcatattctgcgtcctccttcctcttatgcccacacctccgtgctcggctcgcccacggcactggacatccttcctccgcacaaagtacccgaaaaacgccccttaaaacaaataaaaggtaatttaacacgagaacggtcacccatttttactatggtttggtgttcgaaaaacaaacaaaaataaaaccaaaaaaaaggaatgcaacacgaggacttcccaggaggtcacccatcctagtactactctcgcccaagcacgcttaacttcggagttctgatgggatccggtgctttagtgctggtatgatcgcatccgtcatatcttgcgtcctccttcctcttatgcccacacctccgtgctcggctcgcccacggcactggacatccttcctccgcacaaagtacccgaaaaacgcccattaaaacaaataaaaggtaatttaacacgagaacggtcacccatttttactatggtttggtgttcgaaaacaaacaaaaataaaaccaaaaaaaggatgcaacacgaggacttcccaggaggtcacccatcctagtactactctcgcacaaacacgcttaaattcagagttctgatgggatccgatgctttagtgctggtatgatcacatccgtcatatcctgcgtcctccttcctcttatgcccacacctccgtgctcggctcgcccacgacactgaacatccttcc

SEQ ID NO: 5451 - DNA, 1129 bp, Zea mays
  Zm_smallRNAprecursor_940
cccacacctccgtgctcggctcgcccacggcactggacatccttcctccgcacaaagtacccgaaaaacgccccttaaaacaaataaaaggtaatttaacacgagaacggtcacccatttttactatggtttggtgttcgaaaaacaaacaaaaataaaaccaaaaaaaaaggaatgcaacacaaggactttccaggaggtcacccatcctagtactactctcgcgcaagcacgcttaacttcggagttctgatgggatccggtgctttagtgctggtatgatcgcatctgtcatattctgcgtcctccttcctcttatgcccacacctccgtgctcggctcgcccacggcactggacatccttcctccgcacaaagtacccgaaaaacgccccttaaaacaaataaaaggtaatttaacacgagaacggtcacccatttttactatggtttggtgttcgaaaaacaaacaaaaataaaaccaaaaaaaaggaatgcaacacgaggacttcccaggaggtcacccatcctagtactactctcgcccaagcacgcttaacttcggagttctgatgggatccggtgctttagtgctggtatgatcgcatccgtcatatcttgcgtcctccttcctcttatgcccacacctccgtgctcggctcgcccacggcactggacatccttcctccgcacaaagtacccgaaaaacgcccattaaaacaaataaaaggtaatttaacacgagaacggtcacccatttttactatggtttggtgttcgaaaacaaacaaaaataaaaccaaaaaaaggatgcaacacgaggacttcccaggaggtcacccatcctagtactactctcgcacaaacacgcttaaattcagagttctgatgggatccgatgctttagtgctggtatgatcacatccgtcatatcctgcgtcctccttcctcttatgcccacacctccgtgctcggctcgcccacgacactgaacatccttcctccgcacaaagtacccaaaaaatgcccaaaacgccccttaaaataataaaaggtaatttaacacgaggacggtcacccatttttactatggttcggtgttcgaaaaacaaaaaaaataaaacaaaaaa

SEQ ID NO: 5452 - DNA, 1054 bp, Zea mays
  Zm_smallRNAprecursor_941
ctcggctcgcccacggcactggacatccttcctccgcacaaagtacccgaaaaacgccccttaaaacaaataaaaggtaatttaacacgagaacggtcacccatttttactatggtttggtgttcgaaaaacaaacaaaaataaaaccaaaaaaaaaggaatgcaacacaaggactttccaggaggtcacccatcctagtactactctcgcgcaagcacgcttaacttcggagttctgatgggatccggtgctttagtgctggtatgatcgcatctgtcatattctgcgtcctccttcctcttatgcccacacctccgtgctcggctcgcccacggcactggacatccttcctccgcacaaagtacccgaaaaacgccccttaaaacaaataaaaggtaatttaacacgagaacggtcacccatttttactatggtttggtgttcgaaaaacaaacaaaaataaaaccaaaaaaaaggaatgcaacacgaggacttcccaggaggtcacccatcctagtactactctcgcccaagcacgcttaacttcggagttctgatgggatccggtgctttagtgctggtatgatcgcatccgtcatatcttgcgtcctccttcctcttatgcccacacctccgtgctcggctcgcccacggcactggacatccttcctccgcacaaagtacccgaaaaacgcccattaaaacaaataaaaggtaatttaacacgagaacggtcacccatttttactatggtttggtgttcgaaaacaaacaaaaataaaaccaaaaaaaggatgcaacacgaggacttcccaggaggtcacccatcctagtactactctcgcacaaacacgcttaaattcagagttctgatgggatccgatgctttagtgctggtatgatcacatccgtcatatcctgcgtcctccttcctcttatgcccacacctccgtgctcggctcgcccacgacactgaacatccttcctccgcacaaagtacccaaaaaatgcccaaaacgccccttaaaataataaaaggtaatttaacacgag

SEQ ID NO: 5453 - DNA, 1041 bp, Zea mays
  Zm_smallRNAprecursor_942
ctcgcccacggcactggacatccttcctccgcacaaagtacccgaaaaacgccccttaaaacaaataaaaggtaatttaacacgagaacggtcacccatttttactatggtttggtgttcgaaaaacaaacaaaaataaaaccaaaaaaaaaggaatgcaacacaaggactttccaggaggtcacccatcctagtactactctcgcgcaagcacgcttaacttcggagttctgatgggatccggtgctttagtgctggtatgatcgcatctgtcatattctgcgtcctccttcctcttatgcccacacctccgtgctcggctcgcccacggcactggacatccttcctccgcacaaagtacccgaaaaacgccccttaaaacaaataaaaggtaatttaacacgagaacggtcacccatttttactatggtttggtgttcgaaaaacaaacaaaaataaaaccaaaaaaaaggaatgcaacacgaggacttcccaggaggtcacccatcctagtactactctcgcccaagcacgcttaacttcggagttctgatgggatccggtgctttagtgctggtatgatcgcatccgtcatatcttgcgtcctccttcctcttatgcccacacctccgtgctcggctcgcccacggcactggacatccttcctccgcacaaagtacccgaaaaacgcccattaaaacaaataaaaggtaatttaacacgagaacggtcacccatttttactatggtttggtgttcgaaaacaaacaaaaataaaaccaaaaaaaggatgcaacacgaggacttcccaggaggtcacccatcctagtactactctcgcacaaacacgcttaaattcagagttctgatgggatccgatgctttagtgctggtatgatcacatccgtcatatcctgcgtcctccttcctcttatgcccacacctccgtgctcggctcgcccacgacactgaacatccttcctccgcacaaagtacccaaaaaatgcccaaaacgccccttaaaataataaaaggtaattt

SEQ ID NO: 5454 - DNA, 1037 bp, Zea mays
  Zm_smallRNAprecursor_943
cccacggcactggacatccttcctccgcacaaagtacccgaaaaacgccccttaaaacaaataaaaggtaatttaacacgagaacggtcacccatttttactatggtttggtgttcgaaaaacaaacaaaaataaaaccaaaaaaaaaggaatgcaacacaaggactttccaggaggtcacccatcctagtactactctcgcgcaagcacgcttaacttcggagttctgatgggatccggtgctttagtgctggtatgatcgcatctgtcatattctgcgtcctccttcctcttatgcccacacctccgtgctcggctcgcccacggcactggacatccttcctccgcacaaagtacccgaaaaacgccccttaaaacaaataaaaggtaatttaacacgagaacggtcacccatttttactatggtttggtgttcgaaaaacaaacaaaaataaaaccaaaaaaaaggaatgcaacacgaggacttcccaggaggtcacccatcctagtactactctcgcccaagcacgcttaacttcggagttctgatgggatccggtgctttagtgctggtatgatcgcatccgtcatatcttgcgtcctccttcctcttatgcccacacctccgtgctcggctcgcccacggcactggacatccttcctccgcacaaagtacccgaaaaacgcccattaaaacaaataaaaggtaatttaacacgagaacggtcacccatttttactatggtttggtgttcgaaaacaaacaaaaataaaaccaaaaaaaggatgcaacacgaggacttcccaggaggtcacccatcctagtactactctcgcacaaacacgcttaaattcagagttctgatgggatccgatgctttagtgctggtatgatcacatccgtcatatcctgcgtcctccttcctcttatgcccacacctccgtgctcggctcgcccacgacactgaacatccttcctccgcacaaagtacccaaaaaatgcccaaaacgccccttaaaataataaaaggtaattt

SEQ ID NO: 5455 - DNA, 1047 bp, Zea mays
  Zm_smallRNAprecursor_944
tggacatccttcctccgcacaaagtacccgaaaaacgccccttaaaacaaataaaaggtaatttaacacgagaacggtcacccatttttactatggtttggtgttcgaaaaacaaacaaaaataaaaccaaaaaaaaaggaatgcaacacaaggactttccaggaggtcacccatcctagtactactctcgcgcaagcacgcttaacttcggagttctgatgggatccggtgctttagtgctggtatgatcgcatctgtcatattctgcgtcctccttcctcttatgcccacacctccgtgctcggctcgcccacggcactggacatccttcctccgcacaaagtacccgaaaaacgccccttaaaacaaataaaaggtaatttaacacgagaacggtcacccatttttactatggtttggtgttcgaaaaacaaacaaaaataaaaccaaaaaaaaggaatgcaacacgaggacttcccaggaggtcacccatcctagtactactctcgcccaagcacgcttaacttcggagttctgatgggatccggtgctttagtgctggtatgatcgcatccgtcatatcttgcgtcctccttcctcttatgcccacacctccgtgctcggctcgcccacggcactggacatccttcctccgcacaaagtacccgaaaaacgcccattaaaacaaataaaaggtaatttaacacgagaacggtcacccatttttactatggtttggtgttcgaaaacaaacaaaaataaaaccaaaaaaaggatgcaacacgaggacttcccaggaggtcacccatcctagtactactctcgcacaaacacgcttaaattcagagttctgatgggatccgatgctttagtgctggtatgatcacatccgtcatatcctgcgtcctccttcctcttatgcccacacctccgtgctcggctcgcccacgacactgaacatccttcctccgcacaaagtacccaaaaaatgcccaaaacgccccttaaaataataaaaggtaatttaacacgaggacggtcaccca

SEQ ID NO: 5456 - DNA, 1189 bp, Zea mays
  Zm_smallRNAprecursor_945
gtttggtgttcgaaaaacaaacaaaaataaaaccaaaaaaaaaggaatgcaacacaaggactttccaggaggtcacccatcctagtactactctcgcgcaagcacgcttaacttcggagttctgatgggatccggtgctttagtgctggtatgatcgcatctgtcatattctgcgtcctccttcctcttatgcccacacctccgtgctcggctcgcccacggcactggacatccttcctccgcacaaagtacccgaaaaacgccccttaaaacaaataaaaggtaatttaacacgagaacggtcacccatttttactatggtttggtgttcgaaaaacaaacaaaaataaaaccaaaaaaaaggaatgcaacacgaggacttcccaggaggtcacccatcctagtactactctcgcccaagcacgcttaacttcggagttctgatgggatccggtgctttagtgctggtatgatcgcatccgtcatatcttgcgtcctccttcctcttatgcccacacctccgtgctcggctcgcccacggcactggacatccttcctccgcacaaagtacccgaaaaacgcccattaaaacaaataaaaggtaatttaacacgagaacggtcacccatttttactatggtttggtgttcgaaaacaaacaaaaataaaaccaaaaaaaggatgcaacacgaggacttcccaggaggtcacccatcctagtactactctcgcacaaacacgcttaaattcagagttctgatgggatccgatgctttagtgctggtatgatcacatccgtcatatcctgcgtcctccttcctcttatgcccacacctccgtgctcggctcgcccacgacactgaacatccttcctccgcacaaagtacccaaaaaatgcccaaaacgccccttaaaataataaaaggtaatttaacacgaggacggtcacccatttttactatggttcggtgttcgaaaaacaaaaaaaataaaacaaaaaaggaatgcaacacgaggacttcccaggaggtcatccatcctagtactactctcaacaaagcacgcttaacatcaaagttctgatgggatctggtgctttagtgttggtatgatcgcatccgtcatatcctgcgtcctcctttcctcttatgcccacaccttcgtgctcgactcgcccacggcactgaac

SEQ ID NO: 5457 - DNA, 1129 bp, Zea mays
  Zm_smallRNAprecursor_946
tatgcccacacctccgtgctcggctcgcccacggcactggacatccttcctccgcacaaagtacccgaaaaacgccccttaaaacaaataaaaggtaatttaacacgagaacggtcacccatttttactatggtttggtgttcgaaaaacaaacaaaaataaaaccaaaaaaaaggaatgcaacacgaggacttcccaggaggtcacccatcctagtactactctcgcccaagcacgcttaacttcggagttctgatgggatccggtgctttagtgctggtatgatcgcatccgtcatatcttgcgtcctccttcctcttatgcccacacctccgtgctcggctcgcccacggcactggacatccttcctccgcacaaagtacccgaaaaacgcccattaaaacaaataaaaggtaatttaacacgagaacggtcacccatttttactatggtttggtgttcgaaaacaaacaaaaataaaaccaaaaaaaggatgcaacacgaggacttcccaggaggtcacccatcctagtactactctcgcacaaacacgcttaaattcagagttctgatgggatccgatgctttagtgctggtatgatcacatccgtcatatcctgcgtcctccttcctcttatgcccacacctccgtgctcggctcgcccacgacactgaacatccttcctccgcacaaagtacccaaaaaatgcccaaaacgccccttaaaataataaaaggtaatttaacacgaggacggtcacccatttttactatggttcggtgttcgaaaaacaaaaaaaataaaacaaaaaaggaatgcaacacgaggacttcccaggaggtcatccatcctagtactactctcaacaaagcacgcttaacatcaaagttctgatgggatctggtgctttagtgttggtatgatcgcatccgtcatatcctgcgtcctcctttcctcttatgcccacaccttcgtgctcgactcgcccacggcactgaacatccttcctccgcacaaagtacccaaaaaatacgcaaaacgccccttaaaacaaataaaacaaaaaaggtaattcaacacgaggacggtcacccatttttactatggtttggtgttcaaaaaacaaac

SEQ ID NO: 5458 - DNA, 1129 bp, Zea mays
  Zm_smallRNAprecursor_947
acacgtagtagtaggggcatccacggcacggaacatagtaaagctgcacaaatgtactcgaaaaaagaccctaaaaacaaataaaaggtaagtgaacacgagaaacggtcaccctatttttattatgggtttggtgatagaaaaacaaaacaaaaaataaaacaaaaaaaaggaatgcaacaagaggtcttcccaagaggtcacccatcgtaatagtactctcgcccaagcacactcaacttcggagttctgaagggatccgatgccttagtgctggtatgattgcatccgtcatatcatgggtcctccttcctcttatgcccacacctccgtgctcggatcgcccacggctctggacatccttcctccgcacaaagtacccgaaaaacgccccttaaaagaaataaaaggtaatttaacacgagaacggtcacccatttttaatatggtttggtgttcgaaaaacaaacaaaaataaaaccaaaaaaaaggaatgcaacacgaggacttcccaggaggtcacccatcctagtactactctcgcccaagcacgcttatcttcggagttctgatgggattcggtgctttagtgctggtatgatcgcatccgtcatatcctgcgtcctccttcctcttatgcccacacctccgtgctcggctcgcccacggcactggacatccttcctccgcacaaagtacccgaaaaacgcccttaaaacaaataaaaggtaatttaacacgagaacggtaacccatttttactatggtttggtgttcgaaaaacaaacaaaaataaaaccaaaaaaaaggaatgcaaaacgaggacttcccaggaggtcacccatcctagtactactctcgcccaagcacgcttaacttcagagttctgatgggatccggtgctttagtgctggtatgatcgcatccgtcatatcatgcgtcctccttcctcttatgcccacacctccgtgctcggctcgcccacggcactggacgtccttcctccgcacaaagtacccgaaaaacgccccttaaaacaaataaaaggtaatttaacacgagaacggtcacccatttttactatggtttggtgttcgaaaaacaaacaaaaataaaaccaaaaaaaagg

SEQ ID NO: 5459 - DNA, 1041 bp, Zea mays
  Zm_smallRNAprecursor_948
tccacggcacggaacatagtaaagctgcacaaatgtactcgaaaaaagaccctaaaaacaaataaaaggtaagtgaacacgagaaacggtcaccctatttttattatgggtttggtgatagaaaaacaaaacaaaaaataaaacaaaaaaaaggaatgcaacaagaggtcttcccaagaggtcacccatcgtaatagtactctcgcccaagcacactcaacttcggagttctgaagggatccgatgccttagtgctggtatgattgcatccgtcatatcatgggtcctccttcctcttatgcccacacctccgtgctcggatcgcccacggctctggacatccttcctccgcacaaagtacccgaaaaacgccccttaaaagaaataaaaggtaatttaacacgagaacggtcacccatttttaatatggtttggtgttcgaaaaacaaacaaaaataaaaccaaaaaaaaggaatgcaacacgaggacttcccaggaggtcacccatcctagtactactctcgcccaagcacgcttatcttcggagttctgatgggattcggtgctttagtgctggtatgatcgcatccgtcatatcctgcgtcctccttcctcttatgcccacacctccgtgctcggctcgcccacggcactggacatccttcctccgcacaaagtacccgaaaaacgcccttaaaacaaataaaaggtaatttaacacgagaacggtaacccatttttactatggtttggtgttcgaaaaacaaacaaaaataaaaccaaaaaaaaggaatgcaaaacgaggacttcccaggaggtcacccatcctagtactactctcgcccaagcacgcttaacttcagagttctgatgggatccggtgctttagtgctggtatgatcgcatccgtcatatcatgcgtcctccttcctcttatgcccacacctccgtgctcggctcgcccacggcactggacgtccttcctccgcacaaagtacccgaaaaacgccccttaaaacaaataaaaggtaatttaacacg

SEQ ID NO: 5460 - DNA, 1037 bp, Zea mays
  Zm_smallRNAprecursor_949
cggcacggaacatagtaaagctgcacaaatgtactcgaaaaaagaccctaaaaacaaataaaaggtaagtgaacacgagaaacggtcaccctatttttattatgggtttggtgatagaaaaacaaaacaaaaaataaaacaaaaaaaaggaatgcaacaagaggtcttcccaagaggtcacccatcgtaatagtactctcgcccaagcacactcaacttcggagttctgaagggatccgatgccttagtgctggtatgattgcatccgtcatatcatgggtcctccttcctcttatgcccacacctccgtgctcggatcgcccacggctctggacatccttcctccgcacaaagtacccgaaaaacgccccttaaaagaaataaaaggtaatttaacacgagaacggtcacccatttttaatatggtttggtgttcgaaaaacaaacaaaaataaaaccaaaaaaaaggaatgcaacacgaggacttcccaggaggtcacccatcctagtactactctcgcccaagcacgcttatcttcggagttctgatgggattcggtgctttagtgctggtatgatcgcatccgtcatatcctgcgtcctccttcctcttatgcccacacctccgtgctcggctcgcccacggcactggacatccttcctccgcacaaagtacccgaaaaacgcccttaaaacaaataaaaggtaatttaacacgagaacggtaacccatttttactatggtttggtgttcgaaaaacaaacaaaaataaaaccaaaaaaaaggaatgcaaaacgaggacttcccaggaggtcacccatcctagtactactctcgcccaagcacgcttaacttcagagttctgatgggatccggtgctttagtgctggtatgatcgcatccgtcatatcatgcgtcctccttcctcttatgcccacacctccgtgctcggctcgcccacggcactggacgtccttcctccgcacaaagtacccgaaaaacgccccttaaaacaaataaaaggtaatttaacacg

SEQ ID NO: 5461 - DNA, 1047 bp, Zea mays
  Zm_smallRNAprecursor_950
catagtaaagctgcacaaatgtactcgaaaaaagaccctaaaaacaaataaaaggtaagtgaacacgagaaacggtcaccctatttttattatgggtttggtgatagaaaaacaaaacaaaaaataaaacaaaaaaaaggaatgcaacaagaggtcttcccaagaggtcacccatcgtaatagtactctcgcccaagcacactcaacttcggagttctgaagggatccgatgccttagtgctggtatgattgcatccgtcatatcatgggtcctccttcctcttatgcccacacctccgtgctcggatcgcccacggctctggacatccttcctccgcacaaagtacccgaaaaacgccccttaaaagaaataaaaggtaatttaacacgagaacggtcacccatttttaatatggtttggtgttcgaaaaacaaacaaaaataaaaccaaaaaaaaggaatgcaacacgaggacttcccaggaggtcacccatcctagtactactctcgcccaagcacgcttatcttcggagttctgatgggattcggtgctttagtgctggtatgatcgcatccgtcatatcctgcgtcctccttcctcttatgcccacacctccgtgctcggctcgcccacggcactggacatccttcctccgcacaaagtacccgaaaaacgcccttaaaacaaataaaaggtaatttaacacgagaacggtaacccatttttactatggtttggtgttcgaaaaacaaacaaaaataaaaccaaaaaaaaggaatgcaaaacgaggacttcccaggaggtcacccatcctagtactactctcgcccaagcacgcttaacttcagagttctgatgggatccggtgctttagtgctggtatgatcgcatccgtcatatcatgcgtcctccttcctcttatgcccacacctccgtgctcggctcgcccacggcactggacgtccttcctccgcacaaagtacccgaaaaacgccccttaaaacaaataaaaggtaatttaacacgagaacggtcacccattttta

SEQ ID NO: 5462 - DNA, 1191 bp, Zea mays
  Zm_smallRNAprecursor_951
gtttggtgatagaaaaacaaaacaaaaaataaaacaaaaaaaaggaatgcaacaagaggtcttcccaagaggtcacccatcgtaatagtactctcgcccaagcacactcaacttcggagttctgaagggatccgatgccttagtgctggtatgattgcatccgtcatatcatgggtcctccttcctcttatgcccacacctccgtgctcggatcgcccacggctctggacatccttcctccgcacaaagtacccgaaaaacgccccttaaaagaaataaaaggtaatttaacacgagaacggtcacccatttttaatatggtttggtgttcgaaaaacaaacaaaaataaaaccaaaaaaaaggaatgcaacacgaggacttcccaggaggtcacccatcctagtactactctcgcccaagcacgcttatcttcggagttctgatgggattcggtgctttagtgctggtatgatcgcatccgtcatatcctgcgtcctccttcctcttatgcccacacctccgtgctcggctcgcccacggcactggacatccttcctccgcacaaagtacccgaaaaacgcccttaaaacaaataaaaggtaatttaacacgagaacggtaacccatttttactatggtttggtgttcgaaaaacaaacaaaaataaaaccaaaaaaaaggaatgcaaaacgaggacttcccaggaggtcacccatcctagtactactctcgcccaagcacgcttaacttcagagttctgatgggatccggtgctttagtgctggtatgatcgcatccgtcatatcatgcgtcctccttcctcttatgcccacacctccgtgctcggctcgcccacggcactggacgtccttcctccgcacaaagtacccgaaaaacgccccttaaaacaaataaaaggtaatttaacacgagaacggtcacccatttttactatggtttggtgttcgaaaaacaaacaaaaataaaaccaaaaaaaaggaatgcaacacgatgacttcccaggaggtcacccatcctagtactactctcgcccaagcacgattaacttcggagttctgatgggatccggtgctttagtgctggtatgatcgcatccgtcatatcctgcgtcctccttcctcttatgtccacacctccgtgctcggctcgcccacggcactggacatcct

SEQ ID NO: 5463 - DNA, 1129 bp, Zea mays
  Zm_smallRNAprecursor_952
tgcccacacctccgtgctcggatcgcccacggctctggacatccttcctccgcacaaagtacccgaaaaacgccccttaaaagaaataaaaggtaatttaacacgagaacggtcacccatttttaatatggtttggtgttcgaaaaacaaacaaaaataaaaccaaaaaaaaggaatgcaacacgaggacttcccaggaggtcacccatcctagtactactctcgcccaagcacgcttatcttcggagttctgatgggattcggtgctttagtgctggtatgatcgcatccgtcatatcctgcgtcctccttcctcttatgcccacacctccgtgctcggctcgcccacggcactggacatccttcctccgcacaaagtacccgaaaaacgcccttaaaacaaataaaaggtaatttaacacgagaacggtaacccatttttactatggtttggtgttcgaaaaacaaacaaaaataaaaccaaaaaaaaggaatgcaaaacgaggacttcccaggaggtcacccatcctagtactactctcgcccaagcacgcttaacttcagagttctgatgggatccggtgctttagtgctggtatgatcgcatccgtcatatcatgcgtcctccttcctcttatgcccacacctccgtgctcggctcgcccacggcactggacgtccttcctccgcacaaagtacccgaaaaacgccccttaaaacaaataaaaggtaatttaacacgagaacggtcacccatttttactatggtttggtgttcgaaaaacaaacaaaaataaaaccaaaaaaaaggaatgcaacacgatgacttcccaggaggtcacccatcctagtactactctcgcccaagcacgattaacttcggagttctgatgggatccggtgctttagtgctggtatgatcgcatccgtcatatcctgcgtcctccttcctcttatgtccacacctccgtgctcggctcgcccacggcactggacatccttcctccgcacaaagtacccgaaaaacgccccttaaaacaaataaaaggtaatttaacacgagaacggtcacccatttttactatggtttggtgttcgaaaaacaaacaaaaataaaaccaaaaaaaag

SEQ ID NO: 5464 - DNA, 1054 bp, Zea mays
  Zm_smallRNAprecursor_953
tgctcggatcgcccacggctctggacatccttcctccgcacaaagtacccgaaaaacgccccttaaaagaaataaaaggtaatttaacacgagaacggtcacccatttttaatatggtttggtgttcgaaaaacaaacaaaaataaaaccaaaaaaaaggaatgcaacacgaggacttcccaggaggtcacccatcctagtactactctcgcccaagcacgcttatcttcggagttctgatgggattcggtgctttagtgctggtatgatcgcatccgtcatatcctgcgtcctccttcctcttatgcccacacctccgtgctcggctcgcccacggcactggacatccttcctccgcacaaagtacccgaaaaacgcccttaaaacaaataaaaggtaatttaacacgagaacggtaacccatttttactatggtttggtgttcgaaaaacaaacaaaaataaaaccaaaaaaaaggaatgcaaaacgaggacttcccaggaggtcacccatcctagtactactctcgcccaagcacgcttaacttcagagttctgatgggatccggtgctttagtgctggtatgatcgcatccgtcatatcatgcgtcctccttcctcttatgcccacacctccgtgctcggctcgcccacggcactggacgtccttcctccgcacaaagtacccgaaaaacgccccttaaaacaaataaaaggtaatttaacacgagaacggtcacccatttttactatggtttggtgttcgaaaaacaaacaaaaataaaaccaaaaaaaaggaatgcaacacgatgacttcccaggaggtcacccatcctagtactactctcgcccaagcacgattaacttcggagttctgatgggatccggtgctttagtgctggtatgatcgcatccgtcatatcctgcgtcctccttcctcttatgtccacacctccgtgctcggctcgcccacggcactggacatccttcctccgcacaaagtacccgaaaaacgccccttaaaacaaataaaaggtaatttaacacgagaacgg

SEQ ID NO: 5465 - DNA, 1047 bp, Zea mays
  Zm_smallRNAprecursor_954
tctggacatccttcctccgcacaaagtacccgaaaaacgccccttaaaagaaataaaaggtaatttaacacgagaacggtcacccatttttaatatggtttggtgttcgaaaaacaaacaaaaataaaaccaaaaaaaaggaatgcaacacgaggacttcccaggaggtcacccatcctagtactactctcgcccaagcacgcttatcttcggagttctgatgggattcggtgctttagtgctggtatgatcgcatccgtcatatcctgcgtcctccttcctcttatgcccacacctccgtgctcggctcgcccacggcactggacatccttcctccgcacaaagtacccgaaaaacgcccttaaaacaaataaaaggtaatttaacacgagaacggtaacccatttttactatggtttggtgttcgaaaaacaaacaaaaataaaaccaaaaaaaaggaatgcaaaacgaggacttcccaggaggtcacccatcctagtactactctcgcccaagcacgcttaacttcagagttctgatgggatccggtgctttagtgctggtatgatcgcatccgtcatatcatgcgtcctccttcctcttatgcccacacctccgtgctcggctcgcccacggcactggacgtccttcctccgcacaaagtacccgaaaaacgccccttaaaacaaataaaaggtaatttaacacgagaacggtcacccatttttactatggtttggtgttcgaaaaacaaacaaaaataaaaccaaaaaaaaggaatgcaacacgatgacttcccaggaggtcacccatcctagtactactctcgcccaagcacgattaacttcggagttctgatgggatccggtgctttagtgctggtatgatcgcatccgtcatatcctgcgtcctccttcctcttatgtccacacctccgtgctcggctcgcccacggcactggacatccttcctccgcacaaagtacccgaaaaacgccccttaaaacaaataaaaggtaatttaacacgagaacggtcacccattttt

SEQ ID NO: 5466 - DNA, 1054 bp, Zea mays
  Zm_smallRNAprecursor_955
tgctcggctcgcccacggcactggacatccttcctccgcacaaagtacccgaaaaacgcccttaaaacaaataaaaggtaatttaacacgagaacggtaacccatttttactatggtttggtgttcgaaaaacaaacaaaaataaaaccaaaaaaaaggaatgcaaaacgaggacttcccaggaggtcacccatcctagtactactctcgcccaagcacgcttaacttcagagttctgatgggatccggtgctttagtgctggtatgatcgcatccgtcatatcatgcgtcctccttcctcttatgcccacacctccgtgctcggctcgcccacggcactggacgtccttcctccgcacaaagtacccgaaaaacgccccttaaaacaaataaaaggtaatttaacacgagaacggtcacccatttttactatggtttggtgttcgaaaaacaaacaaaaataaaaccaaaaaaaaggaatgcaacacgatgacttcccaggaggtcacccatcctagtactactctcgcccaagcacgattaacttcggagttctgatgggatccggtgctttagtgctggtatgatcgcatccgtcatatcctgcgtcctccttcctcttatgtccacacctccgtgctcggctcgcccacggcactggacatccttcctccgcacaaagtacccgaaaaacgccccttaaaacaaataaaaggtaatttaacacgagaacggtcacccatttttactatggtttggtgttcgaaaaacaaacaaaaataaaaccaaaaaaaaggaatgcaacacgaggacttccccaggaggtcacccatcctagtactactctcgcccaagcacgcttaacttcggagttctgatgggatccggtgctttagtgctggtatgatcgcatccgtcatatcctgcgtcctccttcctcttatgcccacacctccgtgctcggctcgcccacggcactggacatccttcctccgcacaaagtacccgaaaaacgccccttaaaacaaataaaaggtaatttaacacgagaacg

SEQ ID NO: 5467 - DNA, 1041 bp, Zea mays
  Zm_smallRNAprecursor_956
ggctcgcccacggcactggacatccttcctccgcacaaagtacccgaaaaacgcccttaaaacaaataaaaggtaatttaacacgagaacggtaacccatttttactatggtttggtgttcgaaaaacaaacaaaaataaaaccaaaaaaaaggaatgcaaaacgaggacttcccaggaggtcacccatcctagtactactctcgcccaagcacgcttaacttcagagttctgatgggatccggtgctttagtgctggtatgatcgcatccgtcatatcatgcgtcctccttcctcttatgcccacacctccgtgctcggctcgcccacggcactggacgtccttcctccgcacaaagtacccgaaaaacgccccttaaaacaaataaaaggtaatttaacacgagaacggtcacccatttttactatggtttggtgttcgaaaaacaaacaaaaataaaaccaaaaaaaaggaatgcaacacgatgacttcccaggaggtcacccatcctagtactactctcgcccaagcacgattaacttcggagttctgatgggatccggtgctttagtgctggtatgatcgcatccgtcatatcctgcgtcctccttcctcttatgtccacacctccgtgctcggctcgcccacggcactggacatccttcctccgcacaaagtacccgaaaaacgccccttaaaacaaataaaaggtaatttaacacgagaacggtcacccatttttactatggtttggtgttcgaaaaacaaacaaaaataaaaccaaaaaaaaggaatgcaacacgaggacttccccaggaggtcacccatcctagtactactctcgcccaagcacgcttaacttcggagttctgatgggatccggtgctttagtgctggtatgatcgcatccgtcatatcctgcgtcctccttcctcttatgcccacacctccgtgctcggctcgcccacggcactggacatccttcctccgcacaaagtacccgaaaaacgccccttaaaacaaataaaaggtaatttaaca

SEQ ID NO: 5468 - DNA, 1037 bp, Zea mays
  Zm_smallRNAprecursor_957
cgcccacggcactggacatccttcctccgcacaaagtacccgaaaaacgcccttaaaacaaataaaaggtaatttaacacgagaacggtaacccatttttactatggtttggtgttcgaaaaacaaacaaaaataaaaccaaaaaaaaggaatgcaaaacgaggacttcccaggaggtcacccatcctagtactactctcgcccaagcacgcttaacttcagagttctgatgggatccggtgctttagtgctggtatgatcgcatccgtcatatcatgcgtcctccttcctcttatgcccacacctccgtgctcggctcgcccacggcactggacgtccttcctccgcacaaagtacccgaaaaacgccccttaaaacaaataaaaggtaatttaacacgagaacggtcacccatttttactatggtttggtgttcgaaaaacaaacaaaaataaaaccaaaaaaaaggaatgcaacacgatgacttcccaggaggtcacccatcctagtactactctcgcccaagcacgattaacttcggagttctgatgggatccggtgctttagtgctggtatgatcgcatccgtcatatcctgcgtcctccttcctcttatgtccacacctccgtgctcggctcgcccacggcactggacatccttcctccgcacaaagtacccgaaaaacgccccttaaaacaaataaaaggtaatttaacacgagaacggtcacccatttttactatggtttggtgttcgaaaaacaaacaaaaataaaaccaaaaaaaaggaatgcaacacgaggacttccccaggaggtcacccatcctagtactactctcgcccaagcacgcttaacttcggagttctgatgggatccggtgctttagtgctggtatgatcgcatccgtcatatcctgcgtcctccttcctcttatgcccacacctccgtgctcggctcgcccacggcactggacatccttcctccgcacaaagtacccgaaaaacgccccttaaaacaaataaaaggtaatttaaca

SEQ ID NO: 5469 - DNA, 1047 bp, Zea mays
  Zm_smallRNAprecursor_958
actggacatccttcctccgcacaaagtacccgaaaaacgcccttaaaacaaataaaaggtaatttaacacgagaacggtaacccatttttactatggtttggtgttcgaaaaacaaacaaaaataaaaccaaaaaaaaggaatgcaaaacgaggacttcccaggaggtcacccatcctagtactactctcgcccaagcacgcttaacttcagagttctgatgggatccggtgctttagtgctggtatgatcgcatccgtcatatcatgcgtcctccttcctcttatgcccacacctccgtgctcggctcgcccacggcactggacgtccttcctccgcacaaagtacccgaaaaacgccccttaaaacaaataaaaggtaatttaacacgagaacggtcacccatttttactatggtttggtgttcgaaaaacaaacaaaaataaaaccaaaaaaaaggaatgcaacacgatgacttcccaggaggtcacccatcctagtactactctcgcccaagcacgattaacttcggagttctgatgggatccggtgctttagtgctggtatgatcgcatccgtcatatcctgcgtcctccttcctcttatgtccacacctccgtgctcggctcgcccacggcactggacatccttcctccgcacaaagtacccgaaaaacgccccttaaaacaaataaaaggtaatttaacacgagaacggtcacccatttttactatggtttggtgttcgaaaaacaaacaaaaataaaaccaaaaaaaaggaatgcaacacgaggacttccccaggaggtcacccatcctagtactactctcgcccaagcacgcttaacttcggagttctgatgggatccggtgctttagtgctggtatgatcgcatccgtcatatcctgcgtcctccttcctcttatgcccacacctccgtgctcggctcgcccacggcactggacatccttcctccgcacaaagtacccgaaaaacgccccttaaaacaaataaaaggtaatttaacacgagaacggtcacccatttt

SEQ ID NO: 5470 - DNA, 1054 bp, Zea mays
  Zm_smallRNAprecursor_959
ctcggctcgcccacggcactggacgtccttcctccgcacaaagtacccgaaaaacgccccttaaaacaaataaaaggtaatttaacacgagaacggtcacccatttttactatggtttggtgttcgaaaaacaaacaaaaataaaaccaaaaaaaaggaatgcaacacgatgacttcccaggaggtcacccatcctagtactactctcgcccaagcacgattaacttcggagttctgatgggatccggtgctttagtgctggtatgatcgcatccgtcatatcctgcgtcctccttcctcttatgtccacacctccgtgctcggctcgcccacggcactggacatccttcctccgcacaaagtacccgaaaaacgccccttaaaacaaataaaaggtaatttaacacgagaacggtcacccatttttactatggtttggtgttcgaaaaacaaacaaaaataaaaccaaaaaaaaggaatgcaacacgaggacttccccaggaggtcacccatcctagtactactctcgcccaagcacgcttaacttcggagttctgatgggatccggtgctttagtgctggtatgatcgcatccgtcatatcctgcgtcctccttcctcttatgcccacacctccgtgctcggctcgcccacggcactggacatccttcctccgcacaaagtacccgaaaaacgccccttaaaacaaataaaaggtaatttaacacgagaacggtcacccatttttactatggtttggtgttcgaaaaacaaacaaaaataaaaccaaaaaaaggaatgcaacacgaggacttcccaggaggtcacccatcctagtactactctcacccaagcacgcttaacttcggagttctgatgggatctggtgctttagtgctggtttgatcgcatccgtcatatcctgcgtcctccttcctcttatgcccacacctccgtgctcggctcgcccacagcactggacatccttcctccgcacaaagtacccgaaaaacgccccttaaaacaaataaaaggtaatttaacacgagaacggt

SEQ ID NO: 5471 - DNA, 1041 bp, Zea mays
  Zm_smallRNAprecursor_960
ctcgcccacggcactggacgtccttcctccgcacaaagtacccgaaaaacgccccttaaaacaaataaaaggtaatttaacacgagaacggtcacccatttttactatggtttggtgttcgaaaaacaaacaaaaataaaaccaaaaaaaaggaatgcaacacgatgacttcccaggaggtcacccatcctagtactactctcgcccaagcacgattaacttcggagttctgatgggatccggtgctttagtgctggtatgatcgcatccgtcatatcctgcgtcctccttcctcttatgtccacacctccgtgctcggctcgcccacggcactggacatccttcctccgcacaaagtacccgaaaaacgccccttaaaacaaataaaaggtaatttaacacgagaacggtcacccatttttactatggtttggtgttcgaaaaacaaacaaaaataaaaccaaaaaaaaggaatgcaacacgaggacttccccaggaggtcacccatcctagtactactctcgcccaagcacgcttaacttcggagttctgatgggatccggtgctttagtgctggtatgatcgcatccgtcatatcctgcgtcctccttcctcttatgcccacacctccgtgctcggctcgcccacggcactggacatccttcctccgcacaaagtacccgaaaaacgccccttaaaacaaataaaaggtaatttaacacgagaacggtcacccatttttactatggtttggtgttcgaaaaacaaacaaaaataaaaccaaaaaaaggaatgcaacacgaggacttcccaggaggtcacccatcctagtactactctcacccaagcacgcttaacttcggagttctgatgggatctggtgctttagtgctggtttgatcgcatccgtcatatcctgcgtcctccttcctcttatgcccacacctccgtgctcggctcgcccacagcactggacatccttcctccgcacaaagtacccgaaaaacgccccttaaaacaaataaaaggtaatttaacacg

SEQ ID NO: 5472 - DNA, 1037 bp, Zea mays
  Zm_smallRNAprecursor_961
cccacggcactggacgtccttcctccgcacaaagtacccgaaaaacgccccttaaaacaaataaaaggtaatttaacacgagaacggtcacccatttttactatggtttggtgttcgaaaaacaaacaaaaataaaaccaaaaaaaaggaatgcaacacgatgacttcccaggaggtcacccatcctagtactactctcgcccaagcacgattaacttcggagttctgatgggatccggtgctttagtgctggtatgatcgcatccgtcatatcctgcgtcctccttcctcttatgtccacacctccgtgctcggctcgcccacggcactggacatccttcctccgcacaaagtacccgaaaaacgccccttaaaacaaataaaaggtaatttaacacgagaacggtcacccatttttactatggtttggtgttcgaaaaacaaacaaaaataaaaccaaaaaaaaggaatgcaacacgaggacttccccaggaggtcacccatcctagtactactctcgcccaagcacgcttaacttcggagttctgatgggatccggtgctttagtgctggtatgatcgcatccgtcatatcctgcgtcctccttcctcttatgcccacacctccgtgctcggctcgcccacggcactggacatccttcctccgcacaaagtacccgaaaaacgccccttaaaacaaataaaaggtaatttaacacgagaacggtcacccatttttactatggtttggtgttcgaaaaacaaacaaaaataaaaccaaaaaaaggaatgcaacacgaggacttcccaggaggtcacccatcctagtactactctcacccaagcacgcttaacttcggagttctgatgggatctggtgctttagtgctggtttgatcgcatccgtcatatcctgcgtcctccttcctcttatgcccacacctccgtgctcggctcgcccacagcactggacatccttcctccgcacaaagtacccgaaaaacgccccttaaaacaaataaaaggtaatttaacacg

SEQ ID NO: 5473 - DNA, 1047 bp, Zea mays
  Zm_smallRNAprecursor_962
tggacgtccttcctccgcacaaagtacccgaaaaacgccccttaaaacaaataaaaggtaatttaacacgagaacggtcacccatttttactatggtttggtgttcgaaaaacaaacaaaaataaaaccaaaaaaaaggaatgcaacacgatgacttcccaggaggtcacccatcctagtactactctcgcccaagcacgattaacttcggagttctgatgggatccggtgctttagtgctggtatgatcgcatccgtcatatcctgcgtcctccttcctcttatgtccacacctccgtgctcggctcgcccacggcactggacatccttcctccgcacaaagtacccgaaaaacgccccttaaaacaaataaaaggtaatttaacacgagaacggtcacccatttttactatggtttggtgttcgaaaaacaaacaaaaataaaaccaaaaaaaaggaatgcaacacgaggacttccccaggaggtcacccatcctagtactactctcgcccaagcacgcttaacttcggagttctgatgggatccggtgctttagtgctggtatgatcgcatccgtcatatcctgcgtcctccttcctcttatgcccacacctccgtgctcggctcgcccacggcactggacatccttcctccgcacaaagtacccgaaaaacgccccttaaaacaaataaaaggtaatttaacacgagaacggtcacccatttttactatggtttggtgttcgaaaaacaaacaaaaataaaaccaaaaaaaggaatgcaacacgaggacttcccaggaggtcacccatcctagtactactctcacccaagcacgcttaacttcggagttctgatgggatctggtgctttagtgctggtttgatcgcatccgtcatatcctgcgtcctccttcctcttatgcccacacctccgtgctcggctcgcccacagcactggacatccttcctccgcacaaagtacccgaaaaacgccccttaaaacaaataaaaggtaatttaacacgagaacggtcacccattttta

SEQ ID NO: 5474 - DNA, 1191 bp, Zea mays
  Zm_smallRNAprecursor_963
gtttggtgttcgaaaaacaaacaaaaataaaaccaaaaaaaaggaatgcaacacgatgacttcccaggaggtcacccatcctagtactactctcgcccaagcacgattaacttcggagttctgatgggatccggtgctttagtgctggtatgatcgcatccgtcatatcctgcgtcctccttcctcttatgtccacacctccgtgctcggctcgcccacggcactggacatccttcctccgcacaaagtacccgaaaaacgccccttaaaacaaataaaaggtaatttaacacgagaacggtcacccatttttactatggtttggtgttcgaaaaacaaacaaaaataaaaccaaaaaaaaggaatgcaacacgaggacttccccaggaggtcacccatcctagtactactctcgcccaagcacgcttaacttcggagttctgatgggatccggtgctttagtgctggtatgatcgcatccgtcatatcctgcgtcctccttcctcttatgcccacacctccgtgctcggctcgcccacggcactggacatccttcctccgcacaaagtacccgaaaaacgccccttaaaacaaataaaaggtaatttaacacgagaacggtcacccatttttactatggtttggtgttcgaaaaacaaacaaaaataaaaccaaaaaaaggaatgcaacacgaggacttcccaggaggtcacccatcctagtactactctcacccaagcacgcttaacttcggagttctgatgggatctggtgctttagtgctggtttgatcgcatccgtcatatcctgcgtcctccttcctcttatgcccacacctccgtgctcggctcgcccacagcactggacatccttcctccgcacaaagtacccgaaaaacgccccttaaaacaaataaaaggtaatttaacacgagaacggtcacccatttttactatggtttggtgttcgaaaaacaaacaaaaataaaaccaaaaaaaaggaatgcaacacgaggacttcccaggaggtcacccatcctagtactactctcgcccaagcacgcttaacttcggagttctgatgggatccggtgctttagtgctggtatgatcgcatccgtcatatcctgcgtcctccttcctcttatgcccacacctccgtgctcggctcgcccacggcactggacatcct

SEQ ID NO: 5475 - DNA, 1129 bp, Zea mays
  Zm_smallRNAprecursor_964
gtccacacctccgtgctcggctcgcccacggcactggacatccttcctccgcacaaagtacccgaaaaacgccccttaaaacaaataaaaggtaatttaacacgagaacggtcacccatttttactatggtttggtgttcgaaaaacaaacaaaaataaaaccaaaaaaaaggaatgcaacacgaggacttccccaggaggtcacccatcctagtactactctcgcccaagcacgcttaacttcggagttctgatgggatccggtgctttagtgctggtatgatcgcatccgtcatatcctgcgtcctccttcctcttatgcccacacctccgtgctcggctcgcccacggcactggacatccttcctccgcacaaagtacccgaaaaacgccccttaaaacaaataaaaggtaatttaacacgagaacggtcacccatttttactatggtttggtgttcgaaaaacaaacaaaaataaaaccaaaaaaaggaatgcaacacgaggacttcccaggaggtcacccatcctagtactactctcacccaagcacgcttaacttcggagttctgatgggatctggtgctttagtgctggtttgatcgcatccgtcatatcctgcgtcctccttcctcttatgcccacacctccgtgctcggctcgcccacagcactggacatccttcctccgcacaaagtacccgaaaaacgccccttaaaacaaataaaaggtaatttaacacgagaacggtcacccatttttactatggtttggtgttcgaaaaacaaacaaaaataaaaccaaaaaaaaggaatgcaacacgaggacttcccaggaggtcacccatcctagtactactctcgcccaagcacgcttaacttcggagttctgatgggatccggtgctttagtgctggtatgatcgcatccgtcatatcctgcgtcctccttcctcttatgcccacacctccgtgctcggctcgcccacggcactggacatccttcctccgcacaaagtacccgaaaaacgccccttaaaacaaataaaaggtaatttaacacgagaacggtcacccatttttactatggtttggtgttcgaaaaacaaacaaaaataaaaccaaaaaaaag

SEQ ID NO: 5476 - DNA, 1041 bp, Zea mays
  Zm_smallRNAprecursor_965
gctcgcccacggcactggacatccttcctccgcacaaagtacccgaaaaacgccccttaaaacaaataaaaggtaatttaacacgagaacggtcacccatttttactatggtttggtgttcgaaaaacaaacaaaaataaaaccaaaaaaaaggaatgcaacacgaggacttccccaggaggtcacccatcctagtactactctcgcccaagcacgcttaacttcggagttctgatgggatccggtgctttagtgctggtatgatcgcatccgtcatatcctgcgtcctccttcctcttatgcccacacctccgtgctcggctcgcccacggcactggacatccttcctccgcacaaagtacccgaaaaacgccccttaaaacaaataaaaggtaatttaacacgagaacggtcacccatttttactatggtttggtgttcgaaaaacaaacaaaaataaaaccaaaaaaaggaatgcaacacgaggacttcccaggaggtcacccatcctagtactactctcacccaagcacgcttaacttcggagttctgatgggatctggtgctttagtgctggtttgatcgcatccgtcatatcctgcgtcctccttcctcttatgcccacacctccgtgctcggctcgcccacagcactggacatccttcctccgcacaaagtacccgaaaaacgccccttaaaacaaataaaaggtaatttaacacgagaacggtcacccatttttactatggtttggtgttcgaaaaacaaacaaaaataaaaccaaaaaaaaggaatgcaacacgaggacttcccaggaggtcacccatcctagtactactctcgcccaagcacgcttaacttcggagttctgatgggatccggtgctttagtgctggtatgatcgcatccgtcatatcctgcgtcctccttcctcttatgcccacacctccgtgctcggctcgcccacggcactggacatccttcctccgcacaaagtacccgaaaaacgccccttaaaacaaataaaaggtaatttaacac

SEQ ID NO: 5477 - DNA, 1192 bp, Zea mays
  Zm_smallRNAprecursor_966
ggtttggtgttcgaaaaacaaacaaaaataaaaccaaaaaaaaggaatgcaacacgaggacttccccaggaggtcacccatcctagtactactctcgcccaagcacgcttaacttcggagttctgatgggatccggtgctttagtgctggtatgatcgcatccgtcatatcctgcgtcctccttcctcttatgcccacacctccgtgctcggctcgcccacggcactggacatccttcctccgcacaaagtacccgaaaaacgccccttaaaacaaataaaaggtaatttaacacgagaacggtcacccatttttactatggtttggtgttcgaaaaacaaacaaaaataaaaccaaaaaaaggaatgcaacacgaggacttcccaggaggtcacccatcctagtactactctcacccaagcacgcttaacttcggagttctgatgggatctggtgctttagtgctggtttgatcgcatccgtcatatcctgcgtcctccttcctcttatgcccacacctccgtgctcggctcgcccacagcactggacatccttcctccgcacaaagtacccgaaaaacgccccttaaaacaaataaaaggtaatttaacacgagaacggtcacccatttttactatggtttggtgttcgaaaaacaaacaaaaataaaaccaaaaaaaaggaatgcaacacgaggacttcccaggaggtcacccatcctagtactactctcgcccaagcacgcttaacttcggagttctgatgggatccggtgctttagtgctggtatgatcgcatccgtcatatcctgcgtcctccttcctcttatgcccacacctccgtgctcggctcgcccacggcactggacatccttcctccgcacaaagtacccgaaaaacgccccttaaaacaaataaaaggtaatttaacacgagaacggtcacccatttttactatggtttggtgttcgaaaaacaaacaaaaataaaaccaaaaaaaaggaatgcaacacgaggacttcccaggaggtcacccatcctagtactactcttgcccaagcacgcttaacttcggagttctgatgggatccgatgctttagtgctggtatgatcgcatccgtcatatcctgcgtcctccttcctcttatgcccacacctccgtgctcggctcgcccacggcactggacatcct

SEQ ID NO: 5478 - DNA, 1129 bp, Zea mays
  Zm_smallRNAprecursor_967
tgcccacacctccgtgctcggctcgcccacggcactggacatccttcctccgcacaaagtacccgaaaaacgccccttaaaacaaataaaaggtaatttaacacgagaacggtcacccatttttactatggtttggtgttcgaaaaacaaacaaaaataaaaccaaaaaaaggaatgcaacacgaggacttcccaggaggtcacccatcctagtactactctcacccaagcacgcttaacttcggagttctgatgggatctggtgctttagtgctggtttgatcgcatccgtcatatcctgcgtcctccttcctcttatgcccacacctccgtgctcggctcgcccacagcactggacatccttcctccgcacaaagtacccgaaaaacgccccttaaaacaaataaaaggtaatttaacacgagaacggtcacccatttttactatggtttggtgttcgaaaaacaaacaaaaataaaaccaaaaaaaaggaatgcaacacgaggacttcccaggaggtcacccatcctagtactactctcgcccaagcacgcttaacttcggagttctgatgggatccggtgctttagtgctggtatgatcgcatccgtcatatcctgcgtcctccttcctcttatgcccacacctccgtgctcggctcgcccacggcactggacatccttcctccgcacaaagtacccgaaaaacgccccttaaaacaaataaaaggtaatttaacacgagaacggtcacccatttttactatggtttggtgttcgaaaaacaaacaaaaataaaaccaaaaaaaaggaatgcaacacgaggacttcccaggaggtcacccatcctagtactactcttgcccaagcacgcttaacttcggagttctgatgggatccgatgctttagtgctggtatgatcgcatccgtcatatcctgcgtcctccttcctcttatgcccacacctccgtgctcggctcgcccacggcactggacatccttcctccgcacaaagtacccgaaaaacgccccttaaaacaaataaaaggtaatttaacacgagaacggtcacccatttttactatggtttgatgttcgaaaaacaaacaaaaataaaaccaaaaaaagg

SEQ ID NO: 5479 - DNA, 1054 bp, Zea mays
  Zm_smallRNAprecursor_968
tgctcggctcgcccacggcactggacatccttcctccgcacaaagtacccgaaaaacgccccttaaaacaaataaaaggtaatttaacacgagaacggtcacccatttttactatggtttggtgttcgaaaaacaaacaaaaataaaaccaaaaaaaggaatgcaacacgaggacttcccaggaggtcacccatcctagtactactctcacccaagcacgcttaacttcggagttctgatgggatctggtgctttagtgctggtttgatcgcatccgtcatatcctgcgtcctccttcctcttatgcccacacctccgtgctcggctcgcccacagcactggacatccttcctccgcacaaagtacccgaaaaacgccccttaaaacaaataaaaggtaatttaacacgagaacggtcacccatttttactatggtttggtgttcgaaaaacaaacaaaaataaaaccaaaaaaaaggaatgcaacacgaggacttcccaggaggtcacccatcctagtactactctcgcccaagcacgcttaacttcggagttctgatgggatccggtgctttagtgctggtatgatcgcatccgtcatatcctgcgtcctccttcctcttatgcccacacctccgtgctcggctcgcccacggcactggacatccttcctccgcacaaagtacccgaaaaacgccccttaaaacaaataaaaggtaatttaacacgagaacggtcacccatttttactatggtttggtgttcgaaaaacaaacaaaaataaaaccaaaaaaaaggaatgcaacacgaggacttcccaggaggtcacccatcctagtactactcttgcccaagcacgcttaacttcggagttctgatgggatccgatgctttagtgctggtatgatcgcatccgtcatatcctgcgtcctccttcctcttatgcccacacctccgtgctcggctcgcccacggcactggacatccttcctccgcacaaagtacccgaaaaacgccccttaaaacaaataaaaggtaatttaacacgagaacgg

SEQ ID NO: 5480 - DNA, 1041 bp, Zea mays
  Zm_smallRNAprecursor_969
ggctcgcccacggcactggacatccttcctccgcacaaagtacccgaaaaacgccccttaaaacaaataaaaggtaatttaacacgagaacggtcacccatttttactatggtttggtgttcgaaaaacaaacaaaaataaaaccaaaaaaaggaatgcaacacgaggacttcccaggaggtcacccatcctagtactactctcacccaagcacgcttaacttcggagttctgatgggatctggtgctttagtgctggtttgatcgcatccgtcatatcctgcgtcctccttcctcttatgcccacacctccgtgctcggctcgcccacagcactggacatccttcctccgcacaaagtacccgaaaaacgccccttaaaacaaataaaaggtaatttaacacgagaacggtcacccatttttactatggtttggtgttcgaaaaacaaacaaaaataaaaccaaaaaaaaggaatgcaacacgaggacttcccaggaggtcacccatcctagtactactctcgcccaagcacgcttaacttcggagttctgatgggatccggtgctttagtgctggtatgatcgcatccgtcatatcctgcgtcctccttcctcttatgcccacacctccgtgctcggctcgcccacggcactggacatccttcctccgcacaaagtacccgaaaaacgccccttaaaacaaataaaaggtaatttaacacgagaacggtcacccatttttactatggtttggtgttcgaaaaacaaacaaaaataaaaccaaaaaaaaggaatgcaacacgaggacttcccaggaggtcacccatcctagtactactcttgcccaagcacgcttaacttcggagttctgatgggatccgatgctttagtgctggtatgatcgcatccgtcatatcctgcgtcctccttcctcttatgcccacacctccgtgctcggctcgcccacggcactggacatccttcctccgcacaaagtacccgaaaaacgccccttaaaacaaataaaaggtaatttaacac

SEQ ID NO: 5481 - DNA, 1037 bp, Zea mays
  Zm_smallRNAprecursor_970
cgcccacggcactggacatccttcctccgcacaaagtacccgaaaaacgccccttaaaacaaataaaaggtaatttaacacgagaacggtcacccatttttactatggtttggtgttcgaaaaacaaacaaaaataaaaccaaaaaaaggaatgcaacacgaggacttcccaggaggtcacccatcctagtactactctcacccaagcacgcttaacttcggagttctgatgggatctggtgctttagtgctggtttgatcgcatccgtcatatcctgcgtcctccttcctcttatgcccacacctccgtgctcggctcgcccacagcactggacatccttcctccgcacaaagtacccgaaaaacgccccttaaaacaaataaaaggtaatttaacacgagaacggtcacccatttttactatggtttggtgttcgaaaaacaaacaaaaataaaaccaaaaaaaaggaatgcaacacgaggacttcccaggaggtcacccatcctagtactactctcgcccaagcacgcttaacttcggagttctgatgggatccggtgctttagtgctggtatgatcgcatccgtcatatcctgcgtcctccttcctcttatgcccacacctccgtgctcggctcgcccacggcactggacatccttcctccgcacaaagtacccgaaaaacgccccttaaaacaaataaaaggtaatttaacacgagaacggtcacccatttttactatggtttggtgttcgaaaaacaaacaaaaataaaaccaaaaaaaaggaatgcaacacgaggacttcccaggaggtcacccatcctagtactactcttgcccaagcacgcttaacttcggagttctgatgggatccgatgctttagtgctggtatgatcgcatccgtcatatcctgcgtcctccttcctcttatgcccacacctccgtgctcggctcgcccacggcactggacatccttcctccgcacaaagtacccgaaaaacgccccttaaaacaaataaaaggtaatttaacac

SEQ ID NO: 5482 - DNA, 1047 bp, Zea mays
  Zm_smallRNAprecursor_971
actggacatccttcctccgcacaaagtacccgaaaaacgccccttaaaacaaataaaaggtaatttaacacgagaacggtcacccatttttactatggtttggtgttcgaaaaacaaacaaaaataaaaccaaaaaaaggaatgcaacacgaggacttcccaggaggtcacccatcctagtactactctcacccaagcacgcttaacttcggagttctgatgggatctggtgctttagtgctggtttgatcgcatccgtcatatcctgcgtcctccttcctcttatgcccacacctccgtgctcggctcgcccacagcactggacatccttcctccgcacaaagtacccgaaaaacgccccttaaaacaaataaaaggtaatttaacacgagaacggtcacccatttttactatggtttggtgttcgaaaaacaaacaaaaataaaaccaaaaaaaaggaatgcaacacgaggacttcccaggaggtcacccatcctagtactactctcgcccaagcacgcttaacttcggagttctgatgggatccggtgctttagtgctggtatgatcgcatccgtcatatcctgcgtcctccttcctcttatgcccacacctccgtgctcggctcgcccacggcactggacatccttcctccgcacaaagtacccgaaaaacgccccttaaaacaaataaaaggtaatttaacacgagaacggtcacccatttttactatggtttggtgttcgaaaaacaaacaaaaataaaaccaaaaaaaaggaatgcaacacgaggacttcccaggaggtcacccatcctagtactactcttgcccaagcacgcttaacttcggagttctgatgggatccgatgctttagtgctggtatgatcgcatccgtcatatcctgcgtcctccttcctcttatgcccacacctccgtgctcggctcgcccacggcactggacatccttcctccgcacaaagtacccgaaaaacgccccttaaaacaaataaaaggtaatttaacacgagaacggtcacccattttt

SEQ ID NO: 5483 - DNA, 1192 bp, Zea mays
  Zm_smallRNAprecursor_972
tggtttggtgttcgaaaaacaaacaaaaataaaaccaaaaaaaggaatgcaacacgaggacttcccaggaggtcacccatcctagtactactctcacccaagcacgcttaacttcggagttctgatgggatctggtgctttagtgctggtttgatcgcatccgtcatatcctgcgtcctccttcctcttatgcccacacctccgtgctcggctcgcccacagcactggacatccttcctccgcacaaagtacccgaaaaacgccccttaaaacaaataaaaggtaatttaacacgagaacggtcacccatttttactatggtttggtgttcgaaaaacaaacaaaaataaaaccaaaaaaaaggaatgcaacacgaggacttcccaggaggtcacccatcctagtactactctcgcccaagcacgcttaacttcggagttctgatgggatccggtgctttagtgctggtatgatcgcatccgtcatatcctgcgtcctccttcctcttatgcccacacctccgtgctcggctcgcccacggcactggacatccttcctccgcacaaagtacccgaaaaacgccccttaaaacaaataaaaggtaatttaacacgagaacggtcacccatttttactatggtttggtgttcgaaaaacaaacaaaaataaaaccaaaaaaaaggaatgcaacacgaggacttcccaggaggtcacccatcctagtactactcttgcccaagcacgcttaacttcggagttctgatgggatccgatgctttagtgctggtatgatcgcatccgtcatatcctgcgtcctccttcctcttatgcccacacctccgtgctcggctcgcccacggcactggacatccttcctccgcacaaagtacccgaaaaacgccccttaaaacaaataaaaggtaatttaacacgagaacggtcacccatttttactatggtttgatgttcgaaaaacaaacaaaaataaaaccaaaaaaaggaatgcaacacgagggcttccaaggaggtcacccatcctagtactactctcgcccaagctcgcttaacttcggagttctgatgggatccgatgctttagtgctggtatgatcgcatctgtcatatcctgcgtcctccttcctcttatgcccacacctccgtgctcggctcgcccacggcactggacatcctt

SEQ ID NO: 5484 - DNA, 1129 bp, Zea mays
  Zm_smallRNAprecursor_973
gcccacacctccgtgctcggctcgcccacagcactggacatccttcctccgcacaaagtacccgaaaaacgccccttaaaacaaataaaaggtaatttaacacgagaacggtcacccatttttactatggtttggtgttcgaaaaacaaacaaaaataaaaccaaaaaaaaggaatgcaacacgaggacttcccaggaggtcacccatcctagtactactctcgcccaagcacgcttaacttcggagttctgatgggatccggtgctttagtgctggtatgatcgcatccgtcatatcctgcgtcctccttcctcttatgcccacacctccgtgctcggctcgcccacggcactggacatccttcctccgcacaaagtacccgaaaaacgccccttaaaacaaataaaaggtaatttaacacgagaacggtcacccatttttactatggtttggtgttcgaaaaacaaacaaaaataaaaccaaaaaaaaggaatgcaacacgaggacttcccaggaggtcacccatcctagtactactcttgcccaagcacgcttaacttcggagttctgatgggatccgatgctttagtgctggtatgatcgcatccgtcatatcctgcgtcctccttcctcttatgcccacacctccgtgctcggctcgcccacggcactggacatccttcctccgcacaaagtacccgaaaaacgccccttaaaacaaataaaaggtaatttaacacgagaacggtcacccatttttactatggtttgatgttcgaaaaacaaacaaaaataaaaccaaaaaaaggaatgcaacacgagggcttccaaggaggtcacccatcctagtactactctcgcccaagctcgcttaacttcggagttctgatgggatccgatgctttagtgctggtatgatcgcatctgtcatatcctgcgtcctccttcctcttatgcccacacctccgtgctcggctcgcccacggcactggacatccttcctccgcacaaagtacccgaaaaaccccccttaaaacaaataaaaggaaatttaacacgagaacggtcacccatttttactatggtttggtgttcgaaaaacaaacaaaaataaaaccaaaaaaaagg

SEQ ID NO: 5485 - DNA, 1041 bp, Zea mays
  Zm_smallRNAprecursor_974
gctcgcccacagcactggacatccttcctccgcacaaagtacccgaaaaacgccccttaaaacaaataaaaggtaatttaacacgagaacggtcacccatttttactatggtttggtgttcgaaaaacaaacaaaaataaaaccaaaaaaaaggaatgcaacacgaggacttcccaggaggtcacccatcctagtactactctcgcccaagcacgcttaacttcggagttctgatgggatccggtgctttagtgctggtatgatcgcatccgtcatatcctgcgtcctccttcctcttatgcccacacctccgtgctcggctcgcccacggcactggacatccttcctccgcacaaagtacccgaaaaacgccccttaaaacaaataaaaggtaatttaacacgagaacggtcacccatttttactatggtttggtgttcgaaaaacaaacaaaaataaaaccaaaaaaaaggaatgcaacacgaggacttcccaggaggtcacccatcctagtactactcttgcccaagcacgcttaacttcggagttctgatgggatccgatgctttagtgctggtatgatcgcatccgtcatatcctgcgtcctccttcctcttatgcccacacctccgtgctcggctcgcccacggcactggacatccttcctccgcacaaagtacccgaaaaacgccccttaaaacaaataaaaggtaatttaacacgagaacggtcacccatttttactatggtttgatgttcgaaaaacaaacaaaaataaaaccaaaaaaaggaatgcaacacgagggcttccaaggaggtcacccatcctagtactactctcgcccaagctcgcttaacttcggagttctgatgggatccgatgctttagtgctggtatgatcgcatctgtcatatcctgcgtcctccttcctcttatgcccacacctccgtgctcggctcgcccacggcactggacatccttcctccgcacaaagtacccgaaaaaccccccttaaaacaaataaaaggaaatttaacacg

SEQ ID NO: 5486 - DNA, 1041 bp, Zea mays
  Zm_smallRNAprecursor_975
ggctcgcccacggcactggacatccttcctccgcacaaagtacccgaaaaacgccccttaaaacaaataaaaggtaatttaacacgagaacggtcacccatttttactatggtttggtgttcgaaaaacaaacaaaaataaaaccaaaaaaaaggaatgcaacacgaggacttcccaggaggtcacccatcctagtactactcttgcccaagcacgcttaacttcggagttctgatgggatccgatgctttagtgctggtatgatcgcatccgtcatatcctgcgtcctccttcctcttatgcccacacctccgtgctcggctcgcccacggcactggacatccttcctccgcacaaagtacccgaaaaacgccccttaaaacaaataaaaggtaatttaacacgagaacggtcacccatttttactatggtttgatgttcgaaaaacaaacaaaaataaaaccaaaaaaaggaatgcaacacgagggcttccaaggaggtcacccatcctagtactactctcgcccaagctcgcttaacttcggagttctgatgggatccgatgctttagtgctggtatgatcgcatctgtcatatcctgcgtcctccttcctcttatgcccacacctccgtgctcggctcgcccacggcactggacatccttcctccgcacaaagtacccgaaaaaccccccttaaaacaaataaaaggaaatttaacacgagaacggtcacccatttttactatggtttggtgttcgaaaaacaaacaaaaataaaaccaaaaaaaaggaatgcaacacgaggacttccaaggaggtcacccatcctagtactactctcgcccaagcacgctttaacttcggagttctgatgggatccggtgctttagtgctggtatgatcgcatctgtcatatcctgcgtcctccttcctcttatgtccacacctccgtgctcggctcgcccatggcactggacatccttcctccgcacaaagtacccgaaaaaatgccccttaaaacaaataaaaggtaatttaac

SEQ ID NO: 5487 - DNA, 1037 bp, Zea mays
  Zm_smallRNAprecursor_976
cgcccacggcactggacatccttcctccgcacaaagtacccgaaaaacgccccttaaaacaaataaaaggtaatttaacacgagaacggtcacccatttttactatggtttggtgttcgaaaaacaaacaaaaataaaaccaaaaaaaaggaatgcaacacgaggacttcccaggaggtcacccatcctagtactactcttgcccaagcacgcttaacttcggagttctgatgggatccgatgctttagtgctggtatgatcgcatccgtcatatcctgcgtcctccttcctcttatgcccacacctccgtgctcggctcgcccacggcactggacatccttcctccgcacaaagtacccgaaaaacgccccttaaaacaaataaaaggtaatttaacacgagaacggtcacccatttttactatggtttgatgttcgaaaaacaaacaaaaataaaaccaaaaaaaggaatgcaacacgagggcttccaaggaggtcacccatcctagtactactctcgcccaagctcgcttaacttcggagttctgatgggatccgatgctttagtgctggtatgatcgcatctgtcatatcctgcgtcctccttcctcttatgcccacacctccgtgctcggctcgcccacggcactggacatccttcctccgcacaaagtacccgaaaaaccccccttaaaacaaataaaaggaaatttaacacgagaacggtcacccatttttactatggtttggtgttcgaaaaacaaacaaaaataaaaccaaaaaaaaggaatgcaacacgaggacttccaaggaggtcacccatcctagtactactctcgcccaagcacgctttaacttcggagttctgatgggatccggtgctttagtgctggtatgatcgcatctgtcatatcctgcgtcctccttcctcttatgtccacacctccgtgctcggctcgcccatggcactggacatccttcctccgcacaaagtacccgaaaaaatgccccttaaaacaaataaaaggtaatttaac

SEQ ID NO: 5488 - DNA, 1055 bp, Zea mays
  Zm_smallRNAprecursor_977
tgctcggctcgcccacggcactggacatccttcctccgcacaaagtacccgaaaaacgccccttaaaacaaataaaaggtaatttaacacgagaacggtcacccatttttactatggtttgatgttcgaaaaacaaacaaaaataaaaccaaaaaaaggaatgcaacacgagggcttccaaggaggtcacccatcctagtactactctcgcccaagctcgcttaacttcggagttctgatgggatccgatgctttagtgctggtatgatcgcatctgtcatatcctgcgtcctccttcctcttatgcccacacctccgtgctcggctcgcccacggcactggacatccttcctccgcacaaagtacccgaaaaaccccccttaaaacaaataaaaggaaatttaacacgagaacggtcacccatttttactatggtttggtgttcgaaaaacaaacaaaaataaaaccaaaaaaaaggaatgcaacacgaggacttccaaggaggtcacccatcctagtactactctcgcccaagcacgctttaacttcggagttctgatgggatccggtgctttagtgctggtatgatcgcatctgtcatatcctgcgtcctccttcctcttatgtccacacctccgtgctcggctcgcccatggcactggacatccttcctccgcacaaagtacccgaaaaaatgccccttaaaacaaataaaaggtaatttaacaccagaacggtcacccatttttactatggtttggtgttcgaaaaacaaacaaaaataaaacaaaaaaaaggaatgcaacacgaggtcttcccaggaggtaacccatcctagtactactctcgcccaagcacacttaacttcggagttctgatgggatccgatgctttagtgctggtatgatcgcatccgtcatatcctgcgtcctccttcctcttatgcccacacctccgtgctcggctcgcccacggcactggacatccttcctccgcacaaagtacccgaaaaacgccccttaaaacaaataaaaggtaatttaacacgagaacgg

SEQ ID NO: 5489 - DNA, 1042 bp, Zea mays
  Zm_smallRNAprecursor_978
ggctcgcccacggcactggacatccttcctccgcacaaagtacccgaaaaacgccccttaaaacaaataaaaggtaatttaacacgagaacggtcacccatttttactatggtttgatgttcgaaaaacaaacaaaaataaaaccaaaaaaaggaatgcaacacgagggcttccaaggaggtcacccatcctagtactactctcgcccaagctcgcttaacttcggagttctgatgggatccgatgctttagtgctggtatgatcgcatctgtcatatcctgcgtcctccttcctcttatgcccacacctccgtgctcggctcgcccacggcactggacatccttcctccgcacaaagtacccgaaaaaccccccttaaaacaaataaaaggaaatttaacacgagaacggtcacccatttttactatggtttggtgttcgaaaaacaaacaaaaataaaaccaaaaaaaaggaatgcaacacgaggacttccaaggaggtcacccatcctagtactactctcgcccaagcacgctttaacttcggagttctgatgggatccggtgctttagtgctggtatgatcgcatctgtcatatcctgcgtcctccttcctcttatgtccacacctccgtgctcggctcgcccatggcactggacatccttcctccgcacaaagtacccgaaaaaatgccccttaaaacaaataaaaggtaatttaacaccagaacggtcacccatttttactatggtttggtgttcgaaaaacaaacaaaaataaaacaaaaaaaaggaatgcaacacgaggtcttcccaggaggtaacccatcctagtactactctcgcccaagcacacttaacttcggagttctgatgggatccgatgctttagtgctggtatgatcgcatccgtcatatcctgcgtcctccttcctcttatgcccacacctccgtgctcggctcgcccacggcactggacatccttcctccgcacaaagtacccgaaaaacgccccttaaaacaaataaaaggtaatttaacac

SEQ ID NO: 5490 - DNA, 1038 bp, Zea mays
  Zm_smallRNAprecursor_979
cgcccacggcactggacatccttcctccgcacaaagtacccgaaaaacgccccttaaaacaaataaaaggtaatttaacacgagaacggtcacccatttttactatggtttgatgttcgaaaaacaaacaaaaataaaaccaaaaaaaggaatgcaacacgagggcttccaaggaggtcacccatcctagtactactctcgcccaagctcgcttaacttcggagttctgatgggatccgatgctttagtgctggtatgatcgcatctgtcatatcctgcgtcctccttcctcttatgcccacacctccgtgctcggctcgcccacggcactggacatccttcctccgcacaaagtacccgaaaaaccccccttaaaacaaataaaaggaaatttaacacgagaacggtcacccatttttactatggtttggtgttcgaaaaacaaacaaaaataaaaccaaaaaaaaggaatgcaacacgaggacttccaaggaggtcacccatcctagtactactctcgcccaagcacgctttaacttcggagttctgatgggatccggtgctttagtgctggtatgatcgcatctgtcatatcctgcgtcctccttcctcttatgtccacacctccgtgctcggctcgcccatggcactggacatccttcctccgcacaaagtacccgaaaaaatgccccttaaaacaaataaaaggtaatttaacaccagaacggtcacccatttttactatggtttggtgttcgaaaaacaaacaaaaataaaacaaaaaaaaggaatgcaacacgaggtcttcccaggaggtaacccatcctagtactactctcgcccaagcacacttaacttcggagttctgatgggatccgatgctttagtgctggtatgatcgcatccgtcatatcctgcgtcctccttcctcttatgcccacacctccgtgctcggctcgcccacggcactggacatccttcctccgcacaaagtacccgaaaaacgccccttaaaacaaataaaaggtaatttaacac

SEQ ID NO: 5491 - DNA, 1048 bp, Zea mays
  Zm_smallRNAprecursor_980
actggacatccttcctccgcacaaagtacccgaaaaacgccccttaaaacaaataaaaggtaatttaacacgagaacggtcacccatttttactatggtttgatgttcgaaaaacaaacaaaaataaaaccaaaaaaaggaatgcaacacgagggcttccaaggaggtcacccatcctagtactactctcgcccaagctcgcttaacttcggagttctgatgggatccgatgctttagtgctggtatgatcgcatctgtcatatcctgcgtcctccttcctcttatgcccacacctccgtgctcggctcgcccacggcactggacatccttcctccgcacaaagtacccgaaaaaccccccttaaaacaaataaaaggaaatttaacacgagaacggtcacccatttttactatggtttggtgttcgaaaaacaaacaaaaataaaaccaaaaaaaaggaatgcaacacgaggacttccaaggaggtcacccatcctagtactactctcgcccaagcacgctttaacttcggagttctgatgggatccggtgctttagtgctggtatgatcgcatctgtcatatcctgcgtcctccttcctcttatgtccacacctccgtgctcggctcgcccatggcactggacatccttcctccgcacaaagtacccgaaaaaatgccccttaaaacaaataaaaggtaatttaacaccagaacggtcacccatttttactatggtttggtgttcgaaaaacaaacaaaaataaaacaaaaaaaaggaatgcaacacgaggtcttcccaggaggtaacccatcctagtactactctcgcccaagcacacttaacttcggagttctgatgggatccgatgctttagtgctggtatgatcgcatccgtcatatcctgcgtcctccttcctcttatgcccacacctccgtgctcggctcgcccacggcactggacatccttcctccgcacaaagtacccgaaaaacgccccttaaaacaaataaaaggtaatttaacacgagaacggtcacccattttt

SEQ ID NO: 5492 - DNA, 1037 bp, Zea mays
  Zm_smallRNAprecursor_981
cccacggcactggacatccttcctccgcacaaagtacccgaaaaaccccccttaaaacaaataaaaggaaatttaacacgagaacggtcacccatttttactatggtttggtgttcgaaaaacaaacaaaaataaaaccaaaaaaaaggaatgcaacacgaggacttccaaggaggtcacccatcctagtactactctcgcccaagcacgctttaacttcggagttctgatgggatccggtgctttagtgctggtatgatcgcatctgtcatatcctgcgtcctccttcctcttatgtccacacctccgtgctcggctcgcccatggcactggacatccttcctccgcacaaagtacccgaaaaaatgccccttaaaacaaataaaaggtaatttaacaccagaacggtcacccatttttactatggtttggtgttcgaaaaacaaacaaaaataaaacaaaaaaaaggaatgcaacacgaggtcttcccaggaggtaacccatcctagtactactctcgcccaagcacacttaacttcggagttctgatgggatccgatgctttagtgctggtatgatcgcatccgtcatatcctgcgtcctccttcctcttatgcccacacctccgtgctcggctcgcccacggcactggacatccttcctccgcacaaagtacccgaaaaacgccccttaaaacaaataaaaggtaatttaacacgagaacggtcacccatttttactatggtttggtgttcgaaaaacaaacaaaaataaaaccaaaaaaaaggaatgcaacacgaggacttcccaggaggtcacccatcctagtactactctcgcccaagcacgcttaacttcggagttctgatgggatccggtgctttagtgctggtatgatcgcatccgtcatatcctgcgtcctccttcctcttatgcccacacctccgtgctcggctcgcccacggcactggacatccttcctccgcacaaagtacccgaaaaacgccacttaaaacaaataaaaggtaatttaacac

SEQ ID NO: 5493 - DNA, 1192 bp, Zea mays
  Zm_smallRNAprecursor_982
gtttggtgttcgaaaaacaaacaaaaataaaaccaaaaaaaaggaatgcaacacgaggacttccaaggaggtcacccatcctagtactactctcgcccaagcacgctttaacttcggagttctgatgggatccggtgctttagtgctggtatgatcgcatctgtcatatcctgcgtcctccttcctcttatgtccacacctccgtgctcggctcgcccatggcactggacatccttcctccgcacaaagtacccgaaaaaatgccccttaaaacaaataaaaggtaatttaacaccagaacggtcacccatttttactatggtttggtgttcgaaaaacaaacaaaaataaaacaaaaaaaaggaatgcaacacgaggtcttcccaggaggtaacccatcctagtactactctcgcccaagcacacttaacttcggagttctgatgggatccgatgctttagtgctggtatgatcgcatccgtcatatcctgcgtcctccttcctcttatgcccacacctccgtgctcggctcgcccacggcactggacatccttcctccgcacaaagtacccgaaaaacgccccttaaaacaaataaaaggtaatttaacacgagaacggtcacccatttttactatggtttggtgttcgaaaaacaaacaaaaataaaaccaaaaaaaaggaatgcaacacgaggacttcccaggaggtcacccatcctagtactactctcgcccaagcacgcttaacttcggagttctgatgggatccggtgctttagtgctggtatgatcgcatccgtcatatcctgcgtcctccttcctcttatgcccacacctccgtgctcggctcgcccacggcactggacatccttcctccgcacaaagtacccgaaaaacgccacttaaaacaaataaaaggtaatttaacacgagaacggtcacccatttttactatggtttggtgttcgaaaaacaaacaaaaataaaaccaaaaaaaaaggaatgcaacacgatgtcacacccggctttaaggaacaagccaggtgcatctcatacatgcgccaagaagacaacacatataataacagagtgtatagagataaatgtcataaatcatcagagtatttattacatagcggaagacttattacaaagtaaaagtgtaaacataaaacgaactaaggatcgtc

SEQ ID NO: 5494 - DNA, 1129 bp, Zea mays
  Zm_smallRNAprecursor_983
gtccacacctccgtgctcggctcgcccatggcactggacatccttcctccgcacaaagtacccgaaaaaatgccccttaaaacaaataaaaggtaatttaacaccagaacggtcacccatttttactatggtttggtgttcgaaaaacaaacaaaaataaaacaaaaaaaaggaatgcaacacgaggtcttcccaggaggtaacccatcctagtactactctcgcccaagcacacttaacttcggagttctgatgggatccgatgctttagtgctggtatgatcgcatccgtcatatcctgcgtcctccttcctcttatgcccacacctccgtgctcggctcgcccacggcactggacatccttcctccgcacaaagtacccgaaaaacgccccttaaaacaaataaaaggtaatttaacacgagaacggtcacccatttttactatggtttggtgttcgaaaaacaaacaaaaataaaaccaaaaaaaaggaatgcaacacgaggacttcccaggaggtcacccatcctagtactactctcgcccaagcacgcttaacttcggagttctgatgggatccggtgctttagtgctggtatgatcgcatccgtcatatcctgcgtcctccttcctcttatgcccacacctccgtgctcggctcgcccacggcactggacatccttcctccgcacaaagtacccgaaaaacgccacttaaaacaaataaaaggtaatttaacacgagaacggtcacccatttttactatggtttggtgttcgaaaaacaaacaaaaataaaaccaaaaaaaaaggaatgcaacacgatgtcacacccggctttaaggaacaagccaggtgcatctcatacatgcgccaagaagacaacacatataataacagagtgtatagagataaatgtcataaatcatcagagtatttattacatagcggaagacttattacaaagtaaaagtgtaaacataaaacgaactaaggatcgtcggcgccaatgtcgactggaaacgccacctagatcagatcatactcctcgccttgtggctcctcctgaaccacctgctcttctcctgtgggggggtgtgagacagcaagggtgagctcacacatgatca

SEQ ID NO: 5495 - DNA, 1054 bp, Zea mays
  Zm_smallRNAprecursor_984
gctcggctcgcccatggcactggacatccttcctccgcacaaagtacccgaaaaaatgccccttaaaacaaataaaaggtaatttaacaccagaacggtcacccatttttactatggtttggtgttcgaaaaacaaacaaaaataaaacaaaaaaaaggaatgcaacacgaggtcttcccaggaggtaacccatcctagtactactctcgcccaagcacacttaacttcggagttctgatgggatccgatgctttagtgctggtatgatcgcatccgtcatatcctgcgtcctccttcctcttatgcccacacctccgtgctcggctcgcccacggcactggacatccttcctccgcacaaagtacccgaaaaacgccccttaaaacaaataaaaggtaatttaacacgagaacggtcacccatttttactatggtttggtgttcgaaaaacaaacaaaaataaaaccaaaaaaaaggaatgcaacacgaggacttcccaggaggtcacccatcctagtactactctcgcccaagcacgcttaacttcggagttctgatgggatccggtgctttagtgctggtatgatcgcatccgtcatatcctgcgtcctccttcctcttatgcccacacctccgtgctcggctcgcccacggcactggacatccttcctccgcacaaagtacccgaaaaacgccacttaaaacaaataaaaggtaatttaacacgagaacggtcacccatttttactatggtttggtgttcgaaaaacaaacaaaaataaaaccaaaaaaaaaggaatgcaacacgatgtcacacccggctttaaggaacaagccaggtgcatctcatacatgcgccaagaagacaacacatataataacagagtgtatagagataaatgtcataaatcatcagagtatttattacatagcggaagacttattacaaagtaaaagtgtaaacataaaacgaactaaggatcgtcggcgccaatgtcgactggaaacgccacctagatcagatcatactcctcgccttgtggctcctcctga

SEQ ID NO: 5496 - DNA, 1041 bp, Zea mays
  Zm_smallRNAprecursor_985
gctcgcccatggcactggacatccttcctccgcacaaagtacccgaaaaaatgccccttaaaacaaataaaaggtaatttaacaccagaacggtcacccatttttactatggtttggtgttcgaaaaacaaacaaaaataaaacaaaaaaaaggaatgcaacacgaggtcttcccaggaggtaacccatcctagtactactctcgcccaagcacacttaacttcggagttctgatgggatccgatgctttagtgctggtatgatcgcatccgtcatatcctgcgtcctccttcctcttatgcccacacctccgtgctcggctcgcccacggcactggacatccttcctccgcacaaagtacccgaaaaacgccccttaaaacaaataaaaggtaatttaacacgagaacggtcacccatttttactatggtttggtgttcgaaaaacaaacaaaaataaaaccaaaaaaaaggaatgcaacacgaggacttcccaggaggtcacccatcctagtactactctcgcccaagcacgcttaacttcggagttctgatgggatccggtgctttagtgctggtatgatcgcatccgtcatatcctgcgtcctccttcctcttatgcccacacctccgtgctcggctcgcccacggcactggacatccttcctccgcacaaagtacccgaaaaacgccacttaaaacaaataaaaggtaatttaacacgagaacggtcacccatttttactatggtttggtgttcgaaaaacaaacaaaaataaaaccaaaaaaaaaggaatgcaacacgatgtcacacccggctttaaggaacaagccaggtgcatctcatacatgcgccaagaagacaacacatataataacagagtgtatagagataaatgtcataaatcatcagagtatttattacatagcggaagacttattacaaagtaaaagtgtaaacataaaacgaactaaggatcgtcggcgccaatgtcgactggaaacgccacctagatcagatcatactcctcgccttgtggct

SEQ ID NO: 5497 - DNA, 1037 bp, Zea mays
  Zm_smallRNAprecursor_986
gcccatggcactggacatccttcctccgcacaaagtacccgaaaaaatgccccttaaaacaaataaaaggtaatttaacaccagaacggtcacccatttttactatggtttggtgttcgaaaaacaaacaaaaataaaacaaaaaaaaggaatgcaacacgaggtcttcccaggaggtaacccatcctagtactactctcgcccaagcacacttaacttcggagttctgatgggatccgatgctttagtgctggtatgatcgcatccgtcatatcctgcgtcctccttcctcttatgcccacacctccgtgctcggctcgcccacggcactggacatccttcctccgcacaaagtacccgaaaaacgccccttaaaacaaataaaaggtaatttaacacgagaacggtcacccatttttactatggtttggtgttcgaaaaacaaacaaaaataaaaccaaaaaaaaggaatgcaacacgaggacttcccaggaggtcacccatcctagtactactctcgcccaagcacgcttaacttcggagttctgatgggatccggtgctttagtgctggtatgatcgcatccgtcatatcctgcgtcctccttcctcttatgcccacacctccgtgctcggctcgcccacggcactggacatccttcctccgcacaaagtacccgaaaaacgccacttaaaacaaataaaaggtaatttaacacgagaacggtcacccatttttactatggtttggtgttcgaaaaacaaacaaaaataaaaccaaaaaaaaaggaatgcaacacgatgtcacacccggctttaaggaacaagccaggtgcatctcatacatgcgccaagaagacaacacatataataacagagtgtatagagataaatgtcataaatcatcagagtatttattacatagcggaagacttattacaaagtaaaagtgtaaacataaaacgaactaaggatcgtcggcgccaatgtcgactggaaacgccacctagatcagatcatactcctcgccttgtggct

SEQ ID NO: 5498 - DNA, 1047 bp, Zea mays
  Zm_smallRNAprecursor_987
ctggacatccttcctccgcacaaagtacccgaaaaaatgccccttaaaacaaataaaaggtaatttaacaccagaacggtcacccatttttactatggtttggtgttcgaaaaacaaacaaaaataaaacaaaaaaaaggaatgcaacacgaggtcttcccaggaggtaacccatcctagtactactctcgcccaagcacacttaacttcggagttctgatgggatccgatgctttagtgctggtatgatcgcatccgtcatatcctgcgtcctccttcctcttatgcccacacctccgtgctcggctcgcccacggcactggacatccttcctccgcacaaagtacccgaaaaacgccccttaaaacaaataaaaggtaatttaacacgagaacggtcacccatttttactatggtttggtgttcgaaaaacaaacaaaaataaaaccaaaaaaaaggaatgcaacacgaggacttcccaggaggtcacccatcctagtactactctcgcccaagcacgcttaacttcggagttctgatgggatccggtgctttagtgctggtatgatcgcatccgtcatatcctgcgtcctccttcctcttatgcccacacctccgtgctcggctcgcccacggcactggacatccttcctccgcacaaagtacccgaaaaacgccacttaaaacaaataaaaggtaatttaacacgagaacggtcacccatttttactatggtttggtgttcgaaaaacaaacaaaaataaaaccaaaaaaaaaggaatgcaacacgatgtcacacccggctttaaggaacaagccaggtgcatctcatacatgcgccaagaagacaacacatataataacagagtgtatagagataaatgtcataaatcatcagagtatttattacatagcggaagacttattacaaagtaaaagtgtaaacataaaacgaactaaggatcgtcggcgccaatgtcgactggaaacgccacctagatcagatcatactcctcgccttgtggctcctcctgaaccacctgctct

SEQ ID NO: 5499 - DNA, 1127 bp, Zea mays
  Zm_smallRNAprecursor_988
tatgcttatccaatgcccaccacatgagattcctaggtattttatcaaaggccttttccaattcgataaaaaccatgtgcaagtccttttgctccttatatcgctccatgacctgccttattaagaaaattgcttcgatggttgaccttctaggcatgaatccaaattagttcatggtgatatgtatcattcctctcagtcaatgctcaataactctctcacatagcttcatagtgtggctcatgagcttaatccctcgatagttggtacaaatttgaatatctccctcgttcttgaagattggtactaatgtactccttatccactcatcaggcatcttatttgatcgaaaaatatggttgaacaacttggttagcaaacgatagcaatatcaccaaggtatttccacacttctattgggataccatccaggcccattgcattgccccctttcatccgctttaaagcttctttgacctctgattcttggatcctgcgtacaaagcatctatttaaatcatcaaaggagtcatccaattgggtgtccatagtctcattctcaccattgaaaagattgtcaaaatacctctaccacctctgtttgatatcttgtcctttcaccaagagttgatccatctcatccttaatgaatttaacttggttgaggtccctcgtcttcctttcccgaacctagctatcttataaacatacttctccccttcctttgtacttagtcttcggtaaagatcatcataggctcgaccctttgcttcactcacagctcgctttgcagtcttctttgccaccttatacctctctatgttgaccacgctcctgtcatggaacaagctcctgtaacattctttcttctcttttattgccttttgaacattctcggtccaccaccaagtatccttaggttcactatcgctccctttggtcactccaaacacctctaacgccaccttcctaatacaagttgccatcttcactcatatgttgtttgcatcttcttcttcagaccaagcgccctccacaaaaactttttccctaaaaacttcagatgtatcccctttgagtttccaccactttgtcctcacaattttggcttatcccaatgggtacta

SEQ ID NO: 5500 - DNA, 1063 bp, Zea mays
  Zm_smallRNAprecursor_989
agatcttgtttgcctagtgttttatttaccgaggcttttttgtctggcactcggtaaaaaacttctttgacgagtgcctgaaagaaaacactcggcaaaatatttggcacccggcaaaaaggcgaattccgatagtgccacacataagacaatttaacgataattgtgtatgagagaatgaattgtggtcatttagttgttttaggtttcaatgcctatgatctcgtgtctaagtggcatctccctcaagatattgttttattttcttccttctttactcaaatgtcacatcagctttctatcctacatggtatatattaaataatgagtatagtatggcaccgtgccttgagaatatacaccagtcctgctccaaataatgccaatttagtttttctagatgcattactagatatatagagaaaattctacgtatgtcaccgcaattttgtccagtacatcctaatctcttctatgtcactcggatgcaatttcttacctttttcatgccctcgtcagtggcgtaaaagggtaagaaaatcacatgtacttatccttttgtgccactgacgatagcatgaaaggatagaaaaattacatctgaaagacatatagaagtgattaggacatttgccatcacaaacaaggtacgggcaaaattgcaatgaggtagatatatatatcgggatacatatagttaataataaaagtgatgtatttaaaataaccaaataaaaccacttatagattgagaagaaggggattatatatactacttactcgtgcattcaccatcactctggacataggggtttccgtcgtagccatgggcacacttgcagaagtagccagggccattggttgaattagtgcactcgctatgcttgctgcggcagccatagtcaggttcgttgggtgcctgggcgcaggagatggaagtcatggagtcgccgttgttgtcgcggatggcccagtcgagacgcagtggcatggtccaccagtccaaaggcagacggttgtcgggtgtgtgcgacacaaggtcggatgccttgaaggtgtagtt

SEQ ID NO: 5501 - DNA, 1114 bp, Zea mays
  Zm_smallRNAprecursor_990
agccagttgacagccaccggcctggcgcaccggacattgtccggtgcaccaccggacagtccggtgcacccagaccgagctgtctttggctgaacagagccatctcttttccaacttgatttctcctgtttccagcacttagacacaatacattagtctccaaaacaatgtactaagtcttagaaacatacctttttacttgatttgcactttatccatagattaacatgagtccacttgtgttggcactcaatcaccaaaatacttagaaatggcccaagggcacatttccctttcagtgactgatcagatgtcacatgaaatgaagctccagagtcaagaacccaagtagatgacaaagcaccagcagatgaagtagcagcaacaacaactgagcctctaggagatggtcctgtaccacgaccacgagtagcacgacggacacgaaaatcagctagcttctctggatacttagtaaagcagttctcataccgattagtggtcttcttacaatgctcacaaggctagaaggaggtcctcctggacttctgagcagtggccaatacaatgtgcgaactcacaccagtaatagaagacatggacttaaggcgagtctcttcagcaagtaattcagacaatgcctgagccatggtgagagtatcagaagtgtgtagtaaccttgcacgaagagaatcaaattcaagtcgaacgcccataacaaatctgtaggtaaagaacttctcaatgaacttatgggctggacaaggcacagctgtacaagcaggcaccatggaggtcaaagcactcataagatgatcaaaagttgaatagtaatcatcaatggacatatcatgttgctcaatgacatgagtttgctgcataagagtatgtaaaagagccccactgtcctgaacaaaccgatccttcagatgagaccagatagccctagcaatggtgaatttggacagactcataatcatagttggtttagtactattgaccattgcaaccattactttgccatcattgatttgccaagtcttgattgcagctgtgttgcttctatcagctactaaaactgatagaaggcggacgaggaaggcggacgaggaag

SEQ ID NO: 5502 - DNA, 1069 bp, Zea mays
  Zm_smallRNAprecursor_991
gatctcctcaaatcattgcgattttacacaacaacatacatattacatatagctaggaaagggaatagattcattagaaacaccatgatgatgatggcgggaaggaccagcgacaagaaatgggcccagaccaccgcggggcccgacctcacatgacgcttgtcgaccgcgggaagcagcatctccgtggtgggccctccgtgtccccttcggcccgggatggcccacgtgcacgtcgaaagcgtgagagcgagaggaggacgcctacctaagcgagcaatgcaacagccatcatcgtcattcaccttgcctatccatcatcctcgtcttcttctgtctatccatggcgatttggcgttataaccacccccacccccacccttctctggctacgtcctcgctttcccttcctcccagctgcctgcccccccttccctaccctagctacgcacgctaccagctgccccccatccatgccgtccaggaagctggtggaggactccaaagggatcgcattgatctattctcacctgccgcctgctgcatgcgatgcgagtcgacgacaagatcagtgcaatccctttggaattttccactcgcgccttcacccccgccgcacgtgccacacgcccctccatcttccatggattccatctctcatcaggtatctctctctctatctgctcttgcaagctacttccatggatttgatttttgttaagttcgcctacttgctctccacgtacgtactggctacatcgtttctgcgcaccacacacccaccaggccatgaggaatcaatttgctcatgggagcatgatgatgcagacaagtacaaacatagtatataataaaaatagctgccgattcattctttcctttcgctcatcgttttcgtagttaattcattcattggcatggttaagtatgtgtaaatacttacatgtagatatatcagggtaaaggtccagacaggacccatttaagaggattgaatatgcctgcagcggtcggccgccccaactgcacctgcacgcgcatcagtgtatttcgatcaactctctctgtc

SEQ ID NO: 5503 - DNA, 1069 bp, Zea mays; identical to SEQ ID NO: 5502
  Zm_smallRNAprecursor_992

SEQ ID NO: 5504 - DNA, 1069 bp, Zea mays; identical to SEQ ID NO: 5502
  Zm_smallRNAprecursor_993

SEQ ID NO: 5505 - DNA, 1070 bp, Zea mays
  Zm_smallRNAprecursor_994
gatctcctcaaatcattgcgattttacacaacaacatacatattacatatagctaggaaagggaatagattcattagaaacaccatgatgatgatggcgggaaggaccagcgacaagaaatgggcccagaccaccgcggggcccgacctcacatgacgcttgtcgaccgcgggaagcagcatctccgtggtgggccctccgtgtccccttcggcccgggatggcccacgtgcacgtcgaaagcgtgagagcgagaggaggacgcctacctaagcgagcaatgcaacagccatcatcgtcattcaccttgcctatccatcatcctcgtcttcttctgtctatccatggcgatttggcgttataaccacccccacccccacccttctctggctacgtcctcgctttcccttcctcccagctgcctgcccccccttccctaccctagctacgcacgctaccagctgccccccatccatgccgtccaggaagctggtggaggactccaaagggatcgcattgatctattctcacctgccgcctgctgcatgcgatgcgagtcgacgacaagatcagtgcaatccctttggaattttccactcgcgccttcacccccgccgcacgtgccacacgcccctccatcttccatggattccatctctcatcaggtatctctctctctatctgctcttgcaagctacttccatggatttgatttttgttaagttcgcctacttgctctccacgtacgtactggctacatcgtttctgcgcaccacacacccaccaggccatgaggaatcaatttgctcatgggagcatgatgatgcagacaagtacaaacatagtatataataaaaatagctgccgattcattctttcctttcgctcatcgttttcgtagttaattcattcattggcatggttaagtatgtgtaaatacttacatgtagatatatcagggtaaaggtccagacaggacccatttaagaggattgaatatgcctgcagcggtcggccgccccaactgcacctgcacgcgcatcagtgtatttcgatcaactctctctgtcc

SEQ ID NO: 5506 - DNA, 1070 bp, Zea mays; identical to SEQ ID NO: 5505
  Zm_smallRNAprecursor_995

SEQ ID NO: 5507 - DNA, 1070 bp, Zea mays; identical to SEQ ID NO: 5505
  Zm_smallRNAprecursor_996

SEQ ID NO: 5508 - DNA, 1071 bp, Zea mays
  Zm_smallRNAprecursor_997
gatctcctcaaatcattgcgattttacacaacaacatacatattacatatagctaggaaagggaatagattcattagaaacaccatgatgatgatggcgggaaggaccagcgacaagaaatgggcccagaccaccgcggggcccgacctcacatgacgcttgtcgaccgcgggaagcagcatctccgtggtgggccctccgtgtccccttcggcccgggatggcccacgtgcacgtcgaaagcgtgagagcgagaggaggacgcctacctaagcgagcaatgcaacagccatcatcgtcattcaccttgcctatccatcatcctcgtcttcttctgtctatccatggcgatttggcgttataaccacccccacccccacccttctctggctacgtcctcgctttcccttcctcccagctgcctgcccccccttccctaccctagctacgcacgctaccagctgccccccatccatgccgtccaggaagctggtggaggactccaaagggatcgcattgatctattctcacctgccgcctgctgcatgcgatgcgagtcgacgacaagatcagtgcaatccctttggaattttccactcgcgccttcacccccgccgcacgtgccacacgcccctccatcttccatggattccatctctcatcaggtatctctctctctatctgctcttgcaagctacttccatggatttgatttttgttaagttcgcctacttgctctccacgtacgtactggctacatcgtttctgcgcaccacacacccaccaggccatgaggaatcaatttgctcatgggagcatgatgatgcagacaagtacaaacatagtatataataaaaatagctgccgattcattctttcctttcgctcatcgttttcgtagttaattcattcattggcatggttaagtatgtgtaaatacttacatgtagatatatcagggtaaaggtccagacaggacccatttaagaggattgaatatgcctgcagcggtcggccgccccaactgcacctgcacgcgcatcagtgtatttcgatcaactctctctgtcct

SEQ ID NO: 5509 - DNA, 1071 bp, Zea mays; identical to SEQ ID NO: 5508
  Zm_smallRNAprecursor_998

SEQ ID NO: 5510 - DNA, 1071 bp, Zea mays; identical to SEQ ID NO: 5508
  Zm_smallRNAprecursor_999

SEQ ID NO: 5511 - DNA, 1090 bp, Zea mays
  Zm_smallRNAprecursor_1000
acatcagcactatggtaggtcaaggcaatttcaggaggcactatacagaaactacatttctgaaggtgtctaaaaggtgtgtgtagagtgtgcttactagtagtttagccaccatgaccgaaatgttttcgagctcgtaccaagattacctaagctgagcatcatcccagatctgttggccaccctcgctgtcaagatcaacggcgaccacaaggcagcaagcatccagcactgcacatgggccaaagaatgagctctgtgtcaagtgtgagctacaaccatatagggatcagctaagcttatcataccttcctttttttttctcattcagccactactgcagcctacaaaggatatcataatgggccgacccagtcacccaggacgcaatatgttggtcaatcccaccagttagtaccacctcggtagctcagatgagtagaagataccttaaaagttcagctcaggcaacttgcagcacgaccttacttgaacaggatctgttctataggatcgtactgttgcatccttgattaataaggaggcaagtacttaaacctggttgatgagtaaatgacctgtgggccagagcgtgattaacggccaggattcagtctctgtgctttgtctggtgctgtagatgatcgttcctggtcaggagcccctggctaagggtggcccacaggttgtctgacaggtcttcaaatctttttgccctgcttcagttgaacaatggacacctcgacattttttttgccaccaataatgatggaatcatggaactgtgttgcgtttgaagggaattttgatgctgtgctgtgtttgaagaaacatttgagtaaaatatttcaactggcttttcttcaacgtttgcccaccgattaaaaggggagatctcttactcgtttttgccattagtaatacaattttttagctgtgatgtatttgaagagaatttaagtaggatattcctgtcaccagctgttctggctcaatgttgctctcaaactaaaaggggcaaatctcttgcccgttttggcattagtagagccagacttgtggtacaattttttagctgtgatgtatttga

SEQ ID NO: 5512 - DNA, 1150 bp, Zea mays
  Zm_smallRNAprecursor_1001
atatttcgttctaatagtaaaacctcaaatctaaattatagggtgacccactatgatgtagtatatttaaggcatttgagatgatactgtataattttttgaccaaattttgtgaaataatatactgttggagtagtttttaatttaagacaccaattttaaatattgttggagatggtctaagctagcgtttttttatttctttttctcgggtccagaacacgttctctgtataatattttgcgtgtcagaccacctttcaaagaaataatacctgtcactggctcactgtatcgcataatcagtcacatgaaacggttaggccctgttcggttgttagggattggagccccggattgattcctagccggattacttctctaatttatatagattttgacgagctggaacgaatctatgtttattcctgtgaaagcgaacggacccttataaacttagtttccgtctgggtatgcgcccttggattgctgttgcatattcagctcctgttgcagctgctactgctgttttcttgatttaccctattggtcaaggaagtttctctgatggtatgcctttaggaatatctggtactttcaactttatgattgtattccaggcagagcacaacatccttatgcatccatttcacatgttaggtgtagctggtgtattcggcggttccctattcagtgctatgcatggttccttggtaacctctagtttgatcagggaaaccactgaaaatgagtctgctaatgagggttacaaatttggtcaggaagaagagacttataatattgtggctgctcacggttattttggtcgattaatcttccaatatgctagtttcaacaattctcgttctttacacttcttcttggctgcttggcctgtagtagggatctggttcactgctttaggtattagtactatggcattcaacctaaatggtttcaatttcaaccaatctgtagttgatagccaaggtcgcgttattaatacttgggctgatatcatcaactgtgctaatcttggtatggaggtaatgcacgaacgtaatgctcacaacttccctctagacctagctgctcttgaagttccttaccttaatggataaggtttttctcctaaacatataggaattttt

SEQ ID NO: 5513 - DNA, 1195 bp, Zea mays
  Zm_smallRNAprecursor_1002
atatttcgttctaatagtaaaacctcaaatctaaattatagggtgacccactatgatgtagtatatttaaggcatttgagatgatactgtataattttttgaccaaattttgtgaaataatatactgttggagtagtttttaatttaagacaccaattttaaatattgttggagatggtctaagctagcgtttttttatttctttttctcgggtccagaacacgttctctgtataatattttgcgtgtcagaccacctttcaaagaaataatacctgtcactggctcactgtatcgcataatcagtcacatgaaacggttaggccctgttcggttgttagggattggagccccggattgattcctagccggattacttctctaatttatatagattttgacgagctggaacgaatctatgtttattcctgtgaaagcgaacggacccttataaacttagtttccgtctgggtatgcgcccttggattgctgttgcatattcagctcctgttgcagctgctactgctgttttcttgatttaccctattggtcaaggaagtttctctgatggtatgcctttaggaatatctggtactttcaactttatgattgtattccaggcagagcacaacatccttatgcatccatttcacatgttaggtgtagctggtgtattcggcggttccctattcagtgctatgcatggttccttggtaacctctagtttgatcagggaaaccactgaaaatgagtctgctaatgagggttacaaatttggtcaggaagaagagacttataatattgtggctgctcacggttattttggtcgattaatcttccaatatgctagtttcaacaattctcgttctttacacttcttcttggctgcttggcctgtagtagggatctggttcactgctttaggtattagtactatggcattcaacctaaatggtttcaatttcaaccaatctgtagttgatagccaaggtcgcgttattaatacttgggctgatatcatcaactgtgctaatcttggtatggaggtaatgcacgaacgtaatgctcacaacttccctctagacctagctgctcttgaagttccttaccttaatggataaggtttttctcctaaacatataggaatttttgaaggaaggaaagccagaaatacccaatatcttgttccaacagga

SEQ ID NO: 5514 - DNA, 1238 bp, Zea mays
  Zm_smallRNAprecursor_1003
atatttcgttctaatagtaaaacctcaaatctaaattatagggtgacccactatgatgtagtatatttaaggcatttgagatgatactgtataattttttgaccaaattttgtgaaataatatactgttggagtagtttttaatttaagacaccaattttaaatattgttggagatggtctaagctagcgtttttttatttctttttctcgggtccagaacacgttctctgtataatattttgcgtgtcagaccacctttcaaagaaataatacctgtcactggctcactgtatcgcataatcagtcacatgaaacggttaggccctgttcggttgttagggattggagccccggattgattcctagccggattacttctctaatttatatagattttgacgagctggaacgaatctatgtttattcctgtgaaagcgaacggacccttataaacttagtttccgtctgggtatgcgcccttggattgctgttgcatattcagctcctgttgcagctgctactgctgttttcttgatttaccctattggtcaaggaagtttctctgatggtatgcctttaggaatatctggtactttcaactttatgattgtattccaggcagagcacaacatccttatgcatccatttcacatgttaggtgtagctggtgtattcggcggttccctattcagtgctatgcatggttccttggtaacctctagtttgatcagggaaaccactgaaaatgagtctgctaatgagggttacaaatttggtcaggaagaagagacttataatattgtggctgctcacggttattttggtcgattaatcttccaatatgctagtttcaacaattctcgttctttacacttcttcttggctgcttggcctgtagtagggatctggttcactgctttaggtattagtactatggcattcaacctaaatggtttcaatttcaaccaatctgtagttgatagccaaggtcgcgttattaatacttgggctgatatcatcaactgtgctaatcttggtatggaggtaatgcacgaacgtaatgctcacaacttccctctagacctagctgctcttgaagttccttaccttaatggataaggtttttctcctaaacatataggaatttttgaaggaaggaaagccagaaatacccaatatcttgttccaacaggatattgggtatttctttgtttattctgaatctttctattctgaa

SEQ ID NO: 5515 - DNA, 1239 bp, Zea mays
  Zm_smallRNAprecursor_1004
atatttcgttctaatagtaaaacctcaaatctaaattatagggtgacccactatgatgtagtatatttaaggcatttgagatgatactgtataattttttgaccaaattttgtgaaataatatactgttggagtagtttttaatttaagacaccaattttaaatattgttggagatggtctaagctagcgtttttttatttctttttctcgggtccagaacacgttctctgtataatattttgcgtgtcagaccacctttcaaagaaataatacctgtcactggctcactgtatcgcataatcagtcacatgaaacggttaggccctgttcggttgttagggattggagccccggattgattcctagccggattacttctctaatttatatagattttgacgagctggaacgaatctatgtttattcctgtgaaagcgaacggacccttataaacttagtttccgtctgggtatgcgcccttggattgctgttgcatattcagctcctgttgcagctgctactgctgttttcttgatttaccctattggtcaaggaagtttctctgatggtatgcctttaggaatatctggtactttcaactttatgattgtattccaggcagagcacaacatccttatgcatccatttcacatgttaggtgtagctggtgtattcggcggttccctattcagtgctatgcatggttccttggtaacctctagtttgatcagggaaaccactgaaaatgagtctgctaatgagggttacaaatttggtcaggaagaagagacttataatattgtggctgctcacggttattttggtcgattaatcttccaatatgctagtttcaacaattctcgttctttacacttcttcttggctgcttggcctgtagtagggatctggttcactgctttaggtattagtactatggcattcaacctaaatggtttcaatttcaaccaatctgtagttgatagccaaggtcgcgttattaatacttgggctgatatcatcaactgtgctaatcttggtatggaggtaatgcacgaacgtaatgctcacaacttccctctagacctagctgctcttgaagttccttaccttaatggataaggtttttctcctaaacatataggaatttttgaaggaaggaaagccagaaatacccaatatcttgttccaacaggatattgggtatttctttgtttattctgaatctttctattctgaat

SEQ ID NO: 5516 - DNA, 1240 bp, Zea mays
  Zm_smallRNAprecursor_1005
atatttcgttctaatagtaaaacctcaaatctaaattatagggtgacccactatgatgtagtatatttaaggcatttgagatgatactgtataattttttgaccaaattttgtgaaataatatactgttggagtagtttttaatttaagacaccaattttaaatattgttggagatggtctaagctagcgtttttttatttctttttctcgggtccagaacacgttctctgtataatattttgcgtgtcagaccacctttcaaagaaataatacctgtcactggctcactgtatcgcataatcagtcacatgaaacggttaggccctgttcggttgttagggattggagccccggattgattcctagccggattacttctctaatttatatagattttgacgagctggaacgaatctatgtttattcctgtgaaagcgaacggacccttataaacttagtttccgtctgggtatgcgcccttggattgctgttgcatattcagctcctgttgcagctgctactgctgttttcttgatttaccctattggtcaaggaagtttctctgatggtatgcctttaggaatatctggtactttcaactttatgattgtattccaggcagagcacaacatccttatgcatccatttcacatgttaggtgtagctggtgtattcggcggttccctattcagtgctatgcatggttccttggtaacctctagtttgatcagggaaaccactgaaaatgagtctgctaatgagggttacaaatttggtcaggaagaagagacttataatattgtggctgctcacggttattttggtcgattaatcttccaatatgctagtttcaacaattctcgttctttacacttcttcttggctgcttggcctgtagtagggatctggttcactgctttaggtattagtactatggcattcaacctaaatggtttcaatttcaaccaatctgtagttgatagccaaggtcgcgttattaatacttgggctgatatcatcaactgtgctaatcttggtatggaggtaatgcacgaacgtaatgctcacaacttccctctagacctagctgctcttgaagttccttaccttaatggataaggtttttctcctaaacatataggaatttttgaaggaaggaaagccagaaatacccaatatcttgttccaacaggatattgggtatttctttgtttattctgaatctttctattctgaatt

SEQ ID NO: 5517 - DNA, 1193 bp, Zea mays
  Zm_smallRNAprecursor_1006
gtgacccactatgatgtagtatatttaaggcatttgagatgatactgtataattttttgaccaaattttgtgaaataatatactgttggagtagtttttaatttaagacaccaattttaaatattgttggagatggtctaagctagcgtttttttatttctttttctcgggtccagaacacgttctctgtataatattttgcgtgtcagaccacctttcaaagaaataatacctgtcactggctcactgtatcgcataatcagtcacatgaaacggttaggccctgttcggttgttagggattggagccccggattgattcctagccggattacttctctaatttatatagattttgacgagctggaacgaatctatgtttattcctgtgaaagcgaacggacccttataaacttagtttccgtctgggtatgcgcccttggattgctgttgcatattcagctcctgttgcagctgctactgctgttttcttgatttaccctattggtcaaggaagtttctctgatggtatgcctttaggaatatctggtactttcaactttatgattgtattccaggcagagcacaacatccttatgcatccatttcacatgttaggtgtagctggtgtattcggcggttccctattcagtgctatgcatggttccttggtaacctctagtttgatcagggaaaccactgaaaatgagtctgctaatgagggttacaaatttggtcaggaagaagagacttataatattgtggctgctcacggttattttggtcgattaatcttccaatatgctagtttcaacaattctcgttctttacacttcttcttggctgcttggcctgtagtagggatctggttcactgctttaggtattagtactatggcattcaacctaaatggtttcaatttcaaccaatctgtagttgatagccaaggtcgcgttattaatacttgggctgatatcatcaactgtgctaatcttggtatggaggtaatgcacgaacgtaatgctcacaacttccctctagacctagctgctcttgaagttccttaccttaatggataaggtttttctcctaaacatataggaatttttgaaggaaggaaagccagaaatacccaatatcttgttccaacaggatattgggtatttctttgtttattctgaatctttctattct

SEQ ID NO: 5518 - DNA, 1119 bp, Zea mays
  Zm_smallRNAprecursor_1007
accaaattttgtgaaataatatactgttggagtagtttttaatttaagacaccaattttaaatattgttggagatggtctaagctagcgtttttttatttctttttctcgggtccagaacacgttctctgtataatattttgcgtgtcagaccacctttcaaagaaataatacctgtcactggctcactgtatcgcataatcagtcacatgaaacggttaggccctgttcggttgttagggattggagccccggattgattcctagccggattacttctctaatttatatagattttgacgagctggaacgaatctatgtttattcctgtgaaagcgaacggacccttataaacttagtttccgtctgggtatgcgcccttggattgctgttgcatattcagctcctgttgcagctgctactgctgttttcttgatttaccctattggtcaaggaagtttctctgatggtatgcctttaggaatatctggtactttcaactttatgattgtattccaggcagagcacaacatccttatgcatccatttcacatgttaggtgtagctggtgtattcggcggttccctattcagtgctatgcatggttccttggtaacctctagtttgatcagggaaaccactgaaaatgagtctgctaatgagggttacaaatttggtcaggaagaagagacttataatattgtggctgctcacggttattttggtcgattaatcttccaatatgctagtttcaacaattctcgttctttacacttcttcttggctgcttggcctgtagtagggatctggttcactgctttaggtattagtactatggcattcaacctaaatggtttcaatttcaaccaatctgtagttgatagccaaggtcgcgttattaatacttgggctgatatcatcaactgtgctaatcttggtatggaggtaatgcacgaacgtaatgctcacaacttccctctagacctagctgctcttgaagttccttaccttaatggataaggtttttctcctaaacatataggaatttttgaaggaaggaaagccagaaatacccaatatcttgttccaacaggatattgggtatttctttgtttattct

SEQ ID NO: 5519 - DNA, 1119 bp, Zea mays
  Zm_smallRNAprecursor_1008
atatactgttggagtagtttttaatttaagacaccaattttaaatattgttggagatggtctaagctagcgtttttttatttctttttctcgggtccagaacacgttctctgtataatattttgcgtgtcagaccacctttcaaagaaataatacctgtcactggctcactgtatcgcataatcagtcacatgaaacggttaggccctgttcggttgttagggattggagccccggattgattcctagccggattacttctctaatttatatagattttgacgagctggaacgaatctatgtttattcctgtgaaagcgaacggacccttataaacttagtttccgtctgggtatgcgcccttggattgctgttgcatattcagctcctgttgcagctgctactgctgttttcttgatttaccctattggtcaaggaagtttctctgatggtatgcctttaggaatatctggtactttcaactttatgattgtattccaggcagagcacaacatccttatgcatccatttcacatgttaggtgtagctggtgtattcggcggttccctattcagtgctatgcatggttccttggtaacctctagtttgatcagggaaaccactgaaaatgagtctgctaatgagggttacaaatttggtcaggaagaagagacttataatattgtggctgctcacggttattttggtcgattaatcttccaatatgctagtttcaacaattctcgttctttacacttcttcttggctgcttggcctgtagtagggatctggttcactgctttaggtattagtactatggcattcaacctaaatggtttcaatttcaaccaatctgtagttgatagccaaggtcgcgttattaatacttgggctgatatcatcaactgtgctaatcttggtatggaggtaatgcacgaacgtaatgctcacaacttccctctagacctagctgctcttgaagttccttaccttaatggataaggtttttctcctaaacatataggaatttttgaaggaaggaaagccagaaatacccaatatcttgttccaacaggatattgggtatttctttgtttattctgaatctttctattctgaa

SEQ ID NO: 5520 - DNA, 1120 bp, Zea mays
  Zm_smallRNAprecursor_1009
atatactgttggagtagtttttaatttaagacaccaattttaaatattgttggagatggtctaagctagcgtttttttatttctttttctcgggtccagaacacgttctctgtataatattttgcgtgtcagaccacctttcaaagaaataatacctgtcactggctcactgtatcgcataatcagtcacatgaaacggttaggccctgttcggttgttagggattggagccccggattgattcctagccggattacttctctaatttatatagattttgacgagctggaacgaatctatgtttattcctgtgaaagcgaacggacccttataaacttagtttccgtctgggtatgcgcccttggattgctgttgcatattcagctcctgttgcagctgctactgctgttttcttgatttaccctattggtcaaggaagtttctctgatggtatgcctttaggaatatctggtactttcaactttatgattgtattccaggcagagcacaacatccttatgcatccatttcacatgttaggtgtagctggtgtattcggcggttccctattcagtgctatgcatggttccttggtaacctctagtttgatcagggaaaccactgaaaatgagtctgctaatgagggttacaaatttggtcaggaagaagagacttataatattgtggctgctcacggttattttggtcgattaatcttccaatatgctagtttcaacaattctcgttctttacacttcttcttggctgcttggcctgtagtagggatctggttcactgctttaggtattagtactatggcattcaacctaaatggtttcaatttcaaccaatctgtagttgatagccaaggtcgcgttattaatacttgggctgatatcatcaactgtgctaatcttggtatggaggtaatgcacgaacgtaatgctcacaacttccctctagacctagctgctcttgaagttccttaccttaatggataaggtttttctcctaaacatataggaatttttgaaggaaggaaagccagaaatacccaatatcttgttccaacaggatattgggtatttctttgtttattctgaatctttctattctgaat

SEQ ID NO: 5521 - DNA, 1121 bp, Zea mays
  Zm_smallRNAprecursor_1010
atatactgttggagtagtttttaatttaagacaccaattttaaatattgttggagatggtctaagctagcgtttttttatttctttttctcgggtccagaacacgttctctgtataatattttgcgtgtcagaccacctttcaaagaaataatacctgtcactggctcactgtatcgcataatcagtcacatgaaacggttaggccctgttcggttgttagggattggagccccggattgattcctagccggattacttctctaatttatatagattttgacgagctggaacgaatctatgtttattcctgtgaaagcgaacggacccttataaacttagtttccgtctgggtatgcgcccttggattgctgttgcatattcagctcctgttgcagctgctactgctgttttcttgatttaccctattggtcaaggaagtttctctgatggtatgcctttaggaatatctggtactttcaactttatgattgtattccaggcagagcacaacatccttatgcatccatttcacatgttaggtgtagctggtgtattcggcggttccctattcagtgctatgcatggttccttggtaacctctagtttgatcagggaaaccactgaaaatgagtctgctaatgagggttacaaatttggtcaggaagaagagacttataatattgtggctgctcacggttattttggtcgattaatcttccaatatgctagtttcaacaattctcgttctttacacttcttcttggctgcttggcctgtagtagggatctggttcactgctttaggtattagtactatggcattcaacctaaatggtttcaatttcaaccaatctgtagttgatagccaaggtcgcgttattaatacttgggctgatatcatcaactgtgctaatcttggtatggaggtaatgcacgaacgtaatgctcacaacttccctctagacctagctgctcttgaagttccttaccttaatggataaggtttttctcctaaacatataggaatttttgaaggaaggaaagccagaaatacccaatatcttgttccaacaggatattgggtatttctttgtttattctgaatctttctattctgaatt

SEQ ID NO: 5522 - DNA, 1140 bp, Zea mays
  Zm_smallRNAprecursor_1011
acaccaattttaaatattgttggagatggtctaagctagcgtttttttatttctttttctcgggtccagaacacgttctctgtataatattttgcgtgtcagaccacctttcaaagaaataatacctgtcactggctcactgtatcgcataatcagtcacatgaaacggttaggccctgttcggttgttagggattggagccccggattgattcctagccggattacttctctaatttatatagattttgacgagctggaacgaatctatgtttattcctgtgaaagcgaacggacccttataaacttagtttccgtctgggtatgcgcccttggattgctgttgcatattcagctcctgttgcagctgctactgctgttttcttgatttaccctattggtcaaggaagtttctctgatggtatgcctttaggaatatctggtactttcaactttatgattgtattccaggcagagcacaacatccttatgcatccatttcacatgttaggtgtagctggtgtattcggcggttccctattcagtgctatgcatggttccttggtaacctctagtttgatcagggaaaccactgaaaatgagtctgctaatgagggttacaaatttggtcaggaagaagagacttataatattgtggctgctcacggttattttggtcgattaatcttccaatatgctagtttcaacaattctcgttctttacacttcttcttggctgcttggcctgtagtagggatctggttcactgctttaggtattagtactatggcattcaacctaaatggtttcaatttcaaccaatctgtagttgatagccaaggtcgcgttattaatacttgggctgatatcatcaactgtgctaatcttggtatggaggtaatgcacgaacgtaatgctcacaacttccctctagacctagctgctcttgaagttccttaccttaatggataaggtttttctcctaaacatataggaatttttgaaggaaggaaagccagaaatacccaatatcttgttccaacaggatattgggtatttctttgtttattctgaatctttctattctgaattcaattaacgacgagatttagtatcctttcttgtactttcataactcgtg

SEQ ID NO: 5523 - DNA, 1061 bp, Zea mays
  Zm_smallRNAprecursor_1012
gtctaagctagcgtttttttatttctttttctcgggtccagaacacgttctctgtataatattttgcgtgtcagaccacctttcaaagaaataatacctgtcactggctcactgtatcgcataatcagtcacatgaaacggttaggccctgttcggttgttagggattggagccccggattgattcctagccggattacttctctaatttatatagattttgacgagctggaacgaatctatgtttattcctgtgaaagcgaacggacccttataaacttagtttccgtctgggtatgcgcccttggattgctgttgcatattcagctcctgttgcagctgctactgctgttttcttgatttaccctattggtcaaggaagtttctctgatggtatgcctttaggaatatctggtactttcaactttatgattgtattccaggcagagcacaacatccttatgcatccatttcacatgttaggtgtagctggtgtattcggcggttccctattcagtgctatgcatggttccttggtaacctctagtttgatcagggaaaccactgaaaatgagtctgctaatgagggttacaaatttggtcaggaagaagagacttataatattgtggctgctcacggttattttggtcgattaatcttccaatatgctagtttcaacaattctcgttctttacacttcttcttggctgcttggcctgtagtagggatctggttcactgctttaggtattagtactatggcattcaacctaaatggtttcaatttcaaccaatctgtagttgatagccaaggtcgcgttattaatacttgggctgatatcatcaactgtgctaatcttggtatggaggtaatgcacgaacgtaatgctcacaacttccctctagacctagctgctcttgaagttccttaccttaatggataaggtttttctcctaaacatataggaatttttgaaggaaggaaagccagaaatacccaatatcttgttccaacaggatattgggtatttctttgtttattctgaatctttctattctgaa

SEQ ID NO: 5524 - DNA, 1062 bp, Zea mays
  Zm_smallRNAprecursor_1013
gtctaagctagcgtttttttatttctttttctcgggtccagaacacgttctctgtataatattttgcgtgtcagaccacctttcaaagaaataatacctgtcactggctcactgtatcgcataatcagtcacatgaaacggttaggccctgttcggttgttagggattggagccccggattgattcctagccggattacttctctaatttatatagattttgacgagctggaacgaatctatgtttattcctgtgaaagcgaacggacccttataaacttagtttccgtctgggtatgcgcccttggattgctgttgcatattcagctcctgttgcagctgctactgctgttttcttgatttaccctattggtcaaggaagtttctctgatggtatgcctttaggaatatctggtactttcaactttatgattgtattccaggcagagcacaacatccttatgcatccatttcacatgttaggtgtagctggtgtattcggcggttccctattcagtgctatgcatggttccttggtaacctctagtttgatcagggaaaccactgaaaatgagtctgctaatgagggttacaaatttggtcaggaagaagagacttataatattgtggctgctcacggttattttggtcgattaatcttccaatatgctagtttcaacaattctcgttctttacacttcttcttggctgcttggcctgtagtagggatctggttcactgctttaggtattagtactatggcattcaacctaaatggtttcaatttcaaccaatctgtagttgatagccaaggtcgcgttattaatacttgggctgatatcatcaactgtgctaatcttggtatggaggtaatgcacgaacgtaatgctcacaacttccctctagacctagctgctcttgaagttccttaccttaatggataaggtttttctcctaaacatataggaatttttgaaggaaggaaagccagaaatacccaatatcttgttccaacaggatattgggtatttctttgtttattctgaatctttctattctgaat

SEQ ID NO: 5525 - DNA, 1063 bp, Zea mays
  Zm_smallRNAprecursor_1014
gtctaagctagcgtttttttatttctttttctcgggtccagaacacgttctctgtataatattttgcgtgtcagaccacctttcaaagaaataatacctgtcactggctcactgtatcgcataatcagtcacatgaaacggttaggccctgttcggttgttagggattggagccccggattgattcctagccggattacttctctaatttatatagattttgacgagctggaacgaatctatgtttattcctgtgaaagcgaacggacccttataaacttagtttccgtctgggtatgcgcccttggattgctgttgcatattcagctcctgttgcagctgctactgctgttttcttgatttaccctattggtcaaggaagtttctctgatggtatgcctttaggaatatctggtactttcaactttatgattgtattccaggcagagcacaacatccttatgcatccatttcacatgttaggtgtagctggtgtattcggcggttccctattcagtgctatgcatggttccttggtaacctctagtttgatcagggaaaccactgaaaatgagtctgctaatgagggttacaaatttggtcaggaagaagagacttataatattgtggctgctcacggttattttggtcgattaatcttccaatatgctagtttcaacaattctcgttctttacacttcttcttggctgcttggcctgtagtagggatctggttcactgctttaggtattagtactatggcattcaacctaaatggtttcaatttcaaccaatctgtagttgatagccaaggtcgcgttattaatacttgggctgatatcatcaactgtgctaatcttggtatggaggtaatgcacgaacgtaatgctcacaacttccctctagacctagctgctcttgaagttccttaccttaatggataaggtttttctcctaaacatataggaatttttgaaggaaggaaagccagaaatacccaatatcttgttccaacaggatattgggtatttctttgtttattctgaatctttctattctgaatt

SEQ ID NO: 5526 - DNA, 1044 bp, Zea mays
  Zm_smallRNAprecursor_1015
tttatttctttttctcgggtccagaacacgttctctgtataatattttgcgtgtcagaccacctttcaaagaaataatacctgtcactggctcactgtatcgcataatcagtcacatgaaacggttaggccctgttcggttgttagggattggagccccggattgattcctagccggattacttctctaatttatatagattttgacgagctggaacgaatctatgtttattcctgtgaaagcgaacggacccttataaacttagtttccgtctgggtatgcgcccttggattgctgttgcatattcagctcctgttgcagctgctactgctgttttcttgatttaccctattggtcaaggaagtttctctgatggtatgcctttaggaatatctggtactttcaactttatgattgtattccaggcagagcacaacatccttatgcatccatttcacatgttaggtgtagctggtgtattcggcggttccctattcagtgctatgcatggttccttggtaacctctagtttgatcagggaaaccactgaaaatgagtctgctaatgagggttacaaatttggtcaggaagaagagacttataatattgtggctgctcacggttattttggtcgattaatcttccaatatgctagtttcaacaattctcgttctttacacttcttcttggctgcttggcctgtagtagggatctggttcactgctttaggtattagtactatggcattcaacctaaatggtttcaatttcaaccaatctgtagttgatagccaaggtcgcgttattaatacttgggctgatatcatcaactgtgctaatcttggtatggaggtaatgcacgaacgtaatgctcacaacttccctctagacctagctgctcttgaagttccttaccttaatggataaggtttttctcctaaacatataggaatttttgaaggaaggaaagccagaaatacccaatatcttgttccaacaggatattgggtatttctttgtttattctgaatctttctattctgaa

SEQ ID NO: 5527 - DNA, 1052 bp, Zea mays
  Zm_smallRNAprecursor_1016
attttgcgtgtcagaccacctttcaaagaaataatacctgtcactggctcactgtatcgcataatcagtcacatgaaacggttaggccctgttcggttgttagggattggagccccggattgattcctagccggattacttctctaatttatatagattttgacgagctggaacgaatctatgtttattcctgtgaaagcgaacggacccttataaacttagtttccgtctgggtatgcgcccttggattgctgttgcatattcagctcctgttgcagctgctactgctgttttcttgatttaccctattggtcaaggaagtttctctgatggtatgcctttaggaatatctggtactttcaactttatgattgtattccaggcagagcacaacatccttatgcatccatttcacatgttaggtgtagctggtgtattcggcggttccctattcagtgctatgcatggttccttggtaacctctagtttgatcagggaaaccactgaaaatgagtctgctaatgagggttacaaatttggtcaggaagaagagacttataatattgtggctgctcacggttattttggtcgattaatcttccaatatgctagtttcaacaattctcgttctttacacttcttcttggctgcttggcctgtagtagggatctggttcactgctttaggtattagtactatggcattcaacctaaatggtttcaatttcaaccaatctgtagttgatagccaaggtcgcgttattaatacttgggctgatatcatcaactgtgctaatcttggtatggaggtaatgcacgaacgtaatgctcacaacttccctctagacctagctgctcttgaagttccttaccttaatggataaggtttttctcctaaacatataggaatttttgaaggaaggaaagccagaaatacccaatatcttgttccaacaggatattgggtatttctttgtttattctgaatctttctattctgaattcaattaacgacgagatttagtatcctttcttgtactttcataactcgtg

SEQ ID NO: 5528 - DNA, 1052 bp, Zea mays; identical to SEQ ID NO: 5527
  Zm_smallRNAprecursor_1017

SEQ ID NO: 5529 - DNA, 1162 bp, Zea mays
  Zm_smallRNAprecursor_1018
ttttgcgtgtcagaccacctttcaaagaaataatacctgtcactggctcactgtatcgcataatcagtcacatgaaacggttaggccctgttcggttgttagggattggagccccggattgattcctagccggattacttctctaatttatatagattttgacgagctggaacgaatctatgtttattcctgtgaaagcgaacggacccttataaacttagtttccgtctgggtatgcgcccttggattgctgttgcatattcagctcctgttgcagctgctactgctgttttcttgatttaccctattggtcaaggaagtttctctgatggtatgcctttaggaatatctggtactttcaactttatgattgtattccaggcagagcacaacatccttatgcatccatttcacatgttaggtgtagctggtgtattcggcggttccctattcagtgctatgcatggttccttggtaacctctagtttgatcagggaaaccactgaaaatgagtctgctaatgagggttacaaatttggtcaggaagaagagacttataatattgtggctgctcacggttattttggtcgattaatcttccaatatgctagtttcaacaattctcgttctttacacttcttcttggctgcttggcctgtagtagggatctggttcactgctttaggtattagtactatggcattcaacctaaatggtttcaatttcaaccaatctgtagttgatagccaaggtcgcgttattaatacttgggctgatatcatcaactgtgctaatcttggtatggaggtaatgcacgaacgtaatgctcacaacttccctctagacctagctgctcttgaagttccttaccttaatggataaggtttttctcctaaacatataggaatttttgaaggaaggaaagccagaaatacccaatatcttgttccaacaggatattgggtatttctttgtttattctgaatctttctattctgaattcaattaacgacgagatttagtatcctttcttgtactttcataactcgtgaaatgccgagtaggcacgaattcccccaatttgcgacctaccataggatttgttatgtaaataggtatatgttcttttccattatgaatcgcgattgtatggccaaccatt

SEQ ID NO: 5530 - DNA, 1161 bp, Zea mays
  Zm_smallRNAprecursor_1019
tttgcgtgtcagaccacctttcaaagaaataatacctgtcactggctcactgtatcgcataatcagtcacatgaaacggttaggccctgttcggttgttagggattggagccccggattgattcctagccggattacttctctaatttatatagattttgacgagctggaacgaatctatgtttattcctgtgaaagcgaacggacccttataaacttagtttccgtctgggtatgcgcccttggattgctgttgcatattcagctcctgttgcagctgctactgctgttttcttgatttaccctattggtcaaggaagtttctctgatggtatgcctttaggaatatctggtactttcaactttatgattgtattccaggcagagcacaacatccttatgcatccatttcacatgttaggtgtagctggtgtattcggcggttccctattcagtgctatgcatggttccttggtaacctctagtttgatcagggaaaccactgaaaatgagtctgctaatgagggttacaaatttggtcaggaagaagagacttataatattgtggctgctcacggttattttggtcgattaatcttccaatatgctagtttcaacaattctcgttctttacacttcttcttggctgcttggcctgtagtagggatctggttcactgctttaggtattagtactatggcattcaacctaaatggtttcaatttcaaccaatctgtagttgatagccaaggtcgcgttattaatacttgggctgatatcatcaactgtgctaatcttggtatggaggtaatgcacgaacgtaatgctcacaacttccctctagacctagctgctcttgaagttccttaccttaatggataaggtttttctcctaaacatataggaatttttgaaggaaggaaagccagaaatacccaatatcttgttccaacaggatattgggtatttctttgtttattctgaatctttctattctgaattcaattaacgacgagatttagtatcctttcttgtactttcataactcgtgaaatgccgagtaggcacgaattcccccaatttgcgacctaccataggatttgttatgtaaataggtatatgttcttttccattatgaatcgcgattgtatggccaaccatt

SEQ ID NO: 5531 - DNA, 1122 bp, Zea mays
  Zm_smallRNAprecursor_1020
cactggctcactgtatcgcataatcagtcacatgaaacggttaggccctgttcggttgttagggattggagccccggattgattcctagccggattacttctctaatttatatagattttgacgagctggaacgaatctatgtttattcctgtgaaagcgaacggacccttataaacttagtttccgtctgggtatgcgcccttggattgctgttgcatattcagctcctgttgcagctgctactgctgttttcttgatttaccctattggtcaaggaagtttctctgatggtatgcctttaggaatatctggtactttcaactttatgattgtattccaggcagagcacaacatccttatgcatccatttcacatgttaggtgtagctggtgtattcggcggttccctattcagtgctatgcatggttccttggtaacctctagtttgatcagggaaaccactgaaaatgagtctgctaatgagggttacaaatttggtcaggaagaagagacttataatattgtggctgctcacggttattttggtcgattaatcttccaatatgctagtttcaacaattctcgttctttacacttcttcttggctgcttggcctgtagtagggatctggttcactgctttaggtattagtactatggcattcaacctaaatggtttcaatttcaaccaatctgtagttgatagccaaggtcgcgttattaatacttgggctgatatcatcaactgtgctaatcttggtatggaggtaatgcacgaacgtaatgctcacaacttccctctagacctagctgctcttgaagttccttaccttaatggataaggtttttctcctaaacatataggaatttttgaaggaaggaaagccagaaatacccaatatcttgttccaacaggatattgggtatttctttgtttattctgaatctttctattctgaattcaattaacgacgagatttagtatcctttcttgtactttcataactcgtgaaatgccgagtaggcacgaattcccccaatttgcgacctaccataggatttgttatgtaaataggtatatgttcttttccattatgaatcgcgattgtatggccaaccatt

SEQ ID NO: 5532 - DNA, 1038 bp, Zea mays
  Zm_smallRNAprecursor_1021
tggctcactgtatcgcataatcagtcacatgaaacggttaggccctgttcggttgttagggattggagccccggattgattcctagccggattacttctctaatttatatagattttgacgagctggaacgaatctatgtttattcctgtgaaagcgaacggacccttataaacttagtttccgtctgggtatgcgcccttggattgctgttgcatattcagctcctgttgcagctgctactgctgttttcttgatttaccctattggtcaaggaagtttctctgatggtatgcctttaggaatatctggtactttcaactttatgattgtattccaggcagagcacaacatccttatgcatccatttcacatgttaggtgtagctggtgtattcggcggttccctattcagtgctatgcatggttccttggtaacctctagtttgatcagggaaaccactgaaaatgagtctgctaatgagggttacaaatttggtcaggaagaagagacttataatattgtggctgctcacggttattttggtcgattaatcttccaatatgctagtttcaacaattctcgttctttacacttcttcttggctgcttggcctgtagtagggatctggttcactgctttaggtattagtactatggcattcaacctaaatggtttcaatttcaaccaatctgtagttgatagccaaggtcgcgttattaatacttgggctgatatcatcaactgtgctaatcttggtatggaggtaatgcacgaacgtaatgctcacaacttccctctagacctagctgctcttgaagttccttaccttaatggataaggtttttctcctaaacatataggaatttttgaaggaaggaaagccagaaatacccaatatcttgttccaacaggatattgggtatttctttgtttattctgaatctttctattctgaattcaattaacgacgagatttagtatcctttcttgtactttcataactcgtgaaatgccgagtaggcacgaattcccccaat

SEQ ID NO: 5533 - DNA, 1038 bp, Zea mays
  Zm_smallRNAprecursor_1022
gtatcccaaaggctcccttttcgatttacttggctattctgactcagattatgccggttgcaaagtagatcgaaaaaacactactgggacttgccaattccttgggcgatccttagtatcatggagttccaagaaacaaaattgtgttgcactttccactgcagaaagctgagtacatagcaactggggcatgttgtgcacagttgttatggatgaagcaaacccttagagattttggttgtgagtttaacaaaattccacttttgtgtgacaatgggagtgccataaaacttgcaaacaacccctgtgcaacactctagaactaaacatattgacatcagacaccatttcttgagagacccacgaagccaaaggagatatcgaattgtttcatgtgagcactgaaaatcaactagccgatatcttcacaaaaccactcgatgagactaggttttgctttcttaggagtgaattaaatatcttggattctcgtaacttaacttgaaaacggtcacaaaaattgtttgattcactatttttgattgatagttttaaagctatgtgatgatctttcaaaaacttggtgaaaatgttaaaattcgaatgcattttagtgttaagatttttttttgggggctcaactggcttgaccagctgaactttctagttcagctggaggaggccagctgaacttcggagctgaacttcagctcagctgcttttaaccagtttttaccaggaccatcctggttaaaaccggttgaaccggcatagtggaccggttgaaccggtctctgaccggtctgtccgcgcaggtctgtccgcgcaggcctgtccgcgcaggtctgtcagctgcaccttttttcagtcgcgcaacatctttttctctattgaccggtcgcttcctcttctgctggcagcctggcgtgcaattttttttatccggtcacatcctgcagggcgcacaacattttttttgaacggtcacttcctctgctgggcgctcaattttttttggttgctgccgctcagcagggt

SEQ ID NO: 5534 - DNA, 1058 bp, Zea mays
  Zm_smallRNAprecursor_1023
acacccttcagcgcctgaggttcaccaaccctactctcactcctcgtcatcctggtgtccaggatcctcggttctggaatcttttccaggctgacttctacaattttgtcattctttccaagaaacactcagtcgttagacataggtttattgactgagagggttgtgagaatatgggagatgctgacatgtcgtcagctctcgtaaacttagagagaaaggggttacgaaacattatgaccatggaatacccctggaacgatgaggtggtagctcagttctatgccaccctctggataaagaaagtagatgaggaagccgatgggtatgattacccagtcatgtatttcttaatccagggtaactggcacaaagtcagttatcgtcgttttgcccatattctgggcttctctgatgcagatattcagggcagcaacatgcgagtgcatgacattcggctgcccatgcgggaagagacggaattcattcatgtctctactgagcgggagttctggacaaccgctaacatgcataggtactacaggtaccttaattctttgtcccggatgaccgttctcccgaagggcggaaatcaaatgaacgtccttggggagagtcgagtcttcctcctcctccttgctccaaacagtctcgcccgcatcaatgtgtttgatatgatctgggaagagatcgtccgtgcttcctggtctcctctcagagggtgtcttcatgcaccctttatcatgaagatgatcgaagtggtcacccagacccacttcgaaaaacccgtcaaacactcccgctacgtaccctactgggttgattcctccaacccagctgctcgtacgaagcgggctccctcacggtctggaggccctgcctcctccactgagccacctcgccagcctcctcatcatccatcctcctctccccccgctgctgccttgcgtccctctcctggccgcggatctcccatgccacgtgctcgtggtcgtggtcgaggtcgtggccgcgggatgggtgctcgcttggtccatgggtttgcgacatttttctcc

SEQ ID NO: 5535 - DNA, 1141 bp, Zea mays
  Zm_smallRNAprecursor_1024
acacccttcagcgcctgaggttcaccaaccctactctcactcctcgtcatcctggtgtccaggatcctcggttctggaatcttttccaggctgacttctacaattttgtcattctttccaagaaacactcagtcgttagacataggtttattgactgagagggttgtgagaatatgggagatgctgacatgtcgtcagctctcgtaaacttagagagaaaggggttacgaaacattatgaccatggaatacccctggaacgatgaggtggtagctcagttctatgccaccctctggataaagaaagtagatgaggaagccgatgggtatgattacccagtcatgtatttcttaatccagggtaactggcacaaagtcagttatcgtcgttttgcccatattctgggcttctctgatgcagatattcagggcagcaacatgcgagtgcatgacattcggctgcccatgcgggaagagacggaattcattcatgtctctactgagcgggagttctggacaaccgctaacatgcataggtactacaggtaccttaattctttgtcccggatgaccgttctcccgaagggcggaaatcaaatgaacgtccttggggagagtcgagtcttcctcctcctccttgctccaaacagtctcgcccgcatcaatgtgtttgatatgatctgggaagagatcgtccgtgcttcctggtctcctctcagagggtgtcttcatgcaccctttatcatgaagatgatcgaagtggtcacccagacccacttcgaaaaacccgtcaaacactcccgctacgtaccctactgggttgattcctccaacccagctgctcgtacgaagcgggctccctcacggtctggaggccctgcctcctccactgagccacctcgccagcctcctcatcatccatcctcctctccccccgctgctgccttgcgtccctctcctggccgcggatctcccatgccacgtgctcgtggtcgtggtcgaggtcgtggccgcgggatgggtgctcgcttggtccatgggtttgcgacatttttctccatgtgccgcaacatttctgctgatgtccatgaggtggcacggcgtcagcgggagactgacgacaattcttcgtcgtcaagctt

SEQ ID NO: 5536 - DNA, 1057 bp, Zea mays
  Zm_smallRNAprecursor_1025
cacccttcagcgcctgaggttcaccaaccctactctcactcctcgtcatcctggtgtccaggatcctcggttctggaatcttttccaggctgacttctacaattttgtcattctttccaagaaacactcagtcgttagacataggtttattgactgagagggttgtgagaatatgggagatgctgacatgtcgtcagctctcgtaaacttagagagaaaggggttacgaaacattatgaccatggaatacccctggaacgatgaggtggtagctcagttctatgccaccctctggataaagaaagtagatgaggaagccgatgggtatgattacccagtcatgtatttcttaatccagggtaactggcacaaagtcagttatcgtcgttttgcccatattctgggcttctctgatgcagatattcagggcagcaacatgcgagtgcatgacattcggctgcccatgcgggaagagacggaattcattcatgtctctactgagcgggagttctggacaaccgctaacatgcataggtactacaggtaccttaattctttgtcccggatgaccgttctcccgaagggcggaaatcaaatgaacgtccttggggagagtcgagtcttcctcctcctccttgctccaaacagtctcgcccgcatcaatgtgtttgatatgatctgggaagagatcgtccgtgcttcctggtctcctctcagagggtgtcttcatgcaccctttatcatgaagatgatcgaagtggtcacccagacccacttcgaaaaacccgtcaaacactcccgctacgtaccctactgggttgattcctccaacccagctgctcgtacgaagcgggctccctcacggtctggaggccctgcctcctccactgagccacctcgccagcctcctcatcatccatcctcctctccccccgctgctgccttgcgtccctctcctggccgcggatctcccatgccacgtgctcgtggtcgtggtcgaggtcgtggccgcgggatgggtgctcgcttggtccatgggtttgcgacatttttctcc

SEQ ID NO: 5537 - DNA, 1058 bp, Zea mays
  Zm_smallRNAprecursor_1026
cacccttcagcgcctgaggttcaccaaccctactctcactcctcgtcatcctggtgtccaggatcctcggttctggaatcttttccaggctgacttctacaattttgtcattctttccaagaaacactcagtcgttagacataggtttattgactgagagggttgtgagaatatgggagatgctgacatgtcgtcagctctcgtaaacttagagagaaaggggttacgaaacattatgaccatggaatacccctggaacgatgaggtggtagctcagttctatgccaccctctggataaagaaagtagatgaggaagccgatgggtatgattacccagtcatgtatttcttaatccagggtaactggcacaaagtcagttatcgtcgttttgcccatattctgggcttctctgatgcagatattcagggcagcaacatgcgagtgcatgacattcggctgcccatgcgggaagagacggaattcattcatgtctctactgagcgggagttctggacaaccgctaacatgcataggtactacaggtaccttaattctttgtcccggatgaccgttctcccgaagggcggaaatcaaatgaacgtccttggggagagtcgagtcttcctcctcctccttgctccaaacagtctcgcccgcatcaatgtgtttgatatgatctgggaagagatcgtccgtgcttcctggtctcctctcagagggtgtcttcatgcaccctttatcatgaagatgatcgaagtggtcacccagacccacttcgaaaaacccgtcaaacactcccgctacgtaccctactgggttgattcctccaacccagctgctcgtacgaagcgggctccctcacggtctggaggccctgcctcctccactgagccacctcgccagcctcctcatcatccatcctcctctccccccgctgctgccttgcgtccctctcctggccgcggatctcccatgccacgtgctcgtggtcgtggtcgaggtcgtggccgcgggatgggtgctcgcttggtccatgggtttgcgacatttttctcca

SEQ ID NO: 5538 - DNA, 1097 bp, Zea mays
  Zm_smallRNAprecursor_1027
tggtcactggccagtggaaggaaaaagaacgtagaaccagcgcccgcccgttacttcctcggcggcggccgcgcgggtggctgcgcttgacagtaggagagacgagttcgctcggctccctgccgtcctgttgcttctcttgccgctttcctcgtggcccgtctccctccttgcggaaattcggagtgcctggcgcacggtgtcctccggtcctcttccagttcgcggtcgtccacaggccacagcatggacgatcttgcatgcggatttttcctccatgtccacgccttttctgtctcgcggcctagcggtagccgggtatagcgtatccacttccactccaaggccacgatcgaggggcactgtgtagccaaggaaagggagtaagggacgcacggtcaggtgagcagatcaagtgaacattggagcaacgactgggcagtgtgttttactgctaggataagtgacgaagcaaggatttttctttagccttaggccttgttcgtttccgtcggattgcacccggaatcgttccagctaatcaaagtttatataaattagagaagcaatccggtcaggaattgttccgacccaccaatccagcagaaacgaacaaggccttattcagttagaggtggattaaaattgattaagccttctcttattcaaatttaacaattttgtatatatacaatatataatagtcgctagtcataacaatttaacacatatatgtgctaagtatataataaatattactccttccgatctaaattataaatcatttgacttttttgtgccatgtttgacccgctcgtactattcagtttttttgcgtaaaattaaaacattcaaagccatatttagagtatattatatatatgctaaacaatatgacaacaaaaattaataataattatgaaaattttgaataagacgagccgatcaaatttagagtaaaaaacaaagggattataaaatgaaacaaaaggagtaacttattataagctaactttttaattttagtcatagatgtacaactataaaacaaaaaaatgttagagttgatttggtgacaaagggatcacggagggatt

SEQ ID NO: 5539 - DNA, 1102 bp, Zea mays
  Zm_smallRNAprecursor_1028
cgacacgcgggcagcaacagtctcgatgagcaggcgtgggccgcaccagccacacgcgggacccaccgtggccaaggcgtcgctccggaccagaccggcgcgcgcgggcaagcctcggcgcgacgacaatgacatgggtgtgggccatggcgtgggaaggggtgtttgtttggggctataatctgtccagagttgttggattatataatctagacatgttataatcccaaacaaatagagttgttggattatataatcggaagcactgcactgcgtgtgacttcgtgctatgttgaatttggatgatttttttatggcccatctgaaagacaatatactagttgttagacgagacatgagacagaaaaataaatctactttatatgattcacgtatgacatatataggatgtaccaaactcgttatttaaagaagcagagaaaatggatcattaaggactcacagttgtacatgccgtaataccgacgtcccttacgggcttgtttgggagcaagtggaatgaagggtattgataggactataatcccttgctatctaaaattgaatagtggaggattatatgccctccaatctacttcattacctttactcccaaacaagccctactagttactacatatcctgggctcctggcggcactagcactgcaaccactgatggtcaggtgcgatgtagatcaataggccacgctaacgacagatcgtgctgttctcagatcacgatcgtctgatcgataattatcgggtgtgctttcgttttcgtttgtaggagggaggaggctggaggcaccaccagctacttttcatttaacggtcgggtccctgtattattaggctattttttcttgaatgtgcaggctgcacatcattatattaagaaaggaaagatctaaagtggaccgaaatacaatacctagagggcagaaaagaaaaaacaaaaaatagaccaagatcaaaccctcaagcatcctctcaagcaccccaacaatgtgaaaccaaagggggaaacctgacgggcctactagaccctatttaaagtgacaataatcttcaaactgtctaaatgcttcgctcccgccata

SEQ ID NO: 5540 - DNA, 1048 bp, Zea mays
  Zm_smallRNAprecursor_1029
acaactgagcacaacaagcaccagcagctatgtattcagcctcggcagtggaaagtgcaacacagttttggtgcttagagctccaagacaccagggaccgcccaaggaattggcaagtcctcgaggtgctttttcgatctactttacaaccggcatagtctaaatcagagtagccaaataaatcgagaaaggagcccttgggataccagagacctagattttgggtgtgaactagatatctcaaaattctcttaacggccactaagtgacactcttttgggtttgcttgaaaacgagcacacatgcacacactaagcatgatatctggcctagatgcacataaatatagtagagatcctatcattgatctataaagcttttgatctacacttttaccttcttcatttaagtcgagatgaccacttgaagccattggtgtcttggcatgctttgccttttccatgccaaactttttgagcatgtcttgtgtgtacttggtttggcacagaaaggttccttccttgagttgtttaacttgaaaacccaggaagtacttgagctcacccatcatggacatctcaaacctatttgtcataaccctactaaattcctcacaaaaagtttcatcagtactgccaaatataatgtcgtcgacatatatttgacaaacaaataattgattgtcaattttgcgagtgaataaagtagagtctacttttcctatttcaaaaccatttttaagcaagaaatctttaaggtaatcagaccaagctctaggggcttgtttaagcccgcagagtgccttgtgaagtaagtaaacatggtttggcttctttggatcttcaaagcccggtggttgctccacatagaccctctcttgtagtggtccatttagaaaagcgctcttgacatccatttgatataacttgaaatcatggttagtagcataggcaattaatattctaattgactctaaccttgctactggcacatatgtttcaccaaaatcaagtccttccacttgagtgtagccttgggcaaccaaccg

SEQ ID NO: 5541 - DNA, 1154 bp, Zea mays
  Zm_smallRNAprecursor_1030
cagagtagccaaataaatcgagaaaggagcccttgggataccagagacctagattttgggtgtgaactagatatctcaaaattctcttaacggccactaagtgacactcttttgggtttgcttgaaaacgagcacacatgcacacactaagcatgatatctggcctagatgcacataaatatagtagagatcctatcattgatctataaagcttttgatctacacttttaccttcttcatttaagtcgagatgaccacttgaagccattggtgtcttggcatgctttgccttttccatgccaaactttttgagcatgtcttgtgtgtacttggtttggcacagaaaggttccttccttgagttgtttaacttgaaaacccaggaagtacttgagctcacccatcatggacatctcaaacctatttgtcataaccctactaaattcctcacaaaaagtttcatcagtactgccaaatataatgtcgtcgacatatatttgacaaacaaataattgattgtcaattttgcgagtgaataaagtagagtctacttttcctatttcaaaaccatttttaagcaagaaatctttaaggtaatcagaccaagctctaggggcttgtttaagcccgcagagtgccttgtgaagtaagtaaacatggtttggcttctttggatcttcaaagcccggtggttgctccacatagaccctctcttgtagtggtccatttagaaaagcgctcttgacatccatttgatataacttgaaatcatggttagtagcataggcaattaatattctaattgactctaaccttgctactggcacatatgtttcaccaaaatcaagtccttccacttgagtgtagccttgggcaaccaaccgtgctttgtttcttgtaaccacgccatgttcatcttgtttgttcctaaaaactcattttgtcccaatcacattttgtttgggtctttggactaaggaccaaacttcattccgggtgaagttgttcaactcctcttgcatggcaattatccaatccggatcacccaatgcttcttcaaccttaagtggctcaagagaggaaacaaacgagtaaaattcacaaaaattagctaaacgagatcgagttgttacccctctcctgatgctacccagg

SEQ ID NO: 5542 - DNA, 1048 bp, Zea mays
  Zm_smallRNAprecursor_1031
caactgagcacaacaagcaccagcagctatgtattcggcctcggcagtggaaagtgcaccacagttttgcttcttagagctccaagacaccagggatcgcccaaggaattggcaagtccccgaggtgctcttttgatctactttacaaccggcatagtctgaatcagagtagccaaataaatcgaaaaaggagcccttaggataccagagacctagattttgggtgtgaactagatatctcaaaattctctgaacgggccactaagtgacactcttttgggttagcttgaaaacgggcacacatgcacacactaagcatgatatctggcctagatgcacacaaatatagtagagatcctatcattgatctataaagcttttgatctacagttttaccttcttcatttaagtcgagatgaccacttgaagccattggtgtcttggcgtgctttgccttttccatgctaaactttttgagcttgtcttgtgtgtacttggtttggcacagaaaggttccttccttgagttgtataacttgaaaacccaggaagtacttgagctcacccatcatggacatctcaaacctatttgtcataaccctactaaattcctcacaaaaagtttcatcagtactgccaaatataatgtcatcgacatatatttgacaaacaaataattgattgtcaactttgcgagtgaataaagtagagtctacttttcctatttcaaaaccattgttaagcaagaaatccttaaggcaatcataccaagctctaggggcttgtttaagcccgtagagtgccttgtgaaataggtaaacatgatttggcttctttggatcttcaaatcccggtggttgctccacatagaccctctcttgtagtggtccatttagaaatgcgctcttgacatccatttgatatagcttgaaatcatggttagtagcataggcaattaatattctaattgactctaaccttgctaccggcgcatatgtttcaccaaaatcaagtccttccacttgagtgtagccttgggcaaccaaccg

SEQ ID NO: 5543 - DNA, 1070 bp, Zea mays
  Zm_smallRNAprecursor_1032
ccacttggtcatatatagttttctttccattattgcttgaggacgccacacttgaggtcagtttactgcaattggttgcagtagtataattaaaacaacacaaggtcggttctgttatcacctccaatttctgattcaattactattatatatggagtatatcgtggtgctttgaaacccaccaattgctgtttatatatatgtatggtgctgttgctccgctcgacatctcaccaacccggccataaacgttttagatactaattacatgggcctttggtgcatttttctcttcccgatttaaaaggtacttaaattacccattaggtagtacacttcctccacttcataaggcatattagaatttaaagaagccttgaagacatactgaccactatctctcttataatatatcacaaaatataaagcccccaactttttgctaaaagggacaccgctaaaagatatgggccaattccctgtatgccactgaaaaatatactcattccttgtatgccactggccccacatgtcatagacacaaaaaaatatacttatatgccactcagtggcacacaagggatgagtataaaatctgatggcataccaggaattttctcaaaagatatgcggagtatgaatatattgatacatccttttgtgcattaacatataaacattttcattaacatgttggccagagtttatatagtgtttaactttttttggattctaattcactgtaaattttgaaatggatcagagtgagtatattttttttctcaactaataagcctccgaatgtcaaatccaccgcaaattatatatggcgagtcagtcactgtctcgtgccaaatcatttttctgcgtatattttgaatcattcaaggcaggacatttgattaagatattacttgatttagtgtcctttccaatgtaagataaagagaagtatattttgatacatagagactccaaaccgaggttactttgtatatccacatggccaactttgtcagacaatataactttattcaagaaataaaaaatgtcgtttctctccctttttt

SEQ ID NO: 5544 - DNA, 1190 bp, Zea mays
  Zm_smallRNAprecursor_1033
agccggatggcctagggtcaccaggaatgggtcccggacccgggtaaggaggcggagggtgggaggaggattgacccggatccccatggtagggaggcggggcaaactcctcgcgatcatcaacatagacttcttcatcttcatcgtctgcagacataaaaggcaccccgtaggcctgctggtgccactcattgatctccgggggaggaggatggagaggcacatcaggcgaacgagggacaaaaggcatgcccatggaggaagcttgacgacgaagattgtcgtcagtctcccgctgacgccgtgccacctcatggacatcagcagcaacgttgcggcacatggagaaaaatgccgcaaacccatggaccaagcgagcacccatcccacggccacgacctcgaccacgaccacgagcacgtggcatgggagagccgcggccaggagagggacgcgaggcagcagcgggggggggggggaagaggaaggatggtggggaggctggcgaggtggctcagaggaggaggcagggcctccagaccgtgagggaacccgcttcgtacgagcagctgggttggaggaatcaacccagtagggtacgtagcgggagtgtttgacgggtttttcgaagtgggtctgggtgaccacttcgatcatcttcatgataaagggtgcatgaagacaccctctgtgaggagaccaggaagcacggacgatctcctcccagatcatgtcaaacacattgatgcgggcgagactgtttggagcaaggaggaggaggaggactcgactctccccaaggacgttcatttgattaccgccctttgggagaacggtcatccgggacaaggaattaaggtacctgtagtacctatgcatgttagcggttgtccagaactcccgctcagtagagacatgaatgaattccgtctcttcccgcatgggcagccgaatgccatgcactcgcatgttgctgccctgaatgtctgtatcagagaagcccagaatatgggcaaaacgacgataactgactttgtgccagttaccctggatgaagaaatacatgactgggtaatcatacccatcagcttcctcatctactttctttatccagagggtggcataaaactgagctaccacctcatcgttccaggggtattccatggtcataatgtttcggaacccctttc

SEQ ID NO: 5545 - DNA, 1068 bp, Zea mays
  Zm_smallRNAprecursor_1034
gaatgaattccgtctcttcccgcatgggcagccgaatgccatgcactcgcatgttgctgccctgaatgtctgtatcagagaagcccagaatatgggcaaaacgacgataactgactttgtgccagttaccctggatgaagaaatacatgactgggtaatcatacccatcagcttcctcatctactttctttatccagagggtggcataaaactgagctaccacctcatcgttccaggggtattccatggtcataatgtttcggaacccctttctctctaagtgaacgagcgctgacgacatgtcagcatctcccatattctcacaaccctcccagtcaataaatctatgtcggacgactgggtgtttcttggaaagaatgacagaattgtagaagtcagcctggaaaagattccagaaccgagggtcctgaacaccaggatgacgaggagtgagagtagggttggtaaacctcagacgctgaagggtttctattcccttctgagtgaagtcgacgggagattcatgcggaccgcggctgacgttcgccggatgcatgtgcagtccggtgacgtagagagcatcaggcgccggaaggtcgacgaagtcgtcgaaagccccatcctcctcttggcagggagcataccctgaggaagacgtgctacgacgaggacgagaggcgccaaccttttggcgtctcccgcgagtcggctgtgagggcatggaagagccctcgccagccatccgaccagagccacgtcctctcttagagagggagcgacgaggcggaggagaggggacgggagattcctcctgaatctcgtcggagtcgctgctgaactcgaccacagaggggttgcgacgacgcaccatgatttgaaaaggtggtgaaactgtgaagcggatgaagtgtgtgaaggagaggctctaaagattgtgaagcgaccaaggcgagagtgaatgaagtgggagaagagaaggagagagtgaagtatatataggcagttgagctggtcctcaggaccagttcaaccgcccccatgggccagctcagctggttctgaccagtg

SEQ ID NO: 5546 - DNA, 1148 bp, Zea mays
  Zm_smallRNAprecursor_1035
atacccatcagcttcctcatctactttctttatccagagggtggcataaaactgagctaccacctcatcgttccaggggtattccatggtcataatgtttcggaacccctttctctctaagtgaacgagcgctgacgacatgtcagcatctcccatattctcacaaccctcccagtcaataaatctatgtcggacgactgggtgtttcttggaaagaatgacagaattgtagaagtcagcctggaaaagattccagaaccgagggtcctgaacaccaggatgacgaggagtgagagtagggttggtaaacctcagacgctgaagggtttctattcccttctgagtgaagtcgacgggagattcatgcggaccgcggctgacgttcgccggatgcatgtgcagtccggtgacgtagagagcatcaggcgccggaaggtcgacgaagtcgtcgaaagccccatcctcctcttggcagggagcataccctgaggaagacgtgctacgacgaggacgagaggcgccaaccttttggcgtctcccgcgagtcggctgtgagggcatggaagagccctcgccagccatccgaccagagccacgtcctctcttagagagggagcgacgaggcggaggagaggggacgggagattcctcctgaatctcgtcggagtcgctgctgaactcgaccacagaggggttgcgacgacgcaccatgatttgaaaaggtggtgaaactgtgaagcggatgaagtgtgtgaaggagaggctctaaagattgtgaagcgaccaaggcgagagtgaatgaagtgggagaagagaaggagagagtgaagtatatataggcagttgagctggtcctcaggaccagttcaaccgcccccatgggccagctcagctggttctgaccagtgtggtcagagaaccagaaacaacagagagaagaaagaaaaaaattcaaatatgcgcacagctgctggaagtgactggacaggaaaaaattttgcatgcgcacacctgctgatgaccaaataaaagattctccacacgcatgcctgcatgccaagccaaaaggacacaaaatctgcgcgctccagggaagtgaccggacacagctgtcagcatgcaaaagaaaaaaactgcgcgcgcgagaa

SEQ ID NO: 5547 - DNA, 1038 bp, Zea mays
  Zm_smallRNAprecursor_1036
atggtatcccaaaggctcccttttcgatttacttggctattctgactcagattatgccggttgcaaagtagatcgaaaaagcactactgggacttgccaattccttgggcgatccttagtatcatggagttccaagaaacaaaattgtgttgcactttccactgcagaagctgagtacatagcagctggggcatgttgtgcacagttgttatggatgaagcaaactctaagagattttggttgtgagtttaacaaaattccacttttgtgggacaatgagagtgccataaaacttgcaaacaaccctgtgcaacactctagaactaaacatattgacatcagacaccatttcttgagagaccacgaagctaaaggagatatcgaattgtttcatgtgagcaccgaaaatcaactagccgatattttcacaaaacccctcgatgagactaggttttgctttcttaggagtgaattaaatatctaggattctcgtaacttaacttgaaaacggtcacaaaaattgtttgatttactatttttgattgatagttttaaagctttgtgatgatctttcaaaaacttggtgaaaatgttaaaattcgaatgaattttagtgctaagattttttttttggctcaactggcttgaccagctgaactttctagttcagctggaggaggccagctgaacttcagctcacctgtttttaaccagtttttaccaggaccatcctggttaaaaccggttgaaccggcatggtggaccggttgaaccggtctctgcccggtctgtccgcgcaggcctgttcacgcaggtctgtcagctgcagcagtgtcagacgcgcgggattttttttaccggtcacatcctgctgagcgcgcagcatatttttctcttttgaccggtcgcttccacttctactggcggcctagcgtgcagttttttttttctctttccctgtccggtcacttccactcgctgggcgcgcgcagaaattttctttggatgcttctgcactgcattgtcagcccgcgcgcg

SEQ ID NO: 5548 - DNA, 1090 bp, Zea mays
  Zm_smallRNAprecursor_1037
tcccacttcatatgaagctgctatgagaagcgcaaattcatccaaatggttatccaccatggaagatgaattagaatccatgagaaagaacaaagtttgggacttagaagtcgttccccaagaagccaaaacagtaggctgtaaatgggtctacaagacaaaacgtgactccagagggaacgtagtaaaatacaaggctagacttgtggccaaagggttcacacagagagaaggcattgactaccatgaaaccttctcacatgtctcaacaaaagattcattcaggatcatcatggcacttgttgctcattttgatctagagctccatcagatggatgtaaagacaacattactaaatggagagttagtagaaaacgtgttcatggcacaaccaaagggttttgttgtgaatggtaaagaacacatgggtgtcatttgaggaggttcatttatagattaaaacaggcctctagacagtggtacatcaagttttatcagactataagaaagtttggtttcgaggaaaacaagacaattgcatttatgcaaaatttaggaaaggaaagtatatcttctttgttctgtatgtcgatgacatactcttagctagtagtgataaggatctactggcggaaacaaaaaggtttctttcatcgaatgttgatatgaaaggcatgtgagaagcctcttatgttcttgtaatagaaatttacagagacagacaaaagggagtattaggactctcacagaagtcaaatatagaaaatgttttaaagagatataatatgcacaagtgtaatgtctcgcctggtccaatagtcaagggtgataagtttgggaaatatcagtgtcccaagaatcagtatgagaaaaacaagatcaagtcagtaccatatgcttcagctatcggaagcattatgtatgctcaagtatgtactcgccctgacttagcttttacaaccgggatgcttggacgctatcagaagaatccgggcatagatcactggaaagcaatcaagaacgctctaaggtaccttcaaggtactaaaggtctcatgcttacatacagaagatctaattccctacaaat

SEQ ID NO: 5549 - DNA, 1129 bp, Zea mays
  Zm_smallRNAprecursor_1038
tctgttctctctttccttccgactttcccactgccgtgacgattttcacagcgaattctccggccggcgccgccccgtccgtccgtccgtccgtccgttcattccgataccgaactcgccagtcgccacagcgatctctctcgctcgctccgccgacgcagcgctcggcttcagctcgagaggaggaaatggccagcagcggctacgaagggatcctcctgggaatggggaaccccctcctcgacatctccgctgtcgtcgacgagggcttcctcgccaagtactcgattcctcctcgatcacgtctcatgatctctcaactacgcctatattttttttctaactttcagtacgtaattttgccagtggtgtgatgcggactccagcatcaccaattcaccctctctgttgtatccaacggcagttgggagagcatcaccaattcacctctctgttgtatccaacggtgctcaaatgggtatgatgctcatgtgcacattttaaatctggtgcattcattttgcattcaatgacaacagctaattttacgaagaaccccttccaccaggagaggaaggtggaagggattcttcacaaaattaaaattggtgctgctgttagatgcgaaatgggtgcactagatttaaaatgtgcacataagcaccgtacctctttgagcaccagatacgtttccacgacagttatggcctcatggagtcatgggcgcgggttctagatttttttaacctctgaaaccctgaatccagtccgtaccatgcaactgaactaaccatcaatactcgaccaagagcgcctttattgaagctaccaaggaaatcaatgtattagaagtactactgtccacttgggctcacttcgtttgcttgcacatcgtattcccttattctttcttcactaacctgtttaaactggtgtccacgaaaaatatgccttcaattatgttgcttcatcagaacgatgtctgttggattgggacaacgctttctcggttgccttgttctgagtagtcaggctgcacagtgcacctgaagttattccgaactaattaacacgtttgtcgctggacctgtgctctaggtatgatgtgaagccgggcaatgccattctt

SEQ ID NO: 5550 - DNA, 1040 bp, Zea mays
  Zm_smallRNAprecursor_1039
aacaattaaggtcaaaaagatatacatttgcaatagaatatttcttttgaatgattgtatgtagatggctccccctaaatgtgtccacgattgtgaatccaacgttttgacataatatgtcatgtgagcaacacatttagagatagtgacaaaaaccatactaaatacaaccatccgaggggtgcaagagtgtcataacaggagttgtgatgcacatgactatctctaaatacacatcatttttacttcatagcaaagtaatcattacaaactgataggacaaaagatgatggccagaagaccatcatattactttgaataacaacccaacagttttatttcatacaatggtaaaaggatacaagccacaacagtggccaaaacaaaaataattcaaaagaaaaccgaaagaaccacaaactagaaagaaccacaaactagaggttggattttctccccctttttggcaacaagtaccaaaaacaaagagagagacaaggatacatgaatcaatatcctccaggaggaggatatgacggaggatatgatggagggtatgaagtgtagtcagggaagagggtcctcatcacgtcctcctcaaatgtggagtcccgaggtggctcatcagccgcagaaaaaacagatgccgaagatgtacgatgatcaggaggaggaggagggtggtgatggtaaccagagccggatggcctagggtcgccaggaatgggacccggacccgggtagggaggcggggggtaagaggatgattgacccggatccccatggtagggaggcggggcaaactgctcccgatcatcaacatagacttcttcttcttcgtcgtgcagacataaatggcaccccgtaggcctgctggtgccactcattgatctccgggggaggaggatggagaggcacgtcaggcgagcgatggacaaatggcatacccatggtgaaagcttgacgaagaagattgtcatcagtctcccgctgacgccgtgccacctcatggacatcagcagaaatgttgcggcacatgg

SEQ ID NO: 5551 - DNA, 1040 bp, Zea mays
  Zm_smallRNAprecursor_1040
ttggtgattgatgccaaaacaattaaggtcaaaaagatatacatttgcaatagaaaatttcttttgaatgattgtatgtagatggctccccctaaatgtgtgcacgattgtgaatccaatgatttgacataatatgtcatgtgagcaacacatttagagatagtgacaaaaaccatactgaatacaaccatccgaggggtgcaagagtgtcataacaggagttgtgatgcacatgactatctctaaatacacatcatttttaattcataacaaagtaatcattacaaactgataggacaaaagatgatggccagaagaccatcatattactttgaataacatcccaacaattttatttcatacaatggtaagaggatacaagccacaacagtggccaaaacaaaaataatccaaaagaaaatcgaaagaaccacaaactagaagttggattttctccccctttttggcaacaagtaccaaaaacgaagagagagacaaggatacatgaatcaatatcctccaggaggaggatatgacggaggatatgatggagggtatgaagtgtagtcagggaagagggtccgcatcacgtcctcctcaaatgtggagtcccaaggtggctcatcagccgcagaaaaaacagatgccgaagatgtacgatgatcaggaggaggtggagggtggtgatggtaaccagagccggatggcctagggtcaccaggaatgggtcccggacccgggtagggaggcggagggtgagaggatgattgacccggatccccatggtagggaggcggggcaaactgctcgcgatcatcaacataggcttcttcttcgtcgtcgtctgcagacataaatggcaccccgtaggcctgctggtgccactcattgatctccgagggaggaggatggagaggcacgtcaggcgagcgagggacaaatggcatacccatggtggaagcttgacgacgaagattgtcgtcagtctcccgctgacgccttgccacctcatggacatcagcagaaatgttgcggcacat

SEQ ID NO: 5552 - DNA, 1038 bp, Zea mays
  Zm_smallRNAprecursor_1041
atggtatcccaaaggctcccttttcgatttacttggctattctgactcagattatgccggttgcaaagtagatcgaaaaagcactactgggacttgccaattccttgggtgatccttagtatcatggagttccaagaaacaaaattgtgttgcactttccactgcagaagctgagtacatagcagctggggcatgttgtgcacagttgttatggatgaagcaaacccttcgagattttggttgtgagtttaacaaaattccacttttgtgtgacaatgagagtgccataaaacttgcaaacaaccctgtgcaacactctagaactaaacatattgacatcagacaccatttcttgagagaccacgaagccaagggagatatcgaattgtttcatgtgagcaccgaaaatcaactagccgatatcttcacaaaacccctcgatgagactaggttttgctttcttaggagtgaattaaatatcttggattctcgtaacttaacttgaaaacggtcacaaaaattgtttgattcactatttttgattgatagttttaaagctatgtgatgatctttcaaaaacttggtgaaaatgttaaaatttgaatgcattttagtgctaagatttttttttggctcaactggcttgaccagctgaactttctagttcagctggaggaggccagctgaacttagcagctgaacttcagctcagctgtttttaaccagtttttaccaggaccatcctggttaaaaagcggttgaaccggcatggtggaccggttgaaccggtctctgcccgttctgaccgcgcaggcctgttcacgcaggtctgtcagctgcagcagtgtctgacgcacagattttttttggtcgctttctgcagggcgcacagcactttttttgaccggtcatttcctctgctgggcgcgcatattttttttcctttttacttgctgccgctcagcagcgtctgtcagcgcccctgtccggtcacttcccccctgcggcgcgcgcagtgtacttttttttgcatgaaga

SEQ ID NO: 5553 - DNA, 1058 bp, Zea mays
  Zm_smallRNAprecursor_1042
acacccttcagcgtctgaggtttaccaaccctactctcactcctcgtcatcctggtgtccaggaccctcggttctggaatcttttccaggctgacttctacaattctgtcattctttccaagaaacacccagtcgtccgacatagatttattgactgtgagggttgtgagaatatgggagatgctgacatgtcgtcagctctcgtaaacttagagagaaaggggttacggaacattatgaccatggaatacccctggaacgatgaggtggtagctcagttctatgccaccctctggataaagaaagtagatgaggaagccgatgagtatgattacccagtcatgtatttcttcatccagggtaactggcacaaagtcagttatcgtcgttttgcccatattctgggcttctctgatgcagacattcagggcagcaacatgcgagtgcatggcattcggctgcccatgcgggaagagacggaattcattcatgtctctactgagcgggagttctggacaaccgctaacatgcataggtactacaggtaccttaactctttgtcccggatgaccgttctcccaaagggcggtaatcaaatgaacgtccttggggagagtcgagtcttcctcctcctccttgctccaaacagtctcgtccgcatcaatgtgtttgacatgatctgggaagagatcgtccgtgcttcctggtctcctcacaaagggtgtcttcatgcaccctttatcatgaagatgatcgaagtggtcacccagacccacttcgaaaaacccgtcaaacactcccgctacgtaccctactgggttgattcctccaacccagctgctcgtacgaagcgggctccctcacggtctggaggccctgcctcctcctctgagccacctcgccagcctccccaccatacttcctcctctcccccccgctgctgcctcgcgtccctctcctggccgcggatctcccatgccacgtgctcgtggtcgtggtcgaggtcgtggccgcgggatgggtgctcgcttggtccatgggtttgcggcatttttctc

SEQ ID NO: 5554 - DNA, 1057 bp, Zea mays
  Zm_smallRNAprecursor_1043
cacccttcagcgtctgaggtttaccaaccctactctcactcctcgtcatcctggtgtccaggaccctcggttctggaatcttttccaggctgacttctacaattctgtcattctttccaagaaacacccagtcgtccgacatagatttattgactgtgagggttgtgagaatatgggagatgctgacatgtcgtcagctctcgtaaacttagagagaaaggggttacggaacattatgaccatggaatacccctggaacgatgaggtggtagctcagttctatgccaccctctggataaagaaagtagatgaggaagccgatgagtatgattacccagtcatgtatttcttcatccagggtaactggcacaaagtcagttatcgtcgttttgcccatattctgggcttctctgatgcagacattcagggcagcaacatgcgagtgcatggcattcggctgcccatgcgggaagagacggaattcattcatgtctctactgagcgggagttctggacaaccgctaacatgcataggtactacaggtaccttaactctttgtcccggatgaccgttctcccaaagggcggtaatcaaatgaacgtccttggggagagtcgagtcttcctcctcctccttgctccaaacagtctcgtccgcatcaatgtgtttgacatgatctgggaagagatcgtccgtgcttcctggtctcctcacaaagggtgtcttcatgcaccctttatcatgaagatgatcgaagtggtcacccagacccacttcgaaaaacccgtcaaacactcccgctacgtaccctactgggttgattcctccaacccagctgctcgtacgaagcgggctccctcacggtctggaggccctgcctcctcctctgagccacctcgccagcctccccaccatacttcctcctctcccccccgctgctgcctcgcgtccctctcctggccgcggatctcccatgccacgtgctcgtggtcgtggtcgaggtcgtggccgcgggatgggtgctcgcttggtccatgggtttgcggcatttttctc

SEQ ID NO: 5555 - DNA, 1058 bp, Zea mays
  Zm_smallRNAprecursor_1044
cacccttcagcgtctgaggtttaccaaccctactctcactcctcgtcatcctggtgtccaggaccctcggttctggaatcttttccaggctgacttctacaattctgtcattctttccaagaaacacccagtcgtccgacatagatttattgactgtgagggttgtgagaatatgggagatgctgacatgtcgtcagctctcgtaaacttagagagaaaggggttacggaacattatgaccatggaatacccctggaacgatgaggtggtagctcagttctatgccaccctctggataaagaaagtagatgaggaagccgatgagtatgattacccagtcatgtatttcttcatccagggtaactggcacaaagtcagttatcgtcgttttgcccatattctgggcttctctgatgcagacattcagggcagcaacatgcgagtgcatggcattcggctgcccatgcgggaagagacggaattcattcatgtctctactgagcgggagttctggacaaccgctaacatgcataggtactacaggtaccttaactctttgtcccggatgaccgttctcccaaagggcggtaatcaaatgaacgtccttggggagagtcgagtcttcctcctcctccttgctccaaacagtctcgtccgcatcaatgtgtttgacatgatctgggaagagatcgtccgtgcttcctggtctcctcacaaagggtgtcttcatgcaccctttatcatgaagatgatcgaagtggtcacccagacccacttcgaaaaacccgtcaaacactcccgctacgtaccctactgggttgattcctccaacccagctgctcgtacgaagcgggctccctcacggtctggaggccctgcctcctcctctgagccacctcgccagcctccccaccatacttcctcctctcccccccgctgctgcctcgcgtccctctcctggccgcggatctcccatgccacgtgctcgtggtcgtggtcgaggtcgtggccgcgggatgggtgctcgcttggtccatgggtttgcggcatttttctcc

SEQ ID NO: 5556 - DNA, 1143 bp, Zea mays
  Zm_smallRNAprecursor_1045
tgtacacataatattttttacatctaacattgtgtataagtgataatgttctgcattaataacaaaaagtgtatgtcctaattataatttaagcgggaatggagatcccgacagggatttatctccacggagaataggaaagggaagaatcggccccacaaacattcgtgaggatgcttgtcggaaaaaaaatcattacggaaacaaggatggagaattatttccggaaaattccctttgtcattcctatcctcacctagccacctatactaggccggttctctcacccctacacagtgtaatatctctctccacgtagcagaattcactcgaagctatagaccacacttccaactttttgcattttggccctttttgaggtttttttgcacaactatgactcttgtagtttcatttcaaaaaatagatcccaatctcgacaccatcatcattggcgccgaggtaacgcacagtggcgccgatataattggcgccaacttttcctacgtggcagccgatgtggcaagtcccaggggttgacgtcatagatcttggcgccgacccccctgaatagcgccggaccccgccgtcaaggggggtcgacgccaagatctatgacgccgaacccctgtgacttgccacatcggctgccacgtaggaaaaaagttggcgtcgctgtgcgttatctcggcaccaatgatgatgacgccgaggttggactccatttttttaaatgaaactgaaaagagcatagttgtgcaaaaaaaacccaaaaaggctaaaatccaaaaaagttgggaccacactctccgactctcggatgccagggcgaggccgcatacccggaaagaagatttttaagtatttttaaaaatattaataattatatcactaaacgttttaaaattatttatagatttaggaaatcgaaaataacacatctcgacgccatattgagtatcaaacctagaaaatgtcctagatgatgtagggcacattgctacataggcaccgagctccggcgtataacatctcaattctcaacgccgcataacacagagtatcaaatctggatttgtgtcctagatgatgtgacgcacatgctactacttagcagtcgtcgagttctagcgtataacaggt

SEQ ID NO: 5557 - DNA, 1114 bp, Zea mays
  Zm_smallRNAprecursor_1046
ttcaaactgcattaagaggtcatggtttactattccatttaactgaagattcaccagttttagcagctgatagaagcaacgcagctgcaatcaagacttggcaaatcaatgatggcaaagtaatggctgcaatggtcaatagtactaaaccaactatgattatgagtctgtccaaattcaccactgctagggctatctggtctcatctgaaggatcagtttgttcaggacagtggggctcttttacatactcttatgcagcaaactcatgtcattgagcaacatgatatgtccattgatgattactattcagcttttgatcgtcttatgagtgctttgacctccatggtgcctgcttgtacagctgtgccttgtccagcccataagttcattgagaagttctttacctacagatttgttatgggcgttcgacctgaatttgattctcttcgtgcaaggttactacacacttctgatactctcaccatggctcaggcgttatctgaattacttgctgaagagactcgccttaagtccatgtcttctattactggtgtgagttcgcacagtgtattggctactgctcagaagtccaggagcacctcctttcagccttgtgagcattgtaagaagaccactcatcggtttgagaactgctttactaagtatccagagaagctggctgattttcgtgtccgtcgtgctactcgtggtcgtggtacaagaccatctcctagaggctcagttgctgttgctgctacttcatctgctggtgctttgtcatctacttgggttcttgactctggagcttcatttcatgtgacatctgatcagtcacgcctggcttctactgcacctgtcaccgagggtacttctgttcagactgctgatggtacattatgtcatgtcacccacaagggttctctttccaattcaaactttactgtcccaaatattttctttgtacctgaattatccatggatcttttatcagttggtcaaattaccgatcacaattgctttgttggatttgatgactcatcttgttttgtacaggatcgactcacaggggatgtgattgggactggccgtcgccgtaaatcttcgcctcgcct

SEQ ID NO: 5558 - DNA, 1063 bp, Zea mays
  Zm_smallRNAprecursor_1047
gaagtagataaatgttttgaacttacgctcctccacgcagcctggtgccgacgtgaacagtggcatcccgttccaccccaatagaagggtggcagcaggctcaagtctcgtgttgccatacacaagatactggtctcctagcactgtgtttgtcctctgtgcatacaattgcatcagattctgcaaaggctcatccagtcatccagatcagcttccacagctagctctccagaggcatgtctcacaaagataagtatcgtcatcgtcgacctatcagcatcgacagaatcccgattgtccttagtttgaagaaacacccctccggctctgttgctggaaggagcatgcatcttgagataaattgctctgctggtgaatcctatagtagtggcggtaaatcatacagtcttggatataaagttgtaggcttacacgttgaaagctagccagagcgacacattgtgtgcgaagcaacaaaacacgtacggagagggagggggaggaaagagggaggtcgcgacaaaggacgaggtcaaggactgtagcaaaaccaagcggtcagcgcgctctgttgtttgccctccctctccctagtccctccccatactcttccccagtcctctccctctcctaggcgccccttcgttcttaggctcagcggcaatctatccgcaacatgggagaagcgagtgggaaagcccagacaccgccatgacccccataggccgcgctcgtgggagcgcggcgtcgattgttagcgccgcccacggcgaggtcatcgtggtggcgctgaggcgtcgtcattcccttcctgcgcagcgcctcagcctggctttcgtctagcaagccatcgccctgccgcccagggtgatgcatgtatgtacaaaacagtttcatgttgttttcttaattaagcaaaaaaattatgctttatttttgcgcttttcattatctagaaaggaacaaccatggatcatctttaaagacttaacctatggttgttcctttctagataatgatgatccatacatgcatcaccctgggcggcagggcgatggcttgt

SEQ ID NO: 5559 - DNA, 1059 bp, Zea mays
  Zm_smallRNAprecursor_1048
tgggagtcgtccgagtcatcggacgacgccgggggagagacgggagccggagacccctcggactcggaggagaactcctcctccgagtattccgagtcaccgaaatcctccgatggaggagtcggctcacgcttgcgcttgttgttcttgcccatggcggaagcagacagaggggaggaaaagaaggcagtaaggagcagcgaagagatgtgaagaaaccagagaagcaaaggggttatttatagaagggaaaggcaaccgctcacttctaaccgcggtcactgaacagtcgcaaggcattcaataagcactcccacccatctgcagacacgtcagacggcggacgccgtttcatgcaacactacacccattgggactccagtcaacagcgcaaaggatatgattacactagccgtcccatcgcattactactcagaggcaaccggctaaaacactcagcgtaccaacacaacagcaatccaggatattcccgtcggccgggtaccgacgggatttactctaaaaccgacgggatttagctattcccgtcggttttagagtaaatcccgtcggtacccggccgacaggagctacccgacggggattacattacctcccgtcggggccgacgggagataattatctcccgtcggccctaggtagccgacagcggttgtcgctccccggcccagggctgacgtggcgggcaattaactcccgtcggccttaggtagccgacgggagttatgtgtccgccacgtcagccctgattgccgggacgggggagcgacaactgccgtcggcttggctaagccgacggaagttatcctggacagtaccaggataactcccgtcggctttgcaaagccgacgggagttaaactgtcacccccccccccaaaaaccccatatttatgatcaatggcacagaaaatatacacaatatcatcatgcacattcacacatcaatcacatccatccacacacatcaatcacatccatccacaaacatatatataagaacattcatacacataagaagtgttcatccacataaga

SEQ ID NO: 5560 - DNA, 1160 bp, Zea mays
  Zm_smallRNAprecursor_1049
cgccccgtgatagatgttaatctctctcttttcactctaacaaagttttaacactaattttcaagtgctttgactgatatgctcgcatattcaacttgtttaagtgttgtagtgtttctttttgaacctttgcatgttgtcgttggattgtgaacttactattacggtgtgtagatgtttggttactacttagaaaatgcttaaattagatgcatttgattatattattttgatgggatgtgttaggttgtgtctttttctcgtgttctcacatgggcacaaggctgagtttgtataatgatagacaaatatgtcaaagcacgtaatttagtattaaaacttagctcaattggagaaatagagaagttagcaacaaccatggtactgtttaaagagggagtgatttaggagcggtttatcttggacccctattcttagctatggtgttgcttaaatccacctctttagaccatctccaacagcttatctatacgcatacccatattcaaactacactctataaacagtgcaatctacaatgtaaaacaatgtaaaacggtgtttttagtgaccatataggtgcaatgtacaatagttcacccataaggtcaccaaaaacacattttgcactattctgcactgtagattgtattatttgtagagtgtagtttgaatatgggtatgagtaagctattggagatggtcttaagagttatataaattgaattctcccaaattgtgcgatttataaataataataataataataataataataatgcatatgtaagttgtcgcgaatgtgaaataaattcaatgtaagttcccaaaaataataaataaatgagttctaaaaaagcacagatcatattggttgctgttcttcaactatttttaatatcttattgctaaaagatagaagacaattttctatgaaaagctctacattatttccaaatcaattcagccgtttttatattctgttagtctcttgtgcatttctattggcaaccatgtcatttctccttatgtttctctatagcattacaattggccgattcgatgcgtgcgtatcttgtgctgtgattggatcgattttcccaagtgtgcaaaataaaattgagaatatagttacataagaagctattggagattgtttt

SEQ ID NO: 5561 - DNA, 1040 bp, Zea mays
  Zm_smallRNAprecursor_1050
aaacaattaaggtcaaaaagatatacatttgcaatagaaatttcttttgaatgattgtatgtagatggctccccctaaatgtgtgcacgattgtgaatccaacgttttgacataatatgtcatgtgagcaacacatttagagatagtgacaaaaaccatactaaatacaatcatctgaggggtgcaagagtatcataataggagttgtgatgcacatgactatctctaaatacacatcatttttacttcatagcagagtagtcattacaaactgataggacaaaagatgatggccagaagaccatcatattactttgaataacaacccaacagttttatttcatacaatggtaaaaggatacaagccacaacagtggccaaaacaaaaataatccaaaagaaaaccgaaaaaaccacaaactagaaagaaccacaaactagaggttggattttctccccctttttggcaacaagtaccaaaaatggagagagagataaggatacatgaatcaatatcctccaggaggaggatatgacagaggatatgatggagggtatgaagtgtagtcagggaagagggtcctcatcacgtcctcctcaaatgtggagtcccgaggtggctcatcagccgcagaaaaaacagatgccgaagatgtacgatgatcaggaggaggtggagggtggtgatggtaaccagagcaggatggcctagggtcaccaggaatgggtcccggacccgggtagggaggcggagggtgagaggatgattgacccggatccccatggtagggaggcagggcaaactcctcgccatcatcaacataggctttttcttcttcatcgtctgcagacataaatggcaccccgtaggcctgctggtgccactcattgatctccgggggaggaggatggagaggcacgtcaggcgagcgagggacaaaaggcatgcccatggtggaagcttgacgatgaagattgtcgtcagtctcccgctgacgccgtgccacctcatggacatcagcagaaatgttgcggcacat

SEQ ID NO: 5562 - DNA, 1051 bp, Zea mays
  Zm_smallRNAprecursor_1051
tttggcttcctccggagttattgcttcgtcaccaaacaatagtttgaatggagtaaaacctgttgaccttgatattgttgtgttgtggctccataccactttgattaattgatctggccactttcccctaggttgattgaagattaacttcattattcctgtcattataatgccattggctctttcaacgagtccatttgactccggatgcctgactgatgcaaaatggatcttcgtaccaatttgatcacagaaatctctgaaagcttcggaatcgaactgtgttccattatctacagtgatggcctttggtaccccgaaacgacaaacaatattctgccagaaaaacttttggacggtggccgaagttattgtggctaaaggctttgcctcaatccatttagaaaaatattccacagccactacaacatatcttaagttccccttgggccggtggtaatggacctaacaagtcaaaggccccacatttgcaatggccagatatgttgtatgagctgtgttaaggacgaaggttgtttttgatctcttgcacatttctgacaatcttcgcacttttgaactaattccgctgcatccgaagctgccttcggccaataaaacccttggcggaaaacttttccaagtaacggcctagatccaatgtgagatccacacaggcctgaatgtatttctttcatcaactctatgccttcggttctagataaacacttgagtagcggagcacaaactccatgcttgtacaactccccttctatcatgacatatggacgagctcttgcctatatcctcctgttataagtttcgtcatctgaaaggaatttaccctgaaggtaagagatgatctcagttctccaatcttcgctataaacaggagatatattgaggactgctctttcaagaagttccactgaaggtgcctttattgtttcgaagaacacatccgaaggtaagggcagcccctgtgctgctgacttagctagcaaatcagcatgctcattttgtcctcgagggatatttttgacagaaaatc

SEQ ID NO: 5563 - DNA, 1071 bp, Zea mays
  Zm_smallRNAprecursor_1052
gaaggttccccaagacccatcacagaacactgtccatacttcggcatctttatttgtttcttcatcctgagcccctggcgtccaatcggcgataaaatctgccaacacttgggactggatcgaagatctatgcacataatcaatgcaaaattcattgagctctgcagcccattttccaatccgcccagtagcttctctatttctcataatatccttcaacggctgcgaagaaggaacaataacattgtatgcttgaaagtaatgccgaagcttcctggatgccatcaaaacagcatataacaccttctctaattctgtataatttttctttgatatactaagaacttcagatacaaaatacactgggacctgcttcttgacttggccgtcaagcttctcctggacaagtgctgcacttaccgctgagtgcgaagctgccacatataataacaacggagcccctggcgttggtggagttaatgttgttaaatctatcaaatattgcttcaggtcctcgaaggctttttgttggcttggtccccattgaaagacttcgactgatttcagtacttcgaagaatggtagatttctttctgctgatctggatataaatctattaagagatgccagcctccctgttaatctttgggccccttttttgtagttggtggctccattcgaaatatagcttcaattttacttggattagcttcaattccctttgttgaaaccaagcatccaagaaatttccccttcttgactccgaagacacatttttctggattcaactttaggccagcttgcctaaaactggcgaaggtctcttgcaaatcagcaatgtgattttcctgcttcgtgctttttacaatgatatcatcaacataagttagcacatttctgcctatctgagattggagaaccttcgcagtcattctgctgaaacttcctccagcgttcttgagcccttcaggcatccgaagataacaatatgttccactaggggttatgaaactggtctttggctcatcctccttcttcatccaaatttgatgatagcctaaataacaatcg

SEQ ID NO: 5564 - DNA, 1037 bp, Zea mays
  Zm_smallRNAprecursor_1053
ttccctgtgcaggattaaatattctagcttctgctggacaaccccatatatggaagtagttgagcgtgagttttctgccagtccacaactcatatggagttctagccactgatttactaggaactctgttgagtatatgcatggcggtttttaaagcctccatccatagacacaatggtaggttagagtaacttagcatactccttaccatatccattaacgttctgttacgcctttcggcaaccccattctgttctggatcgccaggtgttgaatactgagcaacaataccattttctcttaggaacctcgcaaaaggtcctgggacctggccatactcggtatggcgcccatagtactccccccacgatctgatcggacaatctttatcttcaaatcgtgttgattttctacttcagccttgaactgtttaaacttgtctaagacttctgatctttccttaattggataaatataaccgtagcgagagtagtcatctatgaaggttatgaacgagttaaacccatctactgtcctaactggaaaaggaccacagatatctgtatgaataatttctaacactctcgtactatgcttagcatctttcttaatctgcttcgcgaatttacccttaatgcaatctctgcattgctctaagtctgtgaagtctaggggatggagaatctgttccttaacaagactttctattctccccctcgaaatatggcccaaacgatagtgccataatttcgacgaggtttctccatcacttcgttttcttttcctgccactgttggctggatcattttctggtatatctaatacattaacaacatcactttgcgaaagtaaataaagcatatctcgtcggatggcgagaccaacatatttattatcaaactgaatgacacactgtctatcaccaaaatggcaatgaatgtgctgatcatctaatctagaaaccgaaataaggttccttcgcaaggaaggtacataaagtacgtctctcaacaacagtacaaaaccattagctaatt

SEQ ID NO: 5565 - DNA, 1162 bp, Zea mays
  Zm_smallRNAprecursor_1054
acggaattaaaatcgtacgtagtaatttagtctagtttaaaacagtgataacttttgcattttaaacccgattcaatccattcaagtggcgttagattcgtattaaaattgtctacatgatagaagtattttcacctgctggtgcatattttatttaatttatttaaatatttgtttgaccgatggttaatagaacgacgttttattttaaatctaatttatgatttctaatggcgcatttataaattaacaatagtttggttaatcttaactgaattattctttattaaataattgtttagtttaaatgtgctatctatttattagttctcacgtgttgtgtcgtacgcgtgttgtaccaacttttttggattttagccctttttggtttttttttgcacaactatgccctttgcagtttcatttcaaaaaatggaccccaacctcggcgccatcatcattggcgccgaggtaacgcacagcgacgccagtactattggcgccaacttttcctacgtggcagccgatgtggcatgtcccagggggtcggcgccatagatcttggcgccgaccccccatgacggcgaggtccgacactatccaggggggtcggcgccaagatctatgacgccgaccccctgggacttgccacatcggcagccacgtaggaaaagttggcgccaattatgttgacgccaatgatgatggcggcgaggttggggtccattttttgaaatgaaactgcaaagggcataattgtgcaaaaaaaaaccccaaaagggctaaaatgcaaaaaagttggcgtgctgtacgcatattgtgcgcgtgctgccgtactatttcgtgcgttgtgtttttcgtctcgcaccatcattttgtctcgcttgtagtcgataatgttatttaaattacttatttaactaagagttgttagcgtagtagattaattaaaactagacgatagctctaggttgcatttaataaatgtcgaataatgcgagtatgtcgaattaagtattctaattaatacttgtttagtgtaaacgtgataacttctcgacgtagctccgactgtcgcgtttcttttcctcgcgtgactgtagaagcgacctctattttataccacacgttcttatagcgtttccctttgtatgtttgtttg

SEQ ID NO: 5566 - DNA, 1091 bp, Zea mays
  Zm_smallRNAprecursor_1055
cataaataaaataacaaaataattggaacatggatataatgaaatattagcccaaaaccatataaagcaatagcaaaactacccaaggggtaaacaaggtaaaaaggataaacagactagggtgacctattggttcccatcaaaattaaacctatgcatgaataaatgacattaaagaacattattgggtaaaataaaagtggtcaaggcaccacttgcctggcacttgagattccaggtaccagggtgattcttcagatcctcgaaacctcgcgctagtcgcagcaatacaaacaaatatggtatagacaaaattaacatcccaccaaacataagaacaaactgcataataataatctacgcgttactacgagatcgtggaatcgagaactactaagatcggagttacaattaaagagttatgatcttatagaagatctacatgatttaaatattaaactatagggttttttaaattggcgcccttagttttggtgttgtgctcacctatacccttagtcgtgttttttgctcagctgtgcccttccagtactatagaacagaagggcacaactgaacaaaaaatacgactaagggtataggtgagcacaccaccaaaactaagggtaccaatttaaaaaacccaaactatattataaattggttagtatagattgtatgagagattattctatatataattatctcaactttaatctaagtcattattttgattaaagattatcccgttaaattataaccataaaattagaatactatattaatattaaagaagttaatccaatagacatagattaacccaattataaaagtatgggatatcacataataaatgttgctattgggtagtagatatttatacgaagctaacacaactggaacaagtcaaatcagatttaaaacggaggagttacgaatttcctaaggttttatgtatttgatacgagattaattaagaaataaactttaattccattttcatgttaaacagagacacagggtgataaacaacattattacaaagttataggaactggaatgaactaatttgaacttaatatgaattttct

SEQ ID NO: 5567 - DNA, 1097 bp, Zea mays
  Zm_smallRNAprecursor_1056
atccttatgaaatatgatataaaattgaaggtagaagaaagggatataatgaaattcttgatttgattttcaaccaaaccaccttttttatgaaaatggagagtggtcttattcaaattcaaaacgcttcgtaatctttaaccagttctgtgcttcaatataatttcctggagtaagcgctatagcttgtttccaatactcagcagcttgatcaaaccaatcttccgcaatttccgaatcaccctgtagaatggcatgttctcctcggttggaataggcagttcctttccctagaaccgtacttgagagtttcctacctcatacggctcagaaattgctatcttaatttcccctatcttaactgaattcgatttctcaaaaatcaatccaatttcttcttgggttaagtagaagaagttaattacctaaaacctgtgggcttagaaactgcaattttagagagacgcgaaagtacaagcctgtggggtcgcttctgcaactggataactagcaccgaaaaccgtctttacattggatggttcggtgttttgatgatccctaccttattgaccgcaacttccgtatttattatcgccttcatcgctgctcctccagtagatattgatggtattcgtgagcctgtttctggttctttacttcatggaaacaatattatctctgatgctattattcctacttctgtggcgatcggattgcatttttacccaatttgggaagctgcatctgttgatgaatggttatacaatggcggtccttatgagctaattgttctacacttcttcctgttgcagctgctactgctgttttcttgatttaccctattggtcaaggaagtttctctgatggtatgcctttaggaatatctggcactttcaactttatgattgtattccaggcagagcacaacatccttatgcatccatttcacatgttaggtgtagctggtgtattcggcggttccctattcagtgctatgcatggttccttggtaacctctagtttgatcagggaaaccactgaaaattagtctgctaatgagggttacaaatttggtcaggaagaagagacttataata

SEQ ID NO: 5568 - DNA, 1199 bp, Zea mays
  Zm_smallRNAprecursor_1057
tatgaaatatgatataaaattgaaggtagaagaaagggatataatgaaattcttgatttgattttcaaccaaaccaccttttttatgaaaatggagagtggtcttattcaaattcaaaacgcttcgtaatctttaaccagttctgtgcttcaatataatttcctggagtaagcgctatagcttgtttccaatactcagcagcttgatcaaaccaatcttccgcaatttccgaatcaccctgtagaatggcatgttctcctcggttggaataggcagttcctttccctagaaccgtacttgagagtttcctacctcatacggctcagaaattgctatcttaatttcccctatcttaactgaattcgatttctcaaaaatcaatccaatttcttcttgggttaagtagaagaagttaattacctaaaacctgtgggcttagaaactgcaattttagagagacgcgaaagtacaagcctgtggggtcgcttctgcaactggataactagcaccgaaaaccgtctttacattggatggttcggtgttttgatgatccctaccttattgaccgcaacttccgtatttattatcgccttcatcgctgctcctccagtagatattgatggtattcgtgagcctgtttctggttctttacttcatggaaacaatattatctctgatgctattattcctacttctgtggcgatcggattgcatttttacccaatttgggaagctgcatctgttgatgaatggttatacaatggcggtccttatgagctaattgttctacacttcttcctgttgcagctgctactgctgttttcttgatttaccctattggtcaaggaagtttctctgatggtatgcctttaggaatatctggcactttcaactttatgattgtattccaggcagagcacaacatccttatgcatccatttcacatgttaggtgtagctggtgtattcggcggttccctattcagtgctatgcatggttccttggtaacctctagtttgatcagggaaaccactgaaaattagtctgctaatgagggttacaaatttggtcaggaagaagagacttataatattgtggctgctcacggttattttggtcgattaatcttccaatatgctagtttcaacaattctcattctttacacttcttcttggttgcttggcctgtagtagggatc

SEQ ID NO: 5569 - DNA, 1198 bp, Zea mays
  Zm_smallRNAprecursor_1058
atgaaatatgatataaaattgaaggtagaagaaagggatataatgaaattcttgatttgattttcaaccaaaccaccttttttatgaaaatggagagtggtcttattcaaattcaaaacgcttcgtaatctttaaccagttctgtgcttcaatataatttcctggagtaagcgctatagcttgtttccaatactcagcagcttgatcaaaccaatcttccgcaatttccgaatcaccctgtagaatggcatgttctcctcggttggaataggcagttcctttccctagaaccgtacttgagagtttcctacctcatacggctcagaaattgctatcttaatttcccctatcttaactgaattcgatttctcaaaaatcaatccaatttcttcttgggttaagtagaagaagttaattacctaaaacctgtgggcttagaaactgcaattttagagagacgcgaaagtacaagcctgtggggtcgcttctgcaactggataactagcaccgaaaaccgtctttacattggatggttcggtgttttgatgatccctaccttattgaccgcaacttccgtatttattatcgccttcatcgctgctcctccagtagatattgatggtattcgtgagcctgtttctggttctttacttcatggaaacaatattatctctgatgctattattcctacttctgtggcgatcggattgcatttttacccaatttgggaagctgcatctgttgatgaatggttatacaatggcggtccttatgagctaattgttctacacttcttcctgttgcagctgctactgctgttttcttgatttaccctattggtcaaggaagtttctctgatggtatgcctttaggaatatctggcactttcaactttatgattgtattccaggcagagcacaacatccttatgcatccatttcacatgttaggtgtagctggtgtattcggcggttccctattcagtgctatgcatggttccttggtaacctctagtttgatcagggaaaccactgaaaattagtctgctaatgagggttacaaatttggtcaggaagaagagacttataatattgtggctgctcacggttattttggtcgattaatcttccaatatgctagtttcaacaattctcattctttacacttcttcttggttgcttggcctgtagtagggatc

SEQ ID NO: 5570 - DNA, 1166 bp, Zea mays
  Zm_smallRNAprecursor_1059
attttcaaccaaaccaccttttttatgaaaatggagagtggtcttattcaaattcaaaacgcttcgtaatctttaaccagttctgtgcttcaatataatttcctggagtaagcgctatagcttgtttccaatactcagcagcttgatcaaaccaatcttccgcaatttccgaatcaccctgtagaatggcatgttctcctcggttggaataggcagttcctttccctagaaccgtacttgagagtttcctacctcatacggctcagaaattgctatcttaatttcccctatcttaactgaattcgatttctcaaaaatcaatccaatttcttcttgggttaagtagaagaagttaattacctaaaacctgtgggcttagaaactgcaattttagagagacgcgaaagtacaagcctgtggggtcgcttctgcaactggataactagcaccgaaaaccgtctttacattggatggttcggtgttttgatgatccctaccttattgaccgcaacttccgtatttattatcgccttcatcgctgctcctccagtagatattgatggtattcgtgagcctgtttctggttctttacttcatggaaacaatattatctctgatgctattattcctacttctgtggcgatcggattgcatttttacccaatttgggaagctgcatctgttgatgaatggttatacaatggcggtccttatgagctaattgttctacacttcttcctgttgcagctgctactgctgttttcttgatttaccctattggtcaaggaagtttctctgatggtatgcctttaggaatatctggcactttcaactttatgattgtattccaggcagagcacaacatccttatgcatccatttcacatgttaggtgtagctggtgtattcggcggttccctattcagtgctatgcatggttccttggtaacctctagtttgatcagggaaaccactgaaaattagtctgctaatgagggttacaaatttggtcaggaagaagagacttataatattgtggctgctcacggttattttggtcgattaatcttccaatatgctagtttcaacaattctcattctttacacttcttcttggttgcttggcctgtagtagggatctggttcactgctttaggtattagtact

SEQ ID NO: 5571 - DNA, 1160 bp, Zea mays
  Zm_smallRNAprecursor_1060
ttcaaccaaaccaccttttttatgaaaatggagagtggtcttattcaaattcaaaacgcttcgtaatctttaaccagttctgtgcttcaatataatttcctggagtaagcgctatagcttgtttccaatactcagcagcttgatcaaaccaatcttccgcaatttccgaatcaccctgtagaatggcatgttctcctcggttggaataggcagttcctttccctagaaccgtacttgagagtttcctacctcatacggctcagaaattgctatcttaatttcccctatcttaactgaattcgatttctcaaaaatcaatccaatttcttcttgggttaagtagaagaagttaattacctaaaacctgtgggcttagaaactgcaattttagagagacgcgaaagtacaagcctgtggggtcgcttctgcaactggataactagcaccgaaaaccgtctttacattggatggttcggtgttttgatgatccctaccttattgaccgcaacttccgtatttattatcgccttcatcgctgctcctccagtagatattgatggtattcgtgagcctgtttctggttctttacttcatggaaacaatattatctctgatgctattattcctacttctgtggcgatcggattgcatttttacccaatttgggaagctgcatctgttgatgaatggttatacaatggcggtccttatgagctaattgttctacacttcttcctgttgcagctgctactgctgttttcttgatttaccctattggtcaaggaagtttctctgatggtatgcctttaggaatatctggcactttcaactttatgattgtattccaggcagagcacaacatccttatgcatccatttcacatgttaggtgtagctggtgtattcggcggttccctattcagtgctatgcatggttccttggtaacctctagtttgatcagggaaaccactgaaaattagtctgctaatgagggttacaaatttggtcaggaagaagagacttataatattgtggctgctcacggttattttggtcgattaatcttccaatatgctagtttcaacaattctcattctttacacttcttcttggttgcttggcctgtagtagggatctggttcactgctttaggtattagt

SEQ ID NO: 5572 - DNA, 1119 bp, Zea mays
  Zm_smallRNAprecursor_1061
ttgggttaagtagaagaagttaattacctaaaacctgtgggcttagaaactgcaattttagagagacgcgaaagtacaagcctgtggggtcgcttctgcaactggataactagcaccgaaaaccgtctttacattggatggttcggtgttttgatgatccctaccttattgaccgcaacttccgtatttattatcgccttcatcgctgctcctccagtagatattgatggtattcgtgagcctgtttctggttctttacttcatggaaacaatattatctctgatgctattattcctacttctgtggcgatcggattgcatttttacccaatttgggaagctgcatctgttgatgaatggttatacaatggcggtccttatgagctaattgttctacacttcttcctgttgcagctgctactgctgttttcttgatttaccctattggtcaaggaagtttctctgatggtatgcctttaggaatatctggcactttcaactttatgattgtattccaggcagagcacaacatccttatgcatccatttcacatgttaggtgtagctggtgtattcggcggttccctattcagtgctatgcatggttccttggtaacctctagtttgatcagggaaaccactgaaaattagtctgctaatgagggttacaaatttggtcaggaagaagagacttataatattgtggctgctcacggttattttggtcgattaatcttccaatatgctagtttcaacaattctcattctttacacttcttcttggttgcttggcctgtagtagggatctggttcactgctttaggtattagtactatggcattcaacctaaatggtttcaatttcaaccaatctgtagttgatagccaaggtcgcgttattaatacttgggctgatatcatcaaccgtgctaatcttggtatggaggtaatgcacgaacgtaatgctgacaacttccctctagacctagctgctcttgaagttccttaccttaatggataaggtttgtctcctaaacatataggaatttttgaaggaaggaatgccagaaatacctaatatcttgttccaacaggatattgggtatttctttgtttattct

SEQ ID NO: 5573 - DNA, 1140 bp, Zea mays
  Zm_smallRNAprecursor_1062
actgcaattttagagagacgcgaaagtacaagcctgtggggtcgcttctgcaactggataactagcaccgaaaaccgtctttacattggatggttcggtgttttgatgatccctaccttattgaccgcaacttccgtatttattatcgccttcatcgctgctcctccagtagatattgatggtattcgtgagcctgtttctggttctttacttcatggaaacaatattatctctgatgctattattcctacttctgtggcgatcggattgcatttttacccaatttgggaagctgcatctgttgatgaatggttatacaatggcggtccttatgagctaattgttctacacttcttcctgttgcagctgctactgctgttttcttgatttaccctattggtcaaggaagtttctctgatggtatgcctttaggaatatctggcactttcaactttatgattgtattccaggcagagcacaacatccttatgcatccatttcacatgttaggtgtagctggtgtattcggcggttccctattcagtgctatgcatggttccttggtaacctctagtttgatcagggaaaccactgaaaattagtctgctaatgagggttacaaatttggtcaggaagaagagacttataatattgtggctgctcacggttattttggtcgattaatcttccaatatgctagtttcaacaattctcattctttacacttcttcttggttgcttggcctgtagtagggatctggttcactgctttaggtattagtactatggcattcaacctaaatggtttcaatttcaaccaatctgtagttgatagccaaggtcgcgttattaatacttgggctgatatcatcaaccgtgctaatcttggtatggaggtaatgcacgaacgtaatgctgacaacttccctctagacctagctgctcttgaagttccttaccttaatggataaggtttgtctcctaaacatataggaatttttgaaggaaggaatgccagaaatacctaatatcttgttccaacaggatattgggtatttctttgtttattctgaatctttctattctgaattcaattaacgacgagatttagtatcttttcttgtactttcataactcgtg

SEQ ID NO: 5574 - DNA, 1122 bp, Zea mays
  Zm_smallRNAprecursor_1063
acttccgtatttattatcgccttcatcgctgctcctccagtagatattgatggtattcgtgagcctgtttctggttctttacttcatggaaacaatattatctctgatgctattattcctacttctgtggcgatcggattgcatttttacccaatttgggaagctgcatctgttgatgaatggttatacaatggcggtccttatgagctaattgttctacacttcttcctgttgcagctgctactgctgttttcttgatttaccctattggtcaaggaagtttctctgatggtatgcctttaggaatatctggcactttcaactttatgattgtattccaggcagagcacaacatccttatgcatccatttcacatgttaggtgtagctggtgtattcggcggttccctattcagtgctatgcatggttccttggtaacctctagtttgatcagggaaaccactgaaaattagtctgctaatgagggttacaaatttggtcaggaagaagagacttataatattgtggctgctcacggttattttggtcgattaatcttccaatatgctagtttcaacaattctcattctttacacttcttcttggttgcttggcctgtagtagggatctggttcactgctttaggtattagtactatggcattcaacctaaatggtttcaatttcaaccaatctgtagttgatagccaaggtcgcgttattaatacttgggctgatatcatcaaccgtgctaatcttggtatggaggtaatgcacgaacgtaatgctgacaacttccctctagacctagctgctcttgaagttccttaccttaatggataaggtttgtctcctaaacatataggaatttttgaaggaaggaatgccagaaatacctaatatcttgttccaacaggatattgggtatttctttgtttattctgaatctttctattctgaattcaattaacgacgagatttagtatcttttcttgtactttcataactcgtgaaatgccgagtaggcacgaattcccctaatttgcgacctaccataggatttgttatgtaaataggtatatgttcttttccattatgaatcgagattgtatggccaaccatt

SEQ ID NO: 5575 - DNA, 1038 bp, Zea mays
  Zm_smallRNAprecursor_1064
tccgtatttattatcgccttcatcgctgctcctccagtagatattgatggtattcgtgagcctgtttctggttctttacttcatggaaacaatattatctctgatgctattattcctacttctgtggcgatcggattgcatttttacccaatttgggaagctgcatctgttgatgaatggttatacaatggcggtccttatgagctaattgttctacacttcttcctgttgcagctgctactgctgttttcttgatttaccctattggtcaaggaagtttctctgatggtatgcctttaggaatatctggcactttcaactttatgattgtattccaggcagagcacaacatccttatgcatccatttcacatgttaggtgtagctggtgtattcggcggttccctattcagtgctatgcatggttccttggtaacctctagtttgatcagggaaaccactgaaaattagtctgctaatgagggttacaaatttggtcaggaagaagagacttataatattgtggctgctcacggttattttggtcgattaatcttccaatatgctagtttcaacaattctcattctttacacttcttcttggttgcttggcctgtagtagggatctggttcactgctttaggtattagtactatggcattcaacctaaatggtttcaatttcaaccaatctgtagttgatagccaaggtcgcgttattaatacttgggctgatatcatcaaccgtgctaatcttggtatggaggtaatgcacgaacgtaatgctgacaacttccctctagacctagctgctcttgaagttccttaccttaatggataaggtttgtctcctaaacatataggaatttttgaaggaaggaatgccagaaatacctaatatcttgttccaacaggatattgggtatttctttgtttattctgaatctttctattctgaattcaattaacgacgagatttagtatcttttcttgtactttcataactcgtgaaatgccgagtaggcacgaattcccctaat

SEQ ID NO: 5576 - DNA, 1063 bp, Zea mays
  Zm_smallRNAprecursor_1065
gtgcctgttgaagaatgagccggcaactcataggcagtggcttggttaagggaatggaacccaccggagccgtagcgaaagcgagtcttcatagggcgattgtcactgcttatggacccaaacctgggtgatctatccatgaccaggatgaagcttggatgaaactaagcagaggtccgaaccgacagttgttgaagaatcagcggatgagttgtggttaggggtgaaatgccactcgaacctagagctagctggttctccccgaaatgcattgaggcgcagtagttgactggacatctaggggtaaagcactgttttggtgcgggctgcgtgagcggtatcaaatcgaggcaaactctgaatactagatatgacccaaaaataacaggggtcaaggtcggccagtgagacgatgggggataagcttcatcgtcgagagggaaatagcccgggtcaccagctaaggcccctaaatgaccgctcagtgataaaggaggtgggggtgcaaagacagccaggaggtttgcctagaagcagccaccctttaaagagtgcataatagctcactgatcgagcgcccttgcgctgcagatgaacggggctaagcgatctgccgaagctttgggatgtcaaaatgcatcggtaggggagcgtttcgccttagagggaagcaaacgcaaaagcgggggttgacgaagcagaagcgagaatgtcggcttgagtaacgaaaacattggtgagaatccaatgccccgaaaacccaaggtttcctccgcaaggttcgtccacggagggtgagtcggggcctaagatcaggccgaaaggcgtagtcgatggacaacaggtcaatattcctgtactaccccttgttggtacggagggacggaggaggctaggttagtcgaaagatggttataggtataaggacacaaggtgaccctactttttcaggctaagaaggggtagagaaaatgcctcgagccgaggtccgagtaccaagcgctgcaacactgaagtatgagccccgtggactagccattgcttctccacgaggctcatacca

SEQ ID NO: 5577 - DNA, 1127 bp, Zea mays
  Zm_smallRNAprecursor_1066
gggccgacggctcgcccgtgcacttcttcgcggtcttcgacggccacggcggctcccatgtacgtgatccgaacatttcatgaccatctatcagtatcacttggcagcagattttttttacctaattactcccagtagatagtagatgttatacttttacctatatatattctacatcatatcacttggctacttttatagtgttttgtctctctatatattgttgaactcctgctgctactgtgatttatttgtctgtttgcatcatcatgtaacaagaaaggtactaggccaagaaaggaagagtaagggcatgaatgcgtgccgaagaaaggctgccacagctagcttcctcgtctcctcagcaccacgtttggctttggctactatagcagcagtcactgctttctttctgctgttagctagtaccaagtgtccagctggccacattctagtgagaacgtatcttgtgcgcaaggagcgttggtgctcccatgagcaaaatcaatccagaccacatcctccacatccaacggtgttgtgtcagggggttttgtaaaatgttctttgcaactctgtacattttacaaaaacccccctgacgcagcaccgttggatgtggagggtgtggtctggattgattttgctcatgggagcagcagagctccttgctcataagatacgttctccattctagttccttctaaatccgacatgcatgcatccacgtttctctacctcgtttaattgtctttttatttatttgcatgagacagtattatatataattaacaagggctgtccgatcaggtgtccgcgctgtgccgcgaccggatgcacgagttcgtggcggaggagctgggcaaggagggggccgccttccttcggcggcggcaggagtggctggcgtggggcgacggcgccggcgccgagacgagcgccgcggcgttcgtcagggggccccgcggcgcgtggccggagcgcgaggaggaggagcgcgcgtggcgctcggcgctgcggaggagcttccgtcgcgccgacgcgatggcggcgctggcgtgcgcgtgcgggcgcgtggcgcgcccgagctgccgctgcccgctttccagcgtcgtctccggcatcgt

SEQ ID NO: 5578 - DNA, 1117 bp, Zea mays
  Zm_smallRNAprecursor_1067
gacggctcgcccgtgcacttcttcgcggtcttcgacggccacggcggctcccatgtacgtgatccgaacatttcatgaccatctatcagtatcacttggcagcagattttttttacctaattactcccagtagatagtagatgttatacttttacctatatatattctacatcatatcacttggctacttttatagtgttttgtctctctatatattgttgaactcctgctgctactgtgatttatttgtctgtttgcatcatcatgtaacaagaaaggtactaggccaagaaaggaagagtaagggcatgaatgcgtgccgaagaaaggctgccacagctagcttcctcgtctcctcagcaccacgtttggctttggctactatagcagcagtcactgctttctttctgctgttagctagtaccaagtgtccagctggccacattctagtgagaacgtatcttgtgcgcaaggagcgttggtgctcccatgagcaaaatcaatccagaccacatcctccacatccaacggtgttgtgtcagggggttttgtaaaatgttctttgcaactctgtacattttacaaaaacccccctgacgcagcaccgttggatgtggagggtgtggtctggattgattttgctcatgggagcagcagagctccttgctcataagatacgttctccattctagttccttctaaatccgacatgcatgcatccacgtttctctacctcgtttaattgtctttttatttatttgcatgagacagtattatatataattaacaagggctgtccgatcaggtgtccgcgctgtgccgcgaccggatgcacgagttcgtggcggaggagctgggcaaggagggggccgccttccttcggcggcggcaggagtggctggcgtggggcgacggcgccggcgccgagacgagcgccgcggcgttcgtcagggggccccgcggcgcgtggccggagcgcgaggaggaggagcgcgcgtggcgctcggcgctgcggaggagcttccgtcgcgccgacgcgatggcggcgctggcgtgcgcgtgcgggcgcgtggcgcgcccgagctgccgctgcccgctttccagcgtcgtctccggc

SEQ ID NO: 5579 - DNA, 1071 bp, Zea mays
  Zm_smallRNAprecursor_1068
gaaggttccccaagacccatcacagaacactgtccatacttcggcatctttatttgtttcttcatcctgagcccctggcgtccaatcggcgataaaatctgccaacgcttgggactggatcgaagatctatgcacataatcaatgcaaaattcattgagctctgcagcccattttccaatccgcccagtagcttctctatttctcataatatccttcaacggctgcgaagaaggaacaataacattgtatgcttgaaagtaatgccgaagcttcctggatgccatcaaaacagcatataacaccttctctaattctgtatagtttttctttgatatactaagaacttcagatacaaaatacactgggacctgcttcttgacttggccgtcaagcttctcctggacaagtgctgcacttaccgctgagtgcgaagctgccacatataataacaacggagcccctggcgttggtggagttaatgttgttaaatctatcaaatattgcttcaggtcctcgaaggctttttgttggcttggtccccattgaaagacttcgactaatttcagtacttcgaagaatggtagatttctttctgctgatctggatataaatctattaagagatgtcagcctccctatcaatctttgggcccccttttttgtagttggtggctccattcgaagtatagcttcaattttacttggattagcttcaattccctttgttgaaaccaagcatccaagaaatttccccttcttgactccgaagacacatttttctggattcaacattaggccagcttgcctaaaactggcgaaggtctcttgcaaatcagcaatgtgattttcctgcttcgtgctttttacaatgatatcatcaacataagttagcacatttctgcctatttgagattggagaaccttcgcagtcattctgctgaaacttcctccagcgttcttgagcccttcaggcatccgaagataacaatatgttccactaggggttatgaaaccggtctttggctcatcctccttcttcatccaaatttgatgatagcctgaataacaatc

SEQ ID NO: 5580 - DNA, 1040 bp, Zea mays
  Zm_smallRNAprecursor_1069
aattaaggtcaaaaagataaacatttgcaatagaaaatttcttttgaatgattgtatgtagatggctccccctaaatgtgtgcacgattgtgaacccaatgttttgacataatatgtcatgtgagcaacacatttagagatagtgacaaaaaccatactgaatacaaccatccgaggggtgcaagagtgtcataataggagttgtgatgcatatgactatcttaaaatacacatcatttttacttcatagcaaagcaatcattacacactgatgggacaaaagatgatgaccagaagaccatcatatcactttgaataataacccagcagttttatttcatacaatgataagaggatacaagccacaacagtggccaaaacaacaaaaattaatccaaaagaaatacataaccgaaagagccacaaatagaatgactagaaattttggattttctccccctttttggcaacaagtaccaaaaacgaagagagagacatggatacatgaatcaatatcctctaggaggaggataggacggaggatatgatggagggtatgaagtgtagtcagggaagaaggtcctcatcacgtcctcctcaaatgtggagtccctaggtggctcatcagccgcagaaaaaacagatgccgaagatgtacgatgatcaggaggaggtggagggtggtgatggtaaccagagccagatggcctagggtcaccaggaatgggtcccgggcccgggtagggaggcagaaggtgagaggatgattgacccggatccccatggtagggaggcggggcaaactgctcgcgatcatcaacgtaggcttcttcttcttcttcgtcgtttgctgacataaatggcaccccgtaggcctgctggtgccactcattgatctccgggggaggaggatggagaggaacgtcaggcgagcgaggggcaaagggcatacccatagtggaagcttgacgacgaagattgtcgtcagtctcccgctgacgccttgccacctcatgtacatcagcagaaatgttgcgaca

SEQ ID NO: 5581 - DNA, 1160 bp, Zea mays
  Zm_smallRNAprecursor_1070
acttggtccttaccattctctagtagatactgcaggaattcagggcactttctcttgtaatgacatgtcttcttgcaatagaggcaggtatcagggggaactgagaaactgcctccttgtcttggctgattattattgctcgaggaagcctggttattctgtttaccttgcttcttgaactttttctttgagttcttgttctgtctggggatattgactttgatgaggttgacagagtttccagtctgctttaacctctcttcctcctggacacactgtgccaaaagttggtctatattccacttatcagtgacactagtgttgtactgtatgtgaaaagtctcaaactcattgggcagagacttcattatcataaatactacaaattcctcgtgtaaagtaaacccgaggtacttgtttatcttagctacgatggatatcattttcagaatgaatggtctgacaccatttccatcgtattttgcattgacaaattctgtcattagagagcaagcataagccttagaagacccttggtgatgagaggctaccctctcaaggtattctttggcagtctcgcactctggtatggaactcttaagaggctccttgatgctcctcttaagaataatcatacatttgtcatttgatctctctcacttgaccttgtcgatgctgtattgcatccacctgtggtcatagttgggagtgcccactgtgggctcaactggtttatcaaacctcagtgcgtaatctatctcacccactgtggttatcatgtctatatcctcccgccaagaatggtaattactaccatctagcggtttcatctgagcaatctggctaatcagcatggccggtatgagtacctttgcaaaattaaaatagaaaatatttaggacatctaaaataaatactgaatactgaatcatagaacatgcatgaattaaatattcaacgttggtcaaataataaacatgctatatctatgaaaatttctgatcacaaaatttctaaaccatcgttggatgatctagaaaacataaacttgtattaaattgtggtaacaatatccaacgttggttaaaatattcaatcaccataaattttctgaattatatgcaatttaagcaataattaacccacgttggtttcataat

SEQ ID NO: 5582 - DNA, 1040 bp, Zea mays
  Zm_smallRNAprecursor_1071
ccaaaacaattaaggtcaaaaagatatacatttgcaatagaaaatttcttttgaatgattgtatgtagatggctccccctaaatgtgtgcacgattgtgaatccaatgttttgacataatatgtcatgtgagcaacacatttagagatagtgacaaaaccatactgaatacaaccatccgaggggtgcaagagtcataacaggagttgtgatgcacatgactatctctaaatacacatcatttttacttcatagcaaagcaatcattacaaactgataggacaaaagatgatggccagaagaccatcatatcactttgaataaaaacccagcagttttatttcatacaatgataagaggatacaagccacaacagtggccaaaacaaaaaaaatccaaaagaaatacataaccgaaagaacctcaaacaaaaagactagaaattttggattttctccccctttttggcaacaagtaccaaaaacgaagagagagacatggatacatgaatcaatatcctccaggcggaggataggatgaaggatatgatggagggtatgatgtgtagtcagggaagagggtcctcatcacgtcttcctcgaacgtggagtccctaggtggctcatcagtcgcagaaaaaacagatgccgaagatgtacgatgatcaggaggaggtggagggtggtggtggtaaccagagccagatggcctagggtcaccaggaatgggtcccggacccgggtagggaggcggagggtgagaggatgattgacccggatccccatggtagggaggcagggcaaactgctcgcgatcatcaacgtaggcttcttcttcttcttcgtcgtctgctgacataaatggcaccccgtaggcctgctggtgccactcattgatctccgggggaggaggatggaggggcacgtcaggcgagcgaggggcaaagggcatacccatagtggaagcttaacgacgaagattgtcgttagtctcccgctgacgccttgccagctcatgtacatcagcagaaatgtttcggca

SEQ ID NO: 5583 - DNA, 1044 bp, Zea mays
  Zm_smallRNAprecursor_1072
ccgctagcccacgaggaaggcgaagctcccactcggcacgcccccctccccagcgtggatgatgaacatccttgaagctgagggcaggggggaggccgcagcctggctcgcttctctccaccaaggctggtagtcatccttctggatgacccccggccggaggttgcgaccgggctgcgtgatgaaaatccttgaagcagaatgttggtggaaggatgccaactcccatggggttgcacccctccaacagcagcaagaagaagacaagatcggcgacacctccacgagcgcgcgctctccgatcgtgaagtcaccggaagggacgaccttgacgcggatccctccagagaacactggcgcaccccatctggaggcccagaatgcggaagggcgcgatggtcgcaagaggagcaaggcatgtctactgcccgggagatcgaactctttttaaaggcagatccccccactcgcgcccctgaagcgtcacgggttgagtcagtgctatgcatggttccttggtaacctctagtttgatcagggaaaccactgaaaatgagtctgctaatgagggttacaaatttggtcaggaagaagagacttataatattgtggctgctcacggttattttggtcgattaatcttccaatatgctagtttcaacaattctcgttctttacacttcttcttggctgcttggcctgtagtagggatctggttcactgctttaggtattagtactatggcattcaacctaaatggtttcaatttcaaccaatctgtagttgatagccaaggtcgcgttattaatacttgggctgatatcatcaaccgtgctaatcttggtatggaggtaatgcacgaacgtaatgctcacaacttccctctagacctagctgctcttgaagttccttaccttaatggataaggtttttctcctaaacatataggtttttctccggagtgcaccaaggatcccaccttatgacacgggggccaggctccacatgtcatacggactaaccctaagaaggagcgtgcaactg

SEQ ID NO: 5584 - DNA, 1052 bp, Zea mays
  Zm_smallRNAprecursor_1073
ccctccccagcgtggatgatgaacatccttgaagctgagggcaggggggaggccgcagcctggctcgcttctctccaccaaggctggtagtcatccttctggatgacccccggccggaggttgcgaccgggctgcgtgatgaaaatccttgaagcagaatgttggtggaaggatgccaactcccatggggttgcacccctccaacagcagcaagaagaagacaagatcggcgacacctccacgagcgcgcgctctccgatcgtgaagtcaccggaagggacgaccttgacgcggatccctccagagaacactggcgcaccccatctggaggcccagaatgcggaagggcgcgatggtcgcaagaggagcaaggcatgtctactgcccgggagatcgaactctttttaaaggcagatccccccactcgcgcccctgaagcgtcacgggttgagtcagtgctatgcatggttccttggtaacctctagtttgatcagggaaaccactgaaaatgagtctgctaatgagggttacaaatttggtcaggaagaagagacttataatattgtggctgctcacggttattttggtcgattaatcttccaatatgctagtttcaacaattctcgttctttacacttcttcttggctgcttggcctgtagtagggatctggttcactgctttaggtattagtactatggcattcaacctaaatggtttcaatttcaaccaatctgtagttgatagccaaggtcgcgttattaatacttgggctgatatcatcaaccgtgctaatcttggtatggaggtaatgcacgaacgtaatgctcacaacttccctctagacctagctgctcttgaagttccttaccttaatggataaggtttttctcctaaacatataggtttttctccggagtgcaccaaggatcccaccttatgacacgggggccaggctccacatgtcatacggactaaccctaagaaggagcgtgcaactgccctgcggttacgcgcccttttgttttcggggcaaccaacgatcaggaagg

SEQ ID NO: 5585 - DNA, 1052 bp, Zea mays; identical to SEQ ID NO: 5584
  Zm_smallRNAprecursor_1074

SEQ ID NO: 5586 - DNA, 1162 bp, Zea mays
  Zm_smallRNAprecursor_1075
cctccccagcgtggatgatgaacatccttgaagctgagggcaggggggaggccgcagcctggctcgcttctctccaccaaggctggtagtcatccttctggatgacccccggccggaggttgcgaccgggctgcgtgatgaaaatccttgaagcagaatgttggtggaaggatgccaactcccatggggttgcacccctccaacagcagcaagaagaagacaagatcggcgacacctccacgagcgcgcgctctccgatcgtgaagtcaccggaagggacgaccttgacgcggatccctccagagaacactggcgcaccccatctggaggcccagaatgcggaagggcgcgatggtcgcaagaggagcaaggcatgtctactgcccgggagatcgaactctttttaaaggcagatccccccactcgcgcccctgaagcgtcacgggttgagtcagtgctatgcatggttccttggtaacctctagtttgatcagggaaaccactgaaaatgagtctgctaatgagggttacaaatttggtcaggaagaagagacttataatattgtggctgctcacggttattttggtcgattaatcttccaatatgctagtttcaacaattctcgttctttacacttcttcttggctgcttggcctgtagtagggatctggttcactgctttaggtattagtactatggcattcaacctaaatggtttcaatttcaaccaatctgtagttgatagccaaggtcgcgttattaatacttgggctgatatcatcaaccgtgctaatcttggtatggaggtaatgcacgaacgtaatgctcacaacttccctctagacctagctgctcttgaagttccttaccttaatggataaggtttttctcctaaacatataggtttttctccggagtgcaccaaggatcccaccttatgacacgggggccaggctccacatgtcatacggactaaccctaagaaggagcgtgcaactgccctgcggttacgcgcccttttgttttcggggcaaccaacgatcaggaaggcaaaccgccgtgcaaggggcatgcaaccaccccacggttaagcgccccttcatcttcgccatatccagcggtcaaagaggcaaaccgccgcgcaagaagcgtacaaccgtc

SEQ ID NO: 5587 - DNA, 1161 bp, Zea mays
  Zm_smallRNAprecursor_1076
ctccccagcgtggatgatgaacatccttgaagctgagggcaggggggaggccgcagcctggctcgcttctctccaccaaggctggtagtcatccttctggatgacccccggccggaggttgcgaccgggctgcgtgatgaaaatccttgaagcagaatgttggtggaaggatgccaactcccatggggttgcacccctccaacagcagcaagaagaagacaagatcggcgacacctccacgagcgcgcgctctccgatcgtgaagtcaccggaagggacgaccttgacgcggatccctccagagaacactggcgcaccccatctggaggcccagaatgcggaagggcgcgatggtcgcaagaggagcaaggcatgtctactgcccgggagatcgaactctttttaaaggcagatccccccactcgcgcccctgaagcgtcacgggttgagtcagtgctatgcatggttccttggtaacctctagtttgatcagggaaaccactgaaaatgagtctgctaatgagggttacaaatttggtcaggaagaagagacttataatattgtggctgctcacggttattttggtcgattaatcttccaatatgctagtttcaacaattctcgttctttacacttcttcttggctgcttggcctgtagtagggatctggttcactgctttaggtattagtactatggcattcaacctaaatggtttcaatttcaaccaatctgtagttgatagccaaggtcgcgttattaatacttgggctgatatcatcaaccgtgctaatcttggtatggaggtaatgcacgaacgtaatgctcacaacttccctctagacctagctgctcttgaagttccttaccttaatggataaggtttttctcctaaacatataggtttttctccggagtgcaccaaggatcccaccttatgacacgggggccaggctccacatgtcatacggactaaccctaagaaggagcgtgcaactgccctgcggttacgcgcccttttgttttcggggcaaccaacgatcaggaaggcaaaccgccgtgcaaggggcatgcaaccaccccacggttaagcgccccttcatcttcgccatatccagcggtcaaagaggcaaaccgccgcgcaagaagcgtacaaccgtc

SEQ ID NO: 5588 - DNA, 1122 bp, Zea mays
  Zm_smallRNAprecursor_1077
caggggggaggccgcagcctggctcgcttctctccaccaaggctggtagtcatccttctggatgacccccggccggaggttgcgaccgggctgcgtgatgaaaatccttgaagcagaatgttggtggaaggatgccaactcccatggggttgcacccctccaacagcagcaagaagaagacaagatcggcgacacctccacgagcgcgcgctctccgatcgtgaagtcaccggaagggacgaccttgacgcggatccctccagagaacactggcgcaccccatctggaggcccagaatgcggaagggcgcgatggtcgcaagaggagcaaggcatgtctactgcccgggagatcgaactctttttaaaggcagatccccccactcgcgcccctgaagcgtcacgggttgagtcagtgctatgcatggttccttggtaacctctagtttgatcagggaaaccactgaaaatgagtctgctaatgagggttacaaatttggtcaggaagaagagacttataatattgtggctgctcacggttattttggtcgattaatcttccaatatgctagtttcaacaattctcgttctttacacttcttcttggctgcttggcctgtagtagggatctggttcactgctttaggtattagtactatggcattcaacctaaatggtttcaatttcaaccaatctgtagttgatagccaaggtcgcgttattaatacttgggctgatatcatcaaccgtgctaatcttggtatggaggtaatgcacgaacgtaatgctcacaacttccctctagacctagctgctcttgaagttccttaccttaatggataaggtttttctcctaaacatataggtttttctccggagtgcaccaaggatcccaccttatgacacgggggccaggctccacatgtcatacggactaaccctaagaaggagcgtgcaactgccctgcggttacgcgcccttttgttttcggggcaaccaacgatcaggaaggcaaaccgccgtgcaaggggcatgcaaccaccccacggttaagcgccccttcatcttcgccatatccagcggtcaaagaggcaaaccgccgcgcaagaagcgtacaaccgtc

SEQ ID NO: 5589 - DNA, 1038 bp, Zea mays
  Zm_smallRNAprecursor_1078
gggggaggccgcagcctggctcgcttctctccaccaaggctggtagtcatccttctggatgacccccggccggaggttgcgaccgggctgcgtgatgaaaatccttgaagcagaatgttggtggaaggatgccaactcccatggggttgcacccctccaacagcagcaagaagaagacaagatcggcgacacctccacgagcgcgcgctctccgatcgtgaagtcaccggaagggacgaccttgacgcggatccctccagagaacactggcgcaccccatctggaggcccagaatgcggaagggcgcgatggtcgcaagaggagcaaggcatgtctactgcccgggagatcgaactctttttaaaggcagatccccccactcgcgcccctgaagcgtcacgggttgagtcagtgctatgcatggttccttggtaacctctagtttgatcagggaaaccactgaaaatgagtctgctaatgagggttacaaatttggtcaggaagaagagacttataatattgtggctgctcacggttattttggtcgattaatcttccaatatgctagtttcaacaattctcgttctttacacttcttcttggctgcttggcctgtagtagggatctggttcactgctttaggtattagtactatggcattcaacctaaatggtttcaatttcaaccaatctgtagttgatagccaaggtcgcgttattaatacttgggctgatatcatcaaccgtgctaatcttggtatggaggtaatgcacgaacgtaatgctcacaacttccctctagacctagctgctcttgaagttccttaccttaatggataaggtttttctcctaaacatataggtttttctccggagtgcaccaaggatcccaccttatgacacgggggccaggctccacatgtcatacggactaaccctaagaaggagcgtgcaactgccctgcggttacgcgcccttttgttttcggggcaaccaacgatcaggaaggcaaaccgccgtgcaaggggcatgcaaccac

SEQ ID NO: 5590 - DNA, 1171 bp, Zea mays
  Zm_smallRNAprecursor_1079
ctgtcactgcgcgcagaaatattttttctgactgctgccgctctgcgtccagtcacttccctggcgcgcaaattttttttttctgtccagtcacttccagcagctgcgcgcaaatttgaatttgtcgtttctggttctctgaccacactggtcagaaccagctgaactggcccatgggggcggttgaactggtcctgaggaccagctcaactgcctatatatacttgactctccccttctcttctcccacttcattcactcttgccttggtcgcttcacaacctttagagcctctccttcacacacttcattcgcttcacagtttcaccaccttttcaatcatggtgcgtcgtcgcaacccctctgtggtcgagttcagcagcgactccgacgagattcaggaggaatctcccgtcccctctcctccgcctcgtcgctccctctctaagagaggacgtggctctggtcggatggctagcgagggctcttccatgccctcgcagccgactcgcgggagacgccaaaaggttggcgcctctcgtcctcgtcgtagcacgtcttcctcagggtatgctccctgccaagaggaggatggggctttcgacgacttcgtcgaccttccggcgcctgatgctctctacgtcaccggactgcacatgcatccggcgaacgtcagccgcggtccgcatgaatctcccgtcgacttcactcagaagggaatagaaacccttcagcgtctgaggtttaccaaccctactctcactcctcgtcatcctggtgtccaggaccctcggttctggaatcttttccaggctgacttctacaattctgtcattctttccaagaaacacccagtcgtccgacatagatttattgactgggagggttgtgagaatatgggagatgctgacatgtcgtcagctctcgtaaacttagagagaaaggggttacgtaacattatgaccatggaatgcccctggaacgatgaggtggtagctcagttctatgccaccctctggataaagaaagtagatgaggaagccgatgggtatgattacccagtcatgtatttcttcatccagggtaactggcacaaagtcagttatcgtcattttgcccatattctgggcttctctgatgcagacattcagggcagcaacatgcgagtgca

SEQ ID NO: 5591 - DNA, 1058 bp, Zea mays
  Zm_smallRNAprecursor_1080
aaacccttcagcgtctgaggtttaccaaccctactctcactcctcgtcatcctggtgtccaggaccctcggttctggaatcttttccaggctgacttctacaattctgtcattctttccaagaaacacccagtcgtccgacatagatttattgactgggagggttgtgagaatatgggagatgctgacatgtcgtcagctctcgtaaacttagagagaaaggggttacgtaacattatgaccatggaatgcccctggaacgatgaggtggtagctcagttctatgccaccctctggataaagaaagtagatgaggaagccgatgggtatgattacccagtcatgtatttcttcatccagggtaactggcacaaagtcagttatcgtcattttgcccatattctgggcttctctgatgcagacattcagggcagcaacatgcgagtgcatggcattcggctgcccatgcgggaagagacggaattcattcatgtctctactgagcgggagttctggacaaccgctaacatgcataggtactacaggtaccttaattccttgtcccggatgaccgttctcccaaagggcggtaatcaaatgaacgtccttggggagagtcgagtcctcctcctcctccttgctccaaacagtctcgcccgcatcaatgtgtttgacatgatctgggaggagatcgtccgtgcttcctggtctcctcacagagggtgtcttcatgcaccctttatcatgaagatgatcgaagtggtcacccagacccacttcgaaaaacccgtcaaacactcccgctacgtaccctactgggttgattcttccaacccagctgctcgtacgaagcgggttccctcacggtctggaggccctgcctcctcctctgagccacctcgccagcctccccaccatccttcctcctctccccccgctgctgcctcgcgtccctctcctggccgcggctctcccatgccacgtgctcgtggtcgtggtcgtggtcgtggccgcgggatgggtgctcgcttggtccatgggcttgcggcatttttctcc

SEQ ID NO: 5592 - DNA, 1141 bp, Zea mays
  Zm_smallRNAprecursor_1081
aaacccttcagcgtctgaggtttaccaaccctactctcactcctcgtcatcctggtgtccaggaccctcggttctggaatcttttccaggctgacttctacaattctgtcattctttccaagaaacacccagtcgtccgacatagatttattgactgggagggttgtgagaatatgggagatgctgacatgtcgtcagctctcgtaaacttagagagaaaggggttacgtaacattatgaccatggaatgcccctggaacgatgaggtggtagctcagttctatgccaccctctggataaagaaagtagatgaggaagccgatgggtatgattacccagtcatgtatttcttcatccagggtaactggcacaaagtcagttatcgtcattttgcccatattctgggcttctctgatgcagacattcagggcagcaacatgcgagtgcatggcattcggctgcccatgcgggaagagacggaattcattcatgtctctactgagcgggagttctggacaaccgctaacatgcataggtactacaggtaccttaattccttgtcccggatgaccgttctcccaaagggcggtaatcaaatgaacgtccttggggagagtcgagtcctcctcctcctccttgctccaaacagtctcgcccgcatcaatgtgtttgacatgatctgggaggagatcgtccgtgcttcctggtctcctcacagagggtgtcttcatgcaccctttatcatgaagatgatcgaagtggtcacccagacccacttcgaaaaacccgtcaaacactcccgctacgtaccctactgggttgattcttccaacccagctgctcgtacgaagcgggttccctcacggtctggaggccctgcctcctcctctgagccacctcgccagcctccccaccatccttcctcctctccccccgctgctgcctcgcgtccctctcctggccgcggctctcccatgccacgtgctcgtggtcgtggtcgtggtcgtggccgcgggatgggtgctcgcttggtccatgggcttgcggcatttttctccatgtgccgcaacatttctgctgatgtccatgaggtggcacggcgtcagcgggagactgacgacaatcttcgtcgtcaagcttc

SEQ ID NO: 5593 - DNA, 1057 bp, Zea mays
  Zm_smallRNAprecursor_1082
aacccttcagcgtctgaggtttaccaaccctactctcactcctcgtcatcctggtgtccaggaccctcggttctggaatcttttccaggctgacttctacaattctgtcattctttccaagaaacacccagtcgtccgacatagatttattgactgggagggttgtgagaatatgggagatgctgacatgtcgtcagctctcgtaaacttagagagaaaggggttacgtaacattatgaccatggaatgcccctggaacgatgaggtggtagctcagttctatgccaccctctggataaagaaagtagatgaggaagccgatgggtatgattacccagtcatgtatttcttcatccagggtaactggcacaaagtcagttatcgtcattttgcccatattctgggcttctctgatgcagacattcagggcagcaacatgcgagtgcatggcattcggctgcccatgcgggaagagacggaattcattcatgtctctactgagcgggagttctggacaaccgctaacatgcataggtactacaggtaccttaattccttgtcccggatgaccgttctcccaaagggcggtaatcaaatgaacgtccttggggagagtcgagtcctcctcctcctccttgctccaaacagtctcgcccgcatcaatgtgtttgacatgatctgggaggagatcgtccgtgcttcctggtctcctcacagagggtgtcttcatgcaccctttatcatgaagatgatcgaagtggtcacccagacccacttcgaaaaacccgtcaaacactcccgctacgtaccctactgggttgattcttccaacccagctgctcgtacgaagcgggttccctcacggtctggaggccctgcctcctcctctgagccacctcgccagcctccccaccatccttcctcctctccccccgctgctgcctcgcgtccctctcctggccgcggctctcccatgccacgtgctcgtggtcgtggtcgtggtcgtggccgcgggatgggtgctcgcttggtccatgggcttgcggcatttttctcc

SEQ ID NO: 5594 - DNA, 1058 bp, Zea mays
  Zm_smallRNAprecursor_1083
aacccttcagcgtctgaggtttaccaaccctactctcactcctcgtcatcctggtgtccaggaccctcggttctggaatcttttccaggctgacttctacaattctgtcattctttccaagaaacacccagtcgtccgacatagatttattgactgggagggttgtgagaatatgggagatgctgacatgtcgtcagctctcgtaaacttagagagaaaggggttacgtaacattatgaccatggaatgcccctggaacgatgaggtggtagctcagttctatgccaccctctggataaagaaagtagatgaggaagccgatgggtatgattacccagtcatgtatttcttcatccagggtaactggcacaaagtcagttatcgtcattttgcccatattctgggcttctctgatgcagacattcagggcagcaacatgcgagtgcatggcattcggctgcccatgcgggaagagacggaattcattcatgtctctactgagcgggagttctggacaaccgctaacatgcataggtactacaggtaccttaattccttgtcccggatgaccgttctcccaaagggcggtaatcaaatgaacgtccttggggagagtcgagtcctcctcctcctccttgctccaaacagtctcgcccgcatcaatgtgtttgacatgatctgggaggagatcgtccgtgcttcctggtctcctcacagagggtgtcttcatgcaccctttatcatgaagatgatcgaagtggtcacccagacccacttcgaaaaacccgtcaaacactcccgctacgtaccctactgggttgattcttccaacccagctgctcgtacgaagcgggttccctcacggtctggaggccctgcctcctcctctgagccacctcgccagcctccccaccatccttcctcctctccccccgctgctgcctcgcgtccctctcctggccgcggctctcccatgccacgtgctcgtggtcgtggtcgtggtcgtggccgcgggatgggtgctcgcttggtccatgggcttgcggcatttttctcca

SEQ ID NO: 5595 - DNA, 1088 bp, Zea mays
  Zm_smallRNAprecursor_1084
taaggttgattctgtaattatacatgcatcatgctaagaaccatactaatcaaattttcccccttagaaaatgccgccgcgcacaaggagaacaacacgcaaacaaactggaccgattggtgtgccgagtcaccagctggccccaaggcatgataatagtagtagcggaagcaacgatcctataggggatcttgaagctgaagtatgtcggctccaagcggaacttcatcgcaggacggctatatgggtcgtagatggcgaccgcataaatgagttgagaagagacgtccgccatctgcgagatcagctcgcggaccgggatttggcactcgactgggttgttcaatctcgttcgcttgcatgggacaaggagcaaaaagctcaagctcgagtagtcgagctcaacttggctgttgaagacctgcagacatattgcaataccttacatgaagaggttcatgtattatattcgcaacttcatcctagtgagcctatgaatcctgttgagtcggaagccggaccctcgcatgttgcgggacacgcgcttggtggtgagttagaccttttccagccccctccttctatgaggctggtcgacgaatggtctcccacacccgacgacgaggccgccaaaagcaacggaaagcaggaatagtggtgtagtagttgaaatagaagtagtgtattgtataacaggttgtactattgtataataggaagtgtatttgtataataggtaatgtatcctgttgtaaaaatccgagtctgtacattactctttttggtaatgtaaaagggatggttttctctttggcatatcatattgtttccaaatgttgttgccacagatgccgtccaagacccgatcacaggatgcagctggaacttccagtgggagggagactaccccaaatccacctcctgttcctcccacactggccgaggcaattgccgccttggtaaatgcaaccacggataatacccgttttctcagagagatggtgggtcaacagtttcaacagcaaggtgggcggggttatcaacagggtccccgttaaacctcttacttggacttcttagagacgcga

SEQ ID NO: 5596 - DNA, 1071 bp, Zea mays
  Zm_smallRNAprecursor_1085
gaaggttccccaagacccatcgcaaaacactgtccatacttcggcatctttatttgtttcttcatcctgagcccctggcgtccaatcggcgataaaatctgccaacgcttgggactggatcgaagatctatgcacataatcaatgcaaaattcattgagctctgcagcccattttccaatccgcccagtagcttctctatttctcataatatccttcaacggctgcgaagaaggaacaataacattgtatgcttgaaagtaatgccgaagcttcctggatgccatcaaaacagcatataacaccttctctaattttgtatagtttttctttgatatactaagaacttcagatacaaaatacactgggacctgcttcttgacttggccgtcaagcttctcctggacaagtgctgcacttaccgctgagtgcgaagctgccacatataataacaacggagcccctggcgttggtggagttaatgttgttaaatctatcaaatattgcttcaggtcctcgaaggctttttgttggcttggtccccattgaaagacttcgactgatttcagtacttcgaagaatggtagatttctttctgctgatctggatataaatctattaagagatgccagcctccctgtcaatctttgggcccccttttttgtagttggtggctccattcgaagtatagcttcaattttacttggattagcttcaattccctttgttgaaaccaagcatccaagaaatttccccttcttgactccgaagacacatttttctggattcaactttaggccagcttgcctaaaactggcgaaggtctcctgcaaatcagcaatgtgattttcctgcttcgtgctttttacaatgatatcatcaacataagttagcacatttctgcctatctgagattgaagaaccttcgcagtcattctgctgaaacttcctccggcgttcttgagcccctcaggcatccgaagataacaatatgttccactaggggttatgaaactggtctttggctcatcctccttcttcatccaaatttgatgatagcctgaataacaatc

SEQ ID NO: 5597 - DNA, 1091 bp, Zea mays
  Zm_smallRNAprecursor_1086
agtttgataagttttaaatttagttaaattaacgtgcctgtgtcacgcgcttcggcccgcgacgatttaattttaaattcaaatttattagtgtgcgacgattcattttaatttcagattatttaatggtgttgcattgagcatttagtcgcgtgacgttttgttttaaattcagttgaagtgacgtatgccatcttgcgacgctttacattattttcatatttaaagtgtttcgtggcgcgctttatcgcgcgacgattcgtttaatttcagtttagtctaagtgttgtgtcgcgtgtttcgccgtgcgacgactcattttatttttagcttagttcatgcgtactgccgtgcgccttgtcgtgcggcaactcgtcccaattttcggtttagttcgcgtgtgccgtcgtgcgtttcgctgcgcgacaatctttttaaatttaccttgagttgtttacattaattaagggttttttaaattggtgctcagtttggtggtgtgctcacctatacccttagtcgtgttttttgctcagttgttcccttccagtgctatagaacagaggggcacagctgagcaaaaaatacgactaagggtataggtgagcacaccaccaaaactgagggcaccaatttaaaaacccataattaaacgcgtagcgtaactttattttatgcatagcgtgattgtcaaattaatatggttatgtttagacaagtattttaatccttagttgcctaacgtaattgcccttcgaccgtagcctcgacctttgttttctctttctcgcttagtcataggtgcgagttctgcgccaagcctttgcttatttgttatattctactatgtggtgtattgttcattttttattaaaatcttggaatgtatgtttggactcatatagataacgatcagttggcggagtccgaaggagttgtaggtgaagaccctgagcagcagctggttggtgaaggcaagtgtcccttgacccatctatgtactacgaattttataattcactccctgcatttacacaatttatatctaaggattgactagctttgtttatcatgtccttgtttacctatgt

SEQ ID NO: 5598 - DNA, 1058 bp, Zea mays
  Zm_smallRNAprecursor_1087
taataattaccctcagaaattaataatttaaattatatagacacctctacataacattatcacgggtgacaaatcatataaaatgactttatttccgagggtataataattaccctcggaaatttaaaattaaaattatctaagcaccactaattaaatttaggccctcggatataataagataaacattatttaacatactaactattaaataacaacattggaaactacaaaacaatattaatatatacaaaatattaataatacattaaatacattaatattaaataccttacaccggcggccgatggcgggcgggcggggcgggcgtcgacggcgggctgggcgggcgtcgtcggcgggcggggcggtgggcgtcgacggtgggcgggcgtcgacggcggcggcagcgagcgggcagagacagagagaagagagaagcgagcgcgcgcgcgtgaaaaatgaaccgcgcaccgggccgggaccgtgttaaaaaagcttatctccgacggctagttacgagaccgtcggatataaccttatgtccgacggcctcgtaactagccgtcggagataagtctatatttccgagagcccatgttgaccgtcagacataagataatatccgacggcctcgtaggaagccgtcggagatagagtgaccgtcggatattcatcagtttactgtagtgatgaaattagatacacttttaaccgttactacttgaagacacgttttaatgtgtattagcaatttatccttaaccatgtagagatgtttttggtgtaaaatttaaaacatgtaacctaccgaggtatattagtcaccatagttgttgtgtggtatatcttccactagagctaacgtggcatatattataggaggctcaaacaatgttaacattaattgtgtttagctagtgtatgttgtataggtctaataaaggcataataataataataataataataataataataataataataataataataataataataataataaatcagaaaaaatggtcatgcccatttgaaatgggaaaaagtat

SEQ ID NO: 5599 - DNA, 1171 bp, Zea mays
  Zm_smallRNAprecursor_1088
ttactgaaatctggccaacattgaaaatctgacaaggctgtgctcataaccatgtttgagtgatcaaatctatttggattggcttgaaattcagtttacttgctctatacatatgatagcaaagtctgtgcaaatttcataatcattggataagtgaaacttcttgattaagtcaatcttgtcagcacaaacacagcagttttcaacatgtacctactgtgggagatattatggctggcagcacatatgaagtcaaatgagtctcaactttttacagctgttagcagacttattaaagcacatctccaccaattgtcgtggtcataggatctgtacatcaaaatttatgaatgtttctttggagtatacagaatctgtcataagtgacaagtatttgaaatattgaaagtcactttgattggaaggctctcatataggataaatcacataagttgtctgagagaccatagtttggtttttaattgatctataatcatggaaagtgaaggggtacaaggatatttgttgagaaatattttggcacttatcttggtactccaagttgaagatcaagaccaaagatgatcaaagttgaggttatcatataaccgattgcataatcttctttcttacatatggcaatccaaatgcttaaattggttgtaagtatttcttggcacatttcaatttgattactctattattgccatgatctagacataaaagagaaaaaaactcgtgttcgtgaatgaataaggtgctaagtaagaaattcaaattcttaaagcacttatctaaaggggaattctctatatgactagagttgtgaaactaactttttttttacctaagtgatctatgtagtttcacagcatgagaatgagtttctcaaatggactatgcaattaaacgtataaagaagaacaatccaaatctatgtgatgtattctctcttgtacatttggatttatttcttctacattaaatactcaccatgatatgatttaaaattagcctttgaacttaatcaatttatcatgcatggttaatttgttaaaattaagcattgaagattaagagaattttagttcatataataaggtttccttgtttaagtatctgcctactttatatattcaaagtgttataaaagagaatttgatgcttgtat

SEQ ID NO: 5600 - DNA, 1139 bp, Zea mays
  Zm_smallRNAprecursor_1089
tacggaatcaatggattagaagcatggtgatttgaccggtgcaggtggaggattactccagcgagatgccggagatggaggccgtgtcccgggaggagtacctggcctccctccgccgcaggagcagcggcttctccaggggcgtctccaagtacagaggcgtcgccaggtgcttatactgcttatattattctactgtgttactatgtgctaatcttgattccagcacctacatctcgattgatcacctagtagcaaatggtaggatctccacattcatgtagggtgtataaatctgctagctcaatcagcacatgcactgaccatggaatgatggagcacacctggcatgtcaagaggctgtgcagctccaggggcaaaaaaatggatgtctcactggattgtgaaatggggtccaggctgcaggcacactaactcacaccagcgttctctagttggcaacgactgttatgcaagcagtccttttgtgcaagcgtgcaagcaaaccatctgatctattagattacgatccaaccatagatacaactatggtttgttaggggtttttataaagattattgagctggtggtggaaaggtttaagtgttaaatgtgacatacggttggatcaccatctaatggatcagatggtttgcttgcacgcttgtacagaagtactgcttgcatagcagtcgttgcctctctagttgcattgggtgacagacacggcacaagatgaggtccacctgtaacctataacgtcagaggcacacgcatcacctgggcgggcctgtggcacgtcacacacgccagccatgtcatgcatgactcatcacccacctggcattgttcttctgtgcacctagaaaatgccagctctgaactgcatgcatcacagactagtactaaaattgtttgtgaaaccagtgagtgcatcattcttcaaggatcatgatgcacgccttcaataagctaaaagaatgaattttttttttcatgttcttgttgctttgatggtctaggcatcaccacaacgggaggtgggaggcacggattgggcgagtctttgggaacaagtacctctacttgggaacatttggtatggatggacaggcagcgtactacatacattccgcaat

SEQ ID NO: 5601 - DNA, 1140 bp, Zea mays
  Zm_smallRNAprecursor_1090
tacggaatcaatggattagaagcatggtgatttgaccggtgcaggtggaggattactccagcgagatgccggagatggaggccgtgtcccgggaggagtacctggcctccctccgccgcaggagcagcggcttctccaggggcgtctccaagtacagaggcgtcgccaggtgcttatactgcttatattattctactgtgttactatgtgctaatcttgattccagcacctacatctcgattgatcacctagtagcaaatggtaggatctccacattcatgtagggtgtataaatctgctagctcaatcagcacatgcactgaccatggaatgatggagcacacctggcatgtcaagaggctgtgcagctccaggggcaaaaaaatggatgtctcactggattgtgaaatggggtccaggctgcaggcacactaactcacaccagcgttctctagttggcaacgactgttatgcaagcagtccttttgtgcaagcgtgcaagcaaaccatctgatctattagattacgatccaaccatagatacaactatggtttgttaggggtttttataaagattattgagctggtggtggaaaggtttaagtgttaaatgtgacatacggttggatcaccatctaatggatcagatggtttgcttgcacgcttgtacagaagtactgcttgcatagcagtcgttgcctctctagttgcattgggtgacagacacggcacaagatgaggtccacctgtaacctataacgtcagaggcacacgcatcacctgggcgggcctgtggcacgtcacacacgccagccatgtcatgcatgactcatcacccacctggcattgttcttctgtgcacctagaaaatgccagctctgaactgcatgcatcacagactagtactaaaattgtttgtgaaaccagtgagtgcatcattcttcaaggatcatgatgcacgccttcaataagctaaaagaatgaattttttttttcatgttcttgttgctttgatggtctaggcatcaccacaacgggaggtgggaggcacggattgggcgagtctttgggaacaagtacctctacttgggaacatttggtatggatggacaggcagcgtactacatacattccgcaatg

SEQ ID NO: 5602 - DNA, 1132 bp, Zea mays
  Zm_smallRNAprecursor_1091
tcacactctccaaactactcgcgtcaacaccagctacgcccctcagccccggcagatcccggtctacccagtggtagtcgaggaagctccagcgaatctccctcccgtccgagtggagaatgtaatcaacctggaggacagctcggaggagcagctgccgacccccaccccgttggccgagtccctggccttcgcagctgggtcatcgacgtcagcatcgtcggcaccagccttccaagcacctgcacctggaggcaacgaccccgacgactccggagacggcgatgacgaggacgacgacgacgaagacgatggagaagacgaacacatcaacgaggaagctgactacgcccaacaggaccacttcatggggattggtccagttgtcgaacattatacatcaatgttcgagacaggacacttccccaacctgctgcaggcagtgctgcacgagctaggagcctacgcccgccccctgtacgagacgaggcgagtgagcgagcctccccgggcttgctactacatcactcgcatccacgtcagggtaatggatgcaggtgacaggggattcaggactctgtctgctcacgagtccctgataccgctgtccacctacgctgcctcggtcagcgatgctgcccgtcggaccctgtggtcgctcagccacacctaccggcagcagctgcagaacacgaggttcaggcatcttcctcagcgccgacgtggagaaagccagaccaacattgtcccaggtgagcctggtgaggaccgcctcaacaccctagctggtgtagtggccggtctcaacaccgacctggacagtgccactctggacctctacagtgtgcacttggagctggagaatgcccatgccaggattgcagccctggaagcccaactgcaaggactggatccgccagaagctcaggtccccaccgtggcgttgtctcctccccgcaagaggctgcgctatggagagcccggatcagtcactaggctgctttaggagttttgagtcatgatgtaataagttatacttcacgttagacgatgatactctctttatgttatcatattaataaatatcaaccatgtgatggtgattgattgaaatgtttgatttggatctttg

SEQ ID NO: 5603 - DNA, 1077 bp, Zea mays
  Zm_smallRNAprecursor_1092
tcaagcacatgtgccctatgaaatgacaagcctaaagcctccaacaggtcacaggaacataatatctcacaagaacgcacacgagcacaagtgttttggtggctggaatgacttagccttttctggttttctcttctaatatagccaatgtgagctacaaatcaggctgtgatagcccctaaaccctaaagcccctaataaacgcaaaatattacccaactaatcagcctataaatgctatgaacctagacacaggattatttctaacatgaaatgccccgttttctgccaacttaattatttttactctgatttttttgtacaccgtaggttcgtctatgtggccaggccacatgccccaagaacagaaaaggttgtgagcataggatttcaacctgggtttgatccatacaaggtaaatactcgcacttctttagattgctatttattttcattgttgaaacaactaagggggtgtttggtttctagggactaatttttagtccctctattttattccattttagtccctaaattgccaaatacggaaactaaaatagagttttagtttccgtatttggcaatttagagactaaaatggaataaaatggagggactaaaaattattcactagaaaccaaacaccccctaagctattctatagttgtctgggctttcctttagcttgacaatggtccccttttgtattgtttatggaatcacagattgtaagtgcatctcaagctggagacatccagtttcttgatgttagaagggcagcagaaccctacctgactattgaggcacacaggggttcacttacagcattagtggttcatcgttatgccccagttgttgctagtggctcagccaagcaaatgattaaagtgtttagtcttggtggggagcagttgacgataattgggtacctgccatcttttatgggccaaagaataggcagtgtaaattgcctttcttttcacccatacaagtcactcctggctgctggtgctggtgacaatgctctggtctctatctatgctgaggaaaattacaagtaagatgaggccttatatc

SEQ ID NO: 5604 - DNA, 1070 bp, Zea mays
  Zm_smallRNAprecursor_1093
ctccatcacccctatgctttagaccccgctagctagatctgacagggagtagatttgccaaaacaagattcaaaatcgaactactctataaatctctatctttactatctattaagaacttaatgtgggcggcttcaccctcctcacgtccaatgcacgaaaaaaatagtgcagaacaagcactcaaacccacacccttctgctctagaaatttggagctaaccacgagaccacacatactttagtatttacaaataaacaaaaattatatttatagcctaggcgtcgctccccacgctcctccacctcatggcaacgtacgagcacatacctagtattataaataattagagaccaaattattttttactcttaacagctatttagtaactcgctaaatataagtttagaaacctttattttagagaaccattggagatctaaggaatcgttagggcatagtttttagggccaattccctgtatgccactggaaaatatactcattccttgtatgccactggccccacatgtcatagacaccaaaaaatatacctatatgccactcagtggcacacaagggatgagtataaaatctgatggcataccaggaattttctctagtttttagttaataacaacctaaattaatttttggacgtttttagggagatgctctcaaggccacaggatgacaggaccgagtctgccgactagctattagggttttgtttgcaaaccccaattcgattcccaaccacatcagccgccgccgtcccgtcaccaccaccaaccttggtagcagccgccgtccggtcatcaccaccaccttggtagccgccgccgaagcgcgccgcgggcgcgggcgctcgcgatggctaaccgcacggaccccctcgcgaagagcatccatgggacgaacccacaaaacctggtggagaagatcgtgcgctccaagatctatcagagcacctactggaaggagcaatgcttcggcctcaccgcagagacgctagtcgacaaggccatggagctcgaccacaccggcggaacctacggcggcaaccgcaa

SEQ ID NO: 5605 - DNA, 1126 bp, Zea mays
  Zm_smallRNAprecursor_1094
agtacccatagggataaacaagctaaaattgcgaggacgaagtggtgaaaactcaaaggggagacatccaaagtttttagggaaagagttttgtggagggcgcttggattgtggagggcgcttggattgaagaagatgcaaacaacatgtgggtgaagatggcaacttgtgttaggaaggcggagtcagaggtgtttggagtgaccaaagggagtagcggtgaacctaaggatacttggtggtggaccgaggatgttcaaaaggcaataaaggagaagaaagaatgttacaggagcttgttccatgacaggagcgcggtcaacatagagaggtataaggtggcaaagaagactgcaaagcgagctgtgagtgaggcaaagggtcgagcctatgacgatctttatcgaagactaagtacaaaggaaggggagaaggatgtctataagatagctaggattcgggaaagtaagacgagggacctcaaccaagttaaatgtattaaggatgagatggatcaactcttggtgaaaggacaagacatcaaacagaggtgacagaggtattttgacaatcttttcaacagtgagaatgagactatggacacccaattggatgactcctttgatgatttaaatagatgctttgtatgcaggatccaagaatcagaggtcaaagaagctttaaagaggatgaaagggggcaaggcaatggacccagatggtattccaatagaggtgaaaatgccttggggatattgctaccgtttggctaaccaagttgttcaaccatattttttcaatcaaacaagatgcccgatgagtggaggaatacattagtaccaatcttcaagaacaagggagatattcaaagctgtacgaactatcgagggattaagctcatgagccacactatgaagctatgagagagagttattgagcatcgcctgagaggaatgatgcatatcaccatgaatcaatttggattcatgcctgtaaggtcaaccatggaagtagttttcttaataaggcaggtcatggagcgatataaggagcagaaggacttgcacatggtttttatcgacttggaaaaggtctatgataaaatacctaggaatctcatgtggtgg

SEQ ID NO: 5606 - DNA, 1128 bp, Zea mays
  Zm_smallRNAprecursor_1095
catcattaggactgttgaagatagctttcggatcacaatcacccagacctgtactcgcccggcgcgtggcgcgacaggactgtgtacgtctgtactagtgccctgttgtactgctggtggtgcggggctgggcttgcagcaggaggagaagtgaagccagaaaggagggagaaagccaggtactgcgcgcagccgcagtacaagctgtactcgcctggcgcgtgggcgtggctgcggtaccgcgcgcgtactacccgccacccatctctctacttggcacagccgcacagcgcgcccatcccatcccatcccatcagatccgcccgcccttcgccaacaggatgggagtagatacgatacgatacgagctcatttgtcgctgcttccttcatttcatctcttcttctccgctgctaggctcgtcctggccctgtcctagccggctagcccatgcctggaagatgatcggcgacggcaacaagcgcgatgcaaggcagttccggcgggggcgaactgagaacacatgagaataatgagatgagattgctcgcctcgcggtacggttcgtgctggcctggaccaccgtcgtcgccgttcatcttgtacgcataataatgctgcatgtgttctcaggtcgcccccgcagggccttccttgctgctgttccgcagggtggcggtctgggtggccgcccgtcgtccaggggagtatcgagacacgtacgcacgaattcaccaccacgcgatccagcatgttttgctgctgcagtgctcttcgtcacggttatatatatatatatatgtgatcgaactgccatgcatggtaagaaatcactgcgcgcttgctattaaaaaatatatctgtgtgttagcgataactttattaagctgtactcctctcaattccatattgcaagctattttagcttttcttacgcacatgcatagtttttgttagacgtctagatttgtatacattgtgtctatgggtattttttggttctcgatctactttcctactacaacttacttaaggttagtcagccaaattaaagaactaatcttattgtacagaaaaatagataaattatgtcaagttatcaaacaaagcttaaatacatgcatagtt

SEQ ID NO: 5607 - DNA, 1118 bp, Zea mays
  Zm_smallRNAprecursor_1096
ttaggactgttgaagatagctttcggatcacaatcacccagacctgtactcgcccggcgcgtggcgcgacaggactgtgtacgtctgtactagtgccctgttgtactgctggtggtgcggggctgggcttgcagcaggaggagaagtgaagccagaaaggagggagaaagccaggtactgcgcgcagccgcagtacaagctgtactcgcctggcgcgtgggcgtggctgcggtaccgcgcgcgtactacccgccacccatctctctacttggcacagccgcacagcgcgcccatcccatcccatcccatcagatccgcccgcccttcgccaacaggatgggagtagatacgatacgatacgagctcatttgtcgctgcttccttcatttcatctcttcttctccgctgctaggctcgtcctggccctgtcctagccggctagcccatgcctggaagatgatcggcgacggcaacaagcgcgatgcaaggcagttccggcgggggcgaactgagaacacatgagaataatgagatgagattgctcgcctcgcggtacggttcgtgctggcctggaccaccgtcgtcgccgttcatcttgtacgcataataatgctgcatgtgttctcaggtcgcccccgcagggccttccttgctgctgttccgcagggtggcggtctgggtggccgcccgtcgtccaggggagtatcgagacacgtacgcacgaattcaccaccacgcgatccagcatgttttgctgctgcagtgctcttcgtcacggttatatatatatatatatgtgatcgaactgccatgcatggtaagaaatcactgcgcgcttgctattaaaaaatatatctgtgtgttagcgataactttattaagctgtactcctctcaattccatattgcaagctattttagcttttcttacgcacatgcatagtttttgttagacgtctagatttgtatacattgtgtctatgggtattttttggttctcgatctactttcctactacaacttacttaaggttagtcagccaaattaaagaactaatcttattgtacagaaaaatagataaattatgtcaagttatcaaacaaagcttaaatacatgca

SEQ ID NO: 5608 - DNA, 1076 bp, Zea mays
  Zm_smallRNAprecursor_1097
ggccctcggatataataagataaacattatttaacatactaataatttaataaaaacagtgaaaactacaaaataaaaataaaaatacttacttagcagtgggcagggcagtggcggccggcagcgggtgtcgacggggggcgggcggcgggtgtggacggcgggcgagcgaggcggcggcggcgacgggcggtgacggggcggcggcggcggcgccgggcggagacggcgccgggcggtgacggctctgggcggtgacggggcgggcggcgggtgggcggggcggcggcggcggcggcgaccggcggtgacagcacggcggcggcggctacgggcagagagaaggagaggagagagcgagcgcgcatgaaaatgaaccgcgcgccgggcttgccgtgttaaaaaacattagctccgacggctacgtacgaggccgtcggacataagcttatgtccgacggctacgtacgaggccgtcggacataagcttatgtccgacggctgtcagggtagccgtcggagataaggcggtatttccgagagtccttggtggccgtcggacataacgctatgtccgacggcatcgtagacagccgtcggagataaattgaccgtcggatttttgttagtttactgtagtgagttctacacttgtcctatcgtcgtgtatatgaggtagtagacctgactaactcaaatcttaggaatcatgaattagataatttgttcttacttcaacaagagaagcacgaggtctctcttttcattgatgttcccaattcactagtactactaagcaaagagataagtgtcgaatgcacgaagcaagcatgagtcacgttggctttattacctaattattaagtcctggtagtaccaacggtggactggagccttgggtagtgtggtgctactgctcgtcataatggtcctaaaccgttgtttggaactgtgttacgagcttcagtttggtctcatttcacgtatggatcggtttggtttagtgcatagagttgaagtttccggtggtttaccttggactgaagttgagtggcttggtgagcattaacaggctt

SEQ ID NO: 5609 - DNA, 1127 bp, Zea mays
  Zm_smallRNAprecursor_1098
catggtttctcttggctatatggttcatctgggggggagatcgagcttcaagaaattgtgaatggtcttatcaatacacaaatgtataactccccaggaatttcaattgcgcttatattcatcactgtaggacttgggttcaagctttccccagccccttttcatcaatggactcctgacgtctacgaaggagtgtggttcgttcgacaaattcctacctctatctgaggtgtttgggttttgcaaaactccatagacatgcagaagagaaatgctatccccactcctaccaagacagaacttttaccaaaagtttattgtgatctttttgttcaaataacaattaaggtgaagcagggtcaggaacaacgaatctctttatgataaacagatccattttgcaagctcgttattacgggtagttcctacaaagaatcggactaatgacgtatacaatgcttgaattatcgatgtaaatgctacatagtgggttctcatccttcagagactacgagtgtaataggagcatccgttgacaaaaggatcaccctaagatgatcatctcatggctattgggaacgaatcaaatcagatggttctatttctcaacctttctgacttgctcctacggaaccaaggtcgaaaggattgaaaaagtcagtcattcacaaccactgatgaaggattcctcgaaaagttaaggattagtagttctttttcgaaatccatttcgaaaaagaatggattcggtcttatacatacgcgaggaaggtaatcaaaaaagaaagaagacgagttcttctttcttttatcacttaggagccgtgcgagatgaaagtctcatgcacggttttgcatgagagaaagaagcgaggaatcctcttttcgactctgactcccccactccagtcgttgcttttctttctgttacttcgaaagtagctgcttcagctttagccacgcgaattctcgatattcctttttatttctcatcaaacgaatggcatcttcttctggaaatcctagctattcttagcatgatattggggaatctccttgctattactcaaacaagcatgaaacgtatgcttgcatattcgtccatagggcaaatcggatatgtaatt

SEQ ID NO: 5610 - DNA, 1070 bp, Zea mays
  Zm_smallRNAprecursor_1099
aaatcagatggttctatttctcaacctttctgacttgctcctacggaaccaaggtcgaaaggattgaaaaagtcagtcattcacaaccactgatgaaggattcctcgaaaagttaaggattagtagttctttttcgaaatccatttcgaaaaagaatggattcggtcttatacatacgcgaggaaggtaatcaaaaaagaaagaagacgagttcttctttcttttatcacttaggagccgtgcgagatgaaagtctcatgcacggttttgcatgagagaaagaagcgaggaatcctcttttcgactctgactcccccactccagtcgttgcttttctttctgttacttcgaaagtagctgcttcagctttagccacgcgaattctcgatattcctttttatttctcatcaaacgaatggcatcttcttctggaaatcctagctattcttagcatgatattggggaatctccttgctattactcaaacaagcatgaaacgtatgcttgcatattcgtccatagggcaaatcggatatgtaattattggaataattgttggagactcaaatgatggatatgcaagcatgataacttatatgttgttctatatctccatgaatctaggaacttttgcttgcattgtattatttggtctacgtaccggaactgataacattcgagattatgcaggattatacacgaaagatccttttttggatctctctttagccctatgtctcttatccctaggaggccttcctccactagcaggtttcttcggaaaactctatctattctggtgtggatggcaagcaggcctatatttcttggtttcaataggactccttacgagcgttctttctatctactattatctaaaaataatcaagttattaatgactggacgaaaccaagaaataaccccttatgtgcgaaattatagaagatcccctttaagatcaaacaattccatcgaattgagtatgactgtatgtgtgatagcatctactataccaggaatatcaatgaaccccattcttgcaattgctcaggataccctcttttagctg

SEQ ID NO: 5611 - DNA, 1068 bp, Zea mays
  Zm_smallRNAprecursor_1100
agatgcggaggcggcagcagcagcaccagcaccaggaggcctacgacgaggatgatgatgtgccaggcggtgggcagagggtgcagtgcgcccaacagtaggcagtttgcggcaaatttgttgtttcgctttgagcgactattgagtttacccgcttgtattggtctgatgatacttcgattacaagagtgcagtattactaaggattagttcctatataatggcacattgacactaacattgttatgcattttaatgcacccgtagcaacgcacgggcatagacctagtctatatttttaagatgttatatatctaaggacatcgattaccatgtaatcagactctgcatgcatgctttaacgtacccaacggtggattgataatttctaataactgtgtattagaaattactaatccagcgttgaatggacgtaaaacacatgcttgcccgtagagtctagtctgtgatatatctaaggggttgtttggtttggtgcctaagacgccacaatgtgccaaacttttctgcctaaccttagttcttcaattcgagcgcctaaggttaggcagattgtggcgtcttaggtaggaaaccaaacatgccctaagtgcatatattgttgtggtgtggctgaagtaaagtttattcccgtagagacggtaatatatggtgaatttgggttaactaaaacacatggtcagagatatagcttaacggtctcacggttataaacttttttaaaaccctttttaattttgttttaatcaactcgtgatccttccacctccccgacccacaagccctcgtaattaaaaaaaaacatcatgttttgctagatcaagccacggttctatccgaaataaaagtctaaaaataaatgcaatgctagagtttaaaccgtcatcctcccacttctcatatgcagattctaaccactataatctacaaccatttatgtttaataatgaattaaatattgtaaatattctaaatagaaaccgtacgtaaaaccattcatttaaaaatttcaattagagttgatttggtgacccgggatcccgagag

SEQ ID NO: 5612 - DNA, 1206 bp, Zea mays
  Zm_smallRNAprecursor_1101
cattggctcacgtccgcggtcgctatgtcgtccggattccaagatgctcgagttgatttttttaattttatgctttacaatgcaacttcctaatctccttccccactccggcagtgtgaatcgccttcatttgtctccgcgcgaactcaaccctaatcggcgccgccgttgacagtgtcgtcgagctggccgctgctgtcaatcctccgccaccgcgtcctataggtatttcacatgcccaccaacggtcttcattgatcttactgttcttgtgcgattatggttcagttatttatcatagagcctttaggtttgataaaggttcacggacctgttcttttggactcattgtatgctcaaattgtgtgggtgaagatatatgcaatgatgtgaattatacatacctttatgaagtaggggttgatattttgatgtggaaacaagtgtggtggggaggttgaattatgtaccgtgatagaccggacaggcccttgggcttccttgtatgggtaactttctgcattgataattccaccgtttctcataatgtagtctagggcctcggagcatgatccatgtttgcatccaaagttcctgaggttgtttccatctatcaggtgttgctcagaaagttttattaactccttgtttcgtatgaagtgagctgcctctatgagaccggtgacaccaaatgcccagcacgaacctaaagaacaaattacaagcttaggtctaatagtgtgcgctcagcaactatgcatataagttacagtagcgaattgctaataggtagtgacattgcatgcttaccacagtctccctgatcttgtattggtgtcacagctccataggtactccaattgacaaatgtcgggagcatgtcaggacctggtggtccaaatgggacatctgtatcaaaaggagcaccgccgccacgaaaaggggcgctaggtcctataagatgataacatagatatctttagaataaagtaacaaaagtatggacaaattgagtcccagcctcagaatgaagcagtgacaaacctagcctagacttataatggggaggacactgataagacgattagttgcaattagtagtttataaccgatcggcaccaaggaagcaataagcttgactaaaccatgactacataagaatgaccagacatattccattcacttttgttttttcatatttgaagg

SEQ ID NO: 5613 - DNA, 1197 bp, Zea mays
  Zm_smallRNAprecursor_1102
agatgatgatgaagctgcagatgatttggaggaactcccatgcccagatttccttactcaagccgacatattggaaaaatattttggaattgagtatgatagcgaccagtcaaggggttgttgatgtttagtcctaaacaacacgatatgagtatcgtaggtttcactcttagagataatgtattttgtatgaacctcttagagagtgtcaagtcaatgaactatcttcgagtactattgggaagtgtatctctttgatgtattttttttctagtgatatcgatggtgccgagtagcaccaaatttggacttgtgtccatatctatagatgctagtagttgagcactagctcctacaatcttaagtgtgtagaccccaagaagagattaagtcctgtagtctaccacctcccgttatttgtgggcttcaccgatggctggaaacatttggtgatagcaaacgaccttcgggttgaagacgtctgcgagcttgttaagaggccagacgatgttgagccggtgtactatgtccggatgtgtggtcacaaaattaaaatctgccccggctgcatgtgtgtgcttctcttctcttaggtgggtcgctaagtgatcttagtagccgacataagagaagagaagcgcacagatgaagccggggcggctttaaattttgtgaccacacatccggacagagtacaccggctcaacatcgtctggcctcttaacaagctcgcagacgtccccagcccgaaggtcgtttgatgtcaccaaatgtttcccgccctcggtgaagcccacaaataacgagaggtggtagactatagggcataatctcttcttggggtccttcagcattataacatcacagccatgccttctctgtctaactgcattggaaagtgccttttctccaagttcccttattgatggaaccagtatatcacactaacagtatatccctttatcgatggaaccagcttgaatggcagacaacgagcagcctagtatggatgtggtctgcaccggtgcgtctaacaaagttgatgaagacgcgaccaaacttgaatggcagacaacgagcagctccagtgaagggagcggggaggatagtactagtgacgacaatccttgtactcctatacctccaaggaagaaaaaaacatcagatgagcttgatgccgactatattcccaacgat

SEQ ID NO: 5614 - DNA, 1198 bp, Zea mays
  Zm_smallRNAprecursor_1103
agatgatgatgaagctgcagatgatttggaggaactcccatgcccagatttccttactcaagccgacatattggaaaaatattttggaattgagtatgatagcgaccagtcaaggggttgttgatgtttagtcctaaacaacacgatatgagtatcgtaggtttcactcttagagataatgtattttgtatgaacctcttagagagtgtcaagtcaatgaactatcttcgagtactattgggaagtgtatctctttgatgtattttttttctagtgatatcgatggtgccgagtagcaccaaatttggacttgtgtccatatctatagatgctagtagttgagcactagctcctacaatcttaagtgtgtagaccccaagaagagattaagtcctgtagtctaccacctcccgttatttgtgggcttcaccgatggctggaaacatttggtgatagcaaacgaccttcgggttgaagacgtctgcgagcttgttaagaggccagacgatgttgagccggtgtactatgtccggatgtgtggtcacaaaattaaaatctgccccggctgcatgtgtgtgcttctcttctcttaggtgggtcgctaagtgatcttagtagccgacataagagaagagaagcgcacagatgaagccggggcggctttaaattttgtgaccacacatccggacagagtacaccggctcaacatcgtctggcctcttaacaagctcgcagacgtccccagcccgaaggtcgtttgatgtcaccaaatgtttcccgccctcggtgaagcccacaaataacgagaggtggtagactatagggcataatctcttcttggggtccttcagcattataacatcacagccatgccttctctgtctaactgcattggaaagtgccttttctccaagttcccttattgatggaaccagtatatcacactaacagtatatccctttatcgatggaaccagcttgaatggcagacaacgagcagcctagtatggatgtggtctgcaccggtgcgtctaacaaagttgatgaagacgcgaccaaacttgaatggcagacaacgagcagctccagtgaagggagcggggaggatagtactagtgacgacaatccttgtactcctatacctccaaggaagaaaaaaacatcagatgagcttgatgccgactatattcccaacgatg

SEQ ID NO: 5615 - DNA, 1196 bp, Zea mays
  Zm_smallRNAprecursor_1104
gatgatgatgaagctgcagatgatttggaggaactcccatgcccagatttccttactcaagccgacatattggaaaaatattttggaattgagtatgatagcgaccagtcaaggggttgttgatgtttagtcctaaacaacacgatatgagtatcgtaggtttcactcttagagataatgtattttgtatgaacctcttagagagtgtcaagtcaatgaactatcttcgagtactattgggaagtgtatctctttgatgtattttttttctagtgatatcgatggtgccgagtagcaccaaatttggacttgtgtccatatctatagatgctagtagttgagcactagctcctacaatcttaagtgtgtagaccccaagaagagattaagtcctgtagtctaccacctcccgttatttgtgggcttcaccgatggctggaaacatttggtgatagcaaacgaccttcgggttgaagacgtctgcgagcttgttaagaggccagacgatgttgagccggtgtactatgtccggatgtgtggtcacaaaattaaaatctgccccggctgcatgtgtgtgcttctcttctcttaggtgggtcgctaagtgatcttagtagccgacataagagaagagaagcgcacagatgaagccggggcggctttaaattttgtgaccacacatccggacagagtacaccggctcaacatcgtctggcctcttaacaagctcgcagacgtccccagcccgaaggtcgtttgatgtcaccaaatgtttcccgccctcggtgaagcccacaaataacgagaggtggtagactatagggcataatctcttcttggggtccttcagcattataacatcacagccatgccttctctgtctaactgcattggaaagtgccttttctccaagttcccttattgatggaaccagtatatcacactaacagtatatccctttatcgatggaaccagcttgaatggcagacaacgagcagcctagtatggatgtggtctgcaccggtgcgtctaacaaagttgatgaagacgcgaccaaacttgaatggcagacaacgagcagctccagtgaagggagcggggaggatagtactagtgacgacaatccttgtactcctatacctccaaggaagaaaaaaacatcagatgagcttgatgccgactatattcccaacgat

SEQ ID NO: 5616 - DNA, 1196 bp, Zea mays; identical to SEQ ID NO: 5615
  Zm_smallRNAprecursor_1105

SEQ ID NO: 5617 - DNA, 1197 bp, Zea mays
  Zm_smallRNAprecursor_1106
gatgatgatgaagctgcagatgatttggaggaactcccatgcccagatttccttactcaagccgacatattggaaaaatattttggaattgagtatgatagcgaccagtcaaggggttgttgatgtttagtcctaaacaacacgatatgagtatcgtaggtttcactcttagagataatgtattttgtatgaacctcttagagagtgtcaagtcaatgaactatcttcgagtactattgggaagtgtatctctttgatgtattttttttctagtgatatcgatggtgccgagtagcaccaaatttggacttgtgtccatatctatagatgctagtagttgagcactagctcctacaatcttaagtgtgtagaccccaagaagagattaagtcctgtagtctaccacctcccgttatttgtgggcttcaccgatggctggaaacatttggtgatagcaaacgaccttcgggttgaagacgtctgcgagcttgttaagaggccagacgatgttgagccggtgtactatgtccggatgtgtggtcacaaaattaaaatctgccccggctgcatgtgtgtgcttctcttctcttaggtgggtcgctaagtgatcttagtagccgacataagagaagagaagcgcacagatgaagccggggcggctttaaattttgtgaccacacatccggacagagtacaccggctcaacatcgtctggcctcttaacaagctcgcagacgtccccagcccgaaggtcgtttgatgtcaccaaatgtttcccgccctcggtgaagcccacaaataacgagaggtggtagactatagggcataatctcttcttggggtccttcagcattataacatcacagccatgccttctctgtctaactgcattggaaagtgccttttctccaagttcccttattgatggaaccagtatatcacactaacagtatatccctttatcgatggaaccagcttgaatggcagacaacgagcagcctagtatggatgtggtctgcaccggtgcgtctaacaaagttgatgaagacgcgaccaaacttgaatggcagacaacgagcagctccagtgaagggagcggggaggatagtactagtgacgacaatccttgtactcctatacctccaaggaagaaaaaaacatcagatgagcttgatgccgactatattcccaacgatg

SEQ ID NO: 5618 - DNA, 1090 bp, Zea mays
  Zm_smallRNAprecursor_1107
ccataattgtatacattagaatgcaaatataatatgaaattatgtaaacatcaagtgaaaaataaccactggtgttagattttttgctaggccttaatagaccggtggtccggtgggtcggcttagggtatgtcgtggcccatccggaccacccattagatacgcttttgatgatcagtgaaattaaacaagcaattaatcagatgtacaaggattcagccctggccctaatggatttggtgcctctttctccaaaaagttctagaatcttattaaaggagatatgatcattgatgttcagtgacttttatgcagggaagttggatatctagtttctttttttggggttatcacattaattcctaagattaatatggatttcaaaattttcaccaaagttctgacaaataggttgtctctagtagctaaggaggctattgggggcagccagatagggtttttatgggttttttaagctggtgccctcagttttgatggtgtgctcacctatacccttagtcgtgtttttgctcagttttgcccttccagtgttatagaacagaagggcaaaacttagcaaaaaacacgactaagggtataggtgagcacaccatcaaaactgagggcaccagcttaaaaaaccattttattaaagacatgaatatcctagagggggtggtcatattacatgaaattattcatgagttgaagataaagaaaaaaggtctgataatgaaaattgattttgaaaaagcttacgacaaagtcaagtggaactttttggaggaagtaatgaaaacaaaaaattttccggataggtggattgatatggtgatgaggacatggagaggagcaactttttcaaaactttcatagatcttaggtagggtgaccctctttcgccaatgttattcaacttggtagtggatgccttaagtgtcatattagataaaggggtcgaaaagggtcacatctctggggtcttaggagaccttgttcctagtggcatttcccacgtccaatacgtagatgatacagtgatcatgatagatgggtctgataggtcaatcttaaacctaaaattaatcct

SEQ ID NO: 5619 - DNA, 1037 bp, Zea mays
  Zm_smallRNAprecursor_1108
tttccctgtccaggattaaatattctagcttctgctggacaaccccatatgtgaagtagttgagtgtgggttttctgcccgtccacaactcatatggagttctagccactgatttactaggaactctgttgagtatatgcatagcggtttttaaagcctccatccatagacccaatggcaggttagagtaacttagcatactccttaccatatccattagcgttctgttacacctttcggcaaccccattctgctgtgcttcgctaggtgttgaatactgagcaacaataccattttctcttagaaacctcgcgaaaggtcctgggacctggccacactcggtatggcgcccatagtaatccccccacgatctaatcggacaatctttatcttcaaatcgtgttgattttctacttcagccttgaactgtttaaacttgtctaaagcttctgatctttccttaattggataaatataaccgtagcgagagtagtcatctgtgaaggttatgaacgagttaaacccatctactgtcctaactggaaaaggaccacagatatctgtatgaataatttctaacactctcgtactatgcttagcatctttcttaatctgcttcacgaatttacccttaatgtaatctctacattgctctaagtctatgaagtctaggggatggagaatctgttccttaacgagactttctattctccccctcgaaatgtggcccaaacgatagtgccataatttcgacgaggtttctccatcactttgttttcttttcctgccactgctagctggatcgttttctggcgtatctaatacattaataacatcactttgcgaaagtaaataaagcatatctcgtcggatggcgagaccaacatctttattatcaaactgaataacacaatgtctatcaccaaaatggcaatgaatgtgctgatcatctaatctagaaaccgaaataaggttccttcgcaaggaaggtacataaagtacgtctctcaataacagtacaaaatcattaggtaatt

SEQ ID NO: 5620 - DNA, 1160 bp, Zea mays
  Zm_smallRNAprecursor_1109
aacttggtccttaccactctatagtagatactgcagaattcagggcactttctcttgtaatgacctgtcttcttgcaatagaggcaggtgtcagggggaactgagtaactgcctccttgtcttggctgattattattgctcgaggaagcctggttattctgtttaccttgcttcttgaactttttctttgagttcttgttctgtctggggatattgcctttgatgaggttgacagagtctccagtctgctttaacctctcttcctcctggacacactgtgccaagagttagtctatattccacttatcagtgacactagtgttgtactgtatgtgaaaagtctcaaactccttgggcagagacttcattatcataaatactacaaattcctcatgtaaaggagaccagaggtacttgtttatcttagctacgatggatatcattttctgaatgaatggtctgacaccatttccattgtattttgcattgacaaattctgtcattagagagcaagcataagccttataagacccttgatgatgagaggctacactctcaaggtattccttggcagtcttgcactctggtatggaactcttaagaggctccttgatgctactcttaagaataatcatacatttatcatttgatctttctcacttgaccttgtcgatgctgtattgcatccacctgtggtcataattgggagtgcccactgtgggctctacaggtttatcaaacctcaatgtgtaacctatctcacccactgtggttatcatgtcaatatcctcccgccaagaatggtaattactaccatctagcggttttatctgtgcaatctggctaatcagcatggcggtatgagcacctttgcaaaattaaaatagaaaatatttaggatatctgaaataaatactgaatactgaatcatagaatatgcatgaattaaatattcaacgttggtcaaataataaccatgccatatctatgaaaatttctgatcacaaaaaaaatctaaaccatcgttggatgatctagaaaacataaacttgtagtaaaattgtggtaacaatatccaacgttggttaaaatattcaatcaccacaaaattttctgaattctatgcaatttaaacaataatcaatccacgttggtttcat

SEQ ID NO: 5621 - DNA, 1038 bp, Zea mays
  Zm_smallRNAprecursor_1110
atggtatcccaaaggctcctttttcgatttacttggctattctgactcagattatgtcggttgcaaagtagatcaaaaaagtactactgggacttgccaattccttgggcgatccttagtatcatggagttccaagaaacaaaattgtgttgcactttccactgcagaagctgagtacatagcagctggggcatgttgtgcacagttgttatggatgaagcaaacccttcgagactttggttgtgagtttaacaaaattccacttttgtgtgacaatgagagtgccataaaacttgcaaacaaccctgtgcaacactctagaactaaacatattgacatcagacaccatttcttgagagaccacgaagccaaaagagatatcgaattgtttcatgtgagcaccgaaaatcaactagccgatatcttcacaaaacccctcgatgagactaggttttgttttcttaggagtgaattaaatatcttggattctcgtaacttagcttgaaaacggtcacaaaaattgtttgattcactatttttgattgatagttttaaagctatgtgatgatctttcaaaaacttggtgaaaatgttaaaatttgaatgcattttagtgctaagctttcttttggggctcaactggcttgaccagctgaactttctagttcagctggaggaggccagctgaacttagcagctgaactacagctcagctgtttttaaccagtttttaccaggaccatcctggttaaaaccggttgaaccggcattgtggaccggttgaatcggtctctgactggcctgtccgcgcaagtctgtcacctgcaattttttcagtcgcgcaacacctttttgaccagtctcaggtctgtcacctgcctttttgtcgcgttgcacctttttctctgtcgcgcagcatttttttgtgtgtccggtcgcttcgccactgccttgccagcgcgccagtaaattttttctgaccggtcattcactctgctggggcgcgccttttttttgtttgtttgcgtgtcaggcgcg

SEQ ID NO: 5622 - DNA, 1171 bp, Zea mays
  Zm_smallRNAprecursor_1111
agatttttcttggacatttctgctctgcccgcgcactagccatgcatgcgtgtcaggggcgcccaattttttttcctgtccagtcacttccagcagctgcgcaaatttgaatttttttttctctgttgtttctggttctctgaccacactggtcagaaccagctgaactggcccttgggggcggttgaactggtcctgaggaccagctcagctgcctatatatacttgacttcccctcctcttctcccacttcattcactctcgccttggtcgcttcacaacctttagagcctctccttcacacacttcaaccgcttcacagtttcaccaccttttcaatcatggtgcgtcgtcgcaacccctctgtggttgagtttagcagtgactccgacgagattcaggaggaatctcccgtcccctctcctccgcctcgtcgctccctctctaagagaggacgtggctctggtcggatggctggcgagggctcttccatgccctcgcagccgactcgcgggagacgccaaaaggttggcgcctctcgtcctcgtcgtagcacgtcttcctcagggtatgctccctgccaagaggaggatggggctttcgacgacttcgtcgaccttccggcgcctgatgctctctacgtcaccggactgcacatgcatccggcgaacgtcagccgcggtccgcatgaatctcccgtcgacttcactcagaagggaatagaaacccttcagcgtctgaggtttaccaaccctactctcactcctcgtcatcctggtgtccaggaccctcggttctggaatcttttccaggctgacttctacaattctgtcattctttccaagaaacacccagtcgtccgacatagatttattgactgggagggttgtgagaatatgggagatgctgacatgtcgtcagctctcgtaaacttagagagaaaggggttacgtaacattatgaccatggaatacccctggaacgatgaggtggtagctcagttctatgccaccctctggataaagaaagtagacgaggaagccgatgggtatgattacccagtcatgtatttcttcatccagggtaactggcacaaagtcagttatcgtcgttttgcccatattctgggcttctctgatgcagacattcagggcagcaacatgcgagtgca

SEQ ID NO: 5623 - DNA, 1058 bp, Zea mays
  Zm_smallRNAprecursor_1112
aaacccttcagcgtctgaggtttaccaaccctactctcactcctcgtcatcctggtgtccaggaccctcggttctggaatcttttccaggctgacttctacaattctgtcattctttccaagaaacacccagtcgtccgacatagatttattgactgggagggttgtgagaatatgggagatgctgacatgtcgtcagctctcgtaaacttagagagaaaggggttacgtaacattatgaccatggaatacccctggaacgatgaggtggtagctcagttctatgccaccctctggataaagaaagtagacgaggaagccgatgggtatgattacccagtcatgtatttcttcatccagggtaactggcacaaagtcagttatcgtcgttttgcccatattctgggcttctctgatgcagacattcagggcagcaacatgcgagtgcatggcattcggctgcccatgcgggaagagacggaattcattcatgtctctactgagcgggagttctggacaaccgctaacatgcataggtactacaggtaccttaattccttgtcccggatgaccgttctcccaaagggcggtaatcaaatgaacgtccttggggagagtcgagtcctcctcctcctccttgctccaaacagtctcgcccgcatcaatgtgtttgacatgatctgggaggagatcgtccgtgcttcctggtctcctcacagagggtgtcttcatgcaccctttatcatgaagatgatcgaagtggttacccagacccacttcgaaaaactcgtcaaacactcccgctacgtaccctactgggttgattcctccaacccagctgctcgtacgaagcgggttccctcacggtctggaggccctgcctcctcctctgagccacctcgccagcctccccaccatccttcctcctctccccccgctgctgcctcgcgtccctctcctggccgcggctctcccatgccacgtgctcgtggtcgtggtcgtggtcgtggccgcgggatgggtgctcgcttggtccatgggcttgcggcatttttctcc

SEQ ID NO: 5624 - DNA, 1141 bp, Zea mays
  Zm_smallRNAprecursor_1113
aaacccttcagcgtctgaggtttaccaaccctactctcactcctcgtcatcctggtgtccaggaccctcggttctggaatcttttccaggctgacttctacaattctgtcattctttccaagaaacacccagtcgtccgacatagatttattgactgggagggttgtgagaatatgggagatgctgacatgtcgtcagctctcgtaaacttagagagaaaggggttacgtaacattatgaccatggaatacccctggaacgatgaggtggtagctcagttctatgccaccctctggataaagaaagtagacgaggaagccgatgggtatgattacccagtcatgtatttcttcatccagggtaactggcacaaagtcagttatcgtcgttttgcccatattctgggcttctctgatgcagacattcagggcagcaacatgcgagtgcatggcattcggctgcccatgcgggaagagacggaattcattcatgtctctactgagcgggagttctggacaaccgctaacatgcataggtactacaggtaccttaattccttgtcccggatgaccgttctcccaaagggcggtaatcaaatgaacgtccttggggagagtcgagtcctcctcctcctccttgctccaaacagtctcgcccgcatcaatgtgtttgacatgatctgggaggagatcgtccgtgcttcctggtctcctcacagagggtgtcttcatgcaccctttatcatgaagatgatcgaagtggttacccagacccacttcgaaaaactcgtcaaacactcccgctacgtaccctactgggttgattcctccaacccagctgctcgtacgaagcgggttccctcacggtctggaggccctgcctcctcctctgagccacctcgccagcctccccaccatccttcctcctctccccccgctgctgcctcgcgtccctctcctggccgcggctctcccatgccacgtgctcgtggtcgtggtcgtggtcgtggccgcgggatgggtgctcgcttggtccatgggcttgcggcatttttctccatgtgccgcaacatttctgctgatgtccatgaggtggcacggcgtcagcgggagactgacgacaatcttcgtcgtcaagcttc

SEQ ID NO: 5625 - DNA, 1057 bp, Zea mays
  Zm_smallRNAprecursor_1114
aacccttcagcgtctgaggtttaccaaccctactctcactcctcgtcatcctggtgtccaggaccctcggttctggaatcttttccaggctgacttctacaattctgtcattctttccaagaaacacccagtcgtccgacatagatttattgactgggagggttgtgagaatatgggagatgctgacatgtcgtcagctctcgtaaacttagagagaaaggggttacgtaacattatgaccatggaatacccctggaacgatgaggtggtagctcagttctatgccaccctctggataaagaaagtagacgaggaagccgatgggtatgattacccagtcatgtatttcttcatccagggtaactggcacaaagtcagttatcgtcgttttgcccatattctgggcttctctgatgcagacattcagggcagcaacatgcgagtgcatggcattcggctgcccatgcgggaagagacggaattcattcatgtctctactgagcgggagttctggacaaccgctaacatgcataggtactacaggtaccttaattccttgtcccggatgaccgttctcccaaagggcggtaatcaaatgaacgtccttggggagagtcgagtcctcctcctcctccttgctccaaacagtctcgcccgcatcaatgtgtttgacatgatctgggaggagatcgtccgtgcttcctggtctcctcacagagggtgtcttcatgcaccctttatcatgaagatgatcgaagtggttacccagacccacttcgaaaaactcgtcaaacactcccgctacgtaccctactgggttgattcctccaacccagctgctcgtacgaagcgggttccctcacggtctggaggccctgcctcctcctctgagccacctcgccagcctccccaccatccttcctcctctccccccgctgctgcctcgcgtccctctcctggccgcggctctcccatgccacgtgctcgtggtcgtggtcgtggtcgtggccgcgggatgggtgctcgcttggtccatgggcttgcggcatttttctcc

SEQ ID NO: 5626 - DNA, 1058 bp, Zea mays
  Zm_smallRNAprecursor_1115
aacccttcagcgtctgaggtttaccaaccctactctcactcctcgtcatcctggtgtccaggaccctcggttctggaatcttttccaggctgacttctacaattctgtcattctttccaagaaacacccagtcgtccgacatagatttattgactgggagggttgtgagaatatgggagatgctgacatgtcgtcagctctcgtaaacttagagagaaaggggttacgtaacattatgaccatggaatacccctggaacgatgaggtggtagctcagttctatgccaccctctggataaagaaagtagacgaggaagccgatgggtatgattacccagtcatgtatttcttcatccagggtaactggcacaaagtcagttatcgtcgttttgcccatattctgggcttctctgatgcagacattcagggcagcaacatgcgagtgcatggcattcggctgcccatgcgggaagagacggaattcattcatgtctctactgagcgggagttctggacaaccgctaacatgcataggtactacaggtaccttaattccttgtcccggatgaccgttctcccaaagggcggtaatcaaatgaacgtccttggggagagtcgagtcctcctcctcctccttgctccaaacagtctcgcccgcatcaatgtgtttgacatgatctgggaggagatcgtccgtgcttcctggtctcctcacagagggtgtcttcatgcaccctttatcatgaagatgatcgaagtggttacccagacccacttcgaaaaactcgtcaaacactcccgctacgtaccctactgggttgattcctccaacccagctgctcgtacgaagcgggttccctcacggtctggaggccctgcctcctcctctgagccacctcgccagcctccccaccatccttcctcctctccccccgctgctgcctcgcgtccctctcctggccgcggctctcccatgccacgtgctcgtggtcgtggtcgtggtcgtggccgcgggatgggtgctcgcttggtccatgggcttgcggcatttttctcca

SEQ ID NO: 5627 - DNA, 1040 bp, Zea mays
  Zm_smallRNAprecursor_1116
aacaattaaggtcaaaaagataaacatttgcaatagaaaatttcttttgaatgattgtatgtagatggctccccctaaatgtgtgcacgattgtgaatccaatgttttgacataatatgtcatgtgagcaacacaattagagatagtgacaaaaaccatactgaatacaaccatccgaggggtgcaagagtgtcataacaggagttgtgatgcatatgactatctctaaatacacatcatttttacttcatagcaaaacaatcattacaaactgatgggacaaaagatgatggccagaagaccatcatatcactttgaataaaaaacccagcagttttatttcatacaatgataagaggatacaagccacaacggtggccaaaacaaaaataatccaaaagaaatacataaccgaaagaaccacaaacagaatgactagaaattttggattttctccccctttttggcaacaagtaccaaaaacgaagagagagacatggatacatgaatcaatatcctctaggaggaggataggacggaggatatgatggagggtatgatgtgtagttagggaagagggtcctcatcacgtcttcctcgaatgaggattccctaggtggctcatcagccgcagaaaaaacagatgccgaagatgtacgatgatgacgaggaggtggagggtggtgatggtaaccagagccggatggcctagggtcaccgggagtgggtccctaacctgagtagggaggcggagggtgagaggatgattgaccaggatccccatggtagggaggcggggcaaactgctcgcgatcatcaacgtaggcttcttcttcttcatcgtctgctgacataaatggcaccccataggcctgccggtgccactcattgatctccgggggaggaggatggagaggcacgtcaggcgagcgaggggcaaagggcatacccatagtggaagcttgacgacgaagattgtcgtcagtctcccgctgacgccttgccagctcatgtacatcagcagaaatgttccggcacat

SEQ ID NO: 5628 - DNA, 1048 bp, Zea mays
  Zm_smallRNAprecursor_1117
gcaactgagcacaacaagcaccagcagctatgtattcggcctcggcagtggaaagtgcaacacagttttgcttcttagagctccaagacaccagggaccgcccaaggaattggcaagtccccgaggtgctttttcgatctactttacaaccggcatagtctgaattagagtagccaaataaatcgaaaaaggagcccttaggataccagagacctagattttaggtgtgaactagatatctcaaaattctcttaacggccactaagtgacactcttttgggttagcttgaaaacgggcacacatgtacacactaagcatgatatctggcctagatgcacacaaatatagtagagatcctatcattgatctataaagcttttgatctacagttttaccttcttcatttaagtcgagatgaccacttgaagccattggtgtcttggcgtgctttgccttttccatgccaaactttttgagcatgtcttgtgtgtacttggtttggcacagaaaggttccttccttgagttgtttaacttggaaacccaggaagtacttgagctcacccatcatggacatctcaaacctatttgtcataaccctactaaattcctcacaaaaagtttcatcagtactgccaaatataatgtcatcgacatatatttgacaaacaaataattgattgtcaactttgcgagtgaataaagtagagtctacttttcctatttcaaaaccatttttaagcaagaaatctttaaggcaatcataccaagctctaggggcttgtttaagcccgtagagtgccttgtgaagtaggtaaacatggtttgaattctttggatcttcaaaacccggtggttgctccacatagaccctatcttgtagtggtccatttagaaatgcgctcttgacatccatttgatatagcttgaaatcatggttagtagcataggcaattaatattctaattgactctaaccttgctaccggtgcatatgtttcaccaaaatcaagtccttccacttgagtgtagccttgggcaaccaaccg

SEQ ID NO: 5629 - DNA, 1041 bp, Zea mays
  Zm_smallRNAprecursor_1118
aaaacttttgaatgtataatataagttataagtcaaatatttgataatatatataattatatatatttgtgtgtagatagggcatctatattagatttcgcactggcccatgaaaagtcaggaacaaccctaggtgctgttgtaaagagccttagttttgacgctcaagtagtcaaaccacttccagtgtcccgcctcacacacacccagaaaacaagttaatatttttttaaaaaaatatagcaaataatataaatatgaatgtctccaagaaagtttgatataaaaaatacatcgaatactatgcagccgctgagaacacgtgctacaccttagacttagagggacgaaacaaccgatttttttgtattttagccatttttcggaaaaaaattcacgtttagatcttaaaaaattttaatgtcatttttggaccctttgctcggcgccatagcctatggcgccgaagtaacacagctcggcgccataggctatggcgccgaggtcgtgttgcgttggcacaacacggacgcgtggcgtcgacgtggaaccgagctcggcgccacagatcttggcgccgagctcggttgtgttattaaaatttttgttgcagacatgagcacaaagcccatctagcccacttggtagagcacaaggcttctaaccttatggttgtgggttcaagccccatagtttgcattttaatttgtttttcttttgtttatgtcgctggtgtgtccgctcaaatttatttctcgcctaaatttttttatctttgtcactacacattttttaaataactcattaggtatattttttttcttggatttttgctgccagaactcattttcttgtgtccgcttttgtgctaaaatacaaaaaattcggtcgattcgacgagcctttctgagctcgcaataggaaggtgcacatagctccggatggtttgccttattttcaaagagaaaagtggctccggatttgttaaagacgatgcacatctacctggccagataaaatatatatgcacatcgtgacaag

SEQ ID NO: 5630 - DNA, 1041 bp, Zea mays; identical to SEQ ID NO: 5629
  Zm_smallRNAprecursor_1119

SEQ ID NO: 5631 - DNA, 1042 bp, Zea mays
  Zm_smallRNAprecursor_1120
aaaacttttgaatgtataatataagttataagtcaaatatttgataatatatataattatatatatttgtgtgtagatagggcatctatattagatttcgcactggcccatgaaaagtcaggaacaaccctaggtgctgttgtaaagagccttagttttgacgctcaagtagtcaaaccacttccagtgtcccgcctcacacacacccagaaaacaagttaatatttttttaaaaaaatatagcaaataatataaatatgaatgtctccaagaaagtttgatataaaaaatacatcgaatactatgcagccgctgagaacacgtgctacaccttagacttagagggacgaaacaaccgatttttttgtattttagccatttttcggaaaaaaattcacgtttagatcttaaaaaattttaatgtcatttttggaccctttgctcggcgccatagcctatggcgccgaagtaacacagctcggcgccataggctatggcgccgaggtcgtgttgcgttggcacaacacggacgcgtggcgtcgacgtggaaccgagctcggcgccacagatcttggcgccgagctcggttgtgttattaaaatttttgttgcagacatgagcacaaagcccatctagcccacttggtagagcacaaggcttctaaccttatggttgtgggttcaagccccatagtttgcattttaatttgtttttcttttgtttatgtcgctggtgtgtccgctcaaatttatttctcgcctaaatttttttatctttgtcactacacattttttaaataactcattaggtatattttttttcttggatttttgctgccagaactcattttcttgtgtccgcttttgtgctaaaatacaaaaaattcggtcgattcgacgagcctttctgagctcgcaataggaaggtgcacatagctccggatggtttgccttattttcaaagagaaaagtggctccggatttgttaaagacgatgcacatctacctggccagataaaatatatatgcacatcgtgacaagg

SEQ ID NO: 5632 - DNA, 1042 bp, Zea mays; identical to SEQ ID NO: 5631
  Zm_smallRNAprecursor_1121

SEQ ID NO: 5633 - DNA, 1043 bp, Zea mays
  Zm_smallRNAprecursor_1122
aaaacttttgaatgtataatataagttataagtcaaatatttgataatatatataattatatatatttgtgtgtagatagggcatctatattagatttcgcactggcccatgaaaagtcaggaacaaccctaggtgctgttgtaaagagccttagttttgacgctcaagtagtcaaaccacttccagtgtcccgcctcacacacacccagaaaacaagttaatatttttttaaaaaaatatagcaaataatataaatatgaatgtctccaagaaagtttgatataaaaaatacatcgaatactatgcagccgctgagaacacgtgctacaccttagacttagagggacgaaacaaccgatttttttgtattttagccatttttcggaaaaaaattcacgtttagatcttaaaaaattttaatgtcatttttggaccctttgctcggcgccatagcctatggcgccgaagtaacacagctcggcgccataggctatggcgccgaggtcgtgttgcgttggcacaacacggacgcgtggcgtcgacgtggaaccgagctcggcgccacagatcttggcgccgagctcggttgtgttattaaaatttttgttgcagacatgagcacaaagcccatctagcccacttggtagagcacaaggcttctaaccttatggttgtgggttcaagccccatagtttgcattttaatttgtttttcttttgtttatgtcgctggtgtgtccgctcaaatttatttctcgcctaaatttttttatctttgtcactacacattttttaaataactcattaggtatattttttttcttggatttttgctgccagaactcattttcttgtgtccgcttttgtgctaaaatacaaaaaattcggtcgattcgacgagcctttctgagctcgcaataggaaggtgcacatagctccggatggtttgccttattttcaaagagaaaagtggctccggatttgttaaagacgatgcacatctacctggccagataaaatatatatgcacatcgtgacaaggt

SEQ ID NO: 5634 - DNA, 1043 bp, Zea mays; identical to SEQ ID NO: 5633
  Zm_smallRNAprecursor_1123

SEQ ID NO: 5635 - DNA, 1096 bp, Zea mays
  Zm_smallRNAprecursor_1124
ctagcagtgtagtacatgtaccacaaggaatcacatccacatccagctttatgaaggtcagaagacgatccagcctttgaaagagctaaaggtcaacatgatattcgcggacatgtagaggtgcgcggcttgcagcggaacggtgccatattattcccggtcccggggtttttctaatttcggcaggcgataaggtgcaccacaccactgaatgattgaaaatagggatcccttgaaaatatgggcatgcgtaatctggatggatgtgcacatttcaaggagaaaaaaaaggagagagagagagaggagctgaggatatgttcgatgctgcaacctgcggccgtttctgtcatggaagaaaagctttggatccaccagctcgtttctgtacttggacagtataaatagccgaagggcacgcagagcgttgcatccaatccaaggccacagatttgtgtgtgtgcagtgtgctagagagtggcgataagagtctgtccagatagccaaggatgacttgcctgtggcttcttggcttggcttggctcgggcaaaaccttgtgcacgttttattgctcgcctcgtggcctcgatcacaggcagtctccttggctagtccgggcgggccccttatctgaaaccgatccctggttcattcatatatcggtgagcgtgcgaccgagggaaagcatatatgcggtgcaggtgcaggtgcaggcgtgacagctactagctctgggcagaggactggcctggcatggcgatggaagctctgcttcggtagccaaggatgagctgcctgtggcctcctgctgcggacgttgcgtggccccgcctccaccgcgtgcggtccccgcaggcagcctccttggctagtctgagcggcttccatcctccatgctaggctcatctcctcttcagttaatctgtaaatgcagcagctttgctttaaagtcgtggcacgtcatcagaagcagtgcatcacacgttgtttaatttatccaatcttcctaaatgcatgtaatgtaactcggtcggtatatagtttcacttggcttggtgtgcagcagaagcatatcaaggtcgagcggtggatgga

SEQ ID NO: 5636 - DNA, 1184 bp, Zea mays
  Zm_smallRNAprecursor_1125
acatgatattcgcggacatgtagaggtgcgcggcttgcagcggaacggtgccatattattcccggtcccggggtttttctaatttcggcaggcgataaggtgcaccacaccactgaatgattgaaaatagggatcccttgaaaatatgggcatgcgtaatctggatggatgtgcacatttcaaggagaaaaaaaaggagagagagagagaggagctgaggatatgttcgatgctgcaacctgcggccgtttctgtcatggaagaaaagctttggatccaccagctcgtttctgtacttggacagtataaatagccgaagggcacgcagagcgttgcatccaatccaaggccacagatttgtgtgtgtgcagtgtgctagagagtggcgataagagtctgtccagatagccaaggatgacttgcctgtggcttcttggcttggcttggctcgggcaaaaccttgtgcacgttttattgctcgcctcgtggcctcgatcacaggcagtctccttggctagtccgggcgggccccttatctgaaaccgatccctggttcattcatatatcggtgagcgtgcgaccgagggaaagcatatatgcggtgcaggtgcaggtgcaggcgtgacagctactagctctgggcagaggactggcctggcatggcgatggaagctctgcttcggtagccaaggatgagctgcctgtggcctcctgctgcggacgttgcgtggccccgcctccaccgcgtgcggtccccgcaggcagcctccttggctagtctgagcggcttccatcctccatgctaggctcatctcctcttcagttaatctgtaaatgcagcagctttgctttaaagtcgtggcacgtcatcagaagcagtgcatcacacgttgtttaatttatccaatcttcctaaatgcatgtaatgtaactcggtcggtatatagtttcacttggcttggtgtgcagcagaagcatatcaaggtcgagcggtggatggatgaagctaacctaggatggacggatggacctgacgagatgcagctagcagtgtatcccgcgctttcgatcggtcgaccataccatccggtgcaatggggctgaggtttcttgtccaaggacaactatttccccttgttctgttcatttctttcagctgcagcctgcagtaggcagagttgtca

SEQ ID NO: 5637 - DNA, 1040 bp, Zea mays
  Zm_smallRNAprecursor_1126
ttggtgattgatgccaaaacaattaaggtcaaaaagatatacatttgcaatagaaaatttcttttgaatgattgtatgtagatggctccccctaaatgtgtgcacgattgtgaatccaatgttttgacataatatgtcatgtgagcaacacatttagagatagtgacaaaaaccatactgaatacaaccatccgaggggtgcaagagtgtcataacaggagttgtgatgcacatgactatctctaaatacacatcatttttacttcatagcaaagtaatcattacaaactgataggacaaaagatgatggccagaagaccatcatatcactttgaataataacccagcagttttatttcatacaatgataagaggatacaagccacaacagtggccaaaacaaaaataatccaaaagaaaaccgaaagaaccacaaactagaagttttggattttctccccctttttggtaacaagtaccaaaaacgaagagagacatggatacatgaatcaatatcctccaggaggaggatatgacggaggatatgatggagggtatgaagtgtagtcagggaagagggtcctcatcacgtcctcctcgaatgtggattccctaggtggctcatcaaccgcagaaaaaacagatgccgaagatgtacaatgatcaagaggaggtggagggtggtgatggtaaccagagccggatggcctagggtcaccaagaatgggtcccggacccgggtagggaggcggagggtgagaggatgattgacccggatccccatggtagggaggcggggcaaactactcgcgatcatcaacgtaggcttcttcttcttcgtcgtcgtcgtcgtctgctgacataaatggcaccccgtaggcctgctggtgccactcattgatctccggggaggaggatggagaggcacgtcaagcgagcgaggggcaaagggcatacccatagtggaagcttgacgacgaagattgtcgtcagtctctcgctgacgccttgccacctcatgtacatcagcagaaatgttg

SEQ ID NO: 5638 - DNA, 1171 bp, Zea mays
  Zm_smallRNAprecursor_1127
ttttgctgtccggtctcatctgcgcagacacttggttttgtttttttttgcatggaatctctgcagtacactttttcagaatcctgcgtcagaaatttgaattttttttggcatcttccctctgctgtttctggttctctgaccacactggtcagaaccagctgaactggcccatgggggtggttgaactggtcctgaggaccagctcaactgcctatatatacttgactctccccttctcttctcccacttcattcactctcgccttagtcgcttcacaacctttagagccactctttcacacacctcaaccggttcgcagtttcaccacctttttcatcattgtgcgtcgtcgcaatccctctgtgattgagtttagcagcgactccgatgagattcaggaggaatctcccgtcccctctcctccgcctcgtcgctccctctctaagagaggacgtggctctggtcgaaaggatggcgagggctcttccatgccttcgcagccgactcgcgggagacgccaaaaggttggcgcctctcgtcctcgtcgtagcacgtcttcctctgggtatgctccctgccaggaggaggatggggcgttcgacgacttcgtcgaccttccagcgcctgatgctctctacgtcaccggactgcacatgcatccggcgaacgtcagccgcggtccgcatgaatctctcgtcgacttcactctgaagggaatagacacccttcagcgtctgaggtttaccaaccctactctcactcctcgtcatcctggtgtctaggaccctcggttctggaatcttttccaggctgacttctacaattctgtcattctttccaagaaacacccagtcgtccgacatagatttattgactgggagggttgtgagaatatgggagatgctgacatgtcgtcagctctcgtaaacttagagagaaaggggttacgaaacattatgaccatggaatacccctggaacgatgaggtggtagctcagttctatgccaccctctggataaagaaagtagatgaggaagccgatgggtatgattacccagtcatgtatttcttcatccagggtaactggcacaaagtcagttatcgtcgttttgcccatattctgggcttctctgatgcagatattcagggcagcaacatgcgagtgca

SEQ ID NO: 5639 - DNA, 1041 bp, Zea mays
  Zm_smallRNAprecursor_1128
cgcggcggaggaaggtgcacgccatgtgttcgacgcttggcctctgcagggtgcggtccaatgtcctcaaactcactatgatagatgtgacgattttgtttcggcttttttttaacctctgcccaccagaagctactgaagtcgtctaacttttagctcgttgccggttaccataattacgggtatttagatcataatcgtaaaatctctagcttgagtaaaaagggttcataaacaaaacacgcttccgatcttaccaagatacgagagccctaagtcatgcctcgctcgagactatccccgagcgagggacccgagtccgaattttttgtattttagcccttaaacagaagtaaaatcacgtttagacctaaaaaaattttaaatgcagttttggaccctttgctcggcgccatagcctatggcgccgagctaacacagctcggcgccataggctatggcgccgagctaacacagctcggcgccataggctatggcgccgaggtcgtgttgcgttggcagcgtcttgacgcgtggcgtcgacgtggaaccgagctcggcgccacagatcttggcgccgagctcggttgtgttattaaaatatttgttgcagacatgagcacaaagcccatctagcccacttggtagagcacaaggtttctaaccatgtggtcgtgggttaaaacctcattgtttgcatttttttgttttttttttgtttatgtcgttggtgtgtccgcttaaatttatttctcgcctagattttttttatctttgttttgtcactgaagtcagttcagcttatataatttacctatacttacactgaagttgccacagacctattcttgatctcaacctgggggtacatctaatgtagtatccaaaaaatttaacacgcactttacagataattgatggcggtgtagaacttctggagttaaaacaaagagaatgggatttgcgcgctgacttgcaagcatcggctattctttagcctccagcaaatgattcatgaccaggcggaggctccttagctgc

SEQ ID NO: 5640 - DNA, 1041 bp, Zea mays; identical to SEQ ID NO: 5639
  Zm_smallRNAprecursor_1129

SEQ ID NO: 5641 - DNA, 1042 bp, Zea mays
  Zm_smallRNAprecursor_1130
cgcggcggaggaaggtgcacgccatgtgttcgacgcttggcctctgcagggtgcggtccaatgtcctcaaactcactatgatagatgtgacgattttgtttcggcttttttttaacctctgcccaccagaagctactgaagtcgtctaacttttagctcgttgccggttaccataattacgggtatttagatcataatcgtaaaatctctagcttgagtaaaaagggttcataaacaaaacacgcttccgatcttaccaagatacgagagccctaagtcatgcctcgctcgagactatccccgagcgagggacccgagtccgaattttttgtattttagcccttaaacagaagtaaaatcacgtttagacctaaaaaaattttaaatgcagttttggaccctttgctcggcgccatagcctatggcgccgagctaacacagctcggcgccataggctatggcgccgagctaacacagctcggcgccataggctatggcgccgaggtcgtgttgcgttggcagcgtcttgacgcgtggcgtcgacgtggaaccgagctcggcgccacagatcttggcgccgagctcggttgtgttattaaaatatttgttgcagacatgagcacaaagcccatctagcccacttggtagagcacaaggtttctaaccatgtggtcgtgggttaaaacctcattgtttgcatttttttgttttttttttgtttatgtcgttggtgtgtccgcttaaatttatttctcgcctagattttttttatctttgttttgtcactgaagtcagttcagcttatataatttacctatacttacactgaagttgccacagacctattcttgatctcaacctgggggtacatctaatgtagtatccaaaaaatttaacacgcactttacagataattgatggcggtgtagaacttctggagttaaaacaaagagaatgggatttgcgcgctgacttgcaagcatcggctattctttagcctccagcaaatgattcatgaccaggcggaggctccttagctgct

SEQ ID NO: 5642 - DNA, 1042 bp, Zea mays; identical to SEQ ID NO: 5641
  Zm_smallRNAprecursor_1131

SEQ ID NO: 5643 - DNA, 1043 bp, Zea mays
  Zm_smallRNAprecursor_1132
cgcggcggaggaaggtgcacgccatgtgttcgacgcttggcctctgcagggtgcggtccaatgtcctcaaactcactatgatagatgtgacgattttgtttcggcttttttttaacctctgcccaccagaagctactgaagtcgtctaacttttagctcgttgccggttaccataattacgggtatttagatcataatcgtaaaatctctagcttgagtaaaaagggttcataaacaaaacacgcttccgatcttaccaagatacgagagccctaagtcatgcctcgctcgagactatccccgagcgagggacccgagtccgaattttttgtattttagcccttaaacagaagtaaaatcacgtttagacctaaaaaaattttaaatgcagttttggaccctttgctcggcgccatagcctatggcgccgagctaacacagctcggcgccataggctatggcgccgagctaacacagctcggcgccataggctatggcgccgaggtcgtgttgcgttggcagcgtcttgacgcgtggcgtcgacgtggaaccgagctcggcgccacagatcttggcgccgagctcggttgtgttattaaaatatttgttgcagacatgagcacaaagcccatctagcccacttggtagagcacaaggtttctaaccatgtggtcgtgggttaaaacctcattgtttgcatttttttgttttttttttgtttatgtcgttggtgtgtccgcttaaatttatttctcgcctagattttttttatctttgttttgtcactgaagtcagttcagcttatataatttacctatacttacactgaagttgccacagacctattcttgatctcaacctgggggtacatctaatgtagtatccaaaaaatttaacacgcactttacagataattgatggcggtgtagaacttctggagttaaaacaaagagaatgggatttgcgcgctgacttgcaagcatcggctattctttagcctccagcaaatgattcatgaccaggcggaggctccttagctgctt

SEQ ID NO: 5644 - DNA, 1043 bp, Zea mays; identical to SEQ ID NO: 5643
  Zm_smallRNAprecursor_1133

SEQ ID NO: 5645 - DNA, 1184 bp, Zea mays
  Zm_smallRNAprecursor_1134
gatccaatttcactgcccttatcacaggatcttattctaattttataggtcttactggtgatctagtctggattggagcgttgagaacgaaaccaggattcacaacctcccactgatgctttgcctctatggaaggcacattatcagcatatgttgctttgaacttggcaatagagtactactcatgtacatattgatcaatttcgctggctacaccacgaagggaagtaatgaaaaacaagacatgagtgcatggcaacccggtgatctgctactgcctacaagtgcatgtcctgttcgataagtccactggatatctccattccctcttttgtttgtccacaattgtcacctcagcctcaagcggtctgcgcttgatgaaagacattttcaaacctcgggtcttttcatgcaatgtcttcatcacagctggaattatcatgtggccaccaaacctctcaagtgcaattctttaacgtaactcaaactttaccataagcatctgtcgaatcttatctagcaactccaccacatgaaactcctttgtttttcttatccatgcattgaatgactctgccaagttattgttcacatagtcaaccttgcacccttcaccaaatttgtttctggcccatagatatttgtgatgactttccatgtatatctttaacctagagtttgtgtacagttgattcacatgatagttatgttttctaaggctatatgtcaatgatgttggccataagttgtcatcaatcaactttcccttgaatgatttacccaagtttgaagcaaaatgcctcatgcattccctatgctctactccaggaaacacataatccactgcagtttctaaacccttgcaagcgtctgtgggtatactcaatccatgtggaaaccctatgatctgacacaaattttgtaggaaccatgtccaactttcagttgactcagcctcgaggacaccataagccactggaaagagccaattatgtgcatcaatggcacaagccgctactaactggcctttgaacctcccataaagagctgttgcatccactgctagataaggcctgcaaccagctaagaacccactccaacatgctttgaatgaaacgaacacccttctaaaacattctttgttcaaaatcttgcctctcactttataatccaccgtatgatgg

SEQ ID NO: 5646 - DNA, 1088 bp, Zea mays
  Zm_smallRNAprecursor_1135
agtaatgaaaaacaagacatgagtgcatggcaacccggtgatctgctactgcctacaagtgcatgtcctgttcgataagtccactggatatctccattccctcttttgtttgtccacaattgtcacctcagcctcaagcggtctgcgcttgatgaaagacattttcaaacctcgggtcttttcatgcaatgtcttcatcacagctggaattatcatgtggccaccaaacctctcaagtgcaattctttaacgtaactcaaactttaccataagcatctgtcgaatcttatctagcaactccaccacatgaaactcctttgtttttcttatccatgcattgaatgactctgccaagttattgttcacatagtcaaccttgcacccttcaccaaatttgtttctggcccatagatatttgtgatgactttccatgtatatctttaacctagagtttgtgtacagttgattcacatgatagttatgttttctaaggctatatgtcaatgatgttggccataagttgtcatcaatcaactttcccttgaatgatttacccaagtttgaagcaaaatgcctcatgcattccctatgctctactccaggaaacacataatccactgcagtttctaaacccttgcaagcgtctgtgggtatactcaatccatgtggaaaccctatgatctgacacaaattttgtaggaaccatgtccaactttcagttgactcagcctcgaggacaccataagccactggaaagagccaattatgtgcatcaatggcacaagccgctactaactggcctttgaacctcccataaagagctgttgcatccactgctagataaggcctgcaaccagctaagaacccactccaacatgctttgaatgaaacgaacacccttctaaaacattctttgttcaaaatcttgcctctcactttataatccaccgtatgatggtcaatctcaacaacactaactgggcacgtcttctccacttcagctttgaaagtgaataataagttaaagctttacttccatgggccataaatcttgtcaagagccatttccttgtcataatacactctca

SEQ ID NO: 5647 - DNA, 1142 bp, Zea mays
  Zm_smallRNAprecursor_1136
aagagccatttccttgtcataatacactctcatgtaaggcaccaaaatgttgtacttctctttaatcttctttaccagttcagttgtaccaatgcatggtttatctgtcacccattctaatattgcatctgcacaccatctacttttagctgccttatgtgactcttatctttcacttagacaagtgtgaggagatggattcactttgacctggataagtgtattattacgcatacaggaagcatgtatcctccactgacacctcaaatgcgcaatgaacattcattctagttggctcactcttgtcaattacataatcatactcacctttgatgcaataggtagcaagtgcattcctaaactaggtcatcgatgcaaatgtgactccttcttttaaggatggattatctctgtcataatcaattcttggtacatcatcaccctctccttgctcatccacccccatagctatgttctcctcctcctcttcatcagtctcttcaaattgagcccctgtgacaatatctccatcatagtcctcaaattctagcatatcccacttgtcaacaaactcaggatactgcctctcatcatcatcaagtgcagcaacttcttctattggttcaatgtgtcttgcctcatcatcggggataatgggatccatcctatttcataaaacaatgaggcggtaagaactcataccaattcaacatatgatgcaccacatattagtagccaacacaaagcgtccaccaaatttgattgatacaatttgatacacaatccacaacatattattcaacatatacaatccaccacaattagtagccaacacacacacagacaagaggaaaaagttctactacttgcctgaaggagtgcggttgccgccatggagagttgctcctcctctgtaatggcagcgtttgtgctgctaatggaagcccggcggtgggagctcgcgctgtagaggaagcctggcggtcgatgctccctctcaggccggagctcgctctgtagagcaggggcttggatagggcggcgaagggagcacgggctggaccagggttgacagtgggttgccggagcgcgggctggacgagagtcggcgatgggagctcgggcgggctggacgagaggca

SEQ ID NO: 5648 - DNA, 1142 bp, Zea mays
  Zm_smallRNAprecursor_1137
aagagtcatttccttgccataatacactctcatgtaaggcatgaaaatgttgtacttctctttaatcttctttaccagttcagttgtaccaatgcatggtttatctgtcactcattctaataatgcatctgcacaccatctacttttagctgccttatgtgacccttttctttcacttggacaagtgtgaggagatggattcactttgacctggataagtgtactattacgcatacaggaagcatgtgtcctccactgacacctcaaatgcgcaatgaacagtcattctagttggctcactcttgtcaattacataatcatactcacctttgatgcaataggtagcaagtgcattcctaaactcagtcatcgatgcaaatgtgagtccttttaaggatggattatctctgtcataatcaattcttggtacatcatcaccctctccttgctcatccacccccatagctatgttctcctcctcctcctcttcatcagtctcttcaaattgagcccctgtgacaatatcttcatcatagtcctcaaattctagcatatcccacttgtcaacaaactcaggatactgcctctcatcatcatcaggtgcaacaacttcttctattggttcaatgtgtcttgcctcatcatcggggataatgggatccatcctatttcataaaacaatgaggcggtaagaactcataccaattcaacatatgatgcaccacatattagtagccaacacaaagcgtccaccaaatttgattgatacaatttgatacacaatccaccacatattatccaacatatacaatccaccacatattagtagccaacacacacacggacaagaggagaaagttctactacttgcctgaaggagtgcggttgccgccgtggagagttgctcctcctctgtaatgacagcgtttgtgctgctaatggaagcccagcggtgggagctcgcgctgtagagtaagcctggcggtcgatgctccctctcaggccggagctcgctctgtggagcaggggcttggatagggcggcgaagggagcaccgggctggaccagagtcgacaatgggttgccggagcgcgggctggacgagagtcggcgatgggagcgcgggcgggctggacgagagg

SEQ ID NO: 5649 - DNA, 1160 bp, Zea mays
  Zm_smallRNAprecursor_1138
tggagtgcaccaaggaagtcagatacagataatgagtagtgggggtaggagagctagcatagcaaagcacttttctgaccattcagcatgattatgtatcactcgatatccatccattttaagtgaattctatattatttaagttatcgtatactattttaactcatcacatattacttaagtcaatccatctgatttttagctattgtatcttatccaatcctttaattagttttcaaccgtttttcaagtcatttcatgtttttttagtgatttcatttttaaaaaaaatagttttttcaacgcattttaagtcatttcgtatattgtttgtagaaatttcatcttactcgttttttgttagttgtcctctaattttccaactaattttaggccattctatgtgttttcagacattttatcttacttagtgcttagctgatatttaggaggtgtttgaatgcgttagaactaatagttagggcaacgactattatacaagcagtccttctgtgcaagcgtgcaagcagtccttctgtgaatgcgttagaactaatagtttttataaagattattgagccggtggtggaagggtttaagtgctaaatgtgtcctacggttggatcacaatctaatggatcatatagtttgcttacacgcttgcacagaaggactgcttgcatagcagtcgttgccaataggtagttggctaaaaattattagtggaattagctagctaacaaataactatccaactattaactaatttatcaaaaatagctaatagctgaactattagctagggtgtttagatatctcaactaattttagccactaactattagatttagtttattcaaacaccccttagacacatgtatctttatataatttcatctggtattcaactttatctgattttcagccacttcatattatttagttgtttgattggtttttccaaccgactcagaatagtaccatcaaaaatatacatcagcggataacctttttataatgggtggggtatcgcagaggtaaatcggatccgctttaggccttgtttgtttgtgtcggattggtgggtcggaacgattcctacccggattgcttctctaatttatataaactttgattaactggaacgattacgggtgcaa

SEQ ID NO: 5650 - DNA, 1158 bp, Zea mays
  Zm_smallRNAprecursor_1139
ggagtgcaccaaggaagtcagatacagataatgagtagtgggggtaggagagctagcatagcaaagcacttttctgaccattcagcatgattatgtatcactcgatatccatccattttaagtgaattctatattatttaagttatcgtatactattttaactcatcacatattacttaagtcaatccatctgatttttagctattgtatcttatccaatcctttaattagttttcaaccgtttttcaagtcatttcatgtttttttagtgatttcatttttaaaaaaaatagttttttcaacgcattttaagtcatttcgtatattgtttgtagaaatttcatcttactcgttttttgttagttgtcctctaattttccaactaattttaggccattctatgtgttttcagacattttatcttacttagtgcttagctgatatttaggaggtgtttgaatgcgttagaactaatagttagggcaacgactattatacaagcagtccttctgtgcaagcgtgcaagcagtccttctgtgaatgcgttagaactaatagtttttataaagattattgagccggtggtggaagggtttaagtgctaaatgtgtcctacggttggatcacaatctaatggatcatatagtttgcttacacgcttgcacagaaggactgcttgcatagcagtcgttgccaataggtagttggctaaaaattattagtggaattagctagctaacaaataactatccaactattaactaatttatcaaaaatagctaatagctgaactattagctagggtgtttagatatctcaactaattttagccactaactattagatttagtttattcaaacaccccttagacacatgtatctttatataatttcatctggtattcaactttatctgattttcagccacttcatattatttagttgtttgattggtttttccaaccgactcagaatagtaccatcaaaaatatacatcagcggataacctttttataatgggtggggtatcgcagaggtaaatcggatccgctttaggccttgtttgtttgtgtcggattggtgggtcggaacgattcctacccggattgcttctctaatttatataaactttgattaactggaacgattacgggtgca

SEQ ID NO: 5651 - DNA, 1159 bp, Zea mays
  Zm_smallRNAprecursor_1140
ggagtgcaccaaggaagtcagatacagataatgagtagtgggggtaggagagctagcatagcaaagcacttttctgaccattcagcatgattatgtatcactcgatatccatccattttaagtgaattctatattatttaagttatcgtatactattttaactcatcacatattacttaagtcaatccatctgatttttagctattgtatcttatccaatcctttaattagttttcaaccgtttttcaagtcatttcatgtttttttagtgatttcatttttaaaaaaaatagttttttcaacgcattttaagtcatttcgtatattgtttgtagaaatttcatcttactcgttttttgttagttgtcctctaattttccaactaattttaggccattctatgtgttttcagacattttatcttacttagtgcttagctgatatttaggaggtgtttgaatgcgttagaactaatagttagggcaacgactattatacaagcagtccttctgtgcaagcgtgcaagcagtccttctgtgaatgcgttagaactaatagtttttataaagattattgagccggtggtggaagggtttaagtgctaaatgtgtcctacggttggatcacaatctaatggatcatatagtttgcttacacgcttgcacagaaggactgcttgcatagcagtcgttgccaataggtagttggctaaaaattattagtggaattagctagctaacaaataactatccaactattaactaatttatcaaaaatagctaatagctgaactattagctagggtgtttagatatctcaactaattttagccactaactattagatttagtttattcaaacaccccttagacacatgtatctttatataatttcatctggtattcaactttatctgattttcagccacttcatattatttagttgtttgattggtttttccaaccgactcagaatagtaccatcaaaaatatacatcagcggataacctttttataatgggtggggtatcgcagaggtaaatcggatccgctttaggccttgtttgtttgtgtcggattggtgggtcggaacgattcctacccggattgcttctctaatttatataaactttgattaactggaacgattacgggtgcaa

SEQ ID NO: 5652 - DNA, 1156 bp, Zea mays
  Zm_smallRNAprecursor_1141
gagtgcaccaaggaagtcagatacagataatgagtagtgggggtaggagagctagcatagcaaagcacttttctgaccattcagcatgattatgtatcactcgatatccatccattttaagtgaattctatattatttaagttatcgtatactattttaactcatcacatattacttaagtcaatccatctgatttttagctattgtatcttatccaatcctttaattagttttcaaccgtttttcaagtcatttcatgtttttttagtgatttcatttttaaaaaaaatagttttttcaacgcattttaagtcatttcgtatattgtttgtagaaatttcatcttactcgttttttgttagttgtcctctaattttccaactaattttaggccattctatgtgttttcagacattttatcttacttagtgcttagctgatatttaggaggtgtttgaatgcgttagaactaatagttagggcaacgactattatacaagcagtccttctgtgcaagcgtgcaagcagtccttctgtgaatgcgttagaactaatagtttttataaagattattgagccggtggtggaagggtttaagtgctaaatgtgtcctacggttggatcacaatctaatggatcatatagtttgcttacacgcttgcacagaaggactgcttgcatagcagtcgttgccaataggtagttggctaaaaattattagtggaattagctagctaacaaataactatccaactattaactaatttatcaaaaatagctaatagctgaactattagctagggtgtttagatatctcaactaattttagccactaactattagatttagtttattcaaacaccccttagacacatgtatctttatataatttcatctggtattcaactttatctgattttcagccacttcatattatttagttgtttgattggtttttccaaccgactcagaatagtaccatcaaaaatatacatcagcggataacctttttataatgggtggggtatcgcagaggtaaatcggatccgctttaggccttgtttgtttgtgtcggattggtgggtcggaacgattcctacccggattgcttctctaatttatataaactttgattaactggaacgattacgggtgc

SEQ ID NO: 5653 - DNA, 1157 bp, Zea mays
  Zm_smallRNAprecursor_1142
gagtgcaccaaggaagtcagatacagataatgagtagtgggggtaggagagctagcatagcaaagcacttttctgaccattcagcatgattatgtatcactcgatatccatccattttaagtgaattctatattatttaagttatcgtatactattttaactcatcacatattacttaagtcaatccatctgatttttagctattgtatcttatccaatcctttaattagttttcaaccgtttttcaagtcatttcatgtttttttagtgatttcatttttaaaaaaaatagttttttcaacgcattttaagtcatttcgtatattgtttgtagaaatttcatcttactcgttttttgttagttgtcctctaattttccaactaattttaggccattctatgtgttttcagacattttatcttacttagtgcttagctgatatttaggaggtgtttgaatgcgttagaactaatagttagggcaacgactattatacaagcagtccttctgtgcaagcgtgcaagcagtccttctgtgaatgcgttagaactaatagtttttataaagattattgagccggtggtggaagggtttaagtgctaaatgtgtcctacggttggatcacaatctaatggatcatatagtttgcttacacgcttgcacagaaggactgcttgcatagcagtcgttgccaataggtagttggctaaaaattattagtggaattagctagctaacaaataactatccaactattaactaatttatcaaaaatagctaatagctgaactattagctagggtgtttagatatctcaactaattttagccactaactattagatttagtttattcaaacaccccttagacacatgtatctttatataatttcatctggtattcaactttatctgattttcagccacttcatattatttagttgtttgattggtttttccaaccgactcagaatagtaccatcaaaaatatacatcagcggataacctttttataatgggtggggtatcgcagaggtaaatcggatccgctttaggccttgtttgtttgtgtcggattggtgggtcggaacgattcctacccggattgcttctctaatttatataaactttgattaactggaacgattacgggtgca

SEQ ID NO: 5654 - DNA, 1038 bp, Zea mays
  Zm_smallRNAprecursor_1143
tggtatcccaaaggctcccttttcgatttacttggctattctgactcagattatgcccggttgcaaagtagatcgaaaaagtactactgggacttgccaattccttgggcaatccttagtatcatggagttccaagaaacaaaattgtgttgcactttccactgcagaagctgagtacatagcagctggggcatgttgtgcacagttgttatggatgaagcaaacccttcgagattttggttgtgagtttaacaaaattccacttttgtgtgacaatgagagtgccataaaacttgcaaacaaccctgtgcaacactctagaactaaacatattgacatcagacaccatttcttgagagaccacgaagccaaaggagatatcgaattgtttcatgtgagcaccgaaaatcaactagccgatatcttcacaaaacccctcgatgagactaggttttgctttcttaggagtgaattaaatatcttggattctcgtaacttaacttgaaaacggtcacaaaaattgtttgattcactatttttgattgatagttttaaagctatgtgatgatctttcaaaaacttggtgaaaatgttaaaatttgaatgcattttagtgctaagatttttgtttggggctcaactggcttgaccagctgaactttctagttcagctggaggaggccagctgaacttagcagctaaacttcagctcagctgattttaaccagtttttaccaggaccatcctggttaaaaccggttgaaccggcatagtggaccggttgaaccggtctctgaccggcctgtccgcgcaggtctgtcacctgcatttttttttcagtcgcgcagcacctttttgaccggtcgcaggtctgtcacctgcccttttttttgtcgcgctgcatctttttcttttgtctcgcagcactttttcttgaccggtcgcttcctcgtgcagattttttttctctgtcctgtcccttcccctggcgcgcagataaagtttttttcttttttgctgccgctcagcgcgccaatt

SEQ ID NO: 5655 - DNA, 1170 bp, Zea mays
  Zm_smallRNAprecursor_1144
cttggacatttctgctctgcccgcgcactagccatgcatgcgtgtcaggggcgcccatttttcctgtccagtcgcttccagcagctgcgcgcaaatttgaattttattttgcatcttccctctgctgtttctggttctctgaccacactggtcagaaccagctgaactggcccatgggggcggttgaactggtcctgaggaccagctcaactgcctatatatacttgactctccccttctcctctcccacttcattcactctcgccttggtcgcttcacaacctttagagcctctcctttacacacttcaaccggttcacagtttcaccaccttttcaatcatggtgcgtcgtcgcaacccctctgtggttgagtttagcagcgactccgacgagattcaggaggaatctcccgtcccctctcctccgcctcgtcgctccctctctaagagaggacgtggctctggtcggaaggatggcgagggctcttctatgcccttgcagccgactcgcgggagacgccaaaaggttggcgcctctcgtcctcgtcgtagcacgtcttcctctgggtatgctccctgccaggaggaggatgggctttcgacgacttcgtcgaccttccggcgcctgatgctctctacatcaccggactgcacatgcatccggcgaacgtcagccgcggtccgcatgaatctcccgtcgacttcactcagaagggaatagacacccttcagcgtctgaggtttaccaaccctactctcactcctcgtcatcctggtgtccaggaccctcggttctggaatcttttccaggctgacttctacaattctgtcattctttccaagaaacacccagtcgtccgacatagatttattgactgggaggggtgtgagaatatgggagatgctgacatgtcgtcagctctcgtaaacttagagagaaaggggttacgaaacattatgaccatggaatacccctggaacgatgaggtggtagctcagttctatgccaccctctggataaagaaagtagatgaggaagccgatgagtatgattacccagtcatgtatttcttcatccagggtaactggcacaaagtcagttatcgtcgttttgcccatattctgggcttctctgatgcagacattcagggcagcaacatgcgagtgca

SEQ ID NO: 5656 - DNA, 1058 bp, Zea mays
  Zm_smallRNAprecursor_1145
acacccttcagcgtctgaggtttaccaaccctactctcactcctcgtcatcctggtgtccaggaccctcggttctggaatcttttccaggctgacttctacaattctgtcattctttccaagaaacacccagtcgtccgacatagatttattgactgggaggggtgtgagaatatgggagatgctgacatgtcgtcagctctcgtaaacttagagagaaaggggttacgaaacattatgaccatggaatacccctggaacgatgaggtggtagctcagttctatgccaccctctggataaagaaagtagatgaggaagccgatgagtatgattacccagtcatgtatttcttcatccagggtaactggcacaaagtcagttatcgtcgttttgcccatattctgggcttctctgatgcagacattcagggcagcaacatgcgagtgcatggcattcagctgcccatgcgggaagagacggaattcattcatgtctctactgagcgggagttctggacaaccgctaacatgcataggtactacaggtaccttaattctttgtcccggatgaccgttctcccaaagggcggtaatcaaatgaacgtccttggggagagtcgagtcttcctcctcctccttgctccaaacagtctcgcccgcatcaatgtgtttgacatgatctgggaagagatcgtccatgcttcctggtctcctcacagagggtgtcttcatgcaccctttatcatgaagatgatcgaagtggtcacccagacccacttcgaaaaacccgtcaaacactcccgctacgtaccctactgggttgattcctccaacccagctgctcgtacgaagcgggctccctcacggtctagaggctgtgcctcctcctctgagccacctcgccagcctccccatcatccatcctcctctccccccgctgctgcctcgcgtccctctcctggccgcggctctcccatgccacgtgctcgtggtcgtggtcgaggtcgtggccgcgggatgggtgctcgcttggtccatgggtttgcggcatttttctcc

SEQ ID NO: 5657 - DNA, 1141 bp, Zea mays
  Zm_smallRNAprecursor_1146
acacccttcagcgtctgaggtttaccaaccctactctcactcctcgtcatcctggtgtccaggaccctcggttctggaatcttttccaggctgacttctacaattctgtcattctttccaagaaacacccagtcgtccgacatagatttattgactgggaggggtgtgagaatatgggagatgctgacatgtcgtcagctctcgtaaacttagagagaaaggggttacgaaacattatgaccatggaatacccctggaacgatgaggtggtagctcagttctatgccaccctctggataaagaaagtagatgaggaagccgatgagtatgattacccagtcatgtatttcttcatccagggtaactggcacaaagtcagttatcgtcgttttgcccatattctgggcttctctgatgcagacattcagggcagcaacatgcgagtgcatggcattcagctgcccatgcgggaagagacggaattcattcatgtctctactgagcgggagttctggacaaccgctaacatgcataggtactacaggtaccttaattctttgtcccggatgaccgttctcccaaagggcggtaatcaaatgaacgtccttggggagagtcgagtcttcctcctcctccttgctccaaacagtctcgcccgcatcaatgtgtttgacatgatctgggaagagatcgtccatgcttcctggtctcctcacagagggtgtcttcatgcaccctttatcatgaagatgatcgaagtggtcacccagacccacttcgaaaaacccgtcaaacactcccgctacgtaccctactgggttgattcctccaacccagctgctcgtacgaagcgggctccctcacggtctagaggctgtgcctcctcctctgagccacctcgccagcctccccatcatccatcctcctctccccccgctgctgcctcgcgtccctctcctggccgcggctctcccatgccacgtgctcgtggtcgtggtcgaggtcgtggccgcgggatgggtgctcgcttggtccatgggtttgcggcatttttctccatgtgccgcaacatttctgctgatgtccatgaagtggcacgacgtcagcgggagactgacgacaatctttgtcgtcaagcttc

SEQ ID NO: 5658 - DNA, 1057 bp, Zea mays
  Zm_smallRNAprecursor_1147
cacccttcagcgtctgaggtttaccaaccctactctcactcctcgtcatcctggtgtccaggaccctcggttctggaatcttttccaggctgacttctacaattctgtcattctttccaagaaacacccagtcgtccgacatagatttattgactgggaggggtgtgagaatatgggagatgctgacatgtcgtcagctctcgtaaacttagagagaaaggggttacgaaacattatgaccatggaatacccctggaacgatgaggtggtagctcagttctatgccaccctctggataaagaaagtagatgaggaagccgatgagtatgattacccagtcatgtatttcttcatccagggtaactggcacaaagtcagttatcgtcgttttgcccatattctgggcttctctgatgcagacattcagggcagcaacatgcgagtgcatggcattcagctgcccatgcgggaagagacggaattcattcatgtctctactgagcgggagttctggacaaccgctaacatgcataggtactacaggtaccttaattctttgtcccggatgaccgttctcccaaagggcggtaatcaaatgaacgtccttggggagagtcgagtcttcctcctcctccttgctccaaacagtctcgcccgcatcaatgtgtttgacatgatctgggaagagatcgtccatgcttcctggtctcctcacagagggtgtcttcatgcaccctttatcatgaagatgatcgaagtggtcacccagacccacttcgaaaaacccgtcaaacactcccgctacgtaccctactgggttgattcctccaacccagctgctcgtacgaagcgggctccctcacggtctagaggctgtgcctcctcctctgagccacctcgccagcctccccatcatccatcctcctctccccccgctgctgcctcgcgtccctctcctggccgcggctctcccatgccacgtgctcgtggtcgtggtcgaggtcgtggccgcgggatgggtgctcgcttggtccatgggtttgcggcatttttctcc

SEQ ID NO: 5659 - DNA, 1058 bp, Zea mays
  Zm_smallRNAprecursor_1148
cacccttcagcgtctgaggtttaccaaccctactctcactcctcgtcatcctggtgtccaggaccctcggttctggaatcttttccaggctgacttctacaattctgtcattctttccaagaaacacccagtcgtccgacatagatttattgactgggaggggtgtgagaatatgggagatgctgacatgtcgtcagctctcgtaaacttagagagaaaggggttacgaaacattatgaccatggaatacccctggaacgatgaggtggtagctcagttctatgccaccctctggataaagaaagtagatgaggaagccgatgagtatgattacccagtcatgtatttcttcatccagggtaactggcacaaagtcagttatcgtcgttttgcccatattctgggcttctctgatgcagacattcagggcagcaacatgcgagtgcatggcattcagctgcccatgcgggaagagacggaattcattcatgtctctactgagcgggagttctggacaaccgctaacatgcataggtactacaggtaccttaattctttgtcccggatgaccgttctcccaaagggcggtaatcaaatgaacgtccttggggagagtcgagtcttcctcctcctccttgctccaaacagtctcgcccgcatcaatgtgtttgacatgatctgggaagagatcgtccatgcttcctggtctcctcacagagggtgtcttcatgcaccctttatcatgaagatgatcgaagtggtcacccagacccacttcgaaaaacccgtcaaacactcccgctacgtaccctactgggttgattcctccaacccagctgctcgtacgaagcgggctccctcacggtctagaggctgtgcctcctcctctgagccacctcgccagcctccccatcatccatcctcctctccccccgctgctgcctcgcgtccctctcctggccgcggctctcccatgccacgtgctcgtggtcgtggtcgaggtcgtggccgcgggatgggtgctcgcttggtccatgggtttgcggcatttttctcca

SEQ ID NO: 5660 - DNA, 1159 bp, Zea mays
  Zm_smallRNAprecursor_1149
acttttatttatattttatccaattctcaattgattatgaaaccaacatggattaattattgttttgaattgcatagaattcagaaaattttgtggtgattgaatattttaaccaacgttgcatattgttaccataattttatacaagtttatgttttctaaatcatccaacgatggtttagaattttgtgaccagaagttttcatagatatgacatgattattatttgaccaactttgaatatttaattcatgcatgttcaatgattcagtattcaatatttatttcagatgtcctaaatattttctgttttaattttgcaaatgtgctcataccgccatgctgattatgaaaccgctagatggtagtaattaccattcttggcaggaggatattgacatgataaccacagtgggtgagatagattacgcgctgaggtttgataaaccagtagagcccacggtgggcactcctaactatgaccacaggtggatgcaatacaacatcgacaaggtcaagtgggaaagatcaaatgacaaatgtatgattatttttaagaggagcatcaaggagccttctaagagttccataccagagtgcgagactgccaatgaataccttgagaggatagcctctcatcataaagggtcttctaaggcttatgcttgctctctaatgacagaatttgtcaatgcaaaatacgatggaaatggtgtcagaccattcattcagaaaatgatatccatcatagctaagataaacaagtacctcgggtctcctttacacgaggaatttgtattgtttatgataatgaagtctctacctaaggagtttgagactttccacatacagtataacactagtgtcactgacaagtggaacatagatcaactcttggcacaatgtgttcaggaggaagagaggttaaagcagactggagactctatcaacctcataaaagtcaatatccccagacagaacaagaactcaaagaagaagttcaagaagcagggtaaacagaataaccaagcttcctcaagcaacaataatcagccaagacaaggaggcagtttttcagtttcccctgatacatgcctctgttgcaagaagacaggtcattacaagagaaagtgccctgaattcctgcagtatctactag

SEQ ID NO: 5661 - DNA, 1041 bp, Zea mays
  Zm_smallRNAprecursor_1150
ccgaatggagtggctaaaacaaggataatatgagtgtgttcttaacacgctactgaaatcaagaaaatataaaaaatatatgtctttgagctcgcacgacggcgtttgtgacgaaaccaagagtcttgcggaagccccggcgggccgggcgacgacttgggcagttgggccaaggtcaggtggaagcgcgagacgaccggcgatggagggcgagacggaccgagtggttggccgtagcagccggctgcgcccgttcccacccacgggaaagaggacaacacccagtcgccgtcgcaggcgccgagctggaccgcgactcgattgatctgcgggagcctcttccgcgtgcctccgaccgaattttttgtattttagcccttaaacagaagtaaaatcacgtttagacctaaaaaaactttaaatgcagttttggaccctttgctcggcgccacagcctatggcgccgagctaacacagctcggcgccataggctatggcgccgaggtcgtgttgcgttggcacaccccagacgcgtggcgtcgacgtggaaccgagctcggcgccagctcggttgtgttattaaaatatttgttgcggacatgagcacaaagcccatctagcccacttggtagagcacaaggcttctaaccatgtggtcgtgggttcaagccccatagtttgcattttttttgtttttttgtttatgtcattggtgtgtccgcttaaatttatttctcgcctagatttttgtttatcttccagatgcactcgatgatgatgccattacagagtcattagaactacacaaaattaagagccgccaatgggcgattttcaaaacatctgcaataaagggagagcccaggtttggactagtaagtggggtcaaattttcatgtcctaagcgatgtttctgcaagatatgacaagtggatgaatgtctttaataaaccattcgtatcatcagttaaaatagttcttcatacattatcaagtagtggctgtactgtccgtcgatcaagatgcagttctatgtattaa

SEQ ID NO: 5662 - DNA, 1041 bp, Zea mays; identical to SEQ ID NO: 5661
  Zm_smallRNAprecursor_1151

SEQ ID NO: 5663 - DNA, 1042 bp, Zea mays
  Zm_smallRNAprecursor_1152
ccgaatggagtggctaaaacaaggataatatgagtgtgttcttaacacgctactgaaatcaagaaaatataaaaaatatatgtctttgagctcgcacgacggcgtttgtgacgaaaccaagagtcttgcggaagccccggcgggccgggcgacgacttgggcagttgggccaaggtcaggtggaagcgcgagacgaccggcgatggagggcgagacggaccgagtggttggccgtagcagccggctgcgcccgttcccacccacgggaaagaggacaacacccagtcgccgtcgcaggcgccgagctggaccgcgactcgattgatctgcgggagcctcttccgcgtgcctccgaccgaattttttgtattttagcccttaaacagaagtaaaatcacgtttagacctaaaaaaactttaaatgcagttttggaccctttgctcggcgccacagcctatggcgccgagctaacacagctcggcgccataggctatggcgccgaggtcgtgttgcgttggcacaccccagacgcgtggcgtcgacgtggaaccgagctcggcgccagctcggttgtgttattaaaatatttgttgcggacatgagcacaaagcccatctagcccacttggtagagcacaaggcttctaaccatgtggtcgtgggttcaagccccatagtttgcattttttttgtttttttgtttatgtcattggtgtgtccgcttaaatttatttctcgcctagatttttgtttatcttccagatgcactcgatgatgatgccattacagagtcattagaactacacaaaattaagagccgccaatgggcgattttcaaaacatctgcaataaagggagagcccaggtttggactagtaagtggggtcaaattttcatgtcctaagcgatgtttctgcaagatatgacaagtggatgaatgtctttaataaaccattcgtatcatcagttaaaatagttcttcatacattatcaagtagtggctgtactgtccgtcgatcaagatgcagttctatgtattaat

SEQ ID NO: 5664 - DNA, 1042 bp, Zea mays; identical to SEQ ID NO: 5663
  Zm_smallRNAprecursor_1153

SEQ ID NO: 5665 - DNA, 1043 bp, Zea mays
  Zm_smallRNAprecursor_1154
ccgaatggagtggctaaaacaaggataatatgagtgtgttcttaacacgctactgaaatcaagaaaatataaaaaatatatgtctttgagctcgcacgacggcgtttgtgacgaaaccaagagtcttgcggaagccccggcgggccgggcgacgacttgggcagttgggccaaggtcaggtggaagcgcgagacgaccggcgatggagggcgagacggaccgagtggttggccgtagcagccggctgcgcccgttcccacccacgggaaagaggacaacacccagtcgccgtcgcaggcgccgagctggaccgcgactcgattgatctgcgggagcctcttccgcgtgcctccgaccgaattttttgtattttagcccttaaacagaagtaaaatcacgtttagacctaaaaaaactttaaatgcagttttggaccctttgctcggcgccacagcctatggcgccgagctaacacagctcggcgccataggctatggcgccgaggtcgtgttgcgttggcacaccccagacgcgtggcgtcgacgtggaaccgagctcggcgccagctcggttgtgttattaaaatatttgttgcggacatgagcacaaagcccatctagcccacttggtagagcacaaggcttctaaccatgtggtcgtgggttcaagccccatagtttgcattttttttgtttttttgtttatgtcattggtgtgtccgcttaaatttatttctcgcctagatttttgtttatcttccagatgcactcgatgatgatgccattacagagtcattagaactacacaaaattaagagccgccaatgggcgattttcaaaacatctgcaataaagggagagcccaggtttggactagtaagtggggtcaaattttcatgtcctaagcgatgtttctgcaagatatgacaagtggatgaatgtctttaataaaccattcgtatcatcagttaaaatagttcttcatacattatcaagtagtggctgtactgtccgtcgatcaagatgcagttctatgtattaatt

SEQ ID NO: 5666 - DNA, 1043 bp, Zea mays; identical to SEQ ID NO: 5665
  Zm_smallRNAprecursor_1155

SEQ ID NO: 5667 - DNA, 1041 bp, Zea mays
  Zm_smallRNAprecursor_1156
ctaaggagcctccgcctcgtcatgaatcatttgctggaggctaaagaatagccgatgcttgcaagtcagcgcgcaaatcccattctctttgttttaagtccagaagttctacaccgccatcaattatttgtaaagtgcgtgttaaattttttggatactacattagatgtacccccaggttgagatcaagaataggtctgtggcaacttcagtgtaagtataggtaaattatataagctgaactgacttcagtgacaaaacaaagataaaaaaaatctaggcgagaaataaatttaagcggacacaccaacgacataaacaaaaaaaaacaaaaaaaaaatgcaaactatggggcttgaacccacgaccacatggttagaaaccttgtgctctaccaagtgggctagatgggctttgtgctcatgtctgcaacaaatattttaataacacaaccgagctcggcgccaagatctgtggcgccgagccaagatctgtggcgccgagctcggttccacgtcgacgccacgcgtctggggtgtgccaacgcaacacgacctcggcgccatagcctatggcgccgagctgtgttagctcggcgacataggctatggcgccgagcaaagggtccaaaactgcatttaaaattttttaggtttaaacgtgattttacttctgtttaagggctaaaatacacaaaattcggtgcctccgaccacgttctctacttgccggtaggccatcatgtgcagcataaaacttccactaaaaatgacctaaaagattaccacgtctacattacaaaacaaaggcgatgttgatgggccacgtttctgcatggcacggagccattggatcagcagtccacgtcgggagcatgtagctagcgcaagtggataagcatgtgcattgcatccaccggttgaccatttgcttcagttcagttcagttcagcgcttctggcgaacggccacgagaaccaaacgcatttaatttcggtcaacaaaagggcacaacaatccattggtttccttgtctgtcatc

SEQ ID NO: 5668 - DNA, 1040 bp, Zea mays
  Zm_smallRNAprecursor_1157
taaggagcctccgcctcgtcatgaatcatttgctggaggctaaagaatagccgatgcttgcaagtcagcgcgcaaatcccattctctttgttttaagtccagaagttctacaccgccatcaattatttgtaaagtgcgtgttaaattttttggatactacattagatgtacccccaggttgagatcaagaataggtctgtggcaacttcagtgtaagtataggtaaattatataagctgaactgacttcagtgacaaaacaaagataaaaaaaatctaggcgagaaataaatttaagcggacacaccaacgacataaacaaaaaaaaacaaaaaaaaaatgcaaactatggggcttgaacccacgaccacatggttagaaaccttgtgctctaccaagtgggctagatgggctttgtgctcatgtctgcaacaaatattttaataacacaaccgagctcggcgccaagatctgtggcgccgagccaagatctgtggcgccgagctcggttccacgtcgacgccacgcgtctggggtgtgccaacgcaacacgacctcggcgccatagcctatggcgccgagctgtgttagctcggcgacataggctatggcgccgagcaaagggtccaaaactgcatttaaaattttttaggtttaaacgtgattttacttctgtttaagggctaaaatacacaaaattcggtgcctccgaccacgttctctacttgccggtaggccatcatgtgcagcataaaacttccactaaaaatgacctaaaagattaccacgtctacattacaaaacaaaggcgatgttgatgggccacgtttctgcatggcacggagccattggatcagcagtccacgtcgggagcatgtagctagcgcaagtggataagcatgtgcattgcatccaccggttgaccatttgcttcagttcagttcagttcagcgcttctggcgaacggccacgagaaccaaacgcatttaatttcggtcaacaaaagggcacaacaatccattggtttccttgtctgtcatc

SEQ ID NO: 5669 - DNA, 1141 bp, Zea mays
  Zm_smallRNAprecursor_1158
ggaaggtacataaagtacgtctctcaacaacagtacaaaaccattaactaatttaaaatgtatatctccaatggccgctactgctgcttcaactccatttgccactctaattgttcttcgaccctttgggagcctttggcttgtacggagtccctgtagagagtttgcaacatgaacagttgcacctgagtcaatccaccaagaataactgggatattctaagtataaagactcatttacaaaagtaacttggtctttaccactctctagtagatactgcaggaattcagggcattttctcttgtaatgacctgtcttcttgcaatagaggcaggtatcagggggaactgaaaaactgcctccttgtcttggctgattatcgttgcttgaggaagcctggttattctgtttaccctgcttcttgaacttttcctttgagttcttgttctgtctggagatattgcctttgatgaggttgacagagtctccagtctgctttaacctctcttcctcctggacacactgtgccaagagttggtctatattccacttatcagtgacactagcgttgtactgtatatgaaaagtctcaaactccttgggcagagacttcattatcatgaatactacaaattcctcgtgtaaaggagacccgaggtacttgtttatcttagctacgatggatatcattttctgaatgaatggtctgacaccatttccatcgtattttgcattgacaaattctgtcattagagagcaagcataagccttagaagacccttggtgatgagaggctaccctctcaaggtattctttggctgtctcgcactctggtatggaactcttaagaggctccttgatgctcctcttaagaataatcatacatttgtcatttgatctctcccacttgaccttgtcgatgctgtattgcatccacctgtggtcatagttgggagtgcccactgtgggctcaactggtttatcaaacctcagtgcgtaatctatctcacccactgtggttatcatgtctatatcctcccgccaagaatgataattactaccatctagcggtttcatctgagcaatctggctaatcagcatgggggtatgagcacctttgcaaaattaaaacagaaaatat

SEQ ID NO: 5670 - DNA, 1160 bp, Zea mays
  Zm_smallRNAprecursor_1159
acttggtctttaccactctctagtagatactgcaggaattcagggcattttctcttgtaatgacctgtcttcttgcaatagaggcaggtatcagggggaactgaaaaactgcctccttgtcttggctgattatcgttgcttgaggaagcctggttattctgtttaccctgcttcttgaacttttcctttgagttcttgttctgtctggagatattgcctttgatgaggttgacagagtctccagtctgctttaacctctcttcctcctggacacactgtgccaagagttggtctatattccacttatcagtgacactagcgttgtactgtatatgaaaagtctcaaactccttgggcagagacttcattatcatgaatactacaaattcctcgtgtaaaggagacccgaggtacttgtttatcttagctacgatggatatcattttctgaatgaatggtctgacaccatttccatcgtattttgcattgacaaattctgtcattagagagcaagcataagccttagaagacccttggtgatgagaggctaccctctcaaggtattctttggctgtctcgcactctggtatggaactcttaagaggctccttgatgctcctcttaagaataatcatacatttgtcatttgatctctcccacttgaccttgtcgatgctgtattgcatccacctgtggtcatagttgggagtgcccactgtgggctcaactggtttatcaaacctcagtgcgtaatctatctcacccactgtggttatcatgtctatatcctcccgccaagaatgataattactaccatctagcggtttcatctgagcaatctggctaatcagcatgggggtatgagcacctttgcaaaattaaaacagaaaatatttaggacatctgaaataaatactgaatattgaatcatagaacatgcatgaattaaatattcaacgttggtcaaataataatcatgccatatctatgaaaatttctgatcacaaaatttctaaaccatcgttggatgatctagaaaacataaacttgtattaaattgtgataacaatatccaacgttggttaaaatattcaatcaccacaaaattttctgaattctatgcaatttaaacaataattaatccacgttggtttcataat

SEQ ID NO: 5671 - DNA, 1140 bp, Zea mays
  Zm_smallRNAprecursor_1160
gatagactttccttggtggtttgtgagaaggactgtcttgtttgcgcaactgatgatacttttgtgtttggtcaaccaatccatccctaagatcacatcaatcccttgggatggcaagacggttaagtctgccaagaacactaccccacttaaaaggattctgacttgggagcatttgagctgacatagaaggtctgaccctagggttcgggtgaccaagggaatctctagaggggtacagagaatgccatgcttttccacaaaactagtggctataaaagaatgggatgctcctgaatcaaaaagtacggtagcgggagtaaattcaacaaggaactcaccgagcactactcccggagcttgctgagcctcctaagcatcgacgtgattaactcgtgcccttccttgatactgggtcttgttctgctggctgatggaggagggcgccttgggggcggatgcggaggtattcttggggccattcaccgagttggagtaggcaggtcctgatggcttcagctggggacagttgttcttgaagtgactgggatctccgcagtgccaacatgcattcgccgggggttggttgcttgcaactgagggggcatgaaaggagctctgactctactgactgaaccgtgacggggtgggtccacctggtctactgaagcttagtcccttgggtggaaatccaaaggatcgagttttctggtgccgatcttgctgctgagtccggaggacttggaattttctcttgagatggcctttttcttcctcctttgccctttccacttgcatggctttgttggagaggtgagagaaactgaggaagtcttggctagccaggatggtattgagttctggtctaagccccttcaggaagcgggtcatcttcttaacttcggtactgacgtcatctggcgcgtagcgggccaattccgtgaacttgtgcacgtactcgctgacagatcttccgtcttgagtcagttcccaaaatttgtcttccttgagctgaacgatcccttggtgcacatggtgctcctggaaagctgtttcaaactccgcccaggtagcatctctgatggtgacattgaaggtatcccaccaggataaggccatcccggaaagttgatgagcagc

SEQ ID NO: 5672 - DNA, 1162 bp, Zea mays
  Zm_smallRNAprecursor_1161
atggctcataccgagttagcagaattgaagctccaaatcgcagatcttcaacaaaaagggtacattcgtcccagctcatccccttggggagcactagtccttttcgtctctaagaaagatggaagtatgaggatgtgtattgattaccgatcgttaaatgaagtcaccatcaagaacaagtatccacttcctcagatcgacgacctcttcgatcaacttcaaggggccaaatacttctccaagatagacctaaggtctggttatcaccaattgagaatcaaggaagcagatatccagaagactgcatttgtcacccagtacggacaatatgaattcacagtgatgccttttggactgacaaacgcacccgcctttttcatgaacctcatgaacaaagtgtttatggaagagctggataagtttgtcgtggtcttcattgacgacatccttatctactccaagaactgcgaagaccataagcgtcaccttcggaccgtcctcagaaaactcagggcacaccaactttatgctaaactcagtaaatgtgaattctggttagaaaagatagccttccttgggcatatcttgaccgcggaaggaatagaagtagacccttccaaggtggaagcagtatcaaaatggagacagccatccaacgtcagtgaagttcaaagctttctgggaatggcaggatattaccaccgctttatcaagagattctccagcatagcaagacctatgaccgagctcctcaagaaagaccataagtttgtgtggaccccaaaatgtgaaggaagtttccagatcatagaggagaagctcacgaccgcagccattttgacactaccagatatacatcaggatttcgtcgtattctgtgatgcctcgaggcaaggcttagggtgtgtgctgatgcaaaacgagaaagtcattgcttatgcatcgcacctacttaagccgcatgagcagaattatcccacccatgatttggaattggcagccatagtgcatgctttgaagatatggaggcgttacctaattgggaacaaatgtcacatcttcaccgatcacaagagtctgaggtatatcttcactcagacagatcttaatctccgtcaacgaagatggttggaactgatcaaatactatgaccttgagattc

SEQ ID NO: 5673 - DNA, 1070 bp, Zea mays
  Zm_smallRNAprecursor_1162
gtttctaacactctgcagaggtcgtacacattacccacaagtcgtgattcccattctgcccggaaagagccaatctccattgaccactacttaggtggcatggcagggtatcactatgtagcatttacaaagatttcccagaggtcatagccgcccgttaggtttctctagtttgataaacacagtacctctccccaaaggaagggtgactaacaaaaccaaatcaagaacctttgtaaccagcctcggcagagcaagtactgtgcccggacccattgacggccctacggcgaagccaactactcctctggttcctctatttaatcagctaagggcgtcctattccaccctcatggttgcactattatcccgggtgtcgctccccaaacaggtccttacggagaggtgctcagaaaaatggccagagtcccctaaagtatcacaagaacataatcgggataacatcatgggccaattccctgtatgccactgaaaaatatactcattccttgtatgccactgaccccacatgtcatagacactaaaaaatatacctatatgccactcagtggcacacaagggatgagtataaaatctgatggcataccaggaattttctctaacatcatcgtatcataaatattcacatcatgttcattgattaaagtcataacacctcaaaaccatcaactaaaaataatgcatttagattattagtggtaaatatagtaatggatttttctttcaagtattgatctcatttacctttagaataatttttgtttgctcatatttgatttatggttgtttttatagaatttcttttatattgaaagtccaatttattaatataaaaacattggtccaaaaataaatattttagttataaataatcttggtataattattatgatttttagaaatatttaaaaatatatttgttattgtttcaaaagaaaaaagaaacaaaacaaaacaaaaaaatcggttgaaaccctaaccggcccaccaggggcccaaccgcctccatccactctacccctccccaccctcgcagacacgtgggcccc

SEQ ID NO: 5674 - DNA, 1190 bp, Zea mays
  Zm_smallRNAprecursor_1163
aagagattttcaatccccttgctcgaaccagaccacgagagtttaggccattagaaggaaggagtaccccagattatgtcggatgcgttccatccccgcacttaagccaccggatccccatcaggaacttcaaaagataaggcgtgcttgggcgagagtagtactaggaatgggggaccctcctgggaagtcctcgtattgcatcccttttttttgttttattttttgttttgtttttcgaacaccaaaaccatagtaaaaaaggggtgaccgttctcgggttaaattaccttttatttgttttaaggagcgtttttcgggtactttgtgcggagaaaggatgtccagtgccgtgggcgagctgagcacggaggtgagggcataagaggaaggaggacgcaggatatgacggatgcgatcataccagcactaaagcaccggatcccatcagaactccgaagttaagcgtgcttgggcgagagtagtactaggatgggtgacctcctgggaagtcctcgtgttgcattccgtttttttggttttatttttgtttgtttttcgaacaccaaaccatagtaaaaatgggtgaccgttctcgtggtaaattaccttttatttgttttaaggggcgtttttcgggtactttgggcggaggaaggatgtccagtgccgtgggcgagccgagcacggaggtgtgggcataagaggaaggaggacacatgatatgacggatgcgatcataccagcactaaagcaccggatcccatcagaactccgaagttaagcgtgcttgggcgagagtagtactaggatgggtgacctcctgagaagtcctcgtgttgcattccttttttttggttttatttttgtttgtttttcgaacaccaaaccatagtaaaaatgggtgaccgttctcgtgttaaattacctttttatttgttttaaggggcgtttttcgggtactttgtgcggaggaaggatgtccagtgccgtgggcgagccgagcacggaggtgtgggcataagaggaaggaggacgcaagatatgacggatgcgatcatagcagcactaaagcaccggatcccatcagaactctgaagttaagcatgcttgggcgagagtagtactaggatgggtgacctcctgggaagtcctcgtgttgcattcctttttttggttttatttttgtt

SEQ ID NO: 5675 - DNA, 1047 bp, Zea mays
  Zm_smallRNAprecursor_1164
aacaccaaaaccatagtaaaaaaggggtgaccgttctcgggttaaattaccttttatttgttttaaggagcgtttttcgggtactttgtgcggagaaaggatgtccagtgccgtgggcgagctgagcacggaggtgagggcataagaggaaggaggacgcaggatatgacggatgcgatcataccagcactaaagcaccggatcccatcagaactccgaagttaagcgtgcttgggcgagagtagtactaggatgggtgacctcctgggaagtcctcgtgttgcattccgtttttttggttttatttttgtttgtttttcgaacaccaaaccatagtaaaaatgggtgaccgttctcgtggtaaattaccttttatttgttttaaggggcgtttttcgggtactttgggcggaggaaggatgtccagtgccgtgggcgagccgagcacggaggtgtgggcataagaggaaggaggacacatgatatgacggatgcgatcataccagcactaaagcaccggatcccatcagaactccgaagttaagcgtgcttgggcgagagtagtactaggatgggtgacctcctgagaagtcctcgtgttgcattccttttttttggttttatttttgtttgtttttcgaacaccaaaccatagtaaaaatgggtgaccgttctcgtgttaaattacctttttatttgttttaaggggcgtttttcgggtactttgtgcggaggaaggatgtccagtgccgtgggcgagccgagcacggaggtgtgggcataagaggaaggaggacgcaagatatgacggatgcgatcatagcagcactaaagcaccggatcccatcagaactctgaagttaagcatgcttgggcgagagtagtactaggatgggtgacctcctgggaagtcctcgtgttgcattcctttttttggttttatttttgtttgtttttcgaacaccaaaccatagtaaaaatgggtgactgttctcgtgttaaattaccttttatttgttttaaggggcgtttttcgggtactttgtg

SEQ ID NO: 5676 - DNA, 1053 bp, Zea mays
  Zm_smallRNAprecursor_1165
atagtaaaaaaggggtgaccgttctcgggttaaattaccttttatttgttttaaggagcgtttttcgggtactttgtgcggagaaaggatgtccagtgccgtgggcgagctgagcacggaggtgagggcataagaggaaggaggacgcaggatatgacggatgcgatcataccagcactaaagcaccggatcccatcagaactccgaagttaagcgtgcttgggcgagagtagtactaggatgggtgacctcctgggaagtcctcgtgttgcattccgtttttttggttttatttttgtttgtttttcgaacaccaaaccatagtaaaaatgggtgaccgttctcgtggtaaattaccttttatttgttttaaggggcgtttttcgggtactttgggcggaggaaggatgtccagtgccgtgggcgagccgagcacggaggtgtgggcataagaggaaggaggacacatgatatgacggatgcgatcataccagcactaaagcaccggatcccatcagaactccgaagttaagcgtgcttgggcgagagtagtactaggatgggtgacctcctgagaagtcctcgtgttgcattccttttttttggttttatttttgtttgtttttcgaacaccaaaccatagtaaaaatgggtgaccgttctcgtgttaaattacctttttatttgttttaaggggcgtttttcgggtactttgtgcggaggaaggatgtccagtgccgtgggcgagccgagcacggaggtgtgggcataagaggaaggaggacgcaagatatgacggatgcgatcatagcagcactaaagcaccggatcccatcagaactctgaagttaagcatgcttgggcgagagtagtactaggatgggtgacctcctgggaagtcctcgtgttgcattcctttttttggttttatttttgtttgtttttcgaacaccaaaccatagtaaaaatgggtgactgttctcgtgttaaattaccttttatttgttttaaggggcgtttttcgggtactttgtgcggaggaaggatgtccag

SEQ ID NO: 5677 - DNA, 1036 bp, Zea mays
  Zm_smallRNAprecursor_1166
aaaggggtgaccgttctcgggttaaattaccttttatttgttttaaggagcgtttttcgggtactttgtgcggagaaaggatgtccagtgccgtgggcgagctgagcacggaggtgagggcataagaggaaggaggacgcaggatatgacggatgcgatcataccagcactaaagcaccggatcccatcagaactccgaagttaagcgtgcttgggcgagagtagtactaggatgggtgacctcctgggaagtcctcgtgttgcattccgtttttttggttttatttttgtttgtttttcgaacaccaaaccatagtaaaaatgggtgaccgttctcgtggtaaattaccttttatttgttttaaggggcgtttttcgggtactttgggcggaggaaggatgtccagtgccgtgggcgagccgagcacggaggtgtgggcataagaggaaggaggacacatgatatgacggatgcgatcataccagcactaaagcaccggatcccatcagaactccgaagttaagcgtgcttgggcgagagtagtactaggatgggtgacctcctgagaagtcctcgtgttgcattccttttttttggttttatttttgtttgtttttcgaacaccaaaccatagtaaaaatgggtgaccgttctcgtgttaaattacctttttatttgttttaaggggcgtttttcgggtactttgtgcggaggaaggatgtccagtgccgtgggcgagccgagcacggaggtgtgggcataagaggaaggaggacgcaagatatgacggatgcgatcatagcagcactaaagcaccggatcccatcagaactctgaagttaagcatgcttgggcgagagtagtactaggatgggtgacctcctgggaagtcctcgtgttgcattcctttttttggttttatttttgtttgtttttcgaacaccaaaccatagtaaaaatgggtgactgttctcgtgttaaattaccttttatttgttttaaggggcgtttttcgggtactttgtgcggaggaag

SEQ ID NO: 5678 - DNA, 1131 bp, Zea mays
  Zm_smallRNAprecursor_1167
aagtcctcgtgttgcattccgtttttttggttttatttttgtttgtttttcgaacaccaaaccatagtaaaaatgggtgaccgttctcgtggtaaattaccttttatttgttttaaggggcgtttttcgggtactttgggcggaggaaggatgtccagtgccgtgggcgagccgagcacggaggtgtgggcataagaggaaggaggacacatgatatgacggatgcgatcataccagcactaaagcaccggatcccatcagaactccgaagttaagcgtgcttgggcgagagtagtactaggatgggtgacctcctgagaagtcctcgtgttgcattccttttttttggttttatttttgtttgtttttcgaacaccaaaccatagtaaaaatgggtgaccgttctcgtgttaaattacctttttatttgttttaaggggcgtttttcgggtactttgtgcggaggaaggatgtccagtgccgtgggcgagccgagcacggaggtgtgggcataagaggaaggaggacgcaagatatgacggatgcgatcatagcagcactaaagcaccggatcccatcagaactctgaagttaagcatgcttgggcgagagtagtactaggatgggtgacctcctgggaagtcctcgtgttgcattcctttttttggttttatttttgtttgtttttcgaacaccaaaccatagtaaaaatgggtgactgttctcgtgttaaattaccttttatttgttttaaggggcgtttttcgggtactttgtgcggaggaaggatgtccagtgccgtgggcgagccgagcacggaggtgtgggcataagaggaaggaggacgcaggatatgacggatgcgatcataccagcactaaagcactggatcccatcagaactacgaagttaagcgtgcttgggcgagagtagtactaggatgggtgacctcctggcaagtcctcatgttgcattccttttttttggttttatttttgtttgtttttcgaacaccaaaacatagtaaaaaagggggacccatgtcggaataaaataccgtctatgagctttaaggggcgtttttcgggtacttcattggaggaagaatgtccagtgaaaagggcgagccga

SEQ ID NO: 5679 - DNA, 1053 bp, Zea mays
  Zm_smallRNAprecursor_1168
atagtaaaaatgggtgaccgttctcgtggtaaattaccttttatttgttttaaggggcgtttttcgggtactttgggcggaggaaggatgtccagtgccgtgggcgagccgagcacggaggtgtgggcataagaggaaggaggacacatgatatgacggatgcgatcataccagcactaaagcaccggatcccatcagaactccgaagttaagcgtgcttgggcgagagtagtactaggatgggtgacctcctgagaagtcctcgtgttgcattccttttttttggttttatttttgtttgtttttcgaacaccaaaccatagtaaaaatgggtgaccgttctcgtgttaaattacctttttatttgttttaaggggcgtttttcgggtactttgtgcggaggaaggatgtccagtgccgtgggcgagccgagcacggaggtgtgggcataagaggaaggaggacgcaagatatgacggatgcgatcatagcagcactaaagcaccggatcccatcagaactctgaagttaagcatgcttgggcgagagtagtactaggatgggtgacctcctgggaagtcctcgtgttgcattcctttttttggttttatttttgtttgtttttcgaacaccaaaccatagtaaaaatgggtgactgttctcgtgttaaattaccttttatttgttttaaggggcgtttttcgggtactttgtgcggaggaaggatgtccagtgccgtgggcgagccgagcacggaggtgtgggcataagaggaaggaggacgcaggatatgacggatgcgatcataccagcactaaagcactggatcccatcagaactacgaagttaagcgtgcttgggcgagagtagtactaggatgggtgacctcctggcaagtcctcatgttgcattccttttttttggttttatttttgtttgtttttcgaacaccaaaacatagtaaaaaagggggacccatgtcggaataaaataccgtctatgagctttaaggggcgtttttcgggtacttcattggaggaagaatgtccagtg

SEQ ID NO: 5680 - DNA, 1189 bp, Zea mays
  Zm_smallRNAprecursor_1169
gtactttgggcggaggaaggatgtccagtgccgtgggcgagccgagcacggaggtgtgggcataagaggaaggaggacacatgatatgacggatgcgatcataccagcactaaagcaccggatcccatcagaactccgaagttaagcgtgcttgggcgagagtagtactaggatgggtgacctcctgagaagtcctcgtgttgcattccttttttttggttttatttttgtttgtttttcgaacaccaaaccatagtaaaaatgggtgaccgttctcgtgttaaattacctttttatttgttttaaggggcgtttttcgggtactttgtgcggaggaaggatgtccagtgccgtgggcgagccgagcacggaggtgtgggcataagaggaaggaggacgcaagatatgacggatgcgatcatagcagcactaaagcaccggatcccatcagaactctgaagttaagcatgcttgggcgagagtagtactaggatgggtgacctcctgggaagtcctcgtgttgcattcctttttttggttttatttttgtttgtttttcgaacaccaaaccatagtaaaaatgggtgactgttctcgtgttaaattaccttttatttgttttaaggggcgtttttcgggtactttgtgcggaggaaggatgtccagtgccgtgggcgagccgagcacggaggtgtgggcataagaggaaggaggacgcaggatatgacggatgcgatcataccagcactaaagcactggatcccatcagaactacgaagttaagcgtgcttgggcgagagtagtactaggatgggtgacctcctggcaagtcctcatgttgcattccttttttttggttttatttttgtttgtttttcgaacaccaaaacatagtaaaaaagggggacccatgtcggaataaaataccgtctatgagctttaaggggcgtttttcgggtacttcattggaggaagaatgtccagtgaaaagggcgagccgagcacggaggagtgggcataagaggaaggaggacgcacaataagacggatgctatcataccagcaataaagcaccggattccattagaactccgaagttaatcgagcttgggcgggagtagtgataggaaggggggccttcctgggaagccctcgagaagcattccttttttttggttttatttttgtt

SEQ ID NO: 5681 - DNA, 1047 bp, Zea mays
  Zm_smallRNAprecursor_1170
cgaacaccaaaacatagtaaaaaagggggacccatgtcggaataaaataccgtctatgagctttaaggggcgtttttcgggtacttcattggaggaagaatgtccagtgaaaagggcgagccgagcacggaggagtgggcataagaggaaggaggacgcacaataagacggatgctatcataccagcaataaagcaccggattccattagaactccgaagttaatcgagcttgggcgggagtagtgataggaaggggggccttcctgggaagccctcgagaagcattccttttttttggttttatttttgtttgtttttcgaacaccaaaccatagtaaaaatgggtgaccgttctcgtgttaaattaccttttatttgttttaaggggcgtttttcgggtactttgtgcggaggaaggatgtccagtgccgtgggcgagccgagcacggaggtgtgggcataagaggaaggaggacgcttgatatgacagatgcgatcataccagcactaaagcaccggatcccatcagaactccgaagttaagcgtgcttgggcgagagtagtactaggattggtgacctcctaggaagtcctcgtgttgcattcctttttttagttttatttttgtttgtttttcgaacaccaaaccatagtaaaaatgggtgaccgttctcgtgttaaattaccttttatttgttttaaggggcgtttttcgggtactttgtgcggaggaaggatgtccagtgtcgtgggcgagccgagcacggaggtgtgggcataagaggaaggaggacgcacaatatgacggatgcgatcataccagcaataaagcaccggatcccatcagagctccgaagttaagcgagcttgggcgagagtagtactaggatgggtgacctcctgggaagccctcgtgttgcattcctttttttggttttatttttgtttgtttttcgaacatcaaaccatagtaaaaatgggtgaccgttctcgtgttaaattaccttttatttgttttaaggggcgtttttcggttactttgtgcg

SEQ ID NO: 5682 - DNA, 1053 bp, Zea mays
  Zm_smallRNAprecursor_1171
ccatagtaaaaatgggtgaccgttctcgtgttaaattaccttttatttgttttaaggggcgtttttcgggtactttgtgcggaggaaggatgtccagtgccgtgggcgagccgagcacggaggtgtgggcataagaggaaggaggacgcttgatatgacagatgcgatcataccagcactaaagcaccggatcccatcagaactccgaagttaagcgtgcttgggcgagagtagtactaggattggtgacctcctaggaagtcctcgtgttgcattcctttttttagttttatttttgtttgtttttcgaacaccaaaccatagtaaaaatgggtgaccgttctcgtgttaaattaccttttatttgttttaaggggcgtttttcgggtactttgtgcggaggaaggatgtccagtgtcgtgggcgagccgagcacggaggtgtgggcataagaggaaggaggacgcacaatatgacggatgcgatcataccagcaataaagcaccggatcccatcagagctccgaagttaagcgagcttgggcgagagtagtactaggatgggtgacctcctgggaagccctcgtgttgcattcctttttttggttttatttttgtttgtttttcgaacatcaaaccatagtaaaaatgggtgaccgttctcgtgttaaattaccttttatttgttttaaggggcgtttttcggttactttgtgcggaggaaggatgtccagtgccgtgggcgagccgagcacggaggtgtgggcataagaggaaggaggacacaggatatgacggatgcgatcataccagcactaaagcaccggatcccatcagaactccgaagttaagcgtgcttgggcggagtagtactaggatgggtgacctcctgggaagtcctcgtgttgcattccttttttttgttttatttttgtttgtttttcgaacaccaaaccatagtaaaaatgggtgaccgttctcgtgttaaattaccttttatttgttttaaggggcgtttttcgggtactttgtgcggaggaaggatgtccagtgt

SEQ ID NO: 5683 - DNA, 1130 bp, Zea mays
  Zm_smallRNAprecursor_1172
aggaagtcctcgtgttgcattcctttttttagttttatttttgtttgtttttcgaacaccaaaccatagtaaaaatgggtgaccgttctcgtgttaaattaccttttatttgttttaaggggcgtttttcgggtactttgtgcggaggaaggatgtccagtgtcgtgggcgagccgagcacggaggtgtgggcataagaggaaggaggacgcacaatatgacggatgcgatcataccagcaataaagcaccggatcccatcagagctccgaagttaagcgagcttgggcgagagtagtactaggatgggtgacctcctgggaagccctcgtgttgcattcctttttttggttttatttttgtttgtttttcgaacatcaaaccatagtaaaaatgggtgaccgttctcgtgttaaattaccttttatttgttttaaggggcgtttttcggttactttgtgcggaggaaggatgtccagtgccgtgggcgagccgagcacggaggtgtgggcataagaggaaggaggacacaggatatgacggatgcgatcataccagcactaaagcaccggatcccatcagaactccgaagttaagcgtgcttgggcggagtagtactaggatgggtgacctcctgggaagtcctcgtgttgcattccttttttttgttttatttttgtttgtttttcgaacaccaaaccatagtaaaaatgggtgaccgttctcgtgttaaattaccttttatttgttttaaggggcgtttttcgggtactttgtgcggaggaaggatgtccagtgtcgtgggcgatccgagcacggaggtgtgggcataagaggaaggaggacgcaggatatgacggatgcgatcataccagcactaaagcaccggatcccatcagaacttcgaagttaagcgtgctttggcgagagtagtactaggatgggtgatctcctgggaagtcctcgtgttgcattcctttttttttggttttatttttgtttgtttttcgaacaccaaaccatagtaaaaatgggtgaccgttctcgtgttaaattaccttttatttgttttaaggggcgtttttcgggtactttgtgcggaggaaggatgtccagtgccgtgggcgagcc

SEQ ID NO: 5684 - DNA, 1052 bp, Zea mays
  Zm_smallRNAprecursor_1173
ccatagtaaaaatgggtgaccgttctcgtgttaaattaccttttatttgttttaaggggcgtttttcgggtactttgtgcggaggaaggatgtccagtgtcgtgggcgagccgagcacggaggtgtgggcataagaggaaggaggacgcacaatatgacggatgcgatcataccagcaataaagcaccggatcccatcagagctccgaagttaagcgagcttgggcgagagtagtactaggatgggtgacctcctgggaagccctcgtgttgcattcctttttttggttttatttttgtttgtttttcgaacatcaaaccatagtaaaaatgggtgaccgttctcgtgttaaattaccttttatttgttttaaggggcgtttttcggttactttgtgcggaggaaggatgtccagtgccgtgggcgagccgagcacggaggtgtgggcataagaggaaggaggacacaggatatgacggatgcgatcataccagcactaaagcaccggatcccatcagaactccgaagttaagcgtgcttgggcggagtagtactaggatgggtgacctcctgggaagtcctcgtgttgcattccttttttttgttttatttttgtttgtttttcgaacaccaaaccatagtaaaaatgggtgaccgttctcgtgttaaattaccttttatttgttttaaggggcgtttttcgggtactttgtgcggaggaaggatgtccagtgtcgtgggcgatccgagcacggaggtgtgggcataagaggaaggaggacgcaggatatgacggatgcgatcataccagcactaaagcaccggatcccatcagaacttcgaagttaagcgtgctttggcgagagtagtactaggatgggtgatctcctgggaagtcctcgtgttgcattcctttttttttggttttatttttgtttgtttttcgaacaccaaaccatagtaaaaatgggtgaccgttctcgtgttaaattaccttttatttgttttaaggggcgtttttcgggtactttgtgcggaggaaggatgtccag

SEQ ID NO: 5685 - DNA, 1189 bp, Zea mays
  Zm_smallRNAprecursor_1174
cgggtactttgtgcggaggaaggatgtccagtgtcgtgggcgagccgagcacggaggtgtgggcataagaggaaggaggacgcacaatatgacggatgcgatcataccagcaataaagcaccggatcccatcagagctccgaagttaagcgagcttgggcgagagtagtactaggatgggtgacctcctgggaagccctcgtgttgcattcctttttttggttttatttttgtttgtttttcgaacatcaaaccatagtaaaaatgggtgaccgttctcgtgttaaattaccttttatttgttttaaggggcgtttttcggttactttgtgcggaggaaggatgtccagtgccgtgggcgagccgagcacggaggtgtgggcataagaggaaggaggacacaggatatgacggatgcgatcataccagcactaaagcaccggatcccatcagaactccgaagttaagcgtgcttgggcggagtagtactaggatgggtgacctcctgggaagtcctcgtgttgcattccttttttttgttttatttttgtttgtttttcgaacaccaaaccatagtaaaaatgggtgaccgttctcgtgttaaattaccttttatttgttttaaggggcgtttttcgggtactttgtgcggaggaaggatgtccagtgtcgtgggcgatccgagcacggaggtgtgggcataagaggaaggaggacgcaggatatgacggatgcgatcataccagcactaaagcaccggatcccatcagaacttcgaagttaagcgtgctttggcgagagtagtactaggatgggtgatctcctgggaagtcctcgtgttgcattcctttttttttggttttatttttgtttgtttttcgaacaccaaaccatagtaaaaatgggtgaccgttctcgtgttaaattaccttttatttgttttaaggggcgtttttcgggtactttgtgcggaggaaggatgtccagtgccgtgggcgagccgagcacggaggtgtgggcataagaggaagaaggacgcaggatatgacggatgcgatcataccagcactaaagcatcggatctcattagaactccgaagttaagcgtgcttgggcgagagtagtactaggattggtgacctcctcggaagacctcttgttgcattcctttttttttggttttatttttg

SEQ ID NO: 5686 - DNA, 1131 bp, Zea mays
  Zm_smallRNAprecursor_1175
agtcctcgtgttgcattcctttttttttggttttatttttgtttgtttttcgaacaccaaaccatagtaaaaatgggtgaccgttctcgtgttaaattaccttttatttgttttaaggggcgtttttcgggtactttgtgcggaggaaggatgtccagtgccgtgggcgagccgagcacggaggtgtgggcataagaggaagaaggacgcaggatatgacggatgcgatcataccagcactaaagcatcggatctcattagaactccgaagttaagcgtgcttgggcgagagtagtactaggattggtgacctcctcggaagacctcttgttgcattcctttttttttggttttatttttgtttgtttttcgaacaccaaaccatagtaaaaatgggtgaccgttctcgtgttaaattaccttttatttgttttaagtggcgtttttcgggtactttgtgcggaggaaggatgtccagtgtcgtgggcgagccgagcacggaggtgtgggcataagaggaaggaggacgcaggatatgacggatgcgatcataccagcactaaagcaccggatcccatcaaaactccgaagttaagcgtgcttgggcgagagtagtactaggatgggtgacctcctgggaagtcctcgtgttgcattccttttttttggttttatttttgtttgtttttcgaacaccaaaccatagtaaaaatgggtgaccgttctcgtgttaaattaccttttatttgttttaagtggcgtttttcgggtactttgtgcggaggaaggatgtccagtgccgtgggcgagccgagcacggaggtgtgggcataagaggaaggaggacgcaggatatgacggatgcgatcataccagcactaaagcaccggatcccatcagaactccgaagttaagcgtgcttgggcgagagtagtactaggatgggtgacctcctgggaagtcctcgtgttgcattccttttttttggttttatttttgtttgtttttcgaacaccaaaccatagtaaaaatgggtgaccgttctcgtgttaaattaccttttatttgttttaaggggcgtttttcgggtactttgtgcggaggaaggatgtccagtgccgtgggcgagcc

SEQ ID NO: 5687 - DNA, 1047 bp, Zea mays
  Zm_smallRNAprecursor_1176
gaacaccaaaccatagtaaaaatgggtgaccgttctcgtgttaaattaccttttatttgttttaaggggcgtttttcgggtactttgtgcggaggaaggatgtccagtgccgtgggcgagccgagcacggaggtgtgggcataagaggaagaaggacgcaggatatgacggatgcgatcataccagcactaaagcatcggatctcattagaactccgaagttaagcgtgcttgggcgagagtagtactaggattggtgacctcctcggaagacctcttgttgcattcctttttttttggttttatttttgtttgtttttcgaacaccaaaccatagtaaaaatgggtgaccgttctcgtgttaaattaccttttatttgttttaagtggcgtttttcgggtactttgtgcggaggaaggatgtccagtgtcgtgggcgagccgagcacggaggtgtgggcataagaggaaggaggacgcaggatatgacggatgcgatcataccagcactaaagcaccggatcccatcaaaactccgaagttaagcgtgcttgggcgagagtagtactaggatgggtgacctcctgggaagtcctcgtgttgcattccttttttttggttttatttttgtttgtttttcgaacaccaaaccatagtaaaaatgggtgaccgttctcgtgttaaattaccttttatttgttttaagtggcgtttttcgggtactttgtgcggaggaaggatgtccagtgccgtgggcgagccgagcacggaggtgtgggcataagaggaaggaggacgcaggatatgacggatgcgatcataccagcactaaagcaccggatcccatcagaactccgaagttaagcgtgcttgggcgagagtagtactaggatgggtgacctcctgggaagtcctcgtgttgcattccttttttttggttttatttttgtttgtttttcgaacaccaaaccatagtaaaaatgggtgaccgttctcgtgttaaattaccttttatttgttttaaggggcgtttttcgggtactttgtg

SEQ ID NO: 5688 - DNA, 1190 bp, Zea mays
  Zm_smallRNAprecursor_1177
gtactttgtgcggaggaaggatgtccagtgccgtgggcgagccgagcacggaggtgtgggcataagaggaagaaggacgcaggatatgacggatgcgatcataccagcactaaagcatcggatctcattagaactccgaagttaagcgtgcttgggcgagagtagtactaggattggtgacctcctcggaagacctcttgttgcattcctttttttttggttttatttttgtttgtttttcgaacaccaaaccatagtaaaaatgggtgaccgttctcgtgttaaattaccttttatttgttttaagtggcgtttttcgggtactttgtgcggaggaaggatgtccagtgtcgtgggcgagccgagcacggaggtgtgggcataagaggaaggaggacgcaggatatgacggatgcgatcataccagcactaaagcaccggatcccatcaaaactccgaagttaagcgtgcttgggcgagagtagtactaggatgggtgacctcctgggaagtcctcgtgttgcattccttttttttggttttatttttgtttgtttttcgaacaccaaaccatagtaaaaatgggtgaccgttctcgtgttaaattaccttttatttgttttaagtggcgtttttcgggtactttgtgcggaggaaggatgtccagtgccgtgggcgagccgagcacggaggtgtgggcataagaggaaggaggacgcaggatatgacggatgcgatcataccagcactaaagcaccggatcccatcagaactccgaagttaagcgtgcttgggcgagagtagtactaggatgggtgacctcctgggaagtcctcgtgttgcattccttttttttggttttatttttgtttgtttttcgaacaccaaaccatagtaaaaatgggtgaccgttctcgtgttaaattaccttttatttgttttaaggggcgtttttcgggtactttgtgcggaggaaggatgtccagtgccgtgggcgagccgagcacggaggtgtgggcataagaggaaggaggacgcaggatatgacggatgcgatcataccagcactaaagcaccggatcccatcagaactccgaagttaagcgtgcttgggcgagagtagtactaggatgggtgacctcctgggaagtcttcgtgttgcattccttttttttggttttatttttgtt

SEQ ID NO: 5689 - DNA, 1131 bp, Zea mays
  Zm_smallRNAprecursor_1178
aagacctcttgttgcattcctttttttttggttttatttttgtttgtttttcgaacaccaaaccatagtaaaaatgggtgaccgttctcgtgttaaattaccttttatttgttttaagtggcgtttttcgggtactttgtgcggaggaaggatgtccagtgtcgtgggcgagccgagcacggaggtgtgggcataagaggaaggaggacgcaggatatgacggatgcgatcataccagcactaaagcaccggatcccatcaaaactccgaagttaagcgtgcttgggcgagagtagtactaggatgggtgacctcctgggaagtcctcgtgttgcattccttttttttggttttatttttgtttgtttttcgaacaccaaaccatagtaaaaatgggtgaccgttctcgtgttaaattaccttttatttgttttaagtggcgtttttcgggtactttgtgcggaggaaggatgtccagtgccgtgggcgagccgagcacggaggtgtgggcataagaggaaggaggacgcaggatatgacggatgcgatcataccagcactaaagcaccggatcccatcagaactccgaagttaagcgtgcttgggcgagagtagtactaggatgggtgacctcctgggaagtcctcgtgttgcattccttttttttggttttatttttgtttgtttttcgaacaccaaaccatagtaaaaatgggtgaccgttctcgtgttaaattaccttttatttgttttaaggggcgtttttcgggtactttgtgcggaggaaggatgtccagtgccgtgggcgagccgagcacggaggtgtgggcataagaggaaggaggacgcaggatatgacggatgcgatcataccagcactaaagcaccggatcccatcagaactccgaagttaagcgtgcttgggcgagagtagtactaggatgggtgacctcctgggaagtcttcgtgttgcattccttttttttggttttatttttgtttgtttttcgaacaccaaaccatagtaaaaatgggtgaccgttctcgtgttaaattaccttttatttgttttaaggggcgtttttcgggtactttgtgcggaggaaggatgtccagtgtcgtgggtgagcc

SEQ ID NO: 5690 - DNA, 1047 bp, Zea mays
  Zm_smallRNAprecursor_1179
cgaacaccaaaccatagtaaaaatgggtgaccgttctcgtgttaaattaccttttatttgttttaagtggcgtttttcgggtactttgtgcggaggaaggatgtccagtgtcgtgggcgagccgagcacggaggtgtgggcataagaggaaggaggacgcaggatatgacggatgcgatcataccagcactaaagcaccggatcccatcaaaactccgaagttaagcgtgcttgggcgagagtagtactaggatgggtgacctcctgggaagtcctcgtgttgcattccttttttttggttttatttttgtttgtttttcgaacaccaaaccatagtaaaaatgggtgaccgttctcgtgttaaattaccttttatttgttttaagtggcgtttttcgggtactttgtgcggaggaaggatgtccagtgccgtgggcgagccgagcacggaggtgtgggcataagaggaaggaggacgcaggatatgacggatgcgatcataccagcactaaagcaccggatcccatcagaactccgaagttaagcgtgcttgggcgagagtagtactaggatgggtgacctcctgggaagtcctcgtgttgcattccttttttttggttttatttttgtttgtttttcgaacaccaaaccatagtaaaaatgggtgaccgttctcgtgttaaattaccttttatttgttttaaggggcgtttttcgggtactttgtgcggaggaaggatgtccagtgccgtgggcgagccgagcacggaggtgtgggcataagaggaaggaggacgcaggatatgacggatgcgatcataccagcactaaagcaccggatcccatcagaactccgaagttaagcgtgcttgggcgagagtagtactaggatgggtgacctcctgggaagtcttcgtgttgcattccttttttttggttttatttttgtttgtttttcgaacaccaaaccatagtaaaaatgggtgaccgttctcgtgttaaattaccttttatttgttttaaggggcgtttttcgggtactttgtg

SEQ ID NO: 5691 - DNA, 1053 bp, Zea mays
  Zm_smallRNAprecursor_1180
catagtaaaaatgggtgaccgttctcgtgttaaattaccttttatttgttttaagtggcgtttttcgggtactttgtgcggaggaaggatgtccagtgtcgtgggcgagccgagcacggaggtgtgggcataagaggaaggaggacgcaggatatgacggatgcgatcataccagcactaaagcaccggatcccatcaaaactccgaagttaagcgtgcttgggcgagagtagtactaggatgggtgacctcctgggaagtcctcgtgttgcattccttttttttggttttatttttgtttgtttttcgaacaccaaaccatagtaaaaatgggtgaccgttctcgtgttaaattaccttttatttgttttaagtggcgtttttcgggtactttgtgcggaggaaggatgtccagtgccgtgggcgagccgagcacggaggtgtgggcataagaggaaggaggacgcaggatatgacggatgcgatcataccagcactaaagcaccggatcccatcagaactccgaagttaagcgtgcttgggcgagagtagtactaggatgggtgacctcctgggaagtcctcgtgttgcattccttttttttggttttatttttgtttgtttttcgaacaccaaaccatagtaaaaatgggtgaccgttctcgtgttaaattaccttttatttgttttaaggggcgtttttcgggtactttgtgcggaggaaggatgtccagtgccgtgggcgagccgagcacggaggtgtgggcataagaggaaggaggacgcaggatatgacggatgcgatcataccagcactaaagcaccggatcccatcagaactccgaagttaagcgtgcttgggcgagagtagtactaggatgggtgacctcctgggaagtcttcgtgttgcattccttttttttggttttatttttgtttgtttttcgaacaccaaaccatagtaaaaatgggtgaccgttctcgtgttaaattaccttttatttgttttaaggggcgtttttcgggtactttgtgcggaggaaggatgtccag

SEQ ID NO: 5692 - DNA, 1036 bp, Zea mays
  Zm_smallRNAprecursor_1181
aaatgggtgaccgttctcgtgttaaattaccttttatttgttttaagtggcgtttttcgggtactttgtgcggaggaaggatgtccagtgtcgtgggcgagccgagcacggaggtgtgggcataagaggaaggaggacgcaggatatgacggatgcgatcataccagcactaaagcaccggatcccatcaaaactccgaagttaagcgtgcttgggcgagagtagtactaggatgggtgacctcctgggaagtcctcgtgttgcattccttttttttggttttatttttgtttgtttttcgaacaccaaaccatagtaaaaatgggtgaccgttctcgtgttaaattaccttttatttgttttaagtggcgtttttcgggtactttgtgcggaggaaggatgtccagtgccgtgggcgagccgagcacggaggtgtgggcataagaggaaggaggacgcaggatatgacggatgcgatcataccagcactaaagcaccggatcccatcagaactccgaagttaagcgtgcttgggcgagagtagtactaggatgggtgacctcctgggaagtcctcgtgttgcattccttttttttggttttatttttgtttgtttttcgaacaccaaaccatagtaaaaatgggtgaccgttctcgtgttaaattaccttttatttgttttaaggggcgtttttcgggtactttgtgcggaggaaggatgtccagtgccgtgggcgagccgagcacggaggtgtgggcataagaggaaggaggacgcaggatatgacggatgcgatcataccagcactaaagcaccggatcccatcagaactccgaagttaagcgtgcttgggcgagagtagtactaggatgggtgacctcctgggaagtcttcgtgttgcattccttttttttggttttatttttgtttgtttttcgaacaccaaaccatagtaaaaatgggtgaccgttctcgtgttaaattaccttttatttgttttaaggggcgtttttcgggtactttgtgcggaggaag

SEQ ID NO: 5693 - DNA, 1190 bp, Zea mays
  Zm_smallRNAprecursor_1182
ggtactttgtgcggaggaaggatgtccagtgtcgtgggcgagccgagcacggaggtgtgggcataagaggaaggaggacgcaggatatgacggatgcgatcataccagcactaaagcaccggatcccatcaaaactccgaagttaagcgtgcttgggcgagagtagtactaggatgggtgacctcctgggaagtcctcgtgttgcattccttttttttggttttatttttgtttgtttttcgaacaccaaaccatagtaaaaatgggtgaccgttctcgtgttaaattaccttttatttgttttaagtggcgtttttcgggtactttgtgcggaggaaggatgtccagtgccgtgggcgagccgagcacggaggtgtgggcataagaggaaggaggacgcaggatatgacggatgcgatcataccagcactaaagcaccggatcccatcagaactccgaagttaagcgtgcttgggcgagagtagtactaggatgggtgacctcctgggaagtcctcgtgttgcattccttttttttggttttatttttgtttgtttttcgaacaccaaaccatagtaaaaatgggtgaccgttctcgtgttaaattaccttttatttgttttaaggggcgtttttcgggtactttgtgcggaggaaggatgtccagtgccgtgggcgagccgagcacggaggtgtgggcataagaggaaggaggacgcaggatatgacggatgcgatcataccagcactaaagcaccggatcccatcagaactccgaagttaagcgtgcttgggcgagagtagtactaggatgggtgacctcctgggaagtcttcgtgttgcattccttttttttggttttatttttgtttgtttttcgaacaccaaaccatagtaaaaatgggtgaccgttctcgtgttaaattaccttttatttgttttaaggggcgtttttcgggtactttgtgcggaggaaggatgtccagtgtcgtgggtgagccgagcccggaggtgtgggcataagaggaaggaggacgcaggatatgacggatgcgatcataccagcactaaagcaccggatcccatcagaactccgaagttaagcgtgcttgggcgagagtagtactaggatgggtgacctcctgggaagtcctcgtgttgcattccttttttttggttttatttttgtt

SEQ ID NO: 5694 - DNA, 1047 bp, Zea mays
  Zm_smallRNAprecursor_1183
cgaacaccaaaccatagtaaaaatgggtgaccgttctcgtgttaaattaccttttatttgttttaagtggcgtttttcgggtactttgtgcggaggaaggatgtccagtgccgtgggcgagccgagcacggaggtgtgggcataagaggaaggaggacgcaggatatgacggatgcgatcataccagcactaaagcaccggatcccatcagaactccgaagttaagcgtgcttgggcgagagtagtactaggatgggtgacctcctgggaagtcctcgtgttgcattccttttttttggttttatttttgtttgtttttcgaacaccaaaccatagtaaaaatgggtgaccgttctcgtgttaaattaccttttatttgttttaaggggcgtttttcgggtactttgtgcggaggaaggatgtccagtgccgtgggcgagccgagcacggaggtgtgggcataagaggaaggaggacgcaggatatgacggatgcgatcataccagcactaaagcaccggatcccatcagaactccgaagttaagcgtgcttgggcgagagtagtactaggatgggtgacctcctgggaagtcttcgtgttgcattccttttttttggttttatttttgtttgtttttcgaacaccaaaccatagtaaaaatgggtgaccgttctcgtgttaaattaccttttatttgttttaaggggcgtttttcgggtactttgtgcggaggaaggatgtccagtgtcgtgggtgagccgagcccggaggtgtgggcataagaggaaggaggacgcaggatatgacggatgcgatcataccagcactaaagcaccggatcccatcagaactccgaagttaagcgtgcttgggcgagagtagtactaggatgggtgacctcctgggaagtcctcgtgttgcattccttttttttggttttatttttgtttgtttttcgaacaccaaaccatagtaaaaatgggtgaccgttctcgtgttaaattaccttttctttgttttaaggggcgtttttcgagtactttgtg

SEQ ID NO: 5695 - DNA, 1053 bp, Zea mays
  Zm_smallRNAprecursor_1184
catagtaaaaatgggtgaccgttctcgtgttaaattaccttttatttgttttaagtggcgtttttcgggtactttgtgcggaggaaggatgtccagtgccgtgggcgagccgagcacggaggtgtgggcataagaggaaggaggacgcaggatatgacggatgcgatcataccagcactaaagcaccggatcccatcagaactccgaagttaagcgtgcttgggcgagagtagtactaggatgggtgacctcctgggaagtcctcgtgttgcattccttttttttggttttatttttgtttgtttttcgaacaccaaaccatagtaaaaatgggtgaccgttctcgtgttaaattaccttttatttgttttaaggggcgtttttcgggtactttgtgcggaggaaggatgtccagtgccgtgggcgagccgagcacggaggtgtgggcataagaggaaggaggacgcaggatatgacggatgcgatcataccagcactaaagcaccggatcccatcagaactccgaagttaagcgtgcttgggcgagagtagtactaggatgggtgacctcctgggaagtcttcgtgttgcattccttttttttggttttatttttgtttgtttttcgaacaccaaaccatagtaaaaatgggtgaccgttctcgtgttaaattaccttttatttgttttaaggggcgtttttcgggtactttgtgcggaggaaggatgtccagtgtcgtgggtgagccgagcccggaggtgtgggcataagaggaaggaggacgcaggatatgacggatgcgatcataccagcactaaagcaccggatcccatcagaactccgaagttaagcgtgcttgggcgagagtagtactaggatgggtgacctcctgggaagtcctcgtgttgcattccttttttttggttttatttttgtttgtttttcgaacaccaaaccatagtaaaaatgggtgaccgttctcgtgttaaattaccttttctttgttttaaggggcgtttttcgagtactttgtgcggaggaaggatgtccag

SEQ ID NO: 5696 - DNA, 1036 bp, Zea mays
  Zm_smallRNAprecursor_1185
aaatgggtgaccgttctcgtgttaaattaccttttatttgttttaagtggcgtttttcgggtactttgtgcggaggaaggatgtccagtgccgtgggcgagccgagcacggaggtgtgggcataagaggaaggaggacgcaggatatgacggatgcgatcataccagcactaaagcaccggatcccatcagaactccgaagttaagcgtgcttgggcgagagtagtactaggatgggtgacctcctgggaagtcctcgtgttgcattccttttttttggttttatttttgtttgtttttcgaacaccaaaccatagtaaaaatgggtgaccgttctcgtgttaaattaccttttatttgttttaaggggcgtttttcgggtactttgtgcggaggaaggatgtccagtgccgtgggcgagccgagcacggaggtgtgggcataagaggaaggaggacgcaggatatgacggatgcgatcataccagcactaaagcaccggatcccatcagaactccgaagttaagcgtgcttgggcgagagtagtactaggatgggtgacctcctgggaagtcttcgtgttgcattccttttttttggttttatttttgtttgtttttcgaacaccaaaccatagtaaaaatgggtgaccgttctcgtgttaaattaccttttatttgttttaaggggcgtttttcgggtactttgtgcggaggaaggatgtccagtgtcgtgggtgagccgagcccggaggtgtgggcataagaggaaggaggacgcaggatatgacggatgcgatcataccagcactaaagcaccggatcccatcagaactccgaagttaagcgtgcttgggcgagagtagtactaggatgggtgacctcctgggaagtcctcgtgttgcattccttttttttggttttatttttgtttgtttttcgaacaccaaaccatagtaaaaatgggtgaccgttctcgtgttaaattaccttttctttgttttaaggggcgtttttcgagtactttgtgcggaggaag

SEQ ID NO: 5697 - DNA, 1131 bp, Zea mays
  Zm_smallRNAprecursor_1186
gaagtcctcgtgttgcattccttttttttggttttatttttgtttgtttttcgaacaccaaaccatagtaaaaatgggtgaccgttctcgtgttaaattaccttttatttgttttaaggggcgtttttcgggtactttgtgcggaggaaggatgtccagtgccgtgggcgagccgagcacggaggtgtgggcataagaggaaggaggacgcaggatatgacggatgcgatcataccagcactaaagcaccggatcccatcagaactccgaagttaagcgtgcttgggcgagagtagtactaggatgggtgacctcctgggaagtcttcgtgttgcattccttttttttggttttatttttgtttgtttttcgaacaccaaaccatagtaaaaatgggtgaccgttctcgtgttaaattaccttttatttgttttaaggggcgtttttcgggtactttgtgcggaggaaggatgtccagtgtcgtgggtgagccgagcccggaggtgtgggcataagaggaaggaggacgcaggatatgacggatgcgatcataccagcactaaagcaccggatcccatcagaactccgaagttaagcgtgcttgggcgagagtagtactaggatgggtgacctcctgggaagtcctcgtgttgcattccttttttttggttttatttttgtttgtttttcgaacaccaaaccatagtaaaaatgggtgaccgttctcgtgttaaattaccttttctttgttttaaggggcgtttttcgagtactttgtgcggaggaaggatgtccagtgccgtgggcgagccgagcacggaggtgtgggcataagaggaaggaggacgcaggatatgacggatgcgatcataccagcactaaagcaccggatcccatcagaactccgaagttaagcgtgcttgggcgagagtagtactaggatgggtgacctcctgggaagtcctcgtgttgcattcctttttttttggttttatttttgtttgtttttcgaacaccaaaccatagtaaaaatgggtgaccgttctcgtgttaaattaccttttatttgttttaagtggcgtttttcgggtactttgtgcggaggaaggatgtccagtgctgtcggcgttt

SEQ ID NO: 5698 - DNA, 1047 bp, Zea mays
  Zm_smallRNAprecursor_1187
cgaacaccaaaccatagtaaaaatgggtgaccgttctcgtgttaaattaccttttatttgttttaaggggcgtttttcgggtactttgtgcggaggaaggatgtccagtgccgtgggcgagccgagcacggaggtgtgggcataagaggaaggaggacgcaggatatgacggatgcgatcataccagcactaaagcaccggatcccatcagaactccgaagttaagcgtgcttgggcgagagtagtactaggatgggtgacctcctgggaagtcttcgtgttgcattccttttttttggttttatttttgtttgtttttcgaacaccaaaccatagtaaaaatgggtgaccgttctcgtgttaaattaccttttatttgttttaaggggcgtttttcgggtactttgtgcggaggaaggatgtccagtgtcgtgggtgagccgagcccggaggtgtgggcataagaggaaggaggacgcaggatatgacggatgcgatcataccagcactaaagcaccggatcccatcagaactccgaagttaagcgtgcttgggcgagagtagtactaggatgggtgacctcctgggaagtcctcgtgttgcattccttttttttggttttatttttgtttgtttttcgaacaccaaaccatagtaaaaatgggtgaccgttctcgtgttaaattaccttttctttgttttaaggggcgtttttcgagtactttgtgcggaggaaggatgtccagtgccgtgggcgagccgagcacggaggtgtgggcataagaggaaggaggacgcaggatatgacggatgcgatcataccagcactaaagcaccggatcccatcagaactccgaagttaagcgtgcttgggcgagagtagtactaggatgggtgacctcctgggaagtcctcgtgttgcattcctttttttttggttttatttttgtttgtttttcgaacaccaaaccatagtaaaaatgggtgaccgttctcgtgttaaattaccttttatttgttttaagtggcgtttttcgggtactttgt

SEQ ID NO: 5699 - DNA, 1053 bp, Zea mays
  Zm_smallRNAprecursor_1188
catagtaaaaatgggtgaccgttctcgtgttaaattaccttttatttgttttaaggggcgtttttcgggtactttgtgcggaggaaggatgtccagtgccgtgggcgagccgagcacggaggtgtgggcataagaggaaggaggacgcaggatatgacggatgcgatcataccagcactaaagcaccggatcccatcagaactccgaagttaagcgtgcttgggcgagagtagtactaggatgggtgacctcctgggaagtcttcgtgttgcattccttttttttggttttatttttgtttgtttttcgaacaccaaaccatagtaaaaatgggtgaccgttctcgtgttaaattaccttttatttgttttaaggggcgtttttcgggtactttgtgcggaggaaggatgtccagtgtcgtgggtgagccgagcccggaggtgtgggcataagaggaaggaggacgcaggatatgacggatgcgatcataccagcactaaagcaccggatcccatcagaactccgaagttaagcgtgcttgggcgagagtagtactaggatgggtgacctcctgggaagtcctcgtgttgcattccttttttttggttttatttttgtttgtttttcgaacaccaaaccatagtaaaaatgggtgaccgttctcgtgttaaattaccttttctttgttttaaggggcgtttttcgagtactttgtgcggaggaaggatgtccagtgccgtgggcgagccgagcacggaggtgtgggcataagaggaaggaggacgcaggatatgacggatgcgatcataccagcactaaagcaccggatcccatcagaactccgaagttaagcgtgcttgggcgagagtagtactaggatgggtgacctcctgggaagtcctcgtgttgcattcctttttttttggttttatttttgtttgtttttcgaacaccaaaccatagtaaaaatgggtgaccgttctcgtgttaaattaccttttatttgttttaagtggcgtttttcgggtactttgtgcggaggaaggatgtcca

SEQ ID NO: 5700 - DNA, 1036 bp, Zea mays
  Zm_smallRNAprecursor_1189
aaatgggtgaccgttctcgtgttaaattaccttttatttgttttaaggggcgtttttcgggtactttgtgcggaggaaggatgtccagtgccgtgggcgagccgagcacggaggtgtgggcataagaggaaggaggacgcaggatatgacggatgcgatcataccagcactaaagcaccggatcccatcagaactccgaagttaagcgtgcttgggcgagagtagtactaggatgggtgacctcctgggaagtcttcgtgttgcattccttttttttggttttatttttgtttgtttttcgaacaccaaaccatagtaaaaatgggtgaccgttctcgtgttaaattaccttttatttgttttaaggggcgtttttcgggtactttgtgcggaggaaggatgtccagtgtcgtgggtgagccgagcccggaggtgtgggcataagaggaaggaggacgcaggatatgacggatgcgatcataccagcactaaagcaccggatcccatcagaactccgaagttaagcgtgcttgggcgagagtagtactaggatgggtgacctcctgggaagtcctcgtgttgcattccttttttttggttttatttttgtttgtttttcgaacaccaaaccatagtaaaaatgggtgaccgttctcgtgttaaattaccttttctttgttttaaggggcgtttttcgagtactttgtgcggaggaaggatgtccagtgccgtgggcgagccgagcacggaggtgtgggcataagaggaaggaggacgcaggatatgacggatgcgatcataccagcactaaagcaccggatcccatcagaactccgaagttaagcgtgcttgggcgagagtagtactaggatgggtgacctcctgggaagtcctcgtgttgcattcctttttttttggttttatttttgtttgtttttcgaacaccaaaccatagtaaaaatgggtgaccgttctcgtgttaaattaccttttatttgttttaagtggcgtttttcgggtactttgtgcggaggaa

SEQ ID NO: 5701 - DNA, 1190 bp, Zea mays
  Zm_smallRNAprecursor_1190
ggtactttgtgcggaggaaggatgtccagtgccgtgggcgagccgagcacggaggtgtgggcataagaggaaggaggacgcaggatatgacggatgcgatcataccagcactaaagcaccggatcccatcagaactccgaagttaagcgtgcttgggcgagagtagtactaggatgggtgacctcctgggaagtcttcgtgttgcattccttttttttggttttatttttgtttgtttttcgaacaccaaaccatagtaaaaatgggtgaccgttctcgtgttaaattaccttttatttgttttaaggggcgtttttcgggtactttgtgcggaggaaggatgtccagtgtcgtgggtgagccgagcccggaggtgtgggcataagaggaaggaggacgcaggatatgacggatgcgatcataccagcactaaagcaccggatcccatcagaactccgaagttaagcgtgcttgggcgagagtagtactaggatgggtgacctcctgggaagtcctcgtgttgcattccttttttttggttttatttttgtttgtttttcgaacaccaaaccatagtaaaaatgggtgaccgttctcgtgttaaattaccttttctttgttttaaggggcgtttttcgagtactttgtgcggaggaaggatgtccagtgccgtgggcgagccgagcacggaggtgtgggcataagaggaaggaggacgcaggatatgacggatgcgatcataccagcactaaagcaccggatcccatcagaactccgaagttaagcgtgcttgggcgagagtagtactaggatgggtgacctcctgggaagtcctcgtgttgcattcctttttttttggttttatttttgtttgtttttcgaacaccaaaccatagtaaaaatgggtgaccgttctcgtgttaaattaccttttatttgttttaagtggcgtttttcgggtactttgtgcggaggaaggatgtccagtgctgtcggcgtttcgagacaggggggtccctaagccgacgagtgagtgtgctgcgtgccccagcccagatgggtcgagcgcgtgggcgagcgcggaggggggagaggcgaggcggccggagccgagcgtgagagaggtggaagtcccgcggccttcgtgttcgtcccgcgcccaggtcaggtgcgcttgcagtaggggggtt

SEQ ID NO: 5702 - DNA, 1131 bp, Zea mays
  Zm_smallRNAprecursor_1191
gaagtcttcgtgttgcattccttttttttggttttatttttgtttgtttttcgaacaccaaaccatagtaaaaatgggtgaccgttctcgtgttaaattaccttttatttgttttaaggggcgtttttcgggtactttgtgcggaggaaggatgtccagtgtcgtgggtgagccgagcccggaggtgtgggcataagaggaaggaggacgcaggatatgacggatgcgatcataccagcactaaagcaccggatcccatcagaactccgaagttaagcgtgcttgggcgagagtagtactaggatgggtgacctcctgggaagtcctcgtgttgcattccttttttttggttttatttttgtttgtttttcgaacaccaaaccatagtaaaaatgggtgaccgttctcgtgttaaattaccttttctttgttttaaggggcgtttttcgagtactttgtgcggaggaaggatgtccagtgccgtgggcgagccgagcacggaggtgtgggcataagaggaaggaggacgcaggatatgacggatgcgatcataccagcactaaagcaccggatcccatcagaactccgaagttaagcgtgcttgggcgagagtagtactaggatgggtgacctcctgggaagtcctcgtgttgcattcctttttttttggttttatttttgtttgtttttcgaacaccaaaccatagtaaaaatgggtgaccgttctcgtgttaaattaccttttatttgttttaagtggcgtttttcgggtactttgtgcggaggaaggatgtccagtgctgtcggcgtttcgagacaggggggtccctaagccgacgagtgagtgtgctgcgtgccccagcccagatgggtcgagcgcgtgggcgagcgcggaggggggagaggcgaggcggccggagccgagcgtgagagaggtggaagtcccgcggccttcgtgttcgtcccgcgcccaggtcaggtgcgcttgcagtaggggggttacaagcgtccacgcgggtgagggaagcgagcggccccaagagagcgcctgtcccgtcctcggtcccgcgcggcccaccttttctgagaaggccctggtccttccttttatagttgtaaggagaggatcca

SEQ ID NO: 5703 - DNA, 1047 bp, Zea mays
  Zm_smallRNAprecursor_1192
cgaacaccaaaccatagtaaaaatgggtgaccgttctcgtgttaaattaccttttatttgttttaaggggcgtttttcgggtactttgtgcggaggaaggatgtccagtgtcgtgggtgagccgagcccggaggtgtgggcataagaggaaggaggacgcaggatatgacggatgcgatcataccagcactaaagcaccggatcccatcagaactccgaagttaagcgtgcttgggcgagagtagtactaggatgggtgacctcctgggaagtcctcgtgttgcattccttttttttggttttatttttgtttgtttttcgaacaccaaaccatagtaaaaatgggtgaccgttctcgtgttaaattaccttttctttgttttaaggggcgtttttcgagtactttgtgcggaggaaggatgtccagtgccgtgggcgagccgagcacggaggtgtgggcataagaggaaggaggacgcaggatatgacggatgcgatcataccagcactaaagcaccggatcccatcagaactccgaagttaagcgtgcttgggcgagagtagtactaggatgggtgacctcctgggaagtcctcgtgttgcattcctttttttttggttttatttttgtttgtttttcgaacaccaaaccatagtaaaaatgggtgaccgttctcgtgttaaattaccttttatttgttttaagtggcgtttttcgggtactttgtgcggaggaaggatgtccagtgctgtcggcgtttcgagacaggggggtccctaagccgacgagtgagtgtgctgcgtgccccagcccagatgggtcgagcgcgtgggcgagcgcggaggggggagaggcgaggcggccggagccgagcgtgagagaggtggaagtcccgcggccttcgtgttcgtcccgcgcccaggtcaggtgcgcttgcagtaggggggttacaagcgtccacgcgggtgagggaagcgagcggccccaagagagcgcctgtcccgtcctcggtcccgcgcggcccaccttttctgagaaggccctgg

SEQ ID NO: 5704 - DNA, 1053 bp, Zea mays
  Zm_smallRNAprecursor_1193
catagtaaaaatgggtgaccgttctcgtgttaaattaccttttatttgttttaaggggcgtttttcgggtactttgtgcggaggaaggatgtccagtgtcgtgggtgagccgagcccggaggtgtgggcataagaggaaggaggacgcaggatatgacggatgcgatcataccagcactaaagcaccggatcccatcagaactccgaagttaagcgtgcttgggcgagagtagtactaggatgggtgacctcctgggaagtcctcgtgttgcattccttttttttggttttatttttgtttgtttttcgaacaccaaaccatagtaaaaatgggtgaccgttctcgtgttaaattaccttttctttgttttaaggggcgtttttcgagtactttgtgcggaggaaggatgtccagtgccgtgggcgagccgagcacggaggtgtgggcataagaggaaggaggacgcaggatatgacggatgcgatcataccagcactaaagcaccggatcccatcagaactccgaagttaagcgtgcttgggcgagagtagtactaggatgggtgacctcctgggaagtcctcgtgttgcattcctttttttttggttttatttttgtttgtttttcgaacaccaaaccatagtaaaaatgggtgaccgttctcgtgttaaattaccttttatttgttttaagtggcgtttttcgggtactttgtgcggaggaaggatgtccagtgctgtcggcgtttcgagacaggggggtccctaagccgacgagtgagtgtgctgcgtgccccagcccagatgggtcgagcgcgtgggcgagcgcggaggggggagaggcgaggcggccggagccgagcgtgagagaggtggaagtcccgcggccttcgtgttcgtcccgcgcccaggtcaggtgcgcttgcagtaggggggttacaagcgtccacgcgggtgagggaagcgagcggccccaagagagcgcctgtcccgtcctcggtcccgcgcggcccaccttttctgagaaggccctggtccttccttttatagttg

SEQ ID NO: 5705 - DNA, 1036 bp, Zea mays
  Zm_smallRNAprecursor_1194
aaatgggtgaccgttctcgtgttaaattaccttttatttgttttaaggggcgtttttcgggtactttgtgcggaggaaggatgtccagtgtcgtgggtgagccgagcccggaggtgtgggcataagaggaaggaggacgcaggatatgacggatgcgatcataccagcactaaagcaccggatcccatcagaactccgaagttaagcgtgcttgggcgagagtagtactaggatgggtgacctcctgggaagtcctcgtgttgcattccttttttttggttttatttttgtttgtttttcgaacaccaaaccatagtaaaaatgggtgaccgttctcgtgttaaattaccttttctttgttttaaggggcgtttttcgagtactttgtgcggaggaaggatgtccagtgccgtgggcgagccgagcacggaggtgtgggcataagaggaaggaggacgcaggatatgacggatgcgatcataccagcactaaagcaccggatcccatcagaactccgaagttaagcgtgcttgggcgagagtagtactaggatgggtgacctcctgggaagtcctcgtgttgcattcctttttttttggttttatttttgtttgtttttcgaacaccaaaccatagtaaaaatgggtgaccgttctcgtgttaaattaccttttatttgttttaagtggcgtttttcgggtactttgtgcggaggaaggatgtccagtgctgtcggcgtttcgagacaggggggtccctaagccgacgagtgagtgtgctgcgtgccccagcccagatgggtcgagcgcgtgggcgagcgcggaggggggagaggcgaggcggccggagccgagcgtgagagaggtggaagtcccgcggccttcgtgttcgtcccgcgcccaggtcaggtgcgcttgcagtaggggggttacaagcgtccacgcgggtgagggaagcgagcggccccaagagagcgcctgtcccgtcctcggtcccgcgcggcccaccttttctgagaaggccctggtccttcctt

SEQ ID NO: 5706 - DNA, 1131 bp, Zea mays
  Zm_smallRNAprecursor_1195
aaggcctaattgcctgtcagactcactctgtcgagtggcactgcagtcggagtggcgcaggcggcgctgtccttctgtcagactggccagtggcgcggtggagtgacagcggtcacctcggctctgccgggggcgcgtgtcaggatagaggtgtcaggccacctttgcgttaaatgcccctgcaatttggtcagtcggtgtggtgatttagtcaaggttgcttctgagcgaagccaaggccttgggcaagccggtgatgtgtccgccataaaaagggggcctcgggcgagacggaagtctctcgaggtcggctgccttcggccgaggctaggctcgggtgaagcgtgatcgagtcactcgtgtggactgatccctgacttaatcgtgcccatcaggcctttgcagctttatgctgatgggggttaccagctgagaattaggcgtcttgagggtacccctaattatggtccccgacaagtgccgtgggcgagccgagcacggaggtgtgggcataagaggaaggaggacgcaagatatgacggatgcgatcataccagcactaaagcaccggatcccatcagaactccgaagttaagcgtgcttgggcgagagtagtactaggatgggtgacctcctgggaagtcctcgtgttgcattcctttttttggttttatttttgtttgtttttcgaacaccaaaccatagtaaaaatgggtgaccgttctcgtgttaaattaccttttatttgttttaaggggcgtttttcgggtactttgtgcggaggaaggatgtccagtgccgtgggcgagccgagcacggaggtgtgggcataagaggaaggaggacgccggatatgatggatgcgatcataccagcactaaagcaccagatcccatcagaactccgaagttaagcgtgcttgggcgagagtagtactaggatgggtgacctcctgggaagtcctcgtgttgcattccttttttttggttttatttttgtttgtttttcgaacaccaaaccatagtaaaaatgggtgaccgttctcgtgttaaattaccttttatttgttttaagtggcgtttttcgggtactttgtgcggaggaaggatgtccagtgtcgtgggcgagccg

SEQ ID NO: 5707 - DNA, 1047 bp, Zea mays
  Zm_smallRNAprecursor_1196
gtggcgcaggcggcgctgtccttctgtcagactggccagtggcgcggtggagtgacagcggtcacctcggctctgccgggggcgcgtgtcaggatagaggtgtcaggccacctttgcgttaaatgcccctgcaatttggtcagtcggtgtggtgatttagtcaaggttgcttctgagcgaagccaaggccttgggcaagccggtgatgtgtccgccataaaaagggggcctcgggcgagacggaagtctctcgaggtcggctgccttcggccgaggctaggctcgggtgaagcgtgatcgagtcactcgtgtggactgatccctgacttaatcgtgcccatcaggcctttgcagctttatgctgatgggggttaccagctgagaattaggcgtcttgagggtacccctaattatggtccccgacaagtgccgtgggcgagccgagcacggaggtgtgggcataagaggaaggaggacgcaagatatgacggatgcgatcataccagcactaaagcaccggatcccatcagaactccgaagttaagcgtgcttgggcgagagtagtactaggatgggtgacctcctgggaagtcctcgtgttgcattcctttttttggttttatttttgtttgtttttcgaacaccaaaccatagtaaaaatgggtgaccgttctcgtgttaaattaccttttatttgttttaaggggcgtttttcgggtactttgtgcggaggaaggatgtccagtgccgtgggcgagccgagcacggaggtgtgggcataagaggaaggaggacgccggatatgatggatgcgatcataccagcactaaagcaccagatcccatcagaactccgaagttaagcgtgcttgggcgagagtagtactaggatgggtgacctcctgggaagtcctcgtgttgcattccttttttttggttttatttttgtttgtttttcgaacaccaaaccatagtaaaaatgggtgaccgttctcgtgttaaattaccttttatttgttttaagtggcgtttttcgggtactttgtgc

SEQ ID NO: 5708 - DNA, 1053 bp, Zea mays
  Zm_smallRNAprecursor_1197
gcgctgtccttctgtcagactggccagtggcgcggtggagtgacagcggtcacctcggctctgccgggggcgcgtgtcaggatagaggtgtcaggccacctttgcgttaaatgcccctgcaatttggtcagtcggtgtggtgatttagtcaaggttgcttctgagcgaagccaaggccttgggcaagccggtgatgtgtccgccataaaaagggggcctcgggcgagacggaagtctctcgaggtcggctgccttcggccgaggctaggctcgggtgaagcgtgatcgagtcactcgtgtggactgatccctgacttaatcgtgcccatcaggcctttgcagctttatgctgatgggggttaccagctgagaattaggcgtcttgagggtacccctaattatggtccccgacaagtgccgtgggcgagccgagcacggaggtgtgggcataagaggaaggaggacgcaagatatgacggatgcgatcataccagcactaaagcaccggatcccatcagaactccgaagttaagcgtgcttgggcgagagtagtactaggatgggtgacctcctgggaagtcctcgtgttgcattcctttttttggttttatttttgtttgtttttcgaacaccaaaccatagtaaaaatgggtgaccgttctcgtgttaaattaccttttatttgttttaaggggcgtttttcgggtactttgtgcggaggaaggatgtccagtgccgtgggcgagccgagcacggaggtgtgggcataagaggaaggaggacgccggatatgatggatgcgatcataccagcactaaagcaccagatcccatcagaactccgaagttaagcgtgcttgggcgagagtagtactaggatgggtgacctcctgggaagtcctcgtgttgcattccttttttttggttttatttttgtttgtttttcgaacaccaaaccatagtaaaaatgggtgaccgttctcgtgttaaattaccttttatttgttttaagtggcgtttttcgggtactttgtgcggaggaaggatgtccagt

SEQ ID NO: 5709 - DNA, 1036 bp, Zea mays
  Zm_smallRNAprecursor_1198
cttctgtcagactggccagtggcgcggtggagtgacagcggtcacctcggctctgccgggggcgcgtgtcaggatagaggtgtcaggccacctttgcgttaaatgcccctgcaatttggtcagtcggtgtggtgatttagtcaaggttgcttctgagcgaagccaaggccttgggcaagccggtgatgtgtccgccataaaaagggggcctcgggcgagacggaagtctctcgaggtcggctgccttcggccgaggctaggctcgggtgaagcgtgatcgagtcactcgtgtggactgatccctgacttaatcgtgcccatcaggcctttgcagctttatgctgatgggggttaccagctgagaattaggcgtcttgagggtacccctaattatggtccccgacaagtgccgtgggcgagccgagcacggaggtgtgggcataagaggaaggaggacgcaagatatgacggatgcgatcataccagcactaaagcaccggatcccatcagaactccgaagttaagcgtgcttgggcgagagtagtactaggatgggtgacctcctgggaagtcctcgtgttgcattcctttttttggttttatttttgtttgtttttcgaacaccaaaccatagtaaaaatgggtgaccgttctcgtgttaaattaccttttatttgttttaaggggcgtttttcgggtactttgtgcggaggaaggatgtccagtgccgtgggcgagccgagcacggaggtgtgggcataagaggaaggaggacgccggatatgatggatgcgatcataccagcactaaagcaccagatcccatcagaactccgaagttaagcgtgcttgggcgagagtagtactaggatgggtgacctcctgggaagtcctcgtgttgcattccttttttttggttttatttttgtttgtttttcgaacaccaaaccatagtaaaaatgggtgaccgttctcgtgttaaattaccttttatttgttttaagtggcgtttttcgggtactttgtgcggaggaagg

SEQ ID NO: 5710 - DNA, 1189 bp, Zea mays
  Zm_smallRNAprecursor_1199
gggcgcgtgtcaggatagaggtgtcaggccacctttgcgttaaatgcccctgcaatttggtcagtcggtgtggtgatttagtcaaggttgcttctgagcgaagccaaggccttgggcaagccggtgatgtgtccgccataaaaagggggcctcgggcgagacggaagtctctcgaggtcggctgccttcggccgaggctaggctcgggtgaagcgtgatcgagtcactcgtgtggactgatccctgacttaatcgtgcccatcaggcctttgcagctttatgctgatgggggttaccagctgagaattaggcgtcttgagggtacccctaattatggtccccgacaagtgccgtgggcgagccgagcacggaggtgtgggcataagaggaaggaggacgcaagatatgacggatgcgatcataccagcactaaagcaccggatcccatcagaactccgaagttaagcgtgcttgggcgagagtagtactaggatgggtgacctcctgggaagtcctcgtgttgcattcctttttttggttttatttttgtttgtttttcgaacaccaaaccatagtaaaaatgggtgaccgttctcgtgttaaattaccttttatttgttttaaggggcgtttttcgggtactttgtgcggaggaaggatgtccagtgccgtgggcgagccgagcacggaggtgtgggcataagaggaaggaggacgccggatatgatggatgcgatcataccagcactaaagcaccagatcccatcagaactccgaagttaagcgtgcttgggcgagagtagtactaggatgggtgacctcctgggaagtcctcgtgttgcattccttttttttggttttatttttgtttgtttttcgaacaccaaaccatagtaaaaatgggtgaccgttctcgtgttaaattaccttttatttgttttaagtggcgtttttcgggtactttgtgcggaggaaggatgtccagtgtcgtgggcgagccgagcacggaggtgtgggcataagaggaaggaggacgcaggatatgacggatgcgatcataccagcactaaagcaccggatcccatcagaactctgaagttaagcgtgcttgggcgagagtagtactaggaggggtgacctcctaggaagtcctcgtgttgcattccttttttttggttttatttttgtt

SEQ ID NO: 5711 - DNA, 1131 bp, Zea mays
  Zm_smallRNAprecursor_1200
cggccgaggctaggctcgggtgaagcgtgatcgagtcactcgtgtggactgatccctgacttaatcgtgcccatcaggcctttgcagctttatgctgatgggggttaccagctgagaattaggcgtcttgagggtacccctaattatggtccccgacaagtgccgtgggcgagccgagcacggaggtgtgggcataagaggaaggaggacgcaagatatgacggatgcgatcataccagcactaaagcaccggatcccatcagaactccgaagttaagcgtgcttgggcgagagtagtactaggatgggtgacctcctgggaagtcctcgtgttgcattcctttttttggttttatttttgtttgtttttcgaacaccaaaccatagtaaaaatgggtgaccgttctcgtgttaaattaccttttatttgttttaaggggcgtttttcgggtactttgtgcggaggaaggatgtccagtgccgtgggcgagccgagcacggaggtgtgggcataagaggaaggaggacgccggatatgatggatgcgatcataccagcactaaagcaccagatcccatcagaactccgaagttaagcgtgcttgggcgagagtagtactaggatgggtgacctcctgggaagtcctcgtgttgcattccttttttttggttttatttttgtttgtttttcgaacaccaaaccatagtaaaaatgggtgaccgttctcgtgttaaattaccttttatttgttttaagtggcgtttttcgggtactttgtgcggaggaaggatgtccagtgtcgtgggcgagccgagcacggaggtgtgggcataagaggaaggaggacgcaggatatgacggatgcgatcataccagcactaaagcaccggatcccatcagaactctgaagttaagcgtgcttgggcgagagtagtactaggaggggtgacctcctaggaagtcctcgtgttgcattccttttttttggttttatttttgtttgtttttcgaacaccaaaccatagtaaaaatgggtgaccgttctcgtgttaaattaccttttatttgttttaaggggcgtttttcgggtactttgtgcggaggaaggatgtccagtgccgtgggcgagcc

SEQ ID NO: 5712 - DNA, 1036 bp, Zea mays
  Zm_smallRNAprecursor_1201
catcaggcctttgcagctttatgctgatgggggttaccagctgagaattaggcgtcttgagggtacccctaattatggtccccgacaagtgccgtgggcgagccgagcacggaggtgtgggcataagaggaaggaggacgcaagatatgacggatgcgatcataccagcactaaagcaccggatcccatcagaactccgaagttaagcgtgcttgggcgagagtagtactaggatgggtgacctcctgggaagtcctcgtgttgcattcctttttttggttttatttttgtttgtttttcgaacaccaaaccatagtaaaaatgggtgaccgttctcgtgttaaattaccttttatttgttttaaggggcgtttttcgggtactttgtgcggaggaaggatgtccagtgccgtgggcgagccgagcacggaggtgtgggcataagaggaaggaggacgccggatatgatggatgcgatcataccagcactaaagcaccagatcccatcagaactccgaagttaagcgtgcttgggcgagagtagtactaggatgggtgacctcctgggaagtcctcgtgttgcattccttttttttggttttatttttgtttgtttttcgaacaccaaaccatagtaaaaatgggtgaccgttctcgtgttaaattaccttttatttgttttaagtggcgtttttcgggtactttgtgcggaggaaggatgtccagtgtcgtgggcgagccgagcacggaggtgtgggcataagaggaaggaggacgcaggatatgacggatgcgatcataccagcactaaagcaccggatcccatcagaactctgaagttaagcgtgcttgggcgagagtagtactaggaggggtgacctcctaggaagtcctcgtgttgcattccttttttttggttttatttttgtttgtttttcgaacaccaaaccatagtaaaaatgggtgaccgttctcgtgttaaattaccttttatttgttttaaggggcgtttttcgggtactttgtgcggaggaag

SEQ ID NO: 5713 - DNA, 1190 bp, Zea mays
  Zm_smallRNAprecursor_1202
agggtacccctaattatggtccccgacaagtgccgtgggcgagccgagcacggaggtgtgggcataagaggaaggaggacgcaagatatgacggatgcgatcataccagcactaaagcaccggatcccatcagaactccgaagttaagcgtgcttgggcgagagtagtactaggatgggtgacctcctgggaagtcctcgtgttgcattcctttttttggttttatttttgtttgtttttcgaacaccaaaccatagtaaaaatgggtgaccgttctcgtgttaaattaccttttatttgttttaaggggcgtttttcgggtactttgtgcggaggaaggatgtccagtgccgtgggcgagccgagcacggaggtgtgggcataagaggaaggaggacgccggatatgatggatgcgatcataccagcactaaagcaccagatcccatcagaactccgaagttaagcgtgcttgggcgagagtagtactaggatgggtgacctcctgggaagtcctcgtgttgcattccttttttttggttttatttttgtttgtttttcgaacaccaaaccatagtaaaaatgggtgaccgttctcgtgttaaattaccttttatttgttttaagtggcgtttttcgggtactttgtgcggaggaaggatgtccagtgtcgtgggcgagccgagcacggaggtgtgggcataagaggaaggaggacgcaggatatgacggatgcgatcataccagcactaaagcaccggatcccatcagaactctgaagttaagcgtgcttgggcgagagtagtactaggaggggtgacctcctaggaagtcctcgtgttgcattccttttttttggttttatttttgtttgtttttcgaacaccaaaccatagtaaaaatgggtgaccgttctcgtgttaaattaccttttatttgttttaaggggcgtttttcgggtactttgtgcggaggaaggatgtccagtgccgtgggcgagccgagcccggaggtgtgggcataagaggaaggaggacgcaggatatgatggatgcgatcataccagcactaaagcaccggatcccatcagaactccgaagttaagcgtgcttgggcgagagtagtactaggatgggtgacctcctgggaagtcctcgtgttgcattccttttttttggttttatttttgtt

SEQ ID NO: 5714 - DNA, 1047 bp, Zea mays
  Zm_smallRNAprecursor_1203
cgaacaccaaaccatagtaaaaatgggtgaccgttctcgtgttaaattaccttttatttgttttaaggggcgtttttcgggtactttgtgcggaggaaggatgtccagtgccgtgggcgagccgagcacggaggtgtgggcataagaggaaggaggacgccggatatgatggatgcgatcataccagcactaaagcaccagatcccatcagaactccgaagttaagcgtgcttgggcgagagtagtactaggatgggtgacctcctgggaagtcctcgtgttgcattccttttttttggttttatttttgtttgtttttcgaacaccaaaccatagtaaaaatgggtgaccgttctcgtgttaaattaccttttatttgttttaagtggcgtttttcgggtactttgtgcggaggaaggatgtccagtgtcgtgggcgagccgagcacggaggtgtgggcataagaggaaggaggacgcaggatatgacggatgcgatcataccagcactaaagcaccggatcccatcagaactctgaagttaagcgtgcttgggcgagagtagtactaggaggggtgacctcctaggaagtcctcgtgttgcattccttttttttggttttatttttgtttgtttttcgaacaccaaaccatagtaaaaatgggtgaccgttctcgtgttaaattaccttttatttgttttaaggggcgtttttcgggtactttgtgcggaggaaggatgtccagtgccgtgggcgagccgagcccggaggtgtgggcataagaggaaggaggacgcaggatatgatggatgcgatcataccagcactaaagcaccggatcccatcagaactccgaagttaagcgtgcttgggcgagagtagtactaggatgggtgacctcctgggaagtcctcgtgttgcattccttttttttggttttatttttgtttgtttttcgaacaccaaaccatagtaaaaatgggtgaccgttctcgtgttaaattaccttttatttgttttaaggggcgtttttcgggtactttgtg

SEQ ID NO: 5715 - DNA, 1131 bp, Zea mays
  Zm_smallRNAprecursor_1204
gaagtcctcgtgttgcattccttttttttggttttatttttgtttgtttttcgaacaccaaaccatagtaaaaatgggtgaccgttctcgtgttaaattaccttttatttgttttaagtggcgtttttcgggtactttgtgcggaggaaggatgtccagtgtcgtgggcgagccgagcacggaggtgtgggcataagaggaaggaggacgcaggatatgacggatgcgatcataccagcactaaagcaccggatcccatcagaactctgaagttaagcgtgcttgggcgagagtagtactaggaggggtgacctcctaggaagtcctcgtgttgcattccttttttttggttttatttttgtttgtttttcgaacaccaaaccatagtaaaaatgggtgaccgttctcgtgttaaattaccttttatttgttttaaggggcgtttttcgggtactttgtgcggaggaaggatgtccagtgccgtgggcgagccgagcccggaggtgtgggcataagaggaaggaggacgcaggatatgatggatgcgatcataccagcactaaagcaccggatcccatcagaactccgaagttaagcgtgcttgggcgagagtagtactaggatgggtgacctcctgggaagtcctcgtgttgcattccttttttttggttttatttttgtttgtttttcgaacaccaaaccatagtaaaaatgggtgaccgttctcgtgttaaattaccttttatttgttttaaggggcgtttttcgggtactttgtgcggaggaaggatgtccagtgccgtgggcgagccgagcacggaggtgtgggcataagaggaaggaggacgcaggatatgacggatgcgatcataccagcactaaagcaccgaatcccatcagaactccgaagataagcgtgcttgggcgagagtagtactaggatgggtgacctcctgggaagtcctcgtgttgcattccttttttttggttttatttttgtttgtttttcgaacaccaaaccatagtaaaaatgggtgaccgttctcgtgttaaattaccttttatttcttttaaggggcgtttttcgggtactttgtgcggaggaaggatgtccagtgccgtgggcgagcc

SEQ ID NO: 5716 - DNA, 1047 bp, Zea mays
  Zm_smallRNAprecursor_1205
cgaacaccaaaccatagtaaaaatgggtgaccgttctcgtgttaaattaccttttatttgttttaagtggcgtttttcgggtactttgtgcggaggaaggatgtccagtgtcgtgggcgagccgagcacggaggtgtgggcataagaggaaggaggacgcaggatatgacggatgcgatcataccagcactaaagcaccggatcccatcagaactctgaagttaagcgtgcttgggcgagagtagtactaggaggggtgacctcctaggaagtcctcgtgttgcattccttttttttggttttatttttgtttgtttttcgaacaccaaaccatagtaaaaatgggtgaccgttctcgtgttaaattaccttttatttgttttaaggggcgtttttcgggtactttgtgcggaggaaggatgtccagtgccgtgggcgagccgagcccggaggtgtgggcataagaggaaggaggacgcaggatatgatggatgcgatcataccagcactaaagcaccggatcccatcagaactccgaagttaagcgtgcttgggcgagagtagtactaggatgggtgacctcctgggaagtcctcgtgttgcattccttttttttggttttatttttgtttgtttttcgaacaccaaaccatagtaaaaatgggtgaccgttctcgtgttaaattaccttttatttgttttaaggggcgtttttcgggtactttgtgcggaggaaggatgtccagtgccgtgggcgagccgagcacggaggtgtgggcataagaggaaggaggacgcaggatatgacggatgcgatcataccagcactaaagcaccgaatcccatcagaactccgaagataagcgtgcttgggcgagagtagtactaggatgggtgacctcctgggaagtcctcgtgttgcattccttttttttggttttatttttgtttgtttttcgaacaccaaaccatagtaaaaatgggtgaccgttctcgtgttaaattaccttttatttcttttaaggggcgtttttcgggtactttgtg

SEQ ID NO: 5717 - DNA, 1053 bp, Zea mays
  Zm_smallRNAprecursor_1206
catagtaaaaatgggtgaccgttctcgtgttaaattaccttttatttgttttaagtggcgtttttcgggtactttgtgcggaggaaggatgtccagtgtcgtgggcgagccgagcacggaggtgtgggcataagaggaaggaggacgcaggatatgacggatgcgatcataccagcactaaagcaccggatcccatcagaactctgaagttaagcgtgcttgggcgagagtagtactaggaggggtgacctcctaggaagtcctcgtgttgcattccttttttttggttttatttttgtttgtttttcgaacaccaaaccatagtaaaaatgggtgaccgttctcgtgttaaattaccttttatttgttttaaggggcgtttttcgggtactttgtgcggaggaaggatgtccagtgccgtgggcgagccgagcccggaggtgtgggcataagaggaaggaggacgcaggatatgatggatgcgatcataccagcactaaagcaccggatcccatcagaactccgaagttaagcgtgcttgggcgagagtagtactaggatgggtgacctcctgggaagtcctcgtgttgcattccttttttttggttttatttttgtttgtttttcgaacaccaaaccatagtaaaaatgggtgaccgttctcgtgttaaattaccttttatttgttttaaggggcgtttttcgggtactttgtgcggaggaaggatgtccagtgccgtgggcgagccgagcacggaggtgtgggcataagaggaaggaggacgcaggatatgacggatgcgatcataccagcactaaagcaccgaatcccatcagaactccgaagataagcgtgcttgggcgagagtagtactaggatgggtgacctcctgggaagtcctcgtgttgcattccttttttttggttttatttttgtttgtttttcgaacaccaaaccatagtaaaaatgggtgaccgttctcgtgttaaattaccttttatttcttttaaggggcgtttttcgggtactttgtgcggaggaaggatgtccag

SEQ ID NO: 5718 - DNA, 1036 bp, Zea mays
  Zm_smallRNAprecursor_1207
aaatgggtgaccgttctcgtgttaaattaccttttatttgttttaagtggcgtttttcgggtactttgtgcggaggaaggatgtccagtgtcgtgggcgagccgagcacggaggtgtgggcataagaggaaggaggacgcaggatatgacggatgcgatcataccagcactaaagcaccggatcccatcagaactctgaagttaagcgtgcttgggcgagagtagtactaggaggggtgacctcctaggaagtcctcgtgttgcattccttttttttggttttatttttgtttgtttttcgaacaccaaaccatagtaaaaatgggtgaccgttctcgtgttaaattaccttttatttgttttaaggggcgtttttcgggtactttgtgcggaggaaggatgtccagtgccgtgggcgagccgagcccggaggtgtgggcataagaggaaggaggacgcaggatatgatggatgcgatcataccagcactaaagcaccggatcccatcagaactccgaagttaagcgtgcttgggcgagagtagtactaggatgggtgacctcctgggaagtcctcgtgttgcattccttttttttggttttatttttgtttgtttttcgaacaccaaaccatagtaaaaatgggtgaccgttctcgtgttaaattaccttttatttgttttaaggggcgtttttcgggtactttgtgcggaggaaggatgtccagtgccgtgggcgagccgagcacggaggtgtgggcataagaggaaggaggacgcaggatatgacggatgcgatcataccagcactaaagcaccgaatcccatcagaactccgaagataagcgtgcttgggcgagagtagtactaggatgggtgacctcctgggaagtcctcgtgttgcattccttttttttggttttatttttgtttgtttttcgaacaccaaaccatagtaaaaatgggtgaccgttctcgtgttaaattaccttttatttcttttaaggggcgtttttcgggtactttgtgcggaggaag

SEQ ID NO: 5719 - DNA, 1190 bp, Zea mays
  Zm_smallRNAprecursor_1208
ggtactttgtgcggaggaaggatgtccagtgtcgtgggcgagccgagcacggaggtgtgggcataagaggaaggaggacgcaggatatgacggatgcgatcataccagcactaaagcaccggatcccatcagaactctgaagttaagcgtgcttgggcgagagtagtactaggaggggtgacctcctaggaagtcctcgtgttgcattccttttttttggttttatttttgtttgtttttcgaacaccaaaccatagtaaaaatgggtgaccgttctcgtgttaaattaccttttatttgttttaaggggcgtttttcgggtactttgtgcggaggaaggatgtccagtgccgtgggcgagccgagcccggaggtgtgggcataagaggaaggaggacgcaggatatgatggatgcgatcataccagcactaaagcaccggatcccatcagaactccgaagttaagcgtgcttgggcgagagtagtactaggatgggtgacctcctgggaagtcctcgtgttgcattccttttttttggttttatttttgtttgtttttcgaacaccaaaccatagtaaaaatgggtgaccgttctcgtgttaaattaccttttatttgttttaaggggcgtttttcgggtactttgtgcggaggaaggatgtccagtgccgtgggcgagccgagcacggaggtgtgggcataagaggaaggaggacgcaggatatgacggatgcgatcataccagcactaaagcaccgaatcccatcagaactccgaagataagcgtgcttgggcgagagtagtactaggatgggtgacctcctgggaagtcctcgtgttgcattccttttttttggttttatttttgtttgtttttcgaacaccaaaccatagtaaaaatgggtgaccgttctcgtgttaaattaccttttatttcttttaaggggcgtttttcgggtactttgtgcggaggaaggatgtccagtgccgtgggcgagccgagcacggaggtgtgggcataagaggaaggaggacgcaggatatgacggatgcgatcataccagcactaaagcatcggatcccatcagaactccgaagttaagtgtgcttgggcgagagtagtactaggatgggtgacctcctgggaagacctcgtgttgcattccttttttttgttttatttttgttt

SEQ ID NO: 5720 - DNA, 1131 bp, Zea mays
  Zm_smallRNAprecursor_1209
gaagtcctcgtgttgcattccttttttttggttttatttttgtttgtttttcgaacaccaaaccatagtaaaaatgggtgaccgttctcgtgttaaattaccttttatttgttttaaggggcgtttttcgggtactttgtgcggaggaaggatgtccagtgccgtgggcgagccgagcccggaggtgtgggcataagaggaaggaggacgcaggatatgatggatgcgatcataccagcactaaagcaccggatcccatcagaactccgaagttaagcgtgcttgggcgagagtagtactaggatgggtgacctcctgggaagtcctcgtgttgcattccttttttttggttttatttttgtttgtttttcgaacaccaaaccatagtaaaaatgggtgaccgttctcgtgttaaattaccttttatttgttttaaggggcgtttttcgggtactttgtgcggaggaaggatgtccagtgccgtgggcgagccgagcacggaggtgtgggcataagaggaaggaggacgcaggatatgacggatgcgatcataccagcactaaagcaccgaatcccatcagaactccgaagataagcgtgcttgggcgagagtagtactaggatgggtgacctcctgggaagtcctcgtgttgcattccttttttttggttttatttttgtttgtttttcgaacaccaaaccatagtaaaaatgggtgaccgttctcgtgttaaattaccttttatttcttttaaggggcgtttttcgggtactttgtgcggaggaaggatgtccagtgccgtgggcgagccgagcacggaggtgtgggcataagaggaaggaggacgcaggatatgacggatgcgatcataccagcactaaagcatcggatcccatcagaactccgaagttaagtgtgcttgggcgagagtagtactaggatgggtgacctcctgggaagacctcgtgttgcattccttttttttgttttatttttgtttgtttttcgaacaccaaaccatagtaaaaatgggtgaccgttctcgtgttaaattaccttttatttgttttaaggggcgtttttcgggtactttgtgcggaggaaggatgtccagtgccgtgggcgagccg

SEQ ID NO: 5721 - DNA, 1047 bp, Zea mays
  Zm_smallRNAprecursor_1210
cgaacaccaaaccatagtaaaaatgggtgaccgttctcgtgttaaattaccttttatttgttttaaggggcgtttttcgggtactttgtgcggaggaaggatgtccagtgccgtgggcgagccgagcccggaggtgtgggcataagaggaaggaggacgcaggatatgatggatgcgatcataccagcactaaagcaccggatcccatcagaactccgaagttaagcgtgcttgggcgagagtagtactaggatgggtgacctcctgggaagtcctcgtgttgcattccttttttttggttttatttttgtttgtttttcgaacaccaaaccatagtaaaaatgggtgaccgttctcgtgttaaattaccttttatttgttttaaggggcgtttttcgggtactttgtgcggaggaaggatgtccagtgccgtgggcgagccgagcacggaggtgtgggcataagaggaaggaggacgcaggatatgacggatgcgatcataccagcactaaagcaccgaatcccatcagaactccgaagataagcgtgcttgggcgagagtagtactaggatgggtgacctcctgggaagtcctcgtgttgcattccttttttttggttttatttttgtttgtttttcgaacaccaaaccatagtaaaaatgggtgaccgttctcgtgttaaattaccttttatttcttttaaggggcgtttttcgggtactttgtgcggaggaaggatgtccagtgccgtgggcgagccgagcacggaggtgtgggcataagaggaaggaggacgcaggatatgacggatgcgatcataccagcactaaagcatcggatcccatcagaactccgaagttaagtgtgcttgggcgagagtagtactaggatgggtgacctcctgggaagacctcgtgttgcattccttttttttgttttatttttgtttgtttttcgaacaccaaaccatagtaaaaatgggtgaccgttctcgtgttaaattaccttttatttgttttaaggggcgtttttcgggtactttgtgc

SEQ ID NO: 5722 - DNA, 1036 bp, Zea mays
  Zm_smallRNAprecursor_1211
aaatgggtgaccgttctcgtgttaaattaccttttatttgttttaaggggcgtttttcgggtactttgtgcggaggaaggatgtccagtgccgtgggcgagccgagcccggaggtgtgggcataagaggaaggaggacgcaggatatgatggatgcgatcataccagcactaaagcaccggatcccatcagaactccgaagttaagcgtgcttgggcgagagtagtactaggatgggtgacctcctgggaagtcctcgtgttgcattccttttttttggttttatttttgtttgtttttcgaacaccaaaccatagtaaaaatgggtgaccgttctcgtgttaaattaccttttatttgttttaaggggcgtttttcgggtactttgtgcggaggaaggatgtccagtgccgtgggcgagccgagcacggaggtgtgggcataagaggaaggaggacgcaggatatgacggatgcgatcataccagcactaaagcaccgaatcccatcagaactccgaagataagcgtgcttgggcgagagtagtactaggatgggtgacctcctgggaagtcctcgtgttgcattccttttttttggttttatttttgtttgtttttcgaacaccaaaccatagtaaaaatgggtgaccgttctcgtgttaaattaccttttatttcttttaaggggcgtttttcgggtactttgtgcggaggaaggatgtccagtgccgtgggcgagccgagcacggaggtgtgggcataagaggaaggaggacgcaggatatgacggatgcgatcataccagcactaaagcatcggatcccatcagaactccgaagttaagtgtgcttgggcgagagtagtactaggatgggtgacctcctgggaagacctcgtgttgcattccttttttttgttttatttttgtttgtttttcgaacaccaaaccatagtaaaaatgggtgaccgttctcgtgttaaattaccttttatttgttttaaggggcgtttttcgggtactttgtgcggaggaagg

SEQ ID NO: 5723 - DNA, 1190 bp, Zea mays
  Zm_smallRNAprecursor_1212
ggtactttgtgcggaggaaggatgtccagtgccgtgggcgagccgagcccggaggtgtgggcataagaggaaggaggacgcaggatatgatggatgcgatcataccagcactaaagcaccggatcccatcagaactccgaagttaagcgtgcttgggcgagagtagtactaggatgggtgacctcctgggaagtcctcgtgttgcattccttttttttggttttatttttgtttgtttttcgaacaccaaaccatagtaaaaatgggtgaccgttctcgtgttaaattaccttttatttgttttaaggggcgtttttcgggtactttgtgcggaggaaggatgtccagtgccgtgggcgagccgagcacggaggtgtgggcataagaggaaggaggacgcaggatatgacggatgcgatcataccagcactaaagcaccgaatcccatcagaactccgaagataagcgtgcttgggcgagagtagtactaggatgggtgacctcctgggaagtcctcgtgttgcattccttttttttggttttatttttgtttgtttttcgaacaccaaaccatagtaaaaatgggtgaccgttctcgtgttaaattaccttttatttcttttaaggggcgtttttcgggtactttgtgcggaggaaggatgtccagtgccgtgggcgagccgagcacggaggtgtgggcataagaggaaggaggacgcaggatatgacggatgcgatcataccagcactaaagcatcggatcccatcagaactccgaagttaagtgtgcttgggcgagagtagtactaggatgggtgacctcctgggaagacctcgtgttgcattccttttttttgttttatttttgtttgtttttcgaacaccaaaccatagtaaaaatgggtgaccgttctcgtgttaaattaccttttatttgttttaaggggcgtttttcgggtactttgtgcggaggaaggatgtccagtgccgtgggcgagccgagcacggaggtgtggacataagaggaaggaggacgcaggatatgacggatgcgatcataccagcactaaagcaccggatcccatcagaactccgaagttaagcgtgcttgggcgagagtagtactaggatgggtgacctcctgggaagtcctcgtgttgcattcctttttttggttttatttttgtttg

SEQ ID NO: 5724 - DNA, 1036 bp, Zea mays
  Zm_smallRNAprecursor_1213
aaatgggtgaccgttctcgtgttaaattaccttttatttgttttaaggggcgtttttcgggtactttgtgcggaggaaggatgtccagtgccgtgggcgagccgagcacggaggtgtgggcataagaggaaggaggacgcaggatatgacggatgcgatcataccagcactaaagcaccgaatcccatcagaactccgaagataagcgtgcttgggcgagagtagtactaggatgggtgacctcctgggaagtcctcgtgttgcattccttttttttggttttatttttgtttgtttttcgaacaccaaaccatagtaaaaatgggtgaccgttctcgtgttaaattaccttttatttcttttaaggggcgtttttcgggtactttgtgcggaggaaggatgtccagtgccgtgggcgagccgagcacggaggtgtgggcataagaggaaggaggacgcaggatatgacggatgcgatcataccagcactaaagcatcggatcccatcagaactccgaagttaagtgtgcttgggcgagagtagtactaggatgggtgacctcctgggaagacctcgtgttgcattccttttttttgttttatttttgtttgtttttcgaacaccaaaccatagtaaaaatgggtgaccgttctcgtgttaaattaccttttatttgttttaaggggcgtttttcgggtactttgtgcggaggaaggatgtccagtgccgtgggcgagccgagcacggaggtgtggacataagaggaaggaggacgcaggatatgacggatgcgatcataccagcactaaagcaccggatcccatcagaactccgaagttaagcgtgcttgggcgagagtagtactaggatgggtgacctcctgggaagtcctcgtgttgcattcctttttttggttttatttttgtttgtttttcgaacaccaaaccatagtaaaaatgggtgaccgttctcgtgttaaattaccttttatttgttttaaggggcgtttttcgggtactttgtgcggaggaagga

SEQ ID NO: 5725 - DNA, 1047 bp, Zea mays
  Zm_smallRNAprecursor_1214
tcgaacaccaaaccatagtaaaaatgggtgaccgttctcgtgttaaattaccttttatttcttttaaggggcgtttttcgggtactttgtgcggaggaaggatgtccagtgccgtgggcgagccgagcacggaggtgtgggcataagaggaaggaggacgcaggatatgacggatgcgatcataccagcactaaagcatcggatcccatcagaactccgaagttaagtgtgcttgggcgagagtagtactaggatgggtgacctcctgggaagacctcgtgttgcattccttttttttgttttatttttgtttgtttttcgaacaccaaaccatagtaaaaatgggtgaccgttctcgtgttaaattaccttttatttgttttaaggggcgtttttcgggtactttgtgcggaggaaggatgtccagtgccgtgggcgagccgagcacggaggtgtggacataagaggaaggaggacgcaggatatgacggatgcgatcataccagcactaaagcaccggatcccatcagaactccgaagttaagcgtgcttgggcgagagtagtactaggatgggtgacctcctgggaagtcctcgtgttgcattcctttttttggttttatttttgtttgtttttcgaacaccaaaccatagtaaaaatgggtgaccgttctcgtgttaaattaccttttatttgttttaaggggcgtttttcgggtactttgtgcggaggaaggatgtctagtgccgtgggcgagccgagcacagaggtgtgggcataagaggaaggaggacgcaggatatgacggatgcgatcataccagcactaaagcaccggatcccatcagaactccgaagttaagcttgcttgggcgagagtagtactaggatgggtgacctcctgggaagtcctcgtgttgcattattttttttggttttatttttgtttgtttttcgaacaccaaaccatagtaaaaatgggtgaccgttctcgtgttaaattaccttttatttgttttaaggggcgtttttcgggtactttgtgcg

SEQ ID NO: 5726 - DNA, 1053 bp, Zea mays
  Zm_smallRNAprecursor_1215
ccatagtaaaaatgggtgaccgttctcgtgttaaattaccttttatttcttttaaggggcgtttttcgggtactttgtgcggaggaaggatgtccagtgccgtgggcgagccgagcacggaggtgtgggcataagaggaaggaggacgcaggatatgacggatgcgatcataccagcactaaagcatcggatcccatcagaactccgaagttaagtgtgcttgggcgagagtagtactaggatgggtgacctcctgggaagacctcgtgttgcattccttttttttgttttatttttgtttgtttttcgaacaccaaaccatagtaaaaatgggtgaccgttctcgtgttaaattaccttttatttgttttaaggggcgtttttcgggtactttgtgcggaggaaggatgtccagtgccgtgggcgagccgagcacggaggtgtggacataagaggaaggaggacgcaggatatgacggatgcgatcataccagcactaaagcaccggatcccatcagaactccgaagttaagcgtgcttgggcgagagtagtactaggatgggtgacctcctgggaagtcctcgtgttgcattcctttttttggttttatttttgtttgtttttcgaacaccaaaccatagtaaaaatgggtgaccgttctcgtgttaaattaccttttatttgttttaaggggcgtttttcgggtactttgtgcggaggaaggatgtctagtgccgtgggcgagccgagcacagaggtgtgggcataagaggaaggaggacgcaggatatgacggatgcgatcataccagcactaaagcaccggatcccatcagaactccgaagttaagcttgcttgggcgagagtagtactaggatgggtgacctcctgggaagtcctcgtgttgcattattttttttggttttatttttgtttgtttttcgaacaccaaaccatagtaaaaatgggtgaccgttctcgtgttaaattaccttttatttgttttaaggggcgtttttcgggtactttgtgcggaggaaggatgtccagtg

SEQ ID NO: 5727 - DNA, 1036 bp, Zea mays
  Zm_smallRNAprecursor_1216
aaaatgggtgaccgttctcgtgttaaattaccttttatttcttttaaggggcgtttttcgggtactttgtgcggaggaaggatgtccagtgccgtgggcgagccgagcacggaggtgtgggcataagaggaaggaggacgcaggatatgacggatgcgatcataccagcactaaagcatcggatcccatcagaactccgaagttaagtgtgcttgggcgagagtagtactaggatgggtgacctcctgggaagacctcgtgttgcattccttttttttgttttatttttgtttgtttttcgaacaccaaaccatagtaaaaatgggtgaccgttctcgtgttaaattaccttttatttgttttaaggggcgtttttcgggtactttgtgcggaggaaggatgtccagtgccgtgggcgagccgagcacggaggtgtggacataagaggaaggaggacgcaggatatgacggatgcgatcataccagcactaaagcaccggatcccatcagaactccgaagttaagcgtgcttgggcgagagtagtactaggatgggtgacctcctgggaagtcctcgtgttgcattcctttttttggttttatttttgtttgtttttcgaacaccaaaccatagtaaaaatgggtgaccgttctcgtgttaaattaccttttatttgttttaaggggcgtttttcgggtactttgtgcggaggaaggatgtctagtgccgtgggcgagccgagcacagaggtgtgggcataagaggaaggaggacgcaggatatgacggatgcgatcataccagcactaaagcaccggatcccatcagaactccgaagttaagcttgcttgggcgagagtagtactaggatgggtgacctcctgggaagtcctcgtgttgcattattttttttggttttatttttgtttgtttttcgaacaccaaaccatagtaaaaatgggtgaccgttctcgtgttaaattaccttttatttgttttaaggggcgtttttcgggtactttgtgcggaggaagga

SEQ ID NO: 5728 - DNA, 1189 bp, Zea mays
  Zm_smallRNAprecursor_1217
gggtactttgtgcggaggaaggatgtccagtgccgtgggcgagccgagcacggaggtgtgggcataagaggaaggaggacgcaggatatgacggatgcgatcataccagcactaaagcatcggatcccatcagaactccgaagttaagtgtgcttgggcgagagtagtactaggatgggtgacctcctgggaagacctcgtgttgcattccttttttttgttttatttttgtttgtttttcgaacaccaaaccatagtaaaaatgggtgaccgttctcgtgttaaattaccttttatttgttttaaggggcgtttttcgggtactttgtgcggaggaaggatgtccagtgccgtgggcgagccgagcacggaggtgtggacataagaggaaggaggacgcaggatatgacggatgcgatcataccagcactaaagcaccggatcccatcagaactccgaagttaagcgtgcttgggcgagagtagtactaggatgggtgacctcctgggaagtcctcgtgttgcattcctttttttggttttatttttgtttgtttttcgaacaccaaaccatagtaaaaatgggtgaccgttctcgtgttaaattaccttttatttgttttaaggggcgtttttcgggtactttgtgcggaggaaggatgtctagtgccgtgggcgagccgagcacagaggtgtgggcataagaggaaggaggacgcaggatatgacggatgcgatcataccagcactaaagcaccggatcccatcagaactccgaagttaagcttgcttgggcgagagtagtactaggatgggtgacctcctgggaagtcctcgtgttgcattattttttttggttttatttttgtttgtttttcgaacaccaaaccatagtaaaaatgggtgaccgttctcgtgttaaattaccttttatttgttttaaggggcgtttttcgggtactttgtgcggaggaaggatgtccagtgccgtgggcgagccgagcacggaggtgtgggcataagaggaaggaggacgcaggatatgacggatgcgatcataccagcactaaagcaccggatcccatcagaactccgaagttaagtgtgcttgggcgagagtagtactaggatgggtgacctcctgggaagtcctcgtgttgcattccttttttttggttttatttttgttt

SEQ ID NO: 5729 - DNA, 1131 bp, Zea mays
  Zm_smallRNAprecursor_1218
gggaagacctcgtgttgcattccttttttttgttttatttttgtttgtttttcgaacaccaaaccatagtaaaaatgggtgaccgttctcgtgttaaattaccttttatttgttttaaggggcgtttttcgggtactttgtgcggaggaaggatgtccagtgccgtgggcgagccgagcacggaggtgtggacataagaggaaggaggacgcaggatatgacggatgcgatcataccagcactaaagcaccggatcccatcagaactccgaagttaagcgtgcttgggcgagagtagtactaggatgggtgacctcctgggaagtcctcgtgttgcattcctttttttggttttatttttgtttgtttttcgaacaccaaaccatagtaaaaatgggtgaccgttctcgtgttaaattaccttttatttgttttaaggggcgtttttcgggtactttgtgcggaggaaggatgtctagtgccgtgggcgagccgagcacagaggtgtgggcataagaggaaggaggacgcaggatatgacggatgcgatcataccagcactaaagcaccggatcccatcagaactccgaagttaagcttgcttgggcgagagtagtactaggatgggtgacctcctgggaagtcctcgtgttgcattattttttttggttttatttttgtttgtttttcgaacaccaaaccatagtaaaaatgggtgaccgttctcgtgttaaattaccttttatttgttttaaggggcgtttttcgggtactttgtgcggaggaaggatgtccagtgccgtgggcgagccgagcacggaggtgtgggcataagaggaaggaggacgcaggatatgacggatgcgatcataccagcactaaagcaccggatcccatcagaactccgaagttaagtgtgcttgggcgagagtagtactaggatgggtgacctcctgggaagtcctcgtgttgcattccttttttttggttttatttttgtttgtttttcgaacaccaaaccatagtaaaaataggtgaccgttctcgtgttaaattaccttttatttgttttaaggggcgtttttcgggtactttatgcggaggaaggatgtccagtgccgtgggcgagccg

SEQ ID NO: 5730 - DNA, 1053 bp, Zea mays
  Zm_smallRNAprecursor_1219
ccatagtaaaaatgggtgaccgttctcgtgttaaattaccttttatttgttttaaggggcgtttttcgggtactttgtgcggaggaaggatgtccagtgccgtgggcgagccgagcacggaggtgtggacataagaggaaggaggacgcaggatatgacggatgcgatcataccagcactaaagcaccggatcccatcagaactccgaagttaagcgtgcttgggcgagagtagtactaggatgggtgacctcctgggaagtcctcgtgttgcattcctttttttggttttatttttgtttgtttttcgaacaccaaaccatagtaaaaatgggtgaccgttctcgtgttaaattaccttttatttgttttaaggggcgtttttcgggtactttgtgcggaggaaggatgtctagtgccgtgggcgagccgagcacagaggtgtgggcataagaggaaggaggacgcaggatatgacggatgcgatcataccagcactaaagcaccggatcccatcagaactccgaagttaagcttgcttgggcgagagtagtactaggatgggtgacctcctgggaagtcctcgtgttgcattattttttttggttttatttttgtttgtttttcgaacaccaaaccatagtaaaaatgggtgaccgttctcgtgttaaattaccttttatttgttttaaggggcgtttttcgggtactttgtgcggaggaaggatgtccagtgccgtgggcgagccgagcacggaggtgtgggcataagaggaaggaggacgcaggatatgacggatgcgatcataccagcactaaagcaccggatcccatcagaactccgaagttaagtgtgcttgggcgagagtagtactaggatgggtgacctcctgggaagtcctcgtgttgcattccttttttttggttttatttttgtttgtttttcgaacaccaaaccatagtaaaaataggtgaccgttctcgtgttaaattaccttttatttgttttaaggggcgtttttcgggtactttatgcggaggaaggatgtccagt

SEQ ID NO: 5731 - DNA, 1036 bp, Zea mays
  Zm_smallRNAprecursor_1220
aaaatgggtgaccgttctcgtgttaaattaccttttatttgttttaaggggcgtttttcgggtactttgtgcggaggaaggatgtccagtgccgtgggcgagccgagcacggaggtgtggacataagaggaaggaggacgcaggatatgacggatgcgatcataccagcactaaagcaccggatcccatcagaactccgaagttaagcgtgcttgggcgagagtagtactaggatgggtgacctcctgggaagtcctcgtgttgcattcctttttttggttttatttttgtttgtttttcgaacaccaaaccatagtaaaaatgggtgaccgttctcgtgttaaattaccttttatttgttttaaggggcgtttttcgggtactttgtgcggaggaaggatgtctagtgccgtgggcgagccgagcacagaggtgtgggcataagaggaaggaggacgcaggatatgacggatgcgatcataccagcactaaagcaccggatcccatcagaactccgaagttaagcttgcttgggcgagagtagtactaggatgggtgacctcctgggaagtcctcgtgttgcattattttttttggttttatttttgtttgtttttcgaacaccaaaccatagtaaaaatgggtgaccgttctcgtgttaaattaccttttatttgttttaaggggcgtttttcgggtactttgtgcggaggaaggatgtccagtgccgtgggcgagccgagcacggaggtgtgggcataagaggaaggaggacgcaggatatgacggatgcgatcataccagcactaaagcaccggatcccatcagaactccgaagttaagtgtgcttgggcgagagtagtactaggatgggtgacctcctgggaagtcctcgtgttgcattccttttttttggttttatttttgtttgtttttcgaacaccaaaccatagtaaaaataggtgaccgttctcgtgttaaattaccttttatttgttttaaggggcgtttttcgggtactttatgcggaggaagg

SEQ ID NO: 5732 - DNA, 1189 bp, Zea mays
  Zm_smallRNAprecursor_1221
gggtactttgtgcggaggaaggatgtccagtgccgtgggcgagccgagcacggaggtgtggacataagaggaaggaggacgcaggatatgacggatgcgatcataccagcactaaagcaccggatcccatcagaactccgaagttaagcgtgcttgggcgagagtagtactaggatgggtgacctcctgggaagtcctcgtgttgcattcctttttttggttttatttttgtttgtttttcgaacaccaaaccatagtaaaaatgggtgaccgttctcgtgttaaattaccttttatttgttttaaggggcgtttttcgggtactttgtgcggaggaaggatgtctagtgccgtgggcgagccgagcacagaggtgtgggcataagaggaaggaggacgcaggatatgacggatgcgatcataccagcactaaagcaccggatcccatcagaactccgaagttaagcttgcttgggcgagagtagtactaggatgggtgacctcctgggaagtcctcgtgttgcattattttttttggttttatttttgtttgtttttcgaacaccaaaccatagtaaaaatgggtgaccgttctcgtgttaaattaccttttatttgttttaaggggcgtttttcgggtactttgtgcggaggaaggatgtccagtgccgtgggcgagccgagcacggaggtgtgggcataagaggaaggaggacgcaggatatgacggatgcgatcataccagcactaaagcaccggatcccatcagaactccgaagttaagtgtgcttgggcgagagtagtactaggatgggtgacctcctgggaagtcctcgtgttgcattccttttttttggttttatttttgtttgtttttcgaacaccaaaccatagtaaaaataggtgaccgttctcgtgttaaattaccttttatttgttttaaggggcgtttttcgggtactttatgcggaggaaggatgtccagtgccgtgggcgagccgagcacggaggtgtgggcataagaggaaggaggactgagagcacctagaggggggggggtgaataggtgatcctgtaaaaacttaaacttatagccacaaaacttagattaagcgttagcacagtaattgccaagtggctagagagacctcaaaacacgataaccacaagaaagcaatcacagagttga

SEQ ID NO: 5733 - DNA, 1131 bp, Zea mays
  Zm_smallRNAprecursor_1222
gggaagtcctcgtgttgcattcctttttttggttttatttttgtttgtttttcgaacaccaaaccatagtaaaaatgggtgaccgttctcgtgttaaattaccttttatttgttttaaggggcgtttttcgggtactttgtgcggaggaaggatgtctagtgccgtgggcgagccgagcacagaggtgtgggcataagaggaaggaggacgcaggatatgacggatgcgatcataccagcactaaagcaccggatcccatcagaactccgaagttaagcttgcttgggcgagagtagtactaggatgggtgacctcctgggaagtcctcgtgttgcattattttttttggttttatttttgtttgtttttcgaacaccaaaccatagtaaaaatgggtgaccgttctcgtgttaaattaccttttatttgttttaaggggcgtttttcgggtactttgtgcggaggaaggatgtccagtgccgtgggcgagccgagcacggaggtgtgggcataagaggaaggaggacgcaggatatgacggatgcgatcataccagcactaaagcaccggatcccatcagaactccgaagttaagtgtgcttgggcgagagtagtactaggatgggtgacctcctgggaagtcctcgtgttgcattccttttttttggttttatttttgtttgtttttcgaacaccaaaccatagtaaaaataggtgaccgttctcgtgttaaattaccttttatttgttttaaggggcgtttttcgggtactttatgcggaggaaggatgtccagtgccgtgggcgagccgagcacggaggtgtgggcataagaggaaggaggactgagagcacctagaggggggggggtgaataggtgatcctgtaaaaacttaaacttatagccacaaaacttagattaagcgttagcacagtaattgccaagtggctagagagacctcaaaacacgataaccacaagaaagcaatcacagagttgacacggtggttatcccgtggttcggccaagtacaaaacttgcctactccacgttgtggcgtcccaacggacgagagttgcactcaactcctctcaagtgatccaatgatcaacttgaataccacggtgttt

SEQ ID NO: 5734 - DNA, 1047 bp, Zea mays
  Zm_smallRNAprecursor_1223
tcgaacaccaaaccatagtaaaaatgggtgaccgttctcgtgttaaattaccttttatttgttttaaggggcgtttttcgggtactttgtgcggaggaaggatgtctagtgccgtgggcgagccgagcacagaggtgtgggcataagaggaaggaggacgcaggatatgacggatgcgatcataccagcactaaagcaccggatcccatcagaactccgaagttaagcttgcttgggcgagagtagtactaggatgggtgacctcctgggaagtcctcgtgttgcattattttttttggttttatttttgtttgtttttcgaacaccaaaccatagtaaaaatgggtgaccgttctcgtgttaaattaccttttatttgttttaaggggcgtttttcgggtactttgtgcggaggaaggatgtccagtgccgtgggcgagccgagcacggaggtgtgggcataagaggaaggaggacgcaggatatgacggatgcgatcataccagcactaaagcaccggatcccatcagaactccgaagttaagtgtgcttgggcgagagtagtactaggatgggtgacctcctgggaagtcctcgtgttgcattccttttttttggttttatttttgtttgtttttcgaacaccaaaccatagtaaaaataggtgaccgttctcgtgttaaattaccttttatttgttttaaggggcgtttttcgggtactttatgcggaggaaggatgtccagtgccgtgggcgagccgagcacggaggtgtgggcataagaggaaggaggactgagagcacctagaggggggggggtgaataggtgatcctgtaaaaacttaaacttatagccacaaaacttagattaagcgttagcacagtaattgccaagtggctagagagacctcaaaacacgataaccacaagaaagcaatcacagagttgacacggtggttatcccgtggttcggccaagtacaaaacttgcctactccacgttgtggcgtcccaacggacgagagttgcactcaactcctctcaagt

SEQ ID NO: 5735 - DNA, 1053 bp, Zea mays
  Zm_smallRNAprecursor_1224
ccatagtaaaaatgggtgaccgttctcgtgttaaattaccttttatttgttttaaggggcgtttttcgggtactttgtgcggaggaaggatgtctagtgccgtgggcgagccgagcacagaggtgtgggcataagaggaaggaggacgcaggatatgacggatgcgatcataccagcactaaagcaccggatcccatcagaactccgaagttaagcttgcttgggcgagagtagtactaggatgggtgacctcctgggaagtcctcgtgttgcattattttttttggttttatttttgtttgtttttcgaacaccaaaccatagtaaaaatgggtgaccgttctcgtgttaaattaccttttatttgttttaaggggcgtttttcgggtactttgtgcggaggaaggatgtccagtgccgtgggcgagccgagcacggaggtgtgggcataagaggaaggaggacgcaggatatgacggatgcgatcataccagcactaaagcaccggatcccatcagaactccgaagttaagtgtgcttgggcgagagtagtactaggatgggtgacctcctgggaagtcctcgtgttgcattccttttttttggttttatttttgtttgtttttcgaacaccaaaccatagtaaaaataggtgaccgttctcgtgttaaattaccttttatttgttttaaggggcgtttttcgggtactttatgcggaggaaggatgtccagtgccgtgggcgagccgagcacggaggtgtgggcataagaggaaggaggactgagagcacctagaggggggggggtgaataggtgatcctgtaaaaacttaaacttatagccacaaaacttagattaagcgttagcacagtaattgccaagtggctagagagacctcaaaacacgataaccacaagaaagcaatcacagagttgacacggtggttatcccgtggttcggccaagtacaaaacttgcctactccacgttgtggcgtcccaacggacgagagttgcactcaactcctctcaagtgatccaatgatcaacttg

SEQ ID NO: 5736 - DNA, 1036 bp, Zea mays
  Zm_smallRNAprecursor_1225
aaaatgggtgaccgttctcgtgttaaattaccttttatttgttttaaggggcgtttttcgggtactttgtgcggaggaaggatgtctagtgccgtgggcgagccgagcacagaggtgtgggcataagaggaaggaggacgcaggatatgacggatgcgatcataccagcactaaagcaccggatcccatcagaactccgaagttaagcttgcttgggcgagagtagtactaggatgggtgacctcctgggaagtcctcgtgttgcattattttttttggttttatttttgtttgtttttcgaacaccaaaccatagtaaaaatgggtgaccgttctcgtgttaaattaccttttatttgttttaaggggcgtttttcgggtactttgtgcggaggaaggatgtccagtgccgtgggcgagccgagcacggaggtgtgggcataagaggaaggaggacgcaggatatgacggatgcgatcataccagcactaaagcaccggatcccatcagaactccgaagttaagtgtgcttgggcgagagtagtactaggatgggtgacctcctgggaagtcctcgtgttgcattccttttttttggttttatttttgtttgtttttcgaacaccaaaccatagtaaaaataggtgaccgttctcgtgttaaattaccttttatttgttttaaggggcgtttttcgggtactttatgcggaggaaggatgtccagtgccgtgggcgagccgagcacggaggtgtgggcataagaggaaggaggactgagagcacctagaggggggggggtgaataggtgatcctgtaaaaacttaaacttatagccacaaaacttagattaagcgttagcacagtaattgccaagtggctagagagacctcaaaacacgataaccacaagaaagcaatcacagagttgacacggtggttatcccgtggttcggccaagtacaaaacttgcctactccacgttgtggcgtcccaacggacgagagttgcactcaactcctctcaagtgatccaatg

SEQ ID NO: 5737 - DNA, 1134 bp, Zea mays
  Zm_smallRNAprecursor_1226
aagatggattatgataagaagctgaggaagctcgcccccacgaagaaaatccaaaagaagaccaagaaccaaggaggccaggctgaacggaagaagaaggcccctccagcaccaactcccgccaggatagagaatttgtccgacgtcgaggatatgtccctagctagccttgatgaccttctcaaggaatttggggacactttagaaaaagagttcggtagtacctcagagaacgctcgcgtgtagtacgacttgtagtagttgtatgcttgtaatgtattggtgtaatgaataaaataacttggttggaaaaaattggtatgtgcataatagtgactctctccccctggcagatggcttcggataaaaccacgcctaccgcctccgggattggagcagggtttctcctaagagctgaaagagaagccggtagagaagaaagtgagacccacctccccgcacctccagaactacccctagatttagcccaagttctagccaaccaaacccgactcatcgaggtcctcactagaagtctagaaaatcaacgcatgaatggtggaagaccacaagacaggatggaagatttcctgaggctcaagcctcacacgtttgtcgaatctagcaatcccctcgatgctgacgattggctgcgcacgattaaaaggaagctggaagccatcggatgcccggaaaatcagcgtgttcaactggctgctcatcaactttccggaatggccttagcctggtgggataccttcaatgttgccattagagatgctacctgggcagagtttgaaactgctttccgagagcaccatgtgccccaagggatcgttcagctcaaggaagatgaattcctggaactaactcaagacggaagatctgtcagtgagtacgtgcacaaattcacagagttggcccgctacgcgccggacgacgtcaatagcgaagtcaagaagatggcctgctttttgaaggggctcagaccagaactcaagaccatcctagccagccaagacttcctcagtttctcgcacatctccaacaaagccatgcaagtggaaagggcaaaggaagaataaaaaggccatctcaagaggaaattccaagtcctccgagctcagcatcaag

SEQ ID NO: 5738 - DNA, 1125 bp, Zea mays
  Zm_smallRNAprecursor_1227
cgtcctcccaggcccagctgttgtagcagcaagacccctcccctctccgtggctccgaccttgtgcgggaaccaaaacccccaagaaagcaggagtttttgaaggggggggaggagacgaagaagccccaatgccctgggtgggcggcggtggttcacctatgagcccatgaacatgggagggagttgaaccaccacagccctactctactctactctactctacctgtgtttgggtggagcagtggtgttgccaagatctggtttgggtcccctccctttctctgtccgtccaagagtagagcagagatttggaagcttgctggtgcgcaaggcgctagagattggtggagcaggggtgatgggccatgggagaggagggggcggatcggatgaatgcgacggacggggaagatgatggacggagtagttagagagaggctatttgtttggggaacgtatcatgtgctcatggagctcttgtgctcatatgagcactttaaatctggtgccttcatttctcatctaagtgtgaatagacattttctagtttcttctgtgcgtcacccttgaccacctgcgccgtctgtcgcttctatgtgccactgctgctctcacccctggatgagaaatgaaggcaccagatttaaagtgctcatatgagcacaagagctccatgagcacaggatatgttcccatttgtttgttggctgctggcagtaaatttgctttgcttgagcttccgtttcacatccaatacccgtgttccagttccactttggttttgtgcgatgaaatgaacaagggtcaaggaagggcagagaggccagaggaagatcacgtgctacgcatggatgactctggccgtggtcggtcacagcaaaattcagttggcaacgtatctagtgcaaatcaacctatctatataaccatgcaaacttttaatctaaatcacttgatgttgatgtaagggacgcggaacgtggataatcttacacttaaccgcctgctgttaatcacactttttcaaatccctcttccactccttcgcacgtctccttatatcaacatcatgtgattcaaattaaaagtttatatggttatacggatgagtctcacaatagat

SEQ ID NO: 5739 - DNA, 1171 bp, Zea mays
  Zm_smallRNAprecursor_1228
caatacttcactttaccatttttatgtagaaacttgagattatcttctattaaatgtttattagtattaatttacttgcaatttcgtggtcgaacaagaatattttttataaccaattaatgtattatccgacaagtatccgatatccgatcaaataatatccgtatccgtcacttatctgcccggataaatatccggtccctgtatccgtatccgtcctatttctaactatccgtatccgatcccgaatccgttttaaatacattagggtaggatacaggatgagctaatatccgtccgtatccgcccgttttcacccctagctgtgaaactacatagatcacttaggtaaaaacattagtttcacaactctagtcatatagagaattccctttttgataagtgctttaagaatttgaatttcttacttagcaccttattcatttacgaacacggggtttttctcgtttatgtctagatcatggcaataatagagtaatcaaattgaaatgtgccaagaaatacttacaaccaatttaagtatttggattgccatatgtaagaaagaagattatgtaatctgttatatgataacctcaattttgatcatctttggtcttgatcttcaacttggagtaccaagataagtgccaaaatatttctcaacaaatatccttgtaccccttcactttccataattatagatcaattcaaaaccaaactatggtctctcaaacaacttatgtgatttatcctatatgagagccttccaatcaaagtgactttcaatatttcaaatacttgtcacttatgacagattctgtatactccaaagaaacatccataaattttgatgtacagatcctatgaccacgaaaattggtggagatgtgctttaataagtctgctaacagctgtaaaaagttgagactcatttgacttcatatgtgctgccagccacaacatctcccacaataggtacatgctaaaaactgctgtgtttgtgttggcaagattgacttaatcaagaagtttcacttatccaatgattatgaaatttgcacagactttgctatcatatgtatagagcaagtaaactgaatttcaagccaatttaaatagatttgatcactcaaacatggttatgagcacaaccttgtcagattttcaa

SEQ ID NO: 5740 - DNA, 1156 bp, Zea mays
  Zm_smallRNAprecursor_1229
atttagatattaataataatggtacgttggttgatggccaaggaaacaagatggtgtcaattagtttgtcaattactacgacacccaaatctcaattgttcaattattgcaaatgccttcttggttcatttacttgaagcaaaaagtgtaaaaaaaaggaacatgtccaaacaatgaaaaagttgcaaaaacttgttatataattatttatttaattgaaacgaacaatctgtaaaagttattgaaacagtaaaaagatagagcaaaattgtacatcaggcttgtcctgaaacgtgatacacacgtatatatatacatactggttcatttatgcatgaatccaattatccagattaaagtttcccggcgcttgggaggcaatagcatgcatatccatgtctgcaatgcaactgcaagtaagagatagaaatgacgagaaattatcagtagaccgccacgggaaggaaagggagagagagagacagacagacagacagagaggagctcccttcaatccaagcacgagggaaagatgatggcgggctcatctcccgggtcatgcacacccatgcaagtgcagaggtgagcagcggccattgctgcaccagagaggtatccatgaaccggcagctgcaaccgaccacttcccctcctggattggatcgaagggagctcttcgatcgcctttcttaatcatgcatcttcttcttcttcttcatggcttcattcatcccgtagcatgccatcgaggcttgtgaagtagctcgagtacaacgatagcctaagcgttggtgggcttatatagaggtcatgagcaaatctgagccgttggacgatcacatctgcgtacgtcccctctcctactgtgcgggacagagaaacaacacgccttgccttgatttgattcataatttgtttggccttgtttgtttatttgtgaggttggcatgcatatgcatggaaactgacgctaatctttattccttgtggcatctgctcatgcactgtacgtccttgttgtgctatcttatatataaacaaaacatatgggaatctctcagtgctggagacagcaattaacggccggattcgatctttagaggattcgttctcccttagtccccgaatccttttcttgtccgagcattcctctatt

SEQ ID NO: 5741 - DNA, 1067 bp, Zea mays
  Zm_smallRNAprecursor_1230
agttcacttgataataatgattgtgttggctctaactcaagtaatgcaaatgatggttctatctcaagcatacttgatgattatggtgattgttcatgctcggacaatgatatcactactacaagcccatccattacatcacattgcttcatgtcacaaggtaatatgaaggtatataatgctaatgtgactaatcattcatattcatatgatgagcttgttggtatacttgcaagcatgaacattgctttagaaattgagaaagataaaacaagaaacttggaaaatgaaaactcatttctaaagtattcatgtgaacaacaaaagcatctactttatgttgtaacttgttcacatgaggagctaaaattgagtcatgaggaacttagtgttgctcatgaaaatttgatacaagagcatgcttttctcactaacgagttttctagtaaagaaaataaaactagtgataattcatcccatgaattatatgatcaattgaaaaatgttgctaatccatgtgatgaagacaagaagcatgtatccacctcttgtgatgatttattagctatgccatgttcttcaagtatagattattactattcttccttgtcttgtgagactaaccttttgaaggaaaataataagctcaaaaacaaagtgaagaatttaagcaacatgtttgagagatggcataaatcaaaagtcactcatgatcttatattgaaaaatcaaagaagatatgatgacaagagtggccttggtttcaacaagagcaatatcaaaggcagacaattcaaattaaaaggaaatgagctatctcacttcatgtgctataaatgccatgagatgggtcatcttgcaaaggcatgccccaataaaaggaagctcaagttgaagaaggaagaaaggaggctaaagcatgacaagtgcttcaagtgccacacttggggtcacctcacctcaatgtgcccaaccaagaaattagtgaagccacaagagaagcctcaaccaaagccacgagttgagcaaaggaaggatccccaaaagcaaatcaagattaaccatga

SEQ ID NO: 5742 - DNA, 1042 bp, Zea mays
  Zm_smallRNAprecursor_1231
tgaacattgctttagaaattgagaaagataaaacaagaaacttggaaaatgaaaactcatttctaaagtattcatgtgaacaacaaaagcatctactttatgttgtaacttgttcacatgaggagctaaaattgagtcatgaggaacttagtgttgctcatgaaaatttgatacaagagcatgcttttctcactaacgagttttctagtaaagaaaataaaactagtgataattcatcccatgaattatatgatcaattgaaaaatgttgctaatccatgtgatgaagacaagaagcatgtatccacctcttgtgatgatttattagctatgccatgttcttcaagtatagattattactattcttccttgtcttgtgagactaaccttttgaaggaaaataataagctcaaaaacaaagtgaagaatttaagcaacatgtttgagagatggcataaatcaaaagtcactcatgatcttatattgaaaaatcaaagaagatatgatgacaagagtggccttggtttcaacaagagcaatatcaaaggcagacaattcaaattaaaaggaaatgagctatctcacttcatgtgctataaatgccatgagatgggtcatcttgcaaaggcatgccccaataaaaggaagctcaagttgaagaaggaagaaaggaggctaaagcatgacaagtgcttcaagtgccacacttggggtcacctcacctcaatgtgcccaaccaagaaattagtgaagccacaagagaagcctcaaccaaagccacgagttgagcaaaggaaggatccccaaaagcaaatcaagattaaccatgaatataatggtgatgtggggaagaaaaagaaaacaagaagaagacattcaatatataatcaagataacatgatgagcacaaatcaaaagaagaaggatggtttggctcaaatcaagtgctacatgtgtgatgatatgggtcactttgcctcaaggtgtcccgacaatcttgagaagaaggctcaagcaaatgagaagaggcaagactatgtgaa

SEQ ID NO: 5743 - DNA, 1064 bp, Zea mays
  Zm_smallRNAprecursor_1232
acatcaagaggcgtagaaaagagagacttttgctcgtcgtccttgacaaccgatggaacaatacttctttcgtgaagttcttggacttagtgtattcattcagattcatttatgtttttcagcagctgaagacttcttttctgctatgattgattgatggggctgtgtcttcacccagttctgcctgtggcttgggctattttatcttcctctgcgcattatgtttttcggctcactttcgagcttgtatccccggtattgtaataacattattcagactctgtaactatttgaagtaatgaatgtggttagtagcctcctgggactagtaattatatcacatttgagtcccaaaggatcgggacgcttcaggtggtatcggagcctataggactggccgtagaccacaaccctgaccttaaaagttgccttaacaagaaaacacctcttacctccaagaaacactctttccccttttccccgatattaatagacctttcctttcgtctaccagatggaaaacccctgggtgattaggacttcctattgctcagaggaggaaggctttcctcaccttcttcgaagctgcgcactgcgcttggggatccgcaagaagcccgaatatgtctggaaagagtaccgtgaaaatggaatggaaaagtgctctatgggggtctacttgggagaaagccggaactacccaaaccaccctcctttccaaattaccttcatcgggcaccgcttcccagacacatgccagagcgttgctcgaaaagccctcaaacaactatgccaaaactatagccgagagacctttgaaactcccctccgatatttcccacccagcaacaaaaacaccccaacctggaagaaaagactccaggctctgtcaggaggagattccatagaagatgatcccactatcgtctacatggccggatacctccacacccccgacaaccactacgatgagctctcctcccattgtacccacctaaactcccgagtggaaagcctagagcagcaagtcaaagagcttacgcaagagaaggtatccctccagg

SEQ ID NO: 5744 - DNA, 1133 bp, Zea mays
  Zm_smallRNAprecursor_1233
tcgagttttctggtgccggtcttgctgctgagctcggaggacttggaatttcctcttgagatggcctttttcttcttcctttgccctttccacttgcatggctttgttggagaggtgcgagaaactgaggaagtcttggcaggctaggatggtcttgagttctggtctgagccccttcaaaaagcgggccatcttcttgacttcggtgctgacatcgtccggcgcgtagcgggccaactctgtgaatttgtgcacgtactcactgaccaatcttccatcttgagttagttcctggaattcatcttccttgagctgaacgatcccttggggcacatggtgctctcggaaagcagtttcaaactctgcccaggtagcatctcttatggcaacattgaaggtatcccaccaggctaaggccattccagaaagttgatgagcagccagttgaacacgccgattttctgggcatccgatggcttccagctttcttttaatcgtgcgcagccaatcgtcagcatcgaggggattgctagatcagacaaacgtgggaggcttgagcctcaggaaatctcccatcctgtcttgtggtcttccaccattcgggcgttgattttccagacttctagtgaggacctcgatgagtcgggtttggttggctagaacttgggctaaatctaggggtagttctggaggtgcggggaggtgggtctcacttccttctctaccggcttctcttccagctcttaggggaaaccctgctccaatcccgggggcggtaggcgtggttttatccgaagccatctgccagggggagagagtcactattatgcacatgctaatttttccaaccaagttattttattcattacaccaatacattacaagcatacagctactacaagtcgtactacacacgagcgttctctgaggtactacggaactctttttctaaagtgtccccaaattccttgagaaggtcatcaaggctagctagggacatatcctcgacgtcggacaaattctctatcctggcgggagttggtgctggaggggccttcttcttccgttcagcctagcctccttgattcttggtcttcttttggattttcctcgtgggggcgagcttcctcagc

SEQ ID NO: 5745 - DNA, 1038 bp, Zea mays
  Zm_smallRNAprecursor_1234
tagctatagatggccaaacgggtcgtgctaaatgggccggcactaagcacggcacggcccatagtgcttcggcacgacacgggcacgattcatatagtgccagtgccggcacgacacgaatctagtgccgtgcttgggccgccaccccggcacgatgggctggcacgagcacgacacgattaactggccggcacggttaggcacgacttagaccaacatgtggtttataaatgtgattgtgatatgtgtatgtggttgtacattgttatttgttatgatttacacataatgaattcactttataatgatataaatattcgagttttaaaattatatatataatcttaaagatcttctatatttttttatcttttaaaatgaaatagtgtctgggctggcacggacactattagatattagtgtcgtatagtgccggcacggcacgattaggcactatagtgtagtgcctgggccgctggttaggcactagtgccggcacggcacgacacgattactaatagtgcctaatagtgccgtgcctaatagtgcttagtgccgtgccgggccgggcggcccgtttggccatctatatagctagctattattacagtactagcacttcagcaggcggcagagaagaagaagaataagcccccgggcctgggcatcctgcgtgcgacacttgcgagcagaacaggccaacacagctagctagcaggccgtccggccggcaaggcatgaagggcgacaaggcgggcgggagggacaggggcggcgccagcaggccgctgcgcctcgagtcgcagcggttcaggctgctgtccatcgtcgtcggctgcttcgtcatctgcctcgtcttcctcctctcctcccgccccgacgccgccgccgccttcggcaccggtcagtgcctaacttcctctgcgcgcgccctcgccggctcttctttgttccacgcttgcgcggtacccctgctctcagcctctgacgcgttattccacgcgcgttcctgcttcttgcagtgagtgtgagccccaa

SEQ ID NO: 5746 - DNA, 1126 bp, Zea mays
  Zm_smallRNAprecursor_1235
cgcctgcttcaccccaaggtggacggcgtcgcagagtttgctctgcatgtagccactcggggcatgcatgtggctctgcgaggactcacccgaggggacgtccccggcttcgaggctttggtcgaagtccaccatcgtgtcagataggtccttcagcttggcgatcttttggtccatggcctgggaacgcgtctaggaggtctcgatggaggtgtccaaatcccaccggagctctggaggataaccaagacactaagcagggcccgacaaaaaccatatagacaaagcgaaggtaacaacgcgtacctcccatttgggccttcaggccttgggcctcagatcgctcggcctctagatcctttgcaagtgagtcagcttgggaggaggcctcggtggcttggcaccgagactcatctcgttcgccaatcagcgcaaggaggctttccctcaagggaatgtatcctgtgttcatggagctcttgtgctcatatgagcactttaaatctggtgccttcatttctcatccagggggtgagggcagcagcggcacacagaagagacaggcggcgcggcgcaacaagggtggcacacagaagaaactaggaaatgtctattcacacttggatgagaaatgaaggcaccagatttaaagtgctcatatgagcacaagagctccatgagcacaggatatgttcccttccctcaattaccgcacctcctcctccagtggcgtcaccttcttattcagcagtcgcacctcctcctccagcggcgccaccttcgcgcgcaaggacgcgacctcgtccttcagctccgcgcacagcaaggtcaggccagccgcctcagcactcttctaggctagctgcttgtttgaacgatacatcagacccttctagcgctgcagcatggcccaaacattgcgctcacgaaggatgaagacagacttggccgcagacttcaccattagaccctgagaaggaaaaacaacatcattacaccactcctggaaagggatctctcatgcagagaaggtatgattctcttacccaagccatagtctggaactcggaaaacatttgattctcctccacgtcgtcgaggataaagtagggcaggccattagtag

SEQ ID NO: 5747 - DNA, 1061 bp, Zea mays
  Zm_smallRNAprecursor_1236
tgactttgttcttcaccttggtcttccgctgccaattgattcaacactacaactggcacttgaggttcaactataactatgttctcatcttccaatccacacacatacttggaatcaaacaacaaatcatcaagatgacattcggcagacattctaaaaggtatctggtgaaaattggagaggtgtatcttgtgggacaagaatacactggaacaacataacaggttactagttcacatgaaacagtcagcccatgacaagtttcagtttccaagtttctgatggcacatttcagatagaaaagcatcaacattacaaaccttattataaatataatatcatataagtagatgcagctcataacatcaagatcacataacttgtcataggagttaatatcttgcactgcagacaccataaaaatagacaccgtatcttatgagcaaggagccctgctgctcccatgagcaaaatcaatccaggccacaccctccacatccaacggtgctgcgtcagggggttttttgtaaaatgtacagagttgcaaagaacattttacaaaaccccctgacacagcaccgttggatgtggagggtgtggtctgcattgattttgctcatgggagcaccaacgctccttgcgcacaagatacgttctcataaaaatatgtacaaaatctctatttttaacctgtttagccaagctgttggagttgctagctctaacataaagataaggataaaaagttttttttcttccgaaaaaatgcataaggaaggtaaaattattgttttgagatacaatacatgtaaagagagttagttttaatggctgattgtataatttgaattaacggctgattattagtttgcatgtgatacgatatgagttggacaggcgggacccaaaatgcgccgaccaacacccacgctttccgggctcaattatacgctcctcccggctggccggccgggtcacacacatgtagcctgcactgcacccctgcactgcgctgcactgactgaagctaagctgcatgcattgcattgggtagccctgcc

SEQ ID NO: 5748 - DNA, 1058 bp, Zea mays
  Zm_smallRNAprecursor_1237
gtgcgttacagctttctcgaaactttttcaaatttttatcacagcctctacatatgatatcatgacacgtggacaggtttcatgattttctgactttgtttctgttttatacaattttttaaacacctagatggaaagtttacggtcatgttgagtgagcatgttgctcgaagtttctggtccgctcctgaaatcggtcgtaacttgtgctaagtagtatgaatatcatttttgcatgcacggttttccaagtttcgagtgacctgcagttcaaatctgaattttccgaagaaattcaaataaacaaactaaatgtactagctatagaaaacactgttataatcgtcccacaatggtacatgtaggtctacatagtgtaggaacataccacaaaaagtttggtgaccaaaataaaaaaaaataaaaatatgctttgccgagtgtctacataggacactcggcaaagactctctttgccgagtgccagatatttgacactcggcaaaggctgacggccgtcagttgtagacggccgctaacggccctttgccgagagccatgtttgccgagtgcttgacgctcggcaaaacagtctttgccgagtgcttggctgtgccgagtgccctgcactcggtaaacaagatctttaccgagcgcaggactctgccgagagcggccctcggcaaagtcgactttgccgagtgcccgataaaaagtactcggcaaagccgccggcactcggcaaagagccgaattccggtagtgtatattgtttgttttcaaccgttggactcatgcaccttgggtctaattggaacagtgatgcctaagagagagagagagaggtgaattaggtaatctaatttctcttgaaactatgacctttgtttttctctattaaataaaatcaatctatcttgtgtgcaactacggttttaactaagtgttgctatccctatcataaaggagttatgaaactgttggggcctcttatgccgaagatcacttattagcgaagatcacctatctaacatatcgcttcagcattagcaagtgta

SEQ ID NO: 5749 - DNA, 1088 bp, Zea mays
  Zm_smallRNAprecursor_1238
agctttaacaaacaagggcggacgtgtctccgagaagtccagataagaagtttcgcgggggccttgttgatagccccacccaccttgctgctggagctgttggccccgccatttctcttagaaagcgggtattatcagaagttgcgttcactagggcggcaatcgcctcagccagtgtgggaggaacaagaggtggatttggtgtagatttcctcccccgggaggtaccagctccatcctgagctcgagtcttggaaggcatgtgtggcaacaacatttgaaaacaatatgatatgccaaagaaaaagccatccattttacattaccaaaagtaatgttacagactcaagactcttacaacaggatacattgcctagtatacaatagcactacctattatacactagtacaacctacaatacactacactacttctacttctactacaccactagtcctgcttcccgttgcttttggcggcctcgtcgtcgggtgtgggagaccattcgtcgaccagcctcatggaaggagggggctgaaaaaggtctaactcaccaccaagcgcgtgtcctgcaacatgggagggtccggcttccgactcaacagggtgcgcaggtgcactagggtgtaattgtgaatacagtacatggacttcctcatgtaaagtattgcaatagacctacaggtttgaaagggaaatgtgcccttgggccatttctaagtattttggtgagtgagtgccaatgcaagtgcttttgtgttgatctatgcaatgtggtggacaaagtgcaaatcatgtcaaaaggtatgtttctcagacttagtacattgtttttgagactaatgtattgtgtctaagtgctggaaacaggaaaagaacaattggaaatgtcttggcccgagcagccaagactctgctcagtctggaagaaccggactgtccggtggtgcaccggacagtgtccggtgcgccaggctggctcgtgcgaactcgctgctctcgagatttcatcggcggcgtacggctataattcaccggactgtccggtgagccaacggtcggccgggccaacggtcggctgcgcgat

SEQ ID NO: 5750 - DNA, 1133 bp, Zea mays
  Zm_smallRNAprecursor_1239
tcgagttttctggtgccgatcttgctgctgagcctggaggacttggaatttcctcttgagatggcctttttcttcctcttttgccctttccacttgcatggctttgttggagaggtgagagaaactgaggaagtcttggctggctaggatggtcttgagttctggcctgagtcccttcaggaagcgggccatcttcttgacttcggtactgacgtcatctggtgcgtaccgggctaattccgtgaacttgtgcacatatttgctgacagatcttccgtcttgagtcagttcccggaattcgtcttccttgagctgaacgagcccttggggcacatggtgctcccggaaagctgtttcaaacttcgcccaggtagcatctctgatggtgacattgaaggtatcccaccaggctaaggccatcccggagagttgatgagtagccagttgaacacgctgattttctgggcatccgatggcttccagctttcttttaatcgtgcgcagccaatcgtcagcatcgaggggattgctagatctggcaaacgtgggaggcttgagcctcaggaaatcccccatcctgtcttgcgttcttccaccattcggacgttgattttccagacttcgagtgaggacctcgatgagtcgggtttggttggctagaacttgggctagatctaagggtagttctggaggtgcagggaggtgggtttcactttcctctctaccggcttccctttcagctctcaggggaaaccctgctccaatcccggaggcggtaggcgtggttttatccgaagccatctgctagggggagataatcactattatgcacatgccaatttttatcaaccaagttattttattcattacaccaatacattacaagcatacgactactactagtcatactacacgcgagcgttctcagaggtactcccgaactctttttctaaggtgtccccgaattccctgagaaggtcatcaaggctagctagggacatatcctcgatgtcggacaaattccctatcctagtgggagctagtgctgggggagccttcttcctctgctcagcttggcctccttggttcctggtcttcttttgaattttcttcgtgggggcgagcttcatctt

SEQ ID NO: 5751 - DNA, 1076 bp, Zea mays
  Zm_smallRNAprecursor_1240
tgtcgttcgcgagtgtcgcgcgtgtcgttcgcacgcgttgtcgtgtgccgttcgcgtgtgtcgcacgccttgccgcgtgccgttcgcgcgtatcgcgcgttgtccgcgcgctaagtcgtttgtgtccgcgcgttgcgcacatcatgtttgcacgtcgtgcgtcgttaattcgcctagcttagaatcgctcatattcattaagttacttgcttaactgcaactattaaaatagtaagttagtcaaaactaagtagtaatattaatttacatttgattaatatcaattaatataattatattgaattggatgttctaattagtacttgtttaacgtaaacgcgctaactcctcgaccgtagcttcgactatcgtggttcttttcctcgcgtaaccgtagaggcgctctctattttatattgctcgcttttataacattttatcttgtatggtgtaatcactacagtaaactaacaaaaatccgacggtcaatttatctccgacggctgtctacgatgccgtcggacataacgttatgtccgacggccaccaaggactctcggaaatacctccttacctccgacggctaccctgacagccgtcggacataagcttatgtccgacggcctcctacgtagccgtcggaggtaaggttttttaacacggcaagcccggcgcgcggttcatttttcatgcgcgctcgctctctcctctcttctctctgcccgtcgccgccgccgccgtgccgtcaccgcccgtcgccgccgccgccccggccgcccgccgtcgacacccgccgcccgcccccgtcaccgccccggcgccgccgccgccccgtcaccgccgccgccccgctcgcccgccgtcgacacccgccgcccgcccccgtcgacacccgctgccggccgccactgccctgcccactgctaagtaagtatttttatttttattttgtagtttccactgttgttattaaattattagtatgttaaatgatgtttatcttattatatccgagggcctaaatttgattatatggcgaaatttggttatgtaattaattaagtttgttttcgttt

SEQ ID NO: 5752 - DNA, 1080 bp, Zea mays
  Zm_smallRNAprecursor_1241
atgagctccgagcccatgctgacaagaacattgtgataatgctggttggcaacaagagcgatctcgaggagcagcgggccgtgagcactgaagacgccaaggagtttgccgagaaggagaacctcttctttttggagacctctgcgctccaggcaacaaatgtggagagcttctttttagatatttgacagaactgtgacacgagggaaggatgtgctgatgtattggttctcttgttctctaattgatatgttttatccctgcggcaaatatctgtagcactgattgttttttagagtgaatctgccttgtccaagaaagaatcatgctagtttgcaaccatggttgttgtctggagctaaacagacagataaaatgcgacgcgcaggctctatcagagcagctacacagggaacataaatccaaaaaatgactaagatgtaaaaaaatggtggtctatttagtatgagtctgggccttaagcgagcccatgctgcagtggcctgttatcctcccaccgttaatagcgagcagtgatcgctgctctgtgaagacagcctcacgccgttcctgccactctaggtccaaggaagcccagggccttcgcccaagcctccaacggccactaccaacttggaacgggcaggccaaccaaggaacagcatgtgcccagaccaagactcggtaccaaacatccgcaccaccttaatgcccccacctgggttacaagcccgcgcaactgagctcggcgagtgtggtctacaaagacaaatatttaagctggcgctgtgcagcttggagcggcgaggtggaactaaacagagggacaagcgactggtacgctggcttcctttcatgcttttttgtttcttcttgaagaaaattttcgatgcagctggttactgcatggatgattcagattcagactcaacgatgtgcagatctttttaccgacagttttgtgttttgaagtgttgccggttcctacttgttagagaagttgccatccatataatggtattttctcaagagagaagggaagaaacaactggcactttcccatgctgactgatgcagcaa

SEQ ID NO: 5753 - DNA, 1227 bp, Zea mays
  Zm_smallRNAprecursor_1242
gccacatcttcgctcagctaattcggccaccacagttctagggaactcttgaggcctctcgcctcctctttgggtcctaccgtccagcccctgaggatcctgtgtcggcaccttctcaagtgattgacactcaggccgaggataccgcttttcaccagtttgagactcagggcgcaacagtccctgacgatgatgatgatgatgactttggggttccgcctctgcctccacgcactcatgattatgaggctaggagttccagtgctgcccctgctagcccgcctgccattggccctgctcttgctgtgatcctccagacccttactcagcagcaggctcacttggccgcagtctagcagtagatgttcgagagaatgctatcgatgtttcagactattcaggacagacaggatactctacagcagcagcttctggcagaccgccaagtaagaagtgtagaacaattagctcataaggaccgccattgtataaccattcatcaacagatgcagcttcccaaattgggtaaaaatgcaatccgatcgccgcagaagtaggaataatagcaccagagataatattgtttccataaagtaaagaaccagaaacaggctcacgaataccatcaatatctactggaggagcagcgatgaaggcgataatatatacggaagttgtggtcaataaggtagggatcatcaaaacaccaaaccatccaatgtaaagacggttttcggtgctagttatctagttgcagaagcgaccccacaggcttgtactttcgcgtctctctaaaattgcagtcatggtaaggtcttggtttattcaaattgcaaggactgggctgagaacagggccttcatgactctcatgctttagcataccggtgttccaattcccctagttcaatcagcaccgcctccacctcttcaggctattgttgtgccagccattcaggcaggacctcctcttcctacagttggtccttcttcctctccgctccgaccaatcaccctggttttctcgtcgtcggtcatcagcttcgtcagcactcagccgccagtgcccccagctcctgctgttaccactactgttgtggcggtatctgtgacctcttcagctccggcagctcctgcagcatagcctccgtccgagtcagtaccagctccagcttctatggcagatcctggatctgagactgactctgacccgcagctggcattcgct

SEQ ID NO: 5754 - DNA, 1197 bp, Zea mays
  Zm_smallRNAprecursor_1243
caccacagttctagggaactcttgaggcctctcgcctcctctttgggtcctaccgtccagcccctgaggatcctgtgtcggcaccttctcaagtgattgacactcaggccgaggataccgcttttcaccagtttgagactcagggcgcaacagtccctgacgatgatgatgatgatgactttggggttccgcctctgcctccacgcactcatgattatgaggctaggagttccagtgctgcccctgctagcccgcctgccattggccctgctcttgctgtgatcctccagacccttactcagcagcaggctcacttggccgcagtctagcagtagatgttcgagagaatgctatcgatgtttcagactattcaggacagacaggatactctacagcagcagcttctggcagaccgccaagtaagaagtgtagaacaattagctcataaggaccgccattgtataaccattcatcaacagatgcagcttcccaaattgggtaaaaatgcaatccgatcgccgcagaagtaggaataatagcaccagagataatattgtttccataaagtaaagaaccagaaacaggctcacgaataccatcaatatctactggaggagcagcgatgaaggcgataatatatacggaagttgtggtcaataaggtagggatcatcaaaacaccaaaccatccaatgtaaagacggttttcggtgctagttatctagttgcagaagcgaccccacaggcttgtactttcgcgtctctctaaaattgcagtcatggtaaggtcttggtttattcaaattgcaaggactgggctgagaacagggccttcatgactctcatgctttagcataccggtgttccaattcccctagttcaatcagcaccgcctccacctcttcaggctattgttgtgccagccattcaggcaggacctcctcttcctacagttggtccttcttcctctccgctccgaccaatcaccctggttttctcgtcgtcggtcatcagcttcgtcagcactcagccgccagtgcccccagctcctgctgttaccactactgttgtggcggtatctgtgacctcttcagctccggcagctcctgcagcatagcctccgtccgagtcagtaccagctccagcttctatggcagatcctggatctgagactgactctgacccgcagctggcattc

SEQ ID NO: 5755 - DNA, 1200 bp, Zea mays
  Zm_smallRNAprecursor_1244
caccacagttctagggaactcttgaggcctctcgcctcctctttgggtcctaccgtccagcccctgaggatcctgtgtcggcaccttctcaagtgattgacactcaggccgaggataccgcttttcaccagtttgagactcagggcgcaacagtccctgacgatgatgatgatgatgactttggggttccgcctctgcctccacgcactcatgattatgaggctaggagttccagtgctgcccctgctagcccgcctgccattggccctgctcttgctgtgatcctccagacccttactcagcagcaggctcacttggccgcagtctagcagtagatgttcgagagaatgctatcgatgtttcagactattcaggacagacaggatactctacagcagcagcttctggcagaccgccaagtaagaagtgtagaacaattagctcataaggaccgccattgtataaccattcatcaacagatgcagcttcccaaattgggtaaaaatgcaatccgatcgccgcagaagtaggaataatagcaccagagataatattgtttccataaagtaaagaaccagaaacaggctcacgaataccatcaatatctactggaggagcagcgatgaaggcgataatatatacggaagttgtggtcaataaggtagggatcatcaaaacaccaaaccatccaatgtaaagacggttttcggtgctagttatctagttgcagaagcgaccccacaggcttgtactttcgcgtctctctaaaattgcagtcatggtaaggtcttggtttattcaaattgcaaggactgggctgagaacagggccttcatgactctcatgctttagcataccggtgttccaattcccctagttcaatcagcaccgcctccacctcttcaggctattgttgtgccagccattcaggcaggacctcctcttcctacagttggtccttcttcctctccgctccgaccaatcaccctggttttctcgtcgtcggtcatcagcttcgtcagcactcagccgccagtgcccccagctcctgctgttaccactactgttgtggcggtatctgtgacctcttcagctccggcagctcctgcagcatagcctccgtccgagtcagtaccagctccagcttctatggcagatcctggatctgagactgactctgacccgcagctggcattcgct

SEQ ID NO: 5756 - DNA, 1113 bp, Zea mays
  Zm_smallRNAprecursor_1245
ccacagttctagggaactcttgaggcctctcgcctcctctttgggtcctaccgtccagcccctgaggatcctgtgtcggcaccttctcaagtgattgacactcaggccgaggataccgcttttcaccagtttgagactcagggcgcaacagtccctgacgatgatgatgatgatgactttggggttccgcctctgcctccacgcactcatgattatgaggctaggagttccagtgctgcccctgctagcccgcctgccattggccctgctcttgctgtgatcctccagacccttactcagcagcaggctcacttggccgcagtctagcagtagatgttcgagagaatgctatcgatgtttcagactattcaggacagacaggatactctacagcagcagcttctggcagaccgccaagtaagaagtgtagaacaattagctcataaggaccgccattgtataaccattcatcaacagatgcagcttcccaaattgggtaaaaatgcaatccgatcgccgcagaagtaggaataatagcaccagagataatattgtttccataaagtaaagaaccagaaacaggctcacgaataccatcaatatctactggaggagcagcgatgaaggcgataatatatacggaagttgtggtcaataaggtagggatcatcaaaacaccaaaccatccaatgtaaagacggttttcggtgctagttatctagttgcagaagcgaccccacaggcttgtactttcgcgtctctctaaaattgcagtcatggtaaggtcttggtttattcaaattgcaaggactgggctgagaacagggccttcatgactctcatgctttagcataccggtgttccaattcccctagttcaatcagcaccgcctccacctcttcaggctattgttgtgccagccattcaggcaggacctcctcttcctacagttggtccttcttcctctccgctccgaccaatcaccctggttttctcgtcgtcggtcatcagcttcgtcagcactcagccgccagtgcccccagctcctgctgttaccactactgttgtggcggtatctgtgacctcttcagctccggcagctcctgcagcata

SEQ ID NO: 5757 - DNA, 1058 bp, Zea mays
  Zm_smallRNAprecursor_1246
cctctttgggtcctaccgtccagcccctgaggatcctgtgtcggcaccttctcaagtgattgacactcaggccgaggataccgcttttcaccagtttgagactcagggcgcaacagtccctgacgatgatgatgatgatgactttggggttccgcctctgcctccacgcactcatgattatgaggctaggagttccagtgctgcccctgctagcccgcctgccattggccctgctcttgctgtgatcctccagacccttactcagcagcaggctcacttggccgcagtctagcagtagatgttcgagagaatgctatcgatgtttcagactattcaggacagacaggatactctacagcagcagcttctggcagaccgccaagtaagaagtgtagaacaattagctcataaggaccgccattgtataaccattcatcaacagatgcagcttcccaaattgggtaaaaatgcaatccgatcgccgcagaagtaggaataatagcaccagagataatattgtttccataaagtaaagaaccagaaacaggctcacgaataccatcaatatctactggaggagcagcgatgaaggcgataatatatacggaagttgtggtcaataaggtagggatcatcaaaacaccaaaccatccaatgtaaagacggttttcggtgctagttatctagttgcagaagcgaccccacaggcttgtactttcgcgtctctctaaaattgcagtcatggtaaggtcttggtttattcaaattgcaaggactgggctgagaacagggccttcatgactctcatgctttagcataccggtgttccaattcccctagttcaatcagcaccgcctccacctcttcaggctattgttgtgccagccattcaggcaggacctcctcttcctacagttggtccttcttcctctccgctccgaccaatcaccctggttttctcgtcgtcggtcatcagcttcgtcagcactcagccgccagtgcccccagctcctgctgttaccactactgttgtggcggtatctgtgacctcttcagct

SEQ ID NO: 5758 - DNA, 1227 bp, Zea mays
  Zm_smallRNAprecursor_1247
gcatagcacatcagggttcaccggatcagggccacggtgaccacgaacgtaaacctccataaaacttggagcaactacactttcagcttcctgcatgaaaaagaagagttaaaccatagaattttcatagatgtaacatacaagtttgatttacatacttaccatgcggcgtgcggtaccaaggtgtccatcggcgccgtacctgtgccccggtccttcagtgccacggttggcacggtgcttctgggactctgcaatccacttaggcgacgcccatctcttagccaaccacctccaggcttccatgtccttcgcaagccaatccacaacgctctccaggtactactcctctgtgaggtagatctcattggccccttttatcgatgtttcagactattcaggacagacaggatactctacagcagcagcttctggcagaccgccaagtaagaagtgtagaacaattagctcataaggaccgccattgtataaccattcatcaacagatgcagcttcccaaattgggtaaaaatgcaatccgatcgccgcagaagtaggaataatagcatcagagataatattgtttccataaagtaaagaaccagaaacaggctcacgaataccatcaatatctactggaggagcagcgatgaaggcgataatatatacggaagttgtggtcaataaggtagggatcatcaaaacaccaaaccatccaatgtaaagacggttttcggtgctagttatccagttgcagaagcgaccccacaggcttgtactttcgcgtctctctaaaattgcagtcatggtaaggtcttggtttattcaaattgcaaggactgggctgagaacagggccttcatgactctcatgctttagcataccggtgttccaattcccctagttcaatcagcaccgcctccacctcttcaggctgttgttgtgccagccattcaggcaggacctcctcttcctacagttggtccttcttcctctccgctccgaccgatcaccctggttttctcgtcgtcggtcatcagctccgtcagcactcagccgccagtgcccccagctcctgctattaccactactgttgtggcggtatctgtgacctcttcagctccggcagctcctgcagcatagcctccgtccgagtcagtaccagctccagcttctatggcagatcctggatctgagactgactctgaccggtagctagcattcgct

SEQ ID NO: 5759 - DNA, 1231 bp, Zea mays
  Zm_smallRNAprecursor_1248
gcatagcacatcagggttcaccggatcagggccacggtgaccacgaacgtaaacctccataaaacttggagcaactacactttcagcttcctgcatgaaaaagaagagttaaaccatagaattttcatagatgtaacatacaagtttgatttacatacttaccatgcggcgtgcggtaccaaggtgtccatcggcgccgtacctgtgccccggtccttcagtgccacggttggcacggtgcttctgggactctgcaatccacttaggcgacgcccatctcttagccaaccacctccaggcttccatgtccttcgcaagccaatccacaacgctctccaggtactactcctctgtgaggtagatctcattggccccttttatcgatgtttcagactattcaggacagacaggatactctacagcagcagcttctggcagaccgccaagtaagaagtgtagaacaattagctcataaggaccgccattgtataaccattcatcaacagatgcagcttcccaaattgggtaaaaatgcaatccgatcgccgcagaagtaggaataatagcatcagagataatattgtttccataaagtaaagaaccagaaacaggctcacgaataccatcaatatctactggaggagcagcgatgaaggcgataatatatacggaagttgtggtcaataaggtagggatcatcaaaacaccaaaccatccaatgtaaagacggttttcggtgctagttatccagttgcagaagcgaccccacaggcttgtactttcgcgtctctctaaaattgcagtcatggtaaggtcttggtttattcaaattgcaaggactgggctgagaacagggccttcatgactctcatgctttagcataccggtgttccaattcccctagttcaatcagcaccgcctccacctcttcaggctgttgttgtgccagccattcaggcaggacctcctcttcctacagttggtccttcttcctctccgctccgaccgatcaccctggttttctcgtcgtcggtcatcagctccgtcagcactcagccgccagtgcccccagctcctgctattaccactactgttgtggcggtatctgtgacctcttcagctccggcagctcctgcagcatagcctccgtccgagtcagtaccagctccagcttctatggcagatcctggatctgagactgactctgaccggtagctagcattcgctcttc

SEQ ID NO: 5760 - DNA, 1197 bp, Zea mays
  Zm_smallRNAprecursor_1249
agggccacggtgaccacgaacgtaaacctccataaaacttggagcaactacactttcagcttcctgcatgaaaaagaagagttaaaccatagaattttcatagatgtaacatacaagtttgatttacatacttaccatgcggcgtgcggtaccaaggtgtccatcggcgccgtacctgtgccccggtccttcagtgccacggttggcacggtgcttctgggactctgcaatccacttaggcgacgcccatctcttagccaaccacctccaggcttccatgtccttcgcaagccaatccacaacgctctccaggtactactcctctgtgaggtagatctcattggccccttttatcgatgtttcagactattcaggacagacaggatactctacagcagcagcttctggcagaccgccaagtaagaagtgtagaacaattagctcataaggaccgccattgtataaccattcatcaacagatgcagcttcccaaattgggtaaaaatgcaatccgatcgccgcagaagtaggaataatagcatcagagataatattgtttccataaagtaaagaaccagaaacaggctcacgaataccatcaatatctactggaggagcagcgatgaaggcgataatatatacggaagttgtggtcaataaggtagggatcatcaaaacaccaaaccatccaatgtaaagacggttttcggtgctagttatccagttgcagaagcgaccccacaggcttgtactttcgcgtctctctaaaattgcagtcatggtaaggtcttggtttattcaaattgcaaggactgggctgagaacagggccttcatgactctcatgctttagcataccggtgttccaattcccctagttcaatcagcaccgcctccacctcttcaggctgttgttgtgccagccattcaggcaggacctcctcttcctacagttggtccttcttcctctccgctccgaccgatcaccctggttttctcgtcgtcggtcatcagctccgtcagcactcagccgccagtgcccccagctcctgctattaccactactgttgtggcggtatctgtgacctcttcagctccggcagctcctgcagcatagcctccgtccgagtcagtaccagctccagcttctatggcagatcctggatctgagactgactctgaccggtagctagcattc

SEQ ID NO: 5761 - DNA, 1200 bp, Zea mays
  Zm_smallRNAprecursor_1250
agggccacggtgaccacgaacgtaaacctccataaaacttggagcaactacactttcagcttcctgcatgaaaaagaagagttaaaccatagaattttcatagatgtaacatacaagtttgatttacatacttaccatgcggcgtgcggtaccaaggtgtccatcggcgccgtacctgtgccccggtccttcagtgccacggttggcacggtgcttctgggactctgcaatccacttaggcgacgcccatctcttagccaaccacctccaggcttccatgtccttcgcaagccaatccacaacgctctccaggtactactcctctgtgaggtagatctcattggccccttttatcgatgtttcagactattcaggacagacaggatactctacagcagcagcttctggcagaccgccaagtaagaagtgtagaacaattagctcataaggaccgccattgtataaccattcatcaacagatgcagcttcccaaattgggtaaaaatgcaatccgatcgccgcagaagtaggaataatagcatcagagataatattgtttccataaagtaaagaaccagaaacaggctcacgaataccatcaatatctactggaggagcagcgatgaaggcgataatatatacggaagttgtggtcaataaggtagggatcatcaaaacaccaaaccatccaatgtaaagacggttttcggtgctagttatccagttgcagaagcgaccccacaggcttgtactttcgcgtctctctaaaattgcagtcatggtaaggtcttggtttattcaaattgcaaggactgggctgagaacagggccttcatgactctcatgctttagcataccggtgttccaattcccctagttcaatcagcaccgcctccacctcttcaggctgttgttgtgccagccattcaggcaggacctcctcttcctacagttggtccttcttcctctccgctccgaccgatcaccctggttttctcgtcgtcggtcatcagctccgtcagcactcagccgccagtgcccccagctcctgctattaccactactgttgtggcggtatctgtgacctcttcagctccggcagctcctgcagcatagcctccgtccgagtcagtaccagctccagcttctatggcagatcctggatctgagactgactctgaccggtagctagcattcgct

SEQ ID NO: 5762 - DNA, 1113 bp, Zea mays
  Zm_smallRNAprecursor_1251
ggccacggtgaccacgaacgtaaacctccataaaacttggagcaactacactttcagcttcctgcatgaaaaagaagagttaaaccatagaattttcatagatgtaacatacaagtttgatttacatacttaccatgcggcgtgcggtaccaaggtgtccatcggcgccgtacctgtgccccggtccttcagtgccacggttggcacggtgcttctgggactctgcaatccacttaggcgacgcccatctcttagccaaccacctccaggcttccatgtccttcgcaagccaatccacaacgctctccaggtactactcctctgtgaggtagatctcattggccccttttatcgatgtttcagactattcaggacagacaggatactctacagcagcagcttctggcagaccgccaagtaagaagtgtagaacaattagctcataaggaccgccattgtataaccattcatcaacagatgcagcttcccaaattgggtaaaaatgcaatccgatcgccgcagaagtaggaataatagcatcagagataatattgtttccataaagtaaagaaccagaaacaggctcacgaataccatcaatatctactggaggagcagcgatgaaggcgataatatatacggaagttgtggtcaataaggtagggatcatcaaaacaccaaaccatccaatgtaaagacggttttcggtgctagttatccagttgcagaagcgaccccacaggcttgtactttcgcgtctctctaaaattgcagtcatggtaaggtcttggtttattcaaattgcaaggactgggctgagaacagggccttcatgactctcatgctttagcataccggtgttccaattcccctagttcaatcagcaccgcctccacctcttcaggctgttgttgtgccagccattcaggcaggacctcctcttcctacagttggtccttcttcctctccgctccgaccgatcaccctggttttctcgtcgtcggtcatcagctccgtcagcactcagccgccagtgcccccagctcctgctattaccactactgttgtggcggtatctgtgacctcttcagctccggcagctcctgcagcata

SEQ ID NO: 5763 - DNA, 1097 bp, Zea mays
  Zm_smallRNAprecursor_1252
aacatacaagtttgatttacatacttaccatgcggcgtgcggtaccaaggtgtccatcggcgccgtacctgtgccccggtccttcagtgccacggttggcacggtgcttctgggactctgcaatccacttaggcgacgcccatctcttagccaaccacctccaggcttccatgtccttcgcaagccaatccacaacgctctccaggtactactcctctgtgaggtagatctcattggccccttttatcgatgtttcagactattcaggacagacaggatactctacagcagcagcttctggcagaccgccaagtaagaagtgtagaacaattagctcataaggaccgccattgtataaccattcatcaacagatgcagcttcccaaattgggtaaaaatgcaatccgatcgccgcagaagtaggaataatagcatcagagataatattgtttccataaagtaaagaaccagaaacaggctcacgaataccatcaatatctactggaggagcagcgatgaaggcgataatatatacggaagttgtggtcaataaggtagggatcatcaaaacaccaaaccatccaatgtaaagacggttttcggtgctagttatccagttgcagaagcgaccccacaggcttgtactttcgcgtctctctaaaattgcagtcatggtaaggtcttggtttattcaaattgcaaggactgggctgagaacagggccttcatgactctcatgctttagcataccggtgttccaattcccctagttcaatcagcaccgcctccacctcttcaggctgttgttgtgccagccattcaggcaggacctcctcttcctacagttggtccttcttcctctccgctccgaccgatcaccctggttttctcgtcgtcggtcatcagctccgtcagcactcagccgccagtgcccccagctcctgctattaccactactgttgtggcggtatctgtgacctcttcagctccggcagctcctgcagcatagcctccgtccgagtcagtaccagctccagcttctatggcagatcctggatctgagactgactctgaccggtagctagcattcgctcttc

SEQ ID NO: 5764 - DNA, 1227 bp, Zea mays
  Zm_smallRNAprecursor_1253
gcatagcacatcagggttcaccggatcagggccacggtgaccacgaacgtaaacctccataaaacttggagcaactacactttcagcttcctgcatgaaaaagaagagttaaaccatagaattttcatagatgtaacatacaagtttgatttacatacttaccatgcggcgtgcggtaccaaggtgtccatcggcgccgtacctgtgccccagtccttcagtgccacggttggcacggtgcttctgggactctgcaatccacttaggcgacgcccatctcttagccaaccacctccaggcttccatgtccttcgcaagccaatccacaacgctctccaggtactactcctctgtgaggtagatctcattggccccttttatcgatgtttcagactattcaggacagacaggatactctacagcagcagcttctggcagaccgccaagtaagaagtgtagaacaattagctcataaggaccgccattgtataaccattcatcaacagatgcagcttcccaaattgggtaaaaatgcaatccgatcgccgcagaagtaggaataatagcaccagagataatattgtttccataaagtaaagaaccagaaacaggctcacgaataccatcaatatctactggaggagcagcgatgaaggcgataatatatacggaagttgtggtcaataaggtagggatcatcaaaacaccaaaccatccaatgtaaagacggttttcggtgctagttatctagttgcagaagcgaccccacaggcttgtactttcgcgtctctctaaaattgcagtcatggtaaggtcttggtttattcaaattgcaaggactgggctgagaacagggccttcatgactctcatgctttagcataccggtgttccaattcccctagttcaatcagcaccgcctccacctcttcaggctgttgttgtgccagccattcaggcaggacctcctcttcctacagttggtccttcttcctctccgctccgaccgatcaccctggttttctcgtcgtcggtcatcagcttcgtcagcactcaaccgccagtgcccccagctcctgctgttaccactactgttgtggcggtatctgtgacctcttcagctccggcagctcctgcagcatagcctccgtccgagtcagtaccagctccagcttctatggcagatcctggatctgagactgactctgacccgtagctggcattcgct

SEQ ID NO: 5765 - DNA, 1197 bp, Zea mays
  Zm_smallRNAprecursor_1254
agggccacggtgaccacgaacgtaaacctccataaaacttggagcaactacactttcagcttcctgcatgaaaaagaagagttaaaccatagaattttcatagatgtaacatacaagtttgatttacatacttaccatgcggcgtgcggtaccaaggtgtccatcggcgccgtacctgtgccccagtccttcagtgccacggttggcacggtgcttctgggactctgcaatccacttaggcgacgcccatctcttagccaaccacctccaggcttccatgtccttcgcaagccaatccacaacgctctccaggtactactcctctgtgaggtagatctcattggccccttttatcgatgtttcagactattcaggacagacaggatactctacagcagcagcttctggcagaccgccaagtaagaagtgtagaacaattagctcataaggaccgccattgtataaccattcatcaacagatgcagcttcccaaattgggtaaaaatgcaatccgatcgccgcagaagtaggaataatagcaccagagataatattgtttccataaagtaaagaaccagaaacaggctcacgaataccatcaatatctactggaggagcagcgatgaaggcgataatatatacggaagttgtggtcaataaggtagggatcatcaaaacaccaaaccatccaatgtaaagacggttttcggtgctagttatctagttgcagaagcgaccccacaggcttgtactttcgcgtctctctaaaattgcagtcatggtaaggtcttggtttattcaaattgcaaggactgggctgagaacagggccttcatgactctcatgctttagcataccggtgttccaattcccctagttcaatcagcaccgcctccacctcttcaggctgttgttgtgccagccattcaggcaggacctcctcttcctacagttggtccttcttcctctccgctccgaccgatcaccctggttttctcgtcgtcggtcatcagcttcgtcagcactcaaccgccagtgcccccagctcctgctgttaccactactgttgtggcggtatctgtgacctcttcagctccggcagctcctgcagcatagcctccgtccgagtcagtaccagctccagcttctatggcagatcctggatctgagactgactctgacccgtagctggcattc

SEQ ID NO: 5766 - DNA, 1200 bp, Zea mays
  Zm_smallRNAprecursor_1255
agggccacggtgaccacgaacgtaaacctccataaaacttggagcaactacactttcagcttcctgcatgaaaaagaagagttaaaccatagaattttcatagatgtaacatacaagtttgatttacatacttaccatgcggcgtgcggtaccaaggtgtccatcggcgccgtacctgtgccccagtccttcagtgccacggttggcacggtgcttctgggactctgcaatccacttaggcgacgcccatctcttagccaaccacctccaggcttccatgtccttcgcaagccaatccacaacgctctccaggtactactcctctgtgaggtagatctcattggccccttttatcgatgtttcagactattcaggacagacaggatactctacagcagcagcttctggcagaccgccaagtaagaagtgtagaacaattagctcataaggaccgccattgtataaccattcatcaacagatgcagcttcccaaattgggtaaaaatgcaatccgatcgccgcagaagtaggaataatagcaccagagataatattgtttccataaagtaaagaaccagaaacaggctcacgaataccatcaatatctactggaggagcagcgatgaaggcgataatatatacggaagttgtggtcaataaggtagggatcatcaaaacaccaaaccatccaatgtaaagacggttttcggtgctagttatctagttgcagaagcgaccccacaggcttgtactttcgcgtctctctaaaattgcagtcatggtaaggtcttggtttattcaaattgcaaggactgggctgagaacagggccttcatgactctcatgctttagcataccggtgttccaattcccctagttcaatcagcaccgcctccacctcttcaggctgttgttgtgccagccattcaggcaggacctcctcttcctacagttggtccttcttcctctccgctccgaccgatcaccctggttttctcgtcgtcggtcatcagcttcgtcagcactcaaccgccagtgcccccagctcctgctgttaccactactgttgtggcggtatctgtgacctcttcagctccggcagctcctgcagcatagcctccgtccgagtcagtaccagctccagcttctatggcagatcctggatctgagactgactctgacccgtagctggcattcgct

SEQ ID NO: 5767 - DNA, 1113 bp, Zea mays
  Zm_smallRNAprecursor_1256
ggccacggtgaccacgaacgtaaacctccataaaacttggagcaactacactttcagcttcctgcatgaaaaagaagagttaaaccatagaattttcatagatgtaacatacaagtttgatttacatacttaccatgcggcgtgcggtaccaaggtgtccatcggcgccgtacctgtgccccagtccttcagtgccacggttggcacggtgcttctgggactctgcaatccacttaggcgacgcccatctcttagccaaccacctccaggcttccatgtccttcgcaagccaatccacaacgctctccaggtactactcctctgtgaggtagatctcattggccccttttatcgatgtttcagactattcaggacagacaggatactctacagcagcagcttctggcagaccgccaagtaagaagtgtagaacaattagctcataaggaccgccattgtataaccattcatcaacagatgcagcttcccaaattgggtaaaaatgcaatccgatcgccgcagaagtaggaataatagcaccagagataatattgtttccataaagtaaagaaccagaaacaggctcacgaataccatcaatatctactggaggagcagcgatgaaggcgataatatatacggaagttgtggtcaataaggtagggatcatcaaaacaccaaaccatccaatgtaaagacggttttcggtgctagttatctagttgcagaagcgaccccacaggcttgtactttcgcgtctctctaaaattgcagtcatggtaaggtcttggtttattcaaattgcaaggactgggctgagaacagggccttcatgactctcatgctttagcataccggtgttccaattcccctagttcaatcagcaccgcctccacctcttcaggctgttgttgtgccagccattcaggcaggacctcctcttcctacagttggtccttcttcctctccgctccgaccgatcaccctggttttctcgtcgtcggtcatcagcttcgtcagcactcaaccgccagtgcccccagctcctgctgttaccactactgttgtggcggtatctgtgacctcttcagctccggcagctcctgcagcata

SEQ ID NO: 5768 - DNA, 1058 bp, Zea mays
  Zm_smallRNAprecursor_1257
cttggagcaactacactttcagcttcctgcatgaaaaagaagagttaaaccatagaattttcatagatgtaacatacaagtttgatttacatacttaccatgcggcgtgcggtaccaaggtgtccatcggcgccgtacctgtgccccagtccttcagtgccacggttggcacggtgcttctgggactctgcaatccacttaggcgacgcccatctcttagccaaccacctccaggcttccatgtccttcgcaagccaatccacaacgctctccaggtactactcctctgtgaggtagatctcattggccccttttatcgatgtttcagactattcaggacagacaggatactctacagcagcagcttctggcagaccgccaagtaagaagtgtagaacaattagctcataaggaccgccattgtataaccattcatcaacagatgcagcttcccaaattgggtaaaaatgcaatccgatcgccgcagaagtaggaataatagcaccagagataatattgtttccataaagtaaagaaccagaaacaggctcacgaataccatcaatatctactggaggagcagcgatgaaggcgataatatatacggaagttgtggtcaataaggtagggatcatcaaaacaccaaaccatccaatgtaaagacggttttcggtgctagttatctagttgcagaagcgaccccacaggcttgtactttcgcgtctctctaaaattgcagtcatggtaaggtcttggtttattcaaattgcaaggactgggctgagaacagggccttcatgactctcatgctttagcataccggtgttccaattcccctagttcaatcagcaccgcctccacctcttcaggctgttgttgtgccagccattcaggcaggacctcctcttcctacagttggtccttcttcctctccgctccgaccgatcaccctggttttctcgtcgtcggtcatcagcttcgtcagcactcaaccgccagtgcccccagctcctgctgttaccactactgttgtggcggtatctgtgacctcttcagct

SEQ ID NO: 5769 - DNA, 1188 bp, Zea mays
  Zm_smallRNAprecursor_1258
ttttgtttttgtgtttaaatgattttcaaattttaattaacatatataaagacatctatgaaaatttggcccagatgtgttcaaagggattttatgcaatactaaatcagaactgcattgtgtgatgccaatgatccatgtgtacggattttctaaagctgaggatccagagcatgacttccatgaggtaagcaccgtttactgccataacaacatttttcttttatgttgagattcgttttttatcgtattcagtatctgttatctacataatttcgtttatcagcatctatgcctaaatttgcagaggataaatttaacgttaggcgagaacatcgacactgttgaaatgcacagagtacggcttgttgcacccggaaaatggatgatatgtgcaacttttactcttccacagtcagtggcgtctgcacagccgaattacattacctgttgattttttgtactctctccgtcttaaaatattggcaacgactgttatgcaagcagtccttctgtgcaagcgtgcaagcaaaccatatgatccattagattacgatccaatcacagatacaaccatgtttgttagaggttttttataaagattattgagctgttggtggaagggtttaagtgttaaatgtgacatacggttggatcacgatctaatggatcaaatggtttgcttgcacgcttgcacagaaggactgcttgtatagcagtcgttgcctaaaatattagtcgttttagctcagctctggatttttatgtctatatccaaagacatgtaaaacatataaatcaaatgttatatgaatttattaattgtcgaaaatgaattttaatttgggatagagggagtactattcttactgcagcccctcgtatcttctgtactgtcgtcgaatacttcctatcagattatatagatgatgcccttgatcatctcacactgaatttggaaaggaccacgtgaaaagagatcatttgactgaactgtgaatttactaattagggcatgcacaatctagatatagttttgcgattctccaaacgttagataactttagatacaacttagggggtgtttgaatacactagagctaatagtttgtggctaaaattagttgagacatctaaatatcctagctaatagttcatctattaactatttttggtaaattaattaat

SEQ ID NO: 5770 - DNA, 1189 bp, Zea mays
  Zm_smallRNAprecursor_1259
ttttgtttttgtgtttaaatgattttcaaattttaattaacatatataaagacatctatgaaaatttggcccagatgtgttcaaagggattttatgcaatactaaatcagaactgcattgtgtgatgccaatgatccatgtgtacggattttctaaagctgaggatccagagcatgacttccatgaggtaagcaccgtttactgccataacaacatttttcttttatgttgagattcgttttttatcgtattcagtatctgttatctacataatttcgtttatcagcatctatgcctaaatttgcagaggataaatttaacgttaggcgagaacatcgacactgttgaaatgcacagagtacggcttgttgcacccggaaaatggatgatatgtgcaacttttactcttccacagtcagtggcgtctgcacagccgaattacattacctgttgattttttgtactctctccgtcttaaaatattggcaacgactgttatgcaagcagtccttctgtgcaagcgtgcaagcaaaccatatgatccattagattacgatccaatcacagatacaaccatgtttgttagaggttttttataaagattattgagctgttggtggaagggtttaagtgttaaatgtgacatacggttggatcacgatctaatggatcaaatggtttgcttgcacgcttgcacagaaggactgcttgtatagcagtcgttgcctaaaatattagtcgttttagctcagctctggatttttatgtctatatccaaagacatgtaaaacatataaatcaaatgttatatgaatttattaattgtcgaaaatgaattttaatttgggatagagggagtactattcttactgcagcccctcgtatcttctgtactgtcgtcgaatacttcctatcagattatatagatgatgcccttgatcatctcacactgaatttggaaaggaccacgtgaaaagagatcatttgactgaactgtgaatttactaattagggcatgcacaatctagatatagttttgcgattctccaaacgttagataactttagatacaacttagggggtgtttgaatacactagagctaatagtttgtggctaaaattagttgagacatctaaatatcctagctaatagttcatctattaactatttttggtaaattaattaata

SEQ ID NO: 5771 - DNA, 1186 bp, Zea mays
  Zm_smallRNAprecursor_1260
tttgtttttgtgtttaaatgattttcaaattttaattaacatatataaagacatctatgaaaatttggcccagatgtgttcaaagggattttatgcaatactaaatcagaactgcattgtgtgatgccaatgatccatgtgtacggattttctaaagctgaggatccagagcatgacttccatgaggtaagcaccgtttactgccataacaacatttttcttttatgttgagattcgttttttatcgtattcagtatctgttatctacataatttcgtttatcagcatctatgcctaaatttgcagaggataaatttaacgttaggcgagaacatcgacactgttgaaatgcacagagtacggcttgttgcacccggaaaatggatgatatgtgcaacttttactcttccacagtcagtggcgtctgcacagccgaattacattacctgttgattttttgtactctctccgtcttaaaatattggcaacgactgttatgcaagcagtccttctgtgcaagcgtgcaagcaaaccatatgatccattagattacgatccaatcacagatacaaccatgtttgttagaggttttttataaagattattgagctgttggtggaagggtttaagtgttaaatgtgacatacggttggatcacgatctaatggatcaaatggtttgcttgcacgcttgcacagaaggactgcttgtatagcagtcgttgcctaaaatattagtcgttttagctcagctctggatttttatgtctatatccaaagacatgtaaaacatataaatcaaatgttatatgaatttattaattgtcgaaaatgaattttaatttgggatagagggagtactattcttactgcagcccctcgtatcttctgtactgtcgtcgaatacttcctatcagattatatagatgatgcccttgatcatctcacactgaatttggaaaggaccacgtgaaaagagatcatttgactgaactgtgaatttactaattagggcatgcacaatctagatatagttttgcgattctccaaacgttagataactttagatacaacttagggggtgtttgaatacactagagctaatagtttgtggctaaaattagttgagacatctaaatatcctagctaatagttcatctattaactatttttggtaaattaattaa

SEQ ID NO: 5772 - DNA, 1187 bp, Zea mays
  Zm_smallRNAprecursor_1261
tttgtttttgtgtttaaatgattttcaaattttaattaacatatataaagacatctatgaaaatttggcccagatgtgttcaaagggattttatgcaatactaaatcagaactgcattgtgtgatgccaatgatccatgtgtacggattttctaaagctgaggatccagagcatgacttccatgaggtaagcaccgtttactgccataacaacatttttcttttatgttgagattcgttttttatcgtattcagtatctgttatctacataatttcgtttatcagcatctatgcctaaatttgcagaggataaatttaacgttaggcgagaacatcgacactgttgaaatgcacagagtacggcttgttgcacccggaaaatggatgatatgtgcaacttttactcttccacagtcagtggcgtctgcacagccgaattacattacctgttgattttttgtactctctccgtcttaaaatattggcaacgactgttatgcaagcagtccttctgtgcaagcgtgcaagcaaaccatatgatccattagattacgatccaatcacagatacaaccatgtttgttagaggttttttataaagattattgagctgttggtggaagggtttaagtgttaaatgtgacatacggttggatcacgatctaatggatcaaatggtttgcttgcacgcttgcacagaaggactgcttgtatagcagtcgttgcctaaaatattagtcgttttagctcagctctggatttttatgtctatatccaaagacatgtaaaacatataaatcaaatgttatatgaatttattaattgtcgaaaatgaattttaatttgggatagagggagtactattcttactgcagcccctcgtatcttctgtactgtcgtcgaatacttcctatcagattatatagatgatgcccttgatcatctcacactgaatttggaaaggaccacgtgaaaagagatcatttgactgaactgtgaatttactaattagggcatgcacaatctagatatagttttgcgattctccaaacgttagataactttagatacaacttagggggtgtttgaatacactagagctaatagtttgtggctaaaattagttgagacatctaaatatcctagctaatagttcatctattaactatttttggtaaattaattaat

SEQ ID NO: 5773 - DNA, 1185 bp, Zea mays
  Zm_smallRNAprecursor_1262
ttgtttttgtgtttaaatgattttcaaattttaattaacatatataaagacatctatgaaaatttggcccagatgtgttcaaagggattttatgcaatactaaatcagaactgcattgtgtgatgccaatgatccatgtgtacggattttctaaagctgaggatccagagcatgacttccatgaggtaagcaccgtttactgccataacaacatttttcttttatgttgagattcgttttttatcgtattcagtatctgttatctacataatttcgtttatcagcatctatgcctaaatttgcagaggataaatttaacgttaggcgagaacatcgacactgttgaaatgcacagagtacggcttgttgcacccggaaaatggatgatatgtgcaacttttactcttccacagtcagtggcgtctgcacagccgaattacattacctgttgattttttgtactctctccgtcttaaaatattggcaacgactgttatgcaagcagtccttctgtgcaagcgtgcaagcaaaccatatgatccattagattacgatccaatcacagatacaaccatgtttgttagaggttttttataaagattattgagctgttggtggaagggtttaagtgttaaatgtgacatacggttggatcacgatctaatggatcaaatggtttgcttgcacgcttgcacagaaggactgcttgtatagcagtcgttgcctaaaatattagtcgttttagctcagctctggatttttatgtctatatccaaagacatgtaaaacatataaatcaaatgttatatgaatttattaattgtcgaaaatgaattttaatttgggatagagggagtactattcttactgcagcccctcgtatcttctgtactgtcgtcgaatacttcctatcagattatatagatgatgcccttgatcatctcacactgaatttggaaaggaccacgtgaaaagagatcatttgactgaactgtgaatttactaattagggcatgcacaatctagatatagttttgcgattctccaaacgttagataactttagatacaacttagggggtgtttgaatacactagagctaatagtttgtggctaaaattagttgagacatctaaatatcctagctaatagttcatctattaactatttttggtaaattaattaa

SEQ ID NO: 5774 - DNA, 1133 bp, Zea mays
  Zm_smallRNAprecursor_1263
tcgggttttctggtgccgatcttgctgctgagcccggaggacttggaatttcctcttgagatggcctttttcttcctcctttgccctttccacttgcatggctttattggagaggtgagagaaaccgaggaagtcttggctagccaggatgttcttgagttctggtctgagccccttcaggaagcgggccatcttcttgacttcggtactgacgtcatctggcgcgtagcgggccaattccgtgaacttgtgcacgtactcgctgatggatcttccgtcttgtgtcagttcccggaattcgtcttccttgagctgtacgatcccttggggcacatggtgctcctggaaagctgtttcaaactctgcccaggtagcatctctgatggcgacattgaaggtgtcccaccaggctagggccatcccggaaagttgatgagcagccagttgaacacgctgattttctggacatccgatggcttccagctttctcttaatcgtgcgcagccaatcgtcagcatcgagggggttgctagatccggcaaacgtgggaggcttgagcctcagaaaatcccccatcctgtcttgcggtcttctaccattcggacgttgattttccagacttcgagtgaggacctcgatgagtcgggtttggttggctagaacttgggctagatctaagggtagttctggaggtgtggggaggtgggtctcactttcctctctaccggcttccctttcagctctcaggggaaacccttctccaatcccggaggtggtaggcgtggttttatccgaagccatctgccagggggagagagtcactattatgcacatgccaattgttttcaatcaagtcattttattcattaccccaatacattacaagcatatggctactacaagtcgtactacacgcgagcgttctctgaggtactaccgaactctttttctaaagtgtccccaaattccttgagaaggtcatcaaggctagctagggacatatcctcgatgttggacaaattctctatcctggcgggagttggtgctgggggagccttcttcctccgctcagcttggcctccttggttcctggtcttcttttggattttcttcgtgggggcgagcttctttag

SEQ ID NO: 5775 - DNA, 1094 bp, Zea mays
  Zm_smallRNAprecursor_1264
ctagacttacccgatgtgaggagtctactcctctacctctagaccatgaagttgtttggctgagaggtttggtttgccaaaagcactagctgagtctaattcaagttttagcttttgcagttctagattattacttaactaggtgagctcctagctactaatacatggtaacaagcatttattgcaaacaatactttatatcatgaaaccacatttcacttcttactcgatgcagcgacatggatcaagtagtctcattagccgcgggaagtgtaacaccctaaaatcctatttagtacctaagaaaaccctataaagattcaaaaaatgtaagtgtccttaataaggattttctcaccttttagattattctctaatactcccttttgtctgtctctttgaatttctattccaagaacataagaggcttctcccatgttttccatatcaaaattcgaggaaggaaacatttttgtttccgctagtagatccttatcactactagctaagagtatgtcatcgacatacagaacaaggaagatatactttcctttcctaaattttgcataaattaaattgtcttccttgttttcctcgaaaccaaactttcttatagtctgatcaaacttgatgtaccattgtatggaggcctgttttaatccataaatggacctcctcaagtgacatcccatgtgttctttatcgctcacaacaaaaccctttggttgtgccatgaacacgttttctactaactctccatttaggaatgatgtctttacgtccatcttatggagctctagatcaaaatgagcaacaagtgccatgatgatcctgaatgaatcttttgttgagacatgtgagaaggtttcatggtagtcaatgccttctctctgtgtgaaccctttggccacaaatctagccttgtacctttctatgttccctctggagtcacgctttgtcttgtagacccatttacaactactgttttggctccatggggaatgacttctaagtcccaaactttgttcattctcatggattctaattaatcttccatggctgataaccattttgatgaatttgcacttctcata

SEQ ID NO: 5776 - DNA, 1061 bp, Zea mays
  Zm_smallRNAprecursor_1265
gttcccgcaactgtctccctatctgcgcttgccccccagtgccggaggctgtgatggtcaccttcagagtctcccctccatctggagtcttctcggccaccactttcctgcaagaaaatttacaatccccatcggcctttttagcatcgccgatgattgtttctttgcttttgcctttatcggctgtgtttggccgaactaggactttcttgccctcgaagtcgatcatgttcatcggaaagggctctgtatccacctgcatttcctgaaatttcaatcgtccttcgttaatggccgattgaatctgtcgccgaaatacattacaataattagtggcatgagaaaatgagttatgccacttgcagtacgcacgacgttttagctcgtcggcggatggaacagtgtgatttattttaatgttgccatttttgagtaattcgtcaaatattttatcacacttaccaacattacactacaggaattcacttaattcccgtcggcctgaaaccgacgggaataagccctaaaccgacgggaataagtaattcccgtcggtttagggcttattcccgtcggtttcaggccgacaggcgtcccttatcggggataaggttatccccgtcggcggctgacgggaattattaattcccgtcggctagatagtggccgacgggaattaaggctaattcccgtcggttttgctggccgacgggcgtcacatattaattcccgtcggttccccaggccgacgagagttattaattaattcccgtcagccctacgtggccgacgagaattaactgggccgacgggagttagtaattaattcccgtcggttcgaccatagccgacgggaattaactgggccgacgggaattactctatactgctacaaaaacaacactaaattatgtcactatttctgcacacataacatatatcaaacataatataaatcacatataacagccacattacaaacacatatagagatacgacatccacaaacacatgcatttagacataaacacttgcatttataattaaaacatccaccaacg

SEQ ID NO: 5777 - DNA, 1140 bp, Zea mays
  Zm_smallRNAprecursor_1266
atttatttcagatgtcctaaatattttttgttttaattttgcaaaggtgctcataccgccatgttgattagccagattgctcagatgaaaccgctagatggtagtaattaccattcttggcgggaggatattgacatgataaccacagtgggtgagatagattacgcactcaggtttgataaaccagttgagcccacagtgggcactcccaactatgaccacaggtggatgcaatacagcatcgacaaggtcaagtgggagagatcaaataacaaatgtatgattatttttaagaggagcatcaaggagcctcttaagagttccataccagagtacgagactgccaaggaataccttgagagggtagcctctcatcataaaggttcttctaaggcttatgcttgctctttaatgacataatttgtcaatgcaaaatacgatggaaatggtgttagacctttcattcagaaaatgatatccatcgtagctaagataaacaagtacctcgggtctcctttacacgaggaatttgtagtatttatgataatgaagtctttgcctaaggagtttgagacttttcacatacagtacaacactagtgtcactgataagtggaatatagaccaactcttggcacagtgtgtccaggaggaagagaggttaaagcagactggagactctgtcaacctcatcaaaggcaatatccccagacagaataagaactcaaagaaaaagttcaagaagcaaggtaaacagaataaccaggcttcctcgagcaataataatcagccaagacaaggaggcagtttctcagttccccctgatacctgcctctattgcaagaagacatgtcattacaagagaaagtgccctgaattcctgcagtatctactagagagtggtaaggaccaagttacttttgtaaatgagtctttatacttagaatatcccagttatgcttggtggattgactcaggtgcaactgttcatgttgcaaactctctacagggactccgtacaagctaaaggctcccaaacggcaaaagaacaattagagtggcaaatggagttgaagcagcagtcgaggccattggagatatacatcttaaattacctaatagttttgtactgttattgaga

SEQ ID NO: 5778 - DNA, 1114 bp, Zea mays
  Zm_smallRNAprecursor_1267
cacaatgtgtccaagatgtagaggcgaggcgaagatttacggcgacggccagtcccaatcacatcccctgtgagtcgatcctgtacaaaacaagatgagtcatcaaatccaataaagcaattgtgatcggtaatttgaccaactgataaaagatccatggataatttaggtacaaagaaaatatttgggacagtaaagtttgaattggaaagagaacccttgtgggtgacatgacataatgtaccatcagcagtctgaacagaagtaccctcggtgacaggtgcggtagaagccaggcgtgactgatcagatgtcacatgaaatgaagctccagagtcaagaacccaagtagatgacaaagcaccagcagataaagtagcagcaacaacaactgagcctctaggagatggtcctgtaccacgaccacgagtagcacgacggacacgaaaatcagccagcttctctggatacttagtaaagcagttctcagaccgatgagtggtcttcttacaatgctcacaaggctgaaaggaggtgctcctggacttctgagcagtggccaatacactgtgcgaactcacaccagtaatagaagacatggacttaaggcgagtctcttcagcaagtaattcagacaacgcctgagccatggtgagagtatcagaagtgtgtagtaaccttgcacgaagagaatcaaattcaggtcgaacgcccataacaaatctgtaggtaaagaacttctcaatgaacttatgggctgggcaaggcacagctgtacaagtaggcaccatggaggtcaaagcactcataagacgatcaaaagatgaatagtaatcatcaatggacatatcatgttgctcaatgacatgagtttgctgcataagagtatgtaaaagagccccactgtcctgaacaaactaatccttcagatgagaccagatagccctagcagtggtgaatttggacatactcataatcatagttggtttagtactattgaccattgtagccattactttgccatcattgatttgccaagtcttgattgcagctgcgttgcttctatcagctgctaaaactggtgaatcttcagttaaatggaatagtaaaccat

SEQ ID NO: 5779 - DNA, 1153 bp, Zea mays
  Zm_smallRNAprecursor_1268
tgaaaaaactattggcgggccttcaagaaaaatgtttggaatttagcaacaaatgtattcaacgactgagaaaaattttccactcagttggagtgggcagtgagaaattcaccccgtcagctgaagatttaccaaagaccttcgaacatattgagggtgaaattgatgagcttgacgaagttatagccgggcacggtgacttctgcgcctgggtagcttctcggggcactgctgcagctttcctaaaagctggctgtgatcatggaaagattgtcaataggcccaatttcactttatcaccatcaattctagatgacattcctgatctcgcccgaagcatttccaatagattcgtaaagatgaaatggacaaaaggcgggcgagaaaaggctggagacgaagctcggagtcatcttgaaccagtaagaaatcataccttgtgcttacctcttccttcaagctcgattttgactaacaacaactaaattcatgtaggatgacgaagccgaagccgatggttaaaaagaataacgccgaagctgaagtcccttgaagattaaataggagtagactgtagacagactcaaggaacttttgagataacttttgtaaatgtaactgaacttgtctttaatgaattttgttcataccttgtaatatgctcttatccttccattaatgtatgagaggtgctttgatgtggacgaaattatctttttgagccgaaggcgaaaaaacaccttcccttcttttcgtacacagcgaagcatagaaaacaacatttcctttcttccgaagctcttctttttgtacacgaagaagctcttcttttttttttctttttgccgaagcaaccacttatgctatgatgatgattatcctacatatgcctggatgaatgtttatgaatgcaaatgctatgatgtaatgtgatgtgcaaatgaatgtccaaacatatatccgaagccataatcacagccattatttccttagaaacaatcacacatgagctctgcattcccttaggaacgactttggagcttcttcgccttttactttcggcagaatcagcgttgacttttcgctgtaagctctgcattcccttaggaacgactttggagcttcttcgccttttactttcggcggaatcagc

SEQ ID NO: 5780 - DNA, 1071 bp, Zea mays
  Zm_smallRNAprecursor_1269
acttaaagggtcctaaatgagccaaatcgggttatggtaccaattggatcaacaacttctagataataagccattctagtgctataataagggaaatctatgccattgaagtgtggtggcctatgggaatccatccatcctctaaaaagtgttggccctaatagcagttaaacttaaagggtcctaaatgagccaaaccgggttctggtaccaattgaaaggaacacagacgcctaagagcgagggtgaattaggacttctaaaaatcttactaatataggccacaaataatctcctaaacaaaacctaagaaaataattaaaaaagaatatgcaatctaagttttgtctaagtgttcatatctctattgcaaaaagagttaagcaacctaagttccaatcctatattctaaactaagaatagtaaatgtaatacccaaaattatagattaataaagggttttttatttttgtgcccttagttttggtgttgtgctcatctatacccttagtcgtgtttttttgctcagctatgcccttctgttctatagcactggaagggcacaactgagcaaaaaacacgactaagggtatagatgagcacagcaccaaaactaagggcaccaaattaaaaaacccattaataaaaatgggatctcatgctgttatttattcaccatataaatctttatgttaagtgatcaacttacttagcaagataaacaaaatgagttatgcatctcatgttggagttcttactctattgcattcgatatgaaatttatatgtcacattatatgggatttaagttcaaatccttaattggaaaagaaatatcgaaaatagaaaagaaataaacaaagaaaacaaaggaaatgaaaaagaaaaaagagacaagaactcgtttgggcccaaaactgcgcgtccgacccagtccagctcgcgccaaaccaccaaccgcagcgtcgacaggtagggcccactagccagccacacgacatgcgtccaccagcgtgaacccactggtgcatgggcccgaggagtcatccgatcccactgctgccaggttagc

SEQ ID NO: 5781 - DNA, 1201 bp, Zea mays
  Zm_smallRNAprecursor_1270
cttaaaaaatagggatcgtatggacatcatccaaagttaagggagtaacttagacttttcctttttactaattaagtttctaatatacctatttattagtgtcataaaatttcacaattctctctataattttgatcaaactataaatgtaaaattgatatgttattctttaagaaaattagaatgatataaaaatagctaaaattaattttagtacaaggataactatttgatgaacttgcccaatctttaaacagagctaactaagagatgtttggtttcattcaactaaaatttagtctctggtgtttaaatgataattacagatactaaatatagtttaattataaaattaattacacaaataaatatagtagagtttgaatagagaaatcactacagtaaacggagaaacgtccgacggtcaaaaccgtcggacataaggaataaaccatcggaaatagattatttccgacggcaaagccttatctccgacggctttaagccgtcggagataactcgtcggaaatagtgcaatgtccgacggcagccgtcggacataagctatctccgacggctgcgtgtgcccgtcggagataacaaatcccaaccgttttaccggtcggaatgtgggccccacaagattaagtccgacggctaccactaggccgtcggacataagcatcccttatgtccgacggtagttaatgccgtcggacataaccatgtgttatgtccgacggctaccactaggccgtcggacataacaaattacagaatttacacaaaattctgttttttaaaaaatctgacatttacaaaacaaaaacagattcatgcacatatacacattcacattcacaatcacaaatatacacattctaataagtattcacaatcacaaatattctcacataaataataacattcacaaatttaacatcaacatataggttcgacggttgttgcaaactgaaattgtgtctcacaaacaagtgttgcaaagtgtttcataaataaacatcacgacacatcaatcatatccatcgtctggatggttcgagtagccacctcctccggctggactctgcgtgttgaataggttgttgacccacgaatgtgttgtgtcgtcttgcccagacccatctccaggtgcggcaactgaagcgggtggtgtctgaaatccctataacacaagcac

SEQ ID NO: 5782 - DNA, 1088 bp, Zea mays
  Zm_smallRNAprecursor_1271
gatcttcagctttcactaacaaaggcggacatgtctccgagaagtccagataagaagtttcgcgggggccctgttggtagccccgcccaccctgctgctggaactgttggcccaccatttctctcagaaagcggttattgtcagcagttgcgttcactaaggcggcaatcgcctcagccagtgtgggaggagcaggcggtggatttggtgtagattccctcccccgggaggtaccagctccgtcctgagctcgagtcttggaaggcatctgtggcaacaacatttgaaaacaatatgatatgccaaagaaaaagccatcccttttacattaccaaaagtaatgttacagactcaagactcttacaacaggatacaatacctagtatacaatagcactacctattatacactagtacaacctacaatacactacactacttctactatacaactagtcctgcttcccattgcttttagcggcctcgtcgtcgggtgtgggagaccattcgtcgaccagcctcatggaaggagggggctgaaaaaggtctaactcatcaccaagcacgtgtcctgcaacatgcgagggtccggcttccgactcaacagggtacgcaggtgcactagggtgtaattgcgaatacagtacatggacttcctcatgtaaagtattgcaatagacctgcaggttgtcgatagctgagctaagttccttgactcggacttgagcccttgcttccgtagcacaagccagcaaacgggactgaactgcccagtcgagcgccaagtcccgatcagcaagctgatcccgcaggtggcggatgtcccttcttaattcatttattctatctccatccgcaacccatatgttggtcctgtgttgcaattccgcttgaagttgatttactcgtgcttcaagatcccctattggatcattactcccgctgctactgtcctcatgtcgaggggccagttgatgccagggcacaccgattgggccagttgacttgcgcgacgttttccttgtgcgcggcggcatctttctaagggggaaaattttattagtataattcttagcatgatgcatgtgt

SEQ ID NO: 5783 - DNA, 1040 bp, Zea mays
  Zm_smallRNAprecursor_1272
tgcggcatttttctctatgtgccgaaacatttctgctgatgtacatgagctggcaaggtgtcagcgggagactgacgacaatcttcatcgtcaagcttccactatgggtatgccctttgcccctcgctcgcctgacgtgcctctccatcctcctccctcggagatcaatgagtggcaccagcaggcctacggggtgccatttatgtcagcagacgacgaagaagaagaagaagcctacgttgatgatcgcgagcagtttgccccgcctccctaccatggggatccgggtcaatcatcctctcaccctccgcctccctacccgggtccgggacccattcctggtgacccaaggccatccggctctagttaccatcaccaccctccacctcctcctgatcatcgtacatcttcggcatctgtttttttctgcggctgatgagccacctagggactctacatttgaggaagacgtgatgaggaccctctttcctgactacacatcataccctccatcatatccttcgtcctatcctcctcctggaggatattgattcatgtatccatgtctctctcttcgtttttggtacttgttgccaaaaaggggggagaaaatccaaaatttctagtcattctgtttgtggttctttcggttatgtatttcttttggattatttttgttttggccactgttgtggcttgtatcctcttatcattgtatgaaataaaactgttgggttattattaaaagtgatatgatggtcttctggccatcatcttttgttccgtcagtttgtaatgattgccttgctatgaagtaaaaatgatgtgtatttagagatagtcatatgcatcacaactcctgttataacactcttgcacccctcggatggttgtattcagtatggtttttgtcactatctctaaatgtgttgctcacatgacatattatgtcaaaacattggattcacaatcgtgcacacatttaggggagccatctacatacaatcattcaaaagaaattttctattgcaaatgtttat

SEQ ID NO: 5784 - DNA, 1160 bp, Zea mays
  Zm_smallRNAprecursor_1273
ggcacgataacctattagttgctgtttcttttacaccacatataaaaacaggaaaaaaggtcggtacatgaatcaatgttcgttgtaacttttttatttaccaaacacgggactcgatttatctttacatgattagtgaaagaaaggttgccaacactaccatgtctagtggctaggtttagagctagtggcgaaggtagagcaaatttgacggagtgcaattgttttatgtatgcatagacatcaagtaatgtaggtatatatatagtgaaaatttgtacattataactaattctgtattttttagggggtgcatttgcatctctagaataaacctagctttgccactgttacgagctaagttcattagaatctaacagtggtattgagaccatggttttgagcctgcaccctaatcctagatactagtcaacaatcgattttaggatgaatgtgagcaaaagccctcaggccatcaccagcagcttacccattacatacccatattcaaactacattctataaaacaatacaatctacaatacaaagcagtgcaaaaggtgtttttatgactatatggataaactactgtatattgcacctatatggtcactaaaaataccgttttgtatcgttttatattgtagattgcactgtttatagagtgtagtttgaatatgggtatgggtatacataaactgctatagatggtctcacaagccttagattcgtgtttctacccactagcacattaaatagaagaatagagaaagtcacatcctaatatggtttccccaaaatccttaatcctaaccctaacattccctaaatccgaaaatcctaaccctaagcatggagagaaaagaaaacatgttcttagatattgcttggtcaacgggttcttagatattacctggccatcggtgatgctagtagaccaaggtagaagatggcgcaatcgtcggtcttgtgcccgatgatgcgtaggccttagagcacttttaagaggccattcaacggtggtgcgctcacccttaagtgaatgtgcgcaacggcaaggggcccctcaggcgaatgcgcacattggagacagagaatagagtgaatgaagagggagagagttgtgcatggagagagaagaatgaattaaggttttctcc

SEQ ID NO: 5785 - DNA, 1069 bp, Zea mays
  Zm_smallRNAprecursor_1274
gagcttatgagtcttctcgattgttattcaggctatcatcaaatttggatgaagaaggaggatgagccaaagaccagtttcataacccctagtggaacatattgttatcttcggatgcctgaggggctcaagaacgctggaggaagtttcagcagaatgactacgaaggttcttcaatctcagataggcagaaatgtgctaacttatgttgatgctatcattgtaaaaagcacgaagcaggaaaatcacattgctgatttgcaagagaccttcgccagttttaggcaagctggcctaaagttgaatccagaaaaatgtgtcttcggagtcaagaaggggaaatttcttggatgcttggtttcaacaaagggaattgaagctaatccaagtaaaattgaagctatacttcgaatggagccaccaactacaaaaaagggggcccaaagattgacagggaggctggcatctcttaatagatttatatccagatcagcaaaaagaaatctaccattcttcgaagtactgaaattagtcgaagtctttcaatggggaccaagccaacaaaaagccttcgaggacctgaagcaatatttgatagatttaacaacattaactccaccaacgccaagggctccgttgttattgtatgtggcagcttcgcactcagcggtaagtgcagcacttgtccaggagaagcttgacggccaagtcaagaagcaggtcccagtgtattttgtatctgaagttcttagtatatcaaagaaaaactatacagaattagagaaggtgttatatgctgttttgatggcatccaggaagcttcggcattactttcaagcatacaatgttattgttccttcttcgcagccgttgaaggatattatgagaaatagagaagctactgggtggattggaaaatgggccgcagagctcaatgaattttgcattgattatgtgcatagatcttcgatccagtcccaagcgttggcagattttatcgccgattggacgccaggggctcaggatgaagaaacaaataaagatgccgaagtatggacagtgttttgcg

SEQ ID NO: 5786 - DNA, 1154 bp, Zea mays
  Zm_smallRNAprecursor_1275
gaccatccggtggacaacatcctgggtagcatcaggagaggggtaacaactcgatctcgtttagctaatttttgtgaattttactcgtttgtttcctctcttgagccacttaaggttgaagaagcattgggtgatccggattggataattgccatgcaagaggagttgaacaacttctctcggaatgaagtttggtccttagtctaaagacccaaacaaaatgtgattgggacaaaatgggtctttaggaacaaacaagatgaacatggcgtggttacaagaaacaaagcacggttggttgcccaaggctacactcaagtggaaggacttgattttggtgaaacatatgcgccggtagcaaggttagagtcaattagaatattaattgcctatgctactaaccatgatttcaagctatatcaaatggatgtcaagagcacatttctaaatggaccactacaagagagggtctatgtggagcaaccaccgggctttgaagatccaaagaagccaaaccatgtttacctacttcacaaggcactctacgggcttaaacaagcccctagagcttggtatgattgccttaaagatttcttgcttaaaaatggttttgaaataggaaaagtagactctactttattcactcacaaagttgacaatcaattatttgtttgtcaaatatatgtcgacgacattatatttggcagtactgatgaaactttttgtgaggaatttagtagggttatgacaaataggtttgagatgtcccatgatgggtgagctcaagtacttcctgggttttcaagttaaacaactcaaggaaggaacctttctgtgccaaaccaagtacacacaagacatgctcaaaaagtttggcatggaaaaggcaaagcacgccaagacaccaatggcttcaagtggtcatctcgacttaaatgaagaaggtaaatctgtagatcaaaagctttatagatcaatgataggatctctactatatttgtgtgcatctaggccagatatcatgcttagtgtgtgcatgtgtgcccgttttcaagctaacccaaaagagtgtcacttagtggtcgttaagagaattttgagatatctagttcacacccaaaatctaggtctctggtatcctaagggctcctttt

SEQ ID NO: 5787 - DNA, 1048 bp, Zea mays
  Zm_smallRNAprecursor_1276
tggttacaagaaacaaagcacggttggttgcccaaggctacactcaagtggaaggacttgattttggtgaaacatatgcgccggtagcaaggttagagtcaattagaatattaattgcctatgctactaaccatgatttcaagctatatcaaatggatgtcaagagcacatttctaaatggaccactacaagagagggtctatgtggagcaaccaccgggctttgaagatccaaagaagccaaaccatgtttacctacttcacaaggcactctacgggcttaaacaagcccctagagcttggtatgattgccttaaagatttcttgcttaaaaatggttttgaaataggaaaagtagactctactttattcactcacaaagttgacaatcaattatttgtttgtcaaatatatgtcgacgacattatatttggcagtactgatgaaactttttgtgaggaatttagtagggttatgacaaataggtttgagatgtcccatgatgggtgagctcaagtacttcctgggttttcaagttaaacaactcaaggaaggaacctttctgtgccaaaccaagtacacacaagacatgctcaaaaagtttggcatggaaaaggcaaagcacgccaagacaccaatggcttcaagtggtcatctcgacttaaatgaagaaggtaaatctgtagatcaaaagctttatagatcaatgataggatctctactatatttgtgtgcatctaggccagatatcatgcttagtgtgtgcatgtgtgcccgttttcaagctaacccaaaagagtgtcacttagtggtcgttaagagaattttgagatatctagttcacacccaaaatctaggtctctggtatcctaagggctcctttttcgatttatttggctactgtgattcagactatgtcggttgtaaagtagatcgaaaaagcacctcggggacttgccaattccttgggcggtccctggtgtcttggagctctaagaagcaaaactgtgttgcactttccactgccgaggccgaatacatagctgctg

SEQ ID NO: 5788 - DNA, 1040 bp, Zea mays
  Zm_smallRNAprecursor_1277
cttctgatgtacatgagctggcaaggcgtcagcgggagactgacgacaatcttcgtcgtcaagcttccactatgggtatgccctttgcccctcgctcgcctgatgtgcctctccatcctcctcccccggagatcaatgagtggcaccggcaggcctacggggtgccatttatgtcagcagacgaagaagaagaagaagaagcctacgttgatgatcgcgagcagtttgccccgcctccctaccatggggatccgggtcaatcacccactcccggtgaccctaggtcgtccggctctggtcactatcctcctcctccctacccgggtccgggacccattcctggtgacccgcggccatccagctctggttaccatcaccaccctccacctcctcctcatcatcatacatcttcggcatctgttttttctgcgggtgatgagccccctagggactcctcacgcgaggaagacgtgatgaggaccttcttccctgactacacatcataccctccatcatatcctctatcctatcctcctcctggaggatattgattcatgtatccttgtctctctctcttcgtttttggtatttgttgccaaaaagggggagaaaatccaaaatttctcgtcattctgtttgtggttctttcgtttttggattatttttgttttggccactgttgtggcttgtatcctcttattattgtatgaaataaaactgctgggtttttattcaaagtgatatgatggtcttctggccatcatcttttgtcccatcagtttgtaatgattgctttgctatgaagtaaaaatgatgtgtatttagagatagtcatatgcatcacaactcctgttatgacactcttgcacccctcggatggttgtattcagtatggtttttgtcactatctctaaatgtgttgctcacatgacatattatgtcaaaacattggattcacaatcgtgcacacatttagggggagccatctacatacaatcattcaaaataaattttctattgcaaatgtttatcttttttac

SEQ ID NO: 5789 - DNA, 1048 bp, Zea mays
  Zm_smallRNAprecursor_1278
gtggttacaagaaacaaagcacggttggttgcccaaggctacactcaagtggaaggacttgattttggtgaaacctatgcgccggtagcaaggttagagtcaattagaatattaattgcctatgctactaaccatgatttcaagctatatcaaatggatgtcaagagcgcatttctaaatggaccactacaagagagggtctatgtggagcaaccaccgggctttgaagatccaaagaagccaaatcatgtttacctacttcacaaggcactctacgggcttaaacaagcccctagagcttggtatgattgccttaaggatttctttcttaaaaatggttttgaaataagaaaagtagactctactttattcactcgcaaagttgacaatcaattatttgtttgtcaaatatatgtcgacgacattatatttggcagtactgatgaaactttttgtgaggaatttagtagggttatgacaaataggtttgagatgtccatgatgggtgagctcaagtacttcctgggttttcaagttaaacaactcaaggaaggaacctttctgtgccaaaccaagtacacacaagacatgctcaaaaagtttggcatggaaaaggcaaagcacaccaagacaccaatggcttcaagtggtcatctcgacttaaatgaagaaggtaaatctgtagatcaaaagctttatagatcaatgataggatctctactatatttgtgtgcatctaggccagacatcatgcttagtgtgtgcatgtgtgcccgttttcaagctaacccaaaagagtgtcacttagtggccgttaagagaattttgagatatctagttcacacccaaaatctaggtctctggtatcctaagggctcctttttcgatttatttggctactctgattcagactatgccggttgtaaagtagatcgaaaaagcacctcggggacttgccaattccttgggcggtctctagtgtcttggagctctaagaagcaaaattgtgttgcactttccactgccgaggctgaatacatagctgctg

SEQ ID NO: 5790 - DNA, 1163 bp, Zea mays
  Zm_smallRNAprecursor_1279
agaatatgggcaaaacgacgataactgactttgtgccagttaccctggatgaagaaatacatgactgggtaatcatacccatcggcttcctcatctactttcttgatccagagggtggcatagaacagagctaccacctcgtcgttccaggggtattccatggtcataatatttcttaacccctttctctctaagttttggagagctgacttcatgtcagcatctcccatgttctcacatccctcccagtctataaacctatgcctaacgactgggtgcttcttggataaaatgacagaattgtagaaatcagcatggaaaagattccagaaccgagggtcctggacaccaggatgacgaggagtgagagaaggattggtgaacctcaggcgctgaagggtgtctactcccttcagagagaagtcgacaggaggttcatgtgaaccgcgggtaacgatcgccggatgcatgtgcagaccggtgacgtagagtgcatctggcgctggaaggtcgatgaagtcgtcgaaagccccatcctcctcctgacagggagcatatccagaggaggacgtgctacgatgaggtcgagtggcgccaaccttttggcgcctcccgcgagtcggctgcgagggcatggaagaaccctctccatccatcctaccagagccgcgtcctctcttagagagggagcgacgaggcggaggagaggggacgagagattcctcctgaatctcgtccgagtcgctgctaaactcaatcacggaagggttgcgacgacgcaccatgattggagaggttttggaactatgaaccggttgaggtgagtgagagaggaggctctaaacactacaaagagactaaggcgagaatggttggagtgagggaagagaaggggaacgacaaatatataggcagttgagctggtccccaggacaggttcaaccgccccccaagggccggttcaaccgcttctgaccagtgcggtcagagtgccagaaatggtcagagggaaaatgccaaaaaatttaaatttctgacgcgactgcgcagtaaaaaacagattcttcaaacagtaaaagctgaaaaagtactgcgcaagattctgaaaaggtgttccaaaaagtgactgacgcgacctgacatggcattaattaaagctgcag

SEQ ID NO: 5791 - DNA, 1078 bp, Zea mays
  Zm_smallRNAprecursor_1280
caacgtaaagaaagttttgtaaattcaatacttttggtaagcaaatgcttgtggcttatttttgttttggtcgactatgcaggttggtaaggcatattttgaattagttgattatttggaagctgatcattattttgagctggcacaccgactatcgccttgtacgcttgatggaatggacatctattctactgttctttatgtaagtgaaatcagtgcattgggcttggctacatttattggcacatttatctccaagctcacaagcttcttatgcagcatctgaatgaggaaatgagactaagctaccttgctcaagagcttatttccattgatcgactatctcctcaagcatggtatgtatttttatctcagaaagagtgacaatgttagggccttttcttgccacactattttgattttatttttttaactccatcttttaacacatttttttttgggttttttaaggtggtgccctcagttttgctggtgtactcatttttacccttagtcgtgtttttttgctcagttttgcccttccagtgctatagaacagaaaggcaaaactgagcaaaaaacacgactaagggtaaaaatgagcacaccagcaaaaccgaggacaccagcttaaaatatcctttttttatttttttgtggggaggggagagagatggggttaggttaatgttcttggttttgactatttacatgcagtattggtttcattgcagtgaaaaacagctggatgagtctaggccacaaagccttagtctaaaagctgggttctcatttttcatttctaatatatctgtctggaatatgcaacaggtgtgcagtgggcaattgctttgccttgagaaaagatcatgagactgctttgaagaattttcaacgttcggtacagcttgactcaagatttgcatatgctcacactctatgtggtcatgagtatgttgtggctctcataaatattctatatgtttctattttcatgctccagatcttatatgcaaatctgaagctacatcctgaaaattcatgttcgagataatcatttcaaaatttctaaatgaac

SEQ ID NO: 5792 - DNA, 1042 bp, Zea mays
  Zm_smallRNAprecursor_1281
catgcagatgtagatgagatatatataagagcaattcaaataattaatactagtcttgtctagtcctgtcaagaaaaatgcacctaaaaacttaaatatctatatattcatctcaatctatatgaattaaaacagtttggtttgtagaatttaaactaaattctacaccaaatcacttcaatatatatagattgagtgaatatatgtatggatatctaaacaaggccttcatatgtgtcatttaatataccacagggaggaatgatgccttaccctcttctgcatatattcgatctccgcgagcagcagctcatgctgacaaaaactcaaaggtgcaaaacgttaagtattatcaggatcagagcgaggtatatggtaatggcctataattttaggcccaaagcaaattcacaggacgtctcaactatttgggtgtatatacatcaaataatcagctgactatatattactgtagtggtttgtatagatatactccctccgtttctttttattagtcgccggatagtgcaaatttgtactatccggcgactaataaaaagaaacggagggagtacctttttggaccggatcctcccaatgcctctttcaagcctgctttcaaggccctttagctcctttgcagtcatattgccagtagattcacccatcaggtgcctgacaagtaggagtagaatttaccaaaggaacggtcacttccgggtttttttggccaaaattaagtcacttccgtataaatgttgtagtgcctatcctatgcaaacggataaaattagaacagttgcaggaactagttatgaattatgcgccatacctgtttgaattctgcaaggtttgtatctgctggcgcagttttgccgcttcttgctgaaagtattgctaaaaaattccaatgtgacgtgggatcatccgttaaaaaagatcggaagcaataacaagttttaactttatatatatatatatatatatatataaaagtagtgtgtgtattatattaacatttgttagttgtttcacacgtacg

SEQ ID NO: 5793 - DNA, 1034 bp, Zea mays
  Zm_smallRNAprecursor_1282
cagatgtagatgagatatatataagagcaattcaaataattaatactagtcttgtctagtcctgtcaagaaaaatgcacctaaaaacttaaatatctatatattcatctcaatctatatgaattaaaacagtttggtttgtagaatttaaactaaattctacaccaaatcacttcaatatatatagattgagtgaatatatgtatggatatctaaacaaggccttcatatgtgtcatttaatataccacagggaggaatgatgccttaccctcttctgcatatattcgatctccgcgagcagcagctcatgctgacaaaaactcaaaggtgcaaaacgttaagtattatcaggatcagagcgaggtatatggtaatggcctataattttaggcccaaagcaaattcacaggacgtctcaactatttgggtgtatatacatcaaataatcagctgactatatattactgtagtggtttgtatagatatactccctccgtttctttttattagtcgccggatagtgcaaatttgtactatccggcgactaataaaaagaaacggagggagtacctttttggaccggatcctcccaatgcctctttcaagcctgctttcaaggccctttagctcctttgcagtcatattgccagtagattcacccatcaggtgcctgacaagtaggagtagaatttaccaaaggaacggtcacttccgggtttttttggccaaaattaagtcacttccgtataaatgttgtagtgcctatcctatgcaaacggataaaattagaacagttgcaggaactagttatgaattatgcgccatacctgtttgaattctgcaaggtttgtatctgctggcgcagttttgccgcttcttgctgaaagtattgctaaaaaattccaatgtgacgtgggatcatccgttaaaaaagatcggaagcaataacaagttttaactttatatatatatatatatatatatataaaagtagtgtgtgtattatattaacatttgttagttgtttcacacg

SEQ ID NO: 5794 - DNA, 1145 bp, Zea mays
  Zm_smallRNAprecursor_1283
agttccttgcaagaaatgcaggaatacaacaaatgaaagagatgcagatcatgtgtcaaaaggggatctcccctagaaaagaatatgataaagggtaagaagacaacctcaagttcatttattttcattacttgaccacgatatcgttcctgatattcacccaactcctttagtaggcgttcctgtaatgcactctcccgtcctttggttgctgccagttcttgttccacatagttaagtttatccagaaactgcattctttcatcctctgcaacaataaattgtatttttttattccacttctagcaaagtaatgctaacatctgaatccaggttgcttagaacaaaaggcaacatcaatactacttgttttgagtacaatacagtatcggtcctcgaacttggcacgttgtgtcacttcagtcaccaaacttagaaaaccagcaaaaacgggtcatctaactttgtcggcgcgtgcaaaactatacaaaaccggttttgctcaaaccggataccgacgtggcgtaccacgttagagtcacttgggtcctcgaacttggcatgttgtgtcactcgggtcccaaacttgacatgttgtgtcactgggtctcggaactttcattagtatgctccaacgtggcacgccacatcggcgtccggattgagcaaatccgtgggacgccacaagctgacaaagttagagggtctgttttgctggttttctaagttcggtgacccaagtgacacaatgtgccaagtccaaggaccgctattgtattttactctactgttttcgtagttccctacctcctagacataaagaacctgttgcaaatataactgagggtggtcgtgtttgacatatcttgaaatgacagtcgtatccatatagctaattagcgcttaactgaaatcaaccctattcacgcattatgctaagaaattgtaaaccaaaacataccactcttagataattggtcctccaaggcaacaagttttgtttgatactcctgaacttgcttctctgccgtgtcaagtgccaccatgaactcggatttgacctttcataattcagaattgcatccatgcaaaaaaaacatcaatatgcatatcacagcggcacacgcagttttacaatatgaaag

SEQ ID NO: 5795 - DNA, 1037 bp, Zea mays
  Zm_smallRNAprecursor_1284
acaccacctcgctcgttagaatttggcgggacccagccagcagcctacgcaaaattgacgtccacacgacgcgcccaataaaatttcacctgactgacctctcggttaagtactctgctgctgatctgctcgtgacgaccgacgagctacggcggcctaccgcctacgggccggggcttctggctctggctctggggccctcagaaagagcaccaagagggaagccggaaatggaagccgtccagagttgggcacgatcacgtgtgcgcgaaccaggacccgtccccgtcgacgcgtcaggtatactcaggtcttgtgcgtttcctgtgggagctgacgggccgacgtgggcaatatgggggtggtcagtggtgtaccggtgggtgcacggatcgcactgtgtggtgcagcgaaaagctgacgaccctcgctcacctccgtagctgatcgagcgtttagggcttgtgagccacaaaaccggagggaattagagaggggctaaaatcccctccttattcaatccctccttattcaaaattgaatatgaagaggattttagccctccaatcccctacggtatttggactctcaaactagcccttagtaaaagcctccgtaaccatatatcataggggttagtggcggagtacggatcgagcacccattatggctaaatatgtttggttagtgataaactgataaatgcatattagttccaatataatcaacaggttctacaagttcaaagccctgctcatgcagcatttttatctctaaacgatccgttgggtattgcaggtgcttttggatcatctctcttgtactagggcgactcctgcgtgtgcagccaaagggtcgaagggacacactgtgtggcgtgtacatgtgcgtacaagtacggtggtaagagtatatacagaccattcaaaacttatttggatagtcttgtattcacctcaatctacagtaaaactagtttggtagccacaagacatgagaaaatttgaggtctaaagtctcctccttatgcaattgaa

SEQ ID NO: 5796 - DNA, 1133 bp, Zea mays
  Zm_smallRNAprecursor_1285
atcgagttttctggtgccggtcttgctgctgagctcggaggacttggaatttcctcttgagatggcctttttcttcttcctttgccctttccacttgcatggctttgttggagaggtgcgagaaactgaggaagtcttggctggctaggatggtcttgagttctgatctgagcccctttaggaagcggaccatcttcttgacttcgatgctgacgtcatccggcgcgtagcggccaactccatgaatttgtgcacgtactcactgacagatctttcgtcttgagtcagttcccggaattcatcttccttgagctggacgatcccttggggcacatggtgttctcggaaagcagtttcaaactctgcccaggtagcatctctgatggcagcattgaaggtatcccaccaggctaaggccattctggaaagttgatgggcagccagttgaacacgctgatttttcgggcatccaatggcttccagcttcctcttaatcgtgcgcagccaatcgtcagcatcgagggggttgctagatccggcaaacgtgggaggtttgagcctcaggaaatctcccatcctgtcttgcggtcttccaccattcgggcgttgattttccagacttcgagtgaggacctcgatgagtcgggtttggttggctagaacttgggctaaatctagaggtagttctggaggtgcggggaggtgggtctcactttcttctctaccggcttctctttcagctcttaggggaaaccctgctccaatctcggaggcggtaggcgtggttttatccgaagccatctgccagggggagagagtcactattatgcacatgcaaattgttttcaaccaagttattttattcattacaccaatacattacaagcatacagctactacaagtcgtactacacgtgagcgttccctgaggtacttctgaactctttttctaaagtgtccccaaattccttgagaaggtcatcaaggctagccagggacatatcctcgacgtcggacaaattctctatcctggcgggagttggtgctggaggggccttcttcctccgctcagcttggcctccttggttcttggtcttcttttggattttcttcgtgggggcgagcttcttcag

SEQ ID NO: 5797 - DNA, 1043 bp, Zea mays
  Zm_smallRNAprecursor_1286
ctttctcggctgcacacgagcgcgaggggagaaagattattaatcaactgattataattaagcatgatatgcacggcgtatgtgcatgggcagatcagcgtgtctgtgtgttagtaattaagcacctttcaagtctggcgcccggcgttctacccgggttttattcagcctgttgatgatctcgttacccgggatttttgctacataattacgtatagcacatgtgtgtgagtgtatagctaggaatattgtcgctcaggcgtgagtattatttgctagctacaggcgcaggataaaaaaaatctaggcgagaaataaatttaaacggacacaccaacgatataaacaaaaaaaacaaaaaaaatgcaaactagggggcttgaacccacaaccacatggttaaaagccttatgctctaccaagtgggctagatgggctttgtgctcatgtctgcaacaaatattttaataacacaaccgagctcggcgccaagatctgtggcgccgagctcggttccacgtcgacgccacgcgtctgggttgtgccaacgcaacacgacctcggcgccatagcctatgtcgccgagcaaagggtccaaaactgtatttaaaatttttttaggtctaaacgtgattttacttttgtttaagggctaaaatacaaaaaaattcggggcaagcgcggtcgctgcctttcgccgcgctccaaacaatgctgccatccttgggcaggagaagctccagctccagcctccaggacgcgcgtgtgcgtgcatccggccctggccccgtccgtctctggacgaccacgatctgcctccgcaggtggtccgatgcatccggcacgcgcggaccccacacgcggtggctatcctgagctcgacacgcacgcctgtgcacgttaggcgggtggcggtgcactgctccgtcggtccgtccctgaaattcggttgcatcggacggttggccctgtgaagcaccagtagggacgatgcactgcacagtagcctgctcgctggcggatggccaggcccgagttcaggg

SEQ ID NO: 5798 - DNA, 1044 bp, Zea mays
  Zm_smallRNAprecursor_1287
ctttctcggctgcacacgagcgcgaggggagaaagattattaatcaactgattataattaagcatgatatgcacggcgtatgtgcatgggcagatcagcgtgtctgtgtgttagtaattaagcacctttcaagtctggcgcccggcgttctacccgggttttattcagcctgttgatgatctcgttacccgggatttttgctacataattacgtatagcacatgtgtgtgagtgtatagctaggaatattgtcgctcaggcgtgagtattatttgctagctacaggcgcaggataaaaaaaatctaggcgagaaataaatttaaacggacacaccaacgatataaacaaaaaaaacaaaaaaaatgcaaactagggggcttgaacccacaaccacatggttaaaagccttatgctctaccaagtgggctagatgggctttgtgctcatgtctgcaacaaatattttaataacacaaccgagctcggcgccaagatctgtggcgccgagctcggttccacgtcgacgccacgcgtctgggttgtgccaacgcaacacgacctcggcgccatagcctatgtcgccgagcaaagggtccaaaactgtatttaaaatttttttaggtctaaacgtgattttacttttgtttaagggctaaaatacaaaaaaattcggggcaagcgcggtcgctgcctttcgccgcgctccaaacaatgctgccatccttgggcaggagaagctccagctccagcctccaggacgcgcgtgtgcgtgcatccggccctggccccgtccgtctctggacgaccacgatctgcctccgcaggtggtccgatgcatccggcacgcgcggaccccacacgcggtggctatcctgagctcgacacgcacgcctgtgcacgttaggcgggtggcggtgcactgctccgtcggtccgtccctgaaattcggttgcatcggacggttggccctgtgaagcaccagtagggacgatgcactgcacagtagcctgctcgctggcggatggccaggcccgagttcagggc

SEQ ID NO: 5799 - DNA, 1041 bp, Zea mays
  Zm_smallRNAprecursor_1288
ttctcggctgcacacgagcgcgaggggagaaagattattaatcaactgattataattaagcatgatatgcacggcgtatgtgcatgggcagatcagcgtgtctgtgtgttagtaattaagcacctttcaagtctggcgcccggcgttctacccgggttttattcagcctgttgatgatctcgttacccgggatttttgctacataattacgtatagcacatgtgtgtgagtgtatagctaggaatattgtcgctcaggcgtgagtattatttgctagctacaggcgcaggataaaaaaaatctaggcgagaaataaatttaaacggacacaccaacgatataaacaaaaaaaacaaaaaaaatgcaaactagggggcttgaacccacaaccacatggttaaaagccttatgctctaccaagtgggctagatgggctttgtgctcatgtctgcaacaaatattttaataacacaaccgagctcggcgccaagatctgtggcgccgagctcggttccacgtcgacgccacgcgtctgggttgtgccaacgcaacacgacctcggcgccatagcctatgtcgccgagcaaagggtccaaaactgtatttaaaatttttttaggtctaaacgtgattttacttttgtttaagggctaaaatacaaaaaaattcggggcaagcgcggtcgctgcctttcgccgcgctccaaacaatgctgccatccttgggcaggagaagctccagctccagcctccaggacgcgcgtgtgcgtgcatccggccctggccccgtccgtctctggacgaccacgatctgcctccgcaggtggtccgatgcatccggcacgcgcggaccccacacgcggtggctatcctgagctcgacacgcacgcctgtgcacgttaggcgggtggcggtgcactgctccgtcggtccgtccctgaaattcggttgcatcggacggttggccctgtgaagcaccagtagggacgatgcactgcacagtagcctgctcgctggcggatggccaggcccgagttcaggg

SEQ ID NO: 5800 - DNA, 1042 bp, Zea mays
  Zm_smallRNAprecursor_1289
ttctcggctgcacacgagcgcgaggggagaaagattattaatcaactgattataattaagcatgatatgcacggcgtatgtgcatgggcagatcagcgtgtctgtgtgttagtaattaagcacctttcaagtctggcgcccggcgttctacccgggttttattcagcctgttgatgatctcgttacccgggatttttgctacataattacgtatagcacatgtgtgtgagtgtatagctaggaatattgtcgctcaggcgtgagtattatttgctagctacaggcgcaggataaaaaaaatctaggcgagaaataaatttaaacggacacaccaacgatataaacaaaaaaaacaaaaaaaatgcaaactagggggcttgaacccacaaccacatggttaaaagccttatgctctaccaagtgggctagatgggctttgtgctcatgtctgcaacaaatattttaataacacaaccgagctcggcgccaagatctgtggcgccgagctcggttccacgtcgacgccacgcgtctgggttgtgccaacgcaacacgacctcggcgccatagcctatgtcgccgagcaaagggtccaaaactgtatttaaaatttttttaggtctaaacgtgattttacttttgtttaagggctaaaatacaaaaaaattcggggcaagcgcggtcgctgcctttcgccgcgctccaaacaatgctgccatccttgggcaggagaagctccagctccagcctccaggacgcgcgtgtgcgtgcatccggccctggccccgtccgtctctggacgaccacgatctgcctccgcaggtggtccgatgcatccggcacgcgcggaccccacacgcggtggctatcctgagctcgacacgcacgcctgtgcacgttaggcgggtggcggtgcactgctccgtcggtccgtccctgaaattcggttgcatcggacggttggccctgtgaagcaccagtagggacgatgcactgcacagtagcctgctcgctggcggatggccaggcccgagttcagggc

SEQ ID NO: 5801 - DNA, 1070 bp, Zea mays
  Zm_smallRNAprecursor_1290
aatccttacatttggcaaaaaagaactaaacgagactaaaaatcagggactaacacttgtgagtctcaaacacaccttctctttcggggacttatctatgctttagatatgagtattttaaatctaatatatttatgagcaatctagtgatacgacaacttttcagcatgaatgctacctggccacaacataacgaataacgggtcaaagaagcaatagaagccggtatagattaaagccatctgtttgaactggtgaagcaacaatttatatagacaaaacaccgtaaaaagtagtaaaagcccatacggattaaagccaaacgaataggctgaaaccctaaacctaaacacacgttaagagagtgagaagaaataaattaattttaatgttttgttcatagatatctctaacctaatttataccatcaagttatctagatttatacctgacgtccaatactttaatcctttaatttaagttttggtgttgtgctcatctatacccttagtcgtgttttttgctcagctgtgcccttccagtgctatagaacagaagggcatagctgagcaaaaaacacgactaagggtatagatgagcacaacactaaaactaagggcacgaaattaaaaaaccctttaatttaatccctaaaacacaatatcgtcctatatgcatcgatgcatgatttcccattgtttctcactctttcgttgatgtacaaaaattgattgttttgtcttatgatttttctgaaaaacttttatatataattttgatcgattgtatatgagaccgtcgagcgatgccatctcttccctggggtgttagcaggctcgtgtggcccacaattgggccatatgggtcaggcctcgtattgcctagaagatacgtctcgtgtttgaagcggtcattaacatttgaaaaatttagaaactgaacggccagagtattgctgaaaacttaatttgacacacaaaaaagaacactgtacaattcttgtagctgtaggttgcttatgcgatgactgaaatactatgttggcagttaaatggatgactgaaaggcta

SEQ ID NO: 5802 - DNA, 1171 bp, Zea mays
  Zm_smallRNAprecursor_1291
cgcatgggcagccgaatgtcatgcactcgcatgttgctgccctgaatatctgcatcagagaagcccagaatgtgggcaaaacgacgataactgactttgtgccagttaccctggatgaagaaatacatgactgggtaatcatacccatcggcttcctcatctactttctttatccagagggtggcatagaactgagctaccacctcatcgttctaggggtattccatggtcataatgttccgtaacccctttctctctaagtttacgagagctgacgacatgtcagcatctcccatattctcacaaccctcccagtcaataaatctatgtcggacgactgggtgtttcttggaaagaatgacagaattgtagaagtcagcctggaaaagattccagaaccgagggtcctggacaccaggatgacgaggagtgagagtagggttggtaaacctcagacgctgaagggtgtctattcccttcagagtgaagtcgacgggaggttcatgcggaccgcggctgacgttcgccggatgcatgtgcagtccggtgacgtagagagcatcaggcgccggaaggtcgacggagtcgtcgaaagccccatcctcctcctggcagggagcatacccagaggaagacgtgctacgacgaggacgagaggcgccaaccttttggcgtctcccgcgagtcggctgcgagggcatggaagagccctcgccatccatccgaccagagccacgtcctctcttagagagggagcgacgaggttgtggcggaaccgcctgaattattccagcttaagtgcccaagtcgtacccttaaaggcatcaacacacttaaatcggaataacccgttagtccctcggatctagtccgataaagccacttatccaggatcgaataccactagctcactcgaaggtgaggcacagagaaatacaataaagcataataccacaaatttaataagtatcattagtaattacattatcggagtttcagaaatagtaacaatagtttttaatgcagcggaaataactaacggagaagaaccgagtaacatggcgaagcctggccacactactgctcctggtcctctcctgcggaaacaacaacccactcgatcgtctatcccggtggcggggatggaggccaagtcacaccatcaaccaaa

SEQ ID NO: 5803 - DNA, 1041 bp, Zea mays
  Zm_smallRNAprecursor_1292
gacagggagaaaaaaaacaaaaaaattcctgcatgcgcagcagctgttgaccggacagcacaaaaaaaaatctgtgcgcgcagacaagaagcgactggacagaaaaagtggcgcgcgacagagaaaaaaacgtgccgctgacagacctgcgaccggtcaaaagagaaaaagatgctgcgcgccccaacaggatgtgaccggttaaaaaaaaatcctgcgcgtctgacactgctgcagctggcagacctgcgtgaacaggcctgcgcggacagaccgggcagagaccggttcaaccggtccactataccggttcaaccggttttaaccaggatggtcctggtaaaaactggttaaaaatagctgagctgaagttcagctggcctcctccagctgaactagaaaattcagctggtcaagccagttgagccccaaaaaaatcttagcacagaaattcattcgaattttaacattttcaccaagtatttgaaagatcattacaaagctttaaaactatcaatcaaaaatagtgaatcaaacaattttttgtgaccgttttcaagttaagttacgagaatccaagatatttaattcactcctaagaaaacaaaacctagtctcatcgaggggttttgtgaagatatcggctagttgattttcggtgctcacatgaaacaattcgatatctcctttggcttcgtggtctctcaagaaatgatgtctgatgtcaatatgtttagttctagagtgttgcacagggttgtttgcaagttttatggcactctcattgtcacacaaaagtggaattttgttaaactcacaaccaaaatctctaagggtttgcttcatccataacaactgtgcacaacatgccccagctgctatgtactcagcttctgcagtggaaagcgcaacacaattttgtttcttggaactccatgatactaagaatcgcccaaggaattggcaagtcccagtagtgctttttcgatctactttgtaaccggcataatctgagtcagaatagccaagtaaatcgaaaag

SEQ ID NO: 5804 - DNA, 1132 bp, Zea mays
  Zm_smallRNAprecursor_1293
tataagaccattgcactcaaacaaagatccaaatcaaacatttcaatcaatcaccatcacatggttggtatttattaatatgataacttaaagagagtatcatcgtctaacgcgaaatataacttattacatcatgactcaaaacagctaaagcagcctagtgacgaatttgggctctccatagcgcagcctcttgcggggaggagacaacgccatggcggggacctgagctttgggcggatccagtccttgcagttgggcttccagggctgcaatcctggcgtgggcattctccagctccaaatgcaccctgtagagatccagggtggcaccgtccaggtcggtgttgagaccggccactacacccgctaaggtgtggatgcgatcctcaccagcttcacctgggacaatgctggtctggcttcctccactcagacgttgaggaagatgcctgaacctcgtgttctgcagctgttgccggtaggtgtggctgagcgaccacagggtccgacgggcagcatcgctgaccgaggcagcgtaggtggacagtggcgtcagggactcgtgagcagacagagtcttgaatcccctgtcacctgcatccatcaccctgacgtggatgcgagtgatgtagtagcaagcccggggaggctcgctcactcgccttgtttcgtacagggggcagacgtaggtgcctagcgcatgcagcacttcttgcagcaggttggggaagtgccccgtctcgaacattgatgtgtaatgttcgacaacaggaccaaaccccatgaagttgtcctgctgggcgtagttagcttcctcattgacgtgttcgtcttctccatcgtcttcgtcgtcgtcatcctcgccatcgccgtctccggagtcgtcggggtcgtcgcctccaggtgcaggtgcttggaaggctggggcagacggtgatgacgttgatgacccagctgcgaaggccagggactctgccaacggggtgggcgtcggtagctgtcctccaggttgattacattctccactcggatgggagggagatccgccagaacttcctcgactaccactgggtagaccgggatctgccgggcctgaggggcgtagctggtgttgatgcgggtagtttgga

SEQ ID NO: 5805 - DNA, 1159 bp, Zea mays
  Zm_smallRNAprecursor_1294
ttatgcaatttttccagttaattatgaaaccaacgtggattgattattgcttaaattgcatagaattcagaaaaatttgtggtgattgaatattttaaccaacgttggatattgttaccacaatttaatacaagtttatgttttctagatcatccaacgatggtttagaaattttgtgatcagaaattttcatagatatggcatgattattatttgaccaacgttgaatatttaattcatgcatgttctatgattcagtattcagtatttatttcagatgtcctaaatattttctattttaattttgcaaaggtgctcataccgccatgctcattagccagattgctcagatgaaaccgctagatggtagtaattaccattcttggcgggaggatatagacatgataaccacagtgggtgagatagattacgcactgaggtttgataaaccagttgagcccacagtgggcactcccaactatgaccacaggtggatgcaatacagcatcgacaaggtcaagtgggagagatcaaatgacaaatgtatgattattcttaagaggagcatcaaggagcctcttaagagttccataccagagtgcgagactgccaaagaataccttgagagggtagcctctcatcaccaagggtcttctaaggcttatgcttgctctctaatgacagaatttgtcaatgcaaaatacgatggaaatggtgtcagaccattcattcagaaaatgatatccatcgtagctaagataaacaagtacctcgggtctcctttacacgaggaatttgtagtatttatgataatgaagtctctgcccaaggagtttgagacttttcacatacaatacaacactagtgtcactgataagtggaatatagaccaactcttggcacagtgtgtccaggaggaagagaggttaaagcagactggagactctgtcaacctcatcaaaggcaatatccccagatagaacaagaactcaaagaaaaagttcaagaagcaaggtaaacagaataaccaggcttcgtcgagcaataataatcagccaagacaaggaggcagtttctcagttccccctgatacctgcctctattgcaagaagacaggtcattacaagagaaagtgccctgaattcctgcagtatctact

SEQ ID NO: 5806 - DNA, 1140 bp, Zea mays
  Zm_smallRNAprecursor_1295
atttatttcagatgtcctaaatattttctattttaattttgcaaaggtgctcataccgccatgctcattagccagattgctcagatgaaaccgctagatggtagtaattaccattcttggcgggaggatatagacatgataaccacagtgggtgagatagattacgcactgaggtttgataaaccagttgagcccacagtgggcactcccaactatgaccacaggtggatgcaatacagcatcgacaaggtcaagtgggagagatcaaatgacaaatgtatgattattcttaagaggagcatcaaggagcctcttaagagttccataccagagtgcgagactgccaaagaataccttgagagggtagcctctcatcaccaagggtcttctaaggcttatgcttgctctctaatgacagaatttgtcaatgcaaaatacgatggaaatggtgtcagaccattcattcagaaaatgatatccatcgtagctaagataaacaagtacctcgggtctcctttacacgaggaatttgtagtatttatgataatgaagtctctgcccaaggagtttgagacttttcacatacaatacaacactagtgtcactgataagtggaatatagaccaactcttggcacagtgtgtccaggaggaagagaggttaaagcagactggagactctgtcaacctcatcaaaggcaatatccccagatagaacaagaactcaaagaaaaagttcaagaagcaaggtaaacagaataaccaggcttcgtcgagcaataataatcagccaagacaaggaggcagtttctcagttccccctgatacctgcctctattgcaagaagacaggtcattacaagagaaagtgccctgaattcctgcagtatctactagagagtggtaaggaccaagttacttttgtaaatgagtctttatacttagaacatcccagttattcttggtggattgactctggtgcaactgttcatgttgcaaactctctacagggactccgtacaagccaaaggctcccaaagggccgaagaacaattagagtggcaaatggagttgaagcagcagtcgaggccattggagatatacatcttaaattagttaatggttttgtactgttgttgaga

SEQ ID NO: 5807 - DNA, 1159 bp, Zea mays
  Zm_smallRNAprecursor_1296
aacctttctcgccttagtctctccgcagtgtttagagcctcctctctcactcacctcaaccggttcataattacaaaacctctccaaacatggtgcgtcgtcgcagcccttccgtgattgagtttagcagcgactcggatgagattcaggaggaatcttctgtcccctctcctccgtctcgtcgctccctctctaagagaggacgcggctctggtaggatggatggagagggttcttccatgccctcgcagccgactcgcgggaggcgccaaaaggttggcgccactcgacctcgtcgcagcacttcttactctgaatatactccttgccaggaggaggatggggctttcgacgacttcatcgaccctccggcgccagatgcactctacgtcaccggtctgcacatgcatccggcgaacgttactcgcggtccacatgaacctcctgtcgacttctctctgaagggagtagacacccttcagcgcctgaggttcaccaatccttctctcactcctcgtcatcctggtgtccaggaccctcggttctggaattttttctaggctgatttctacaattctgtcattttatccaagatacactcagtcgtcaggcataggtttatagactgggagagatgtgagaacatgggagatgctgacatgacgtcagcgctccaaaaattagagagaagggggttaaaaaatatcatgaccatggaatacccctagaacgacgaggtggtagctcagttttatgccaccctatggatcaagaaagtagatgaggaagccgatgggtatgattaccctgtcatgtatttcttcatccagggtaactggcacaaagtcagttatcgtcgttttgcccatattctgggcttctctgatgctgatattcagggcagcaacatgcgagtgcataacattaggctgcccatgcgtgaagagactgaatttattcatgtctctaatgatcgagagttctggacgaccgctaacatgcataggtactacaggtaccttaattctttgtccaggatgaccgttctaccaaagggcgggaatcaaatgaacgtccttggggagagtcgggtcttccttctcctccttgctcccaacagtctcgcccgcattaatgtgtttgacatgatctgggaaga

SEQ ID NO: 5808 - DNA, 1032 bp, Zea mays
  Zm_smallRNAprecursor_1297
cggttctggaattttttctaggctgatttctacaattctgtcattttatccaagatacactcagtcgtcaggcataggtttatagactgggagagatgtgagaacatgggagatgctgacatgacgtcagcgctccaaaaattagagagaagggggttaaaaaatatcatgaccatggaatacccctagaacgacgaggtggtagctcagttttatgccaccctatggatcaagaaagtagatgaggaagccgatgggtatgattaccctgtcatgtatttcttcatccagggtaactggcacaaagtcagttatcgtcgttttgcccatattctgggcttctctgatgctgatattcagggcagcaacatgcgagtgcataacattaggctgcccatgcgtgaagagactgaatttattcatgtctctaatgatcgagagttctggacgaccgctaacatgcataggtactacaggtaccttaattctttgtccaggatgaccgttctaccaaagggcgggaatcaaatgaacgtccttggggagagtcgggtcttccttctcctccttgctcccaacagtctcgcccgcattaatgtgtttgacatgatctgggaagagatcatccgtgcttcctggtctcctctcagagggtgtcttcatgcaacctttatcatgaagatgatcgaagtggtcacccagactcacttcgaaaaatctgtcaaacactcccgctacgtgccctactgggttgattcctccaacccagctgctcctacgaagcgggctccctcagggtttggagaaactgcctcctctgctgagccacctccccagcctcctcatcatccatcctcatctcgcgccgccgctacctcgcgtcccactcctggccgcggatctcccgtgccacgtggtcgtggccgagggatggtgctcgcttcgtacgagcagctgggttggaggaatcaacccagtagggtacgtagcgggagtgtttgacaggtttttcaaagtgagtctgggtgacca

SEQ ID NO: 5809 - DNA, 1134 bp, Zea mays
  Zm_smallRNAprecursor_1298
gtggtcacccagactcacttcgaaaaatctgtcaaacactcccgctacgtgccctactgggttgattcctccaacccagctgctcctacgaagcgggctccctcagggtttggagaaactgcctcctctgctgagccacctccccagcctcctcatcatccatcctcatctcgcgccgccgctacctcgcgtcccactcctggccgcggatctcccgtgccacgtggtcgtggccgagggatggtgctcgcttcgtacgagcagctgggttggaggaatcaacccagtagggtacgtagcgggagtgtttgacaggtttttcaaagtgagtctgggtgaccacttcgatcatcttcatgataaagggtgcatgaagacaccctttgagagaagaccaggaagcacggatgatctcttcccagatcatgtcaaacacattaatgcgggcgagactgttgggagcaaggaggagaaggaagacccgactctccccaaggacgttcatttgattgccgcccttcgggagaacggtcatcctggacaaagagttaaggtacctgtagtacctatgcatgttagcggtcgtccagaactcccgatccatagagacatgaataaattcagtctcttcccgcatgggcaggctaatgttatgcactcgcatgttgctgccctgtatatcagcatcagagaagcccagaatatgggcaaaacgacgataactgactttgtgccagttaccctggatgaagaaatacatgacagggtaatcatactcatcggcttcctcatctacttccttgatccagagggtagcataaaactgagctaccacctcgttgttccaggggtattccatggtcataatattttttaacccctttctctctaagttgcagagagctgacgtcatttcagcatctcccatgttctcacatccctcccagtctataaacctatgtctgacgactaggtgtttcttggataaaatgacagaattgtagaaatcagcctagaaaagattccagaaccgagggtcctagacaccaggatgacgaggagtgagagaaggattggtgaacctcaggcgttgaagggtgtccactcccttcagagacaagtcgacaggaggtt

SEQ ID NO: 5810 - DNA, 1170 bp, Zea mays
  Zm_smallRNAprecursor_1299
ggtcatcctggacaaagagttaaggtacctgtagtacctatgcatgttagcggtcgtccagaactcccgatccatagagacatgaataaattcagtctcttcccgcatgggcaggctaatgttatgcactcgcatgttgctgccctgtatatcagcatcagagaagcccagaatatgggcaaaacgacgataactgactttgtgccagttaccctggatgaagaaatacatgacagggtaatcatactcatcggcttcctcatctacttccttgatccagagggtagcataaaactgagctaccacctcgttgttccaggggtattccatggtcataatattttttaacccctttctctctaagttgcagagagctgacgtcatttcagcatctcccatgttctcacatccctcccagtctataaacctatgtctgacgactaggtgtttcttggataaaatgacagaattgtagaaatcagcctagaaaagattccagaaccgagggtcctagacaccaggatgacgaggagtgagagaaggattggtgaacctcaggcgttgaagggtgtccactcccttcagagacaagtcgacaggaggttcatgtggtccgcgggtaactgtcgttggatgcatgtgcagaccggtgacgtagagtgcatctggcgctggaaggtcgatgaagtcgtcgaaagccccatcctcctactggcagggagcatatccagaggaagaagtgctatgacgaggtcgagtggtgccaaccttttggcgcctcccgcgagccggctgcgagggcatggaagaaccctctccatccatcctaccagagccgcgtcctctcttagagagggagcgacgaggcggaggagaggggacgggagattcctcctgaatctcatccgagtcgctgctgaactcaatcacggatgggttgcgacgacgcaccatgtttggagaggttttggaactatgaaccggttgaggtgagtgagagaggaggctctaaacactgcggagagacgaggtcgagaatggttggagtgagggaagagaaggggagcgacatataaataggcagttgagttggtccccaggaccggttcaaccgcccaccaagggctggttcaaccacatctgaccagcacggtcagagggccagaaacg

SEQ ID NO: 5811 - DNA, 1163 bp, Zea mays
  Zm_smallRNAprecursor_1300
agaatatgggcaaaacgacgataactgactttgtgccagttaccctggatgaagaaatacatgacagggtaatcatactcatcggcttcctcatctacttccttgatccagagggtagcataaaactgagctaccacctcgttgttccaggggtattccatggtcataatattttttaacccctttctctctaagttgcagagagctgacgtcatttcagcatctcccatgttctcacatccctcccagtctataaacctatgtctgacgactaggtgtttcttggataaaatgacagaattgtagaaatcagcctagaaaagattccagaaccgagggtcctagacaccaggatgacgaggagtgagagaaggattggtgaacctcaggcgttgaagggtgtccactcccttcagagacaagtcgacaggaggttcatgtggtccgcgggtaactgtcgttggatgcatgtgcagaccggtgacgtagagtgcatctggcgctggaaggtcgatgaagtcgtcgaaagccccatcctcctactggcagggagcatatccagaggaagaagtgctatgacgaggtcgagtggtgccaaccttttggcgcctcccgcgagccggctgcgagggcatggaagaaccctctccatccatcctaccagagccgcgtcctctcttagagagggagcgacgaggcggaggagaggggacgggagattcctcctgaatctcatccgagtcgctgctgaactcaatcacggatgggttgcgacgacgcaccatgtttggagaggttttggaactatgaaccggttgaggtgagtgagagaggaggctctaaacactgcggagagacgaggtcgagaatggttggagtgagggaagagaaggggagcgacatataaataggcagttgagttggtccccaggaccggttcaaccgcccaccaagggctggttcaaccacatctgaccagcacggtcagagggccagaaacggttagagggaaaacgtcaaaaaaacttaaatttctgacgcatctatgcagtaaaaagcagattcttcaaacagtaaaagctgaaaaagtactgcacaggtttctgaaaatgtgttccaaaaagtgactgacacgacctgacatggcattaattaaagcagca

SEQ ID NO: 5812 - DNA, 1040 bp, Zea mays
  Zm_smallRNAprecursor_1301
tgcagcagaccagtcagagccagaccggttcaaccggtcctcaataccggttcaaccggttttggccaggatagtcctggttaattctagttaaaagcagctgagctgaagttcagctccgaagttcagttagcctcctccagctgaattagaaagttcagctagccaagcctgttaagctttaagtgaaaaattttaaaaatcttagcactaaaattcattcgaattttaacatttccaccaagttttgaaagatcatcacaaagctttaaaactatcaatcaaaaaatagtgaatcaaacaatctgtgtgtccgttttcaagttaagttgcgagaatacaagatatttaattcactcctaagaaagcaaaatctagtctcatcgaggggtttgtgaagatatcggctagttgattttccgtgtttacatgacataaatcgatatctccttttgcttcgtggtccctcagaaaatggtgtcttatatctatgtgtttggttctagaatgttgcacaggattgttggctagtttaatgacgatctcattgtcacaaaatagtgggattcttttaaactcacagccaaaatctctcaaagttttcttcatccatagcaactgagcacaacaagcaccagcagctatgtattcggcctcggcagtggaaagtgcaacacagttttgcttcttagagctccaggacaccagggaccgcccaaggaattggcaagtctccgaggtgctttttcgatatactttacaaccagcatagtctgaatcagagtagccaaataaatcgaaaaaggagcccttaggataccagagacctatattttgggtgtgaactagatatctcaaaattctcttaacggccactaagtgacattcttttgcgttagcttaaaaacgggcacacatgcacacactaagcatgatatctagcctagatgcacacaaatatagtagagatcctatcattgatctataaagcttttgatctacagatttaccttcttcatttaagtcgagatgaccacttg

SEQ ID NO: 5813 - DNA, 1153 bp, Zea mays
  Zm_smallRNAprecursor_1302
gatcatccggtggacaacatcctgggtagcatcaggagaggggtaacaactcgatctcgtttagctaatttttgtgaattttactcgtttgtttcctctcttgagccacttaaggtagaagaagcattgggtgatctggattggataatttccatgcaagaggagttgaacaacttcacccggaatgaagtttggtccttagtccaaagacccaaacaaaatgtgattgggacaaaatgggtctttaggaacaaacaagatgaacatggtgtggttacaagaaacaaagcacggttggttgcccaaggctacactcaagtggaaggacttgattttggtgaaacatatgcgccggtagcaaggttagagtcaattagaatattaattgcctatgctactaaccatgatttcaagttatatcaaatggatgtcaagagcgcttttctaaattgaccactacaagagagggtctatgtggagcaaccaccgggctttgaagatccaaagaagccaaaccatgtttacctacttcacaaggcactctacgggcttaaacaagcccctagagcttggcatgattgccttaaggatttcttgcttaaaatggttttgaaataggaaaagtagactctactttattcactcgcaaagttgacaatcaattatttgtttgtcaaatatatgtcgatgacattatatttggcagtactgatgaaactttttgtgaggaatttagtagggttatgacaaataggtttgagatgtccatgatgggtgagctcaagtacttcctgggttttcaagttaaacaactcaaggaaggaacctttctgtgccaaaccaagtacacaaaagacatgctcaaaaagtttggcatggaaaaggcaaagcacgccaagacaccaatggcttcaagtggtcatctcgacttaaatgaagaaggtaaaactgtagatcaaaagatttatagatcaatgataggatctctactatatttatgtgcatctaggccagatatcatgcttagtgtgtgcatgtgtgcccgttttcaagctaacccaaaagagtgtcacttagtggccgttaagagaattttgagatatctagttcacacccaaaatctaggtctctggtatcctaagggctccttttt

SEQ ID NO: 5814 - DNA, 1048 bp, Zea mays
  Zm_smallRNAprecursor_1303
tgtggttacaagaaacaaagcacggttggttgcccaaggctacactcaagtggaaggacttgattttggtgaaacatatgcgccggtagcaaggttagagtcaattagaatattaattgcctatgctactaaccatgatttcaagttatatcaaatggatgtcaagagcgcttttctaaattgaccactacaagagagggtctatgtggagcaaccaccgggctttgaagatccaaagaagccaaaccatgtttacctacttcacaaggcactctacgggcttaaacaagcccctagagcttggcatgattgccttaaggatttcttgcttaaaatggttttgaaataggaaaagtagactctactttattcactcgcaaagttgacaatcaattatttgtttgtcaaatatatgtcgatgacattatatttggcagtactgatgaaactttttgtgaggaatttagtagggttatgacaaataggtttgagatgtccatgatgggtgagctcaagtacttcctgggttttcaagttaaacaactcaaggaaggaacctttctgtgccaaaccaagtacacaaaagacatgctcaaaaagtttggcatggaaaaggcaaagcacgccaagacaccaatggcttcaagtggtcatctcgacttaaatgaagaaggtaaaactgtagatcaaaagatttatagatcaatgataggatctctactatatttatgtgcatctaggccagatatcatgcttagtgtgtgcatgtgtgcccgttttcaagctaacccaaaagagtgtcacttagtggccgttaagagaattttgagatatctagttcacacccaaaatctaggtctctggtatcctaagggctcctttttcgatttatttggctactctgattcagactatgccggttgtaaagtagatcgaaaaagcacctcagggacttgccaattccttgggcggtccctggtgtcttggagctctaagaagcaaaattgtgttgcactttccactgccgaggccgaatacatagctgctg

SEQ ID NO: 5815 - DNA, 1190 bp, Zea mays
  Zm_smallRNAprecursor_1304
tagcaccaacgtatcataactgttctcatcatgttcattgattaaagtaaagcaataacataaaactaatcatagtaaccaatttccaaagggtaaacaaggataggaaaacataatactagtcaatccttaggttgatcttgatatgtgggacagtgaattataaagtaaataggacatgatgggtcagaggacacttgccttcaccaggttgctgctcagagaagtctcctgcaacacactcagaaacctcgatctgctcgttttctacgcaaaacaataattcattcaacacacatggaaaatgacaaaggaaaattacaccaatcatatacaacagagtaaccacaggttcagtggaaaagtacaaacacacaagtgaactctagattctagggtagattaatatacctagtggtctatggttttccaactactgcctatctcagtagattaactacctaactatgtctatcttagtaaaggcaacgactgttatgcaagcagtccttctgtgcaagcgtgcaagcaaaccatctgatccattagattacgatctaatcacagatacaaccatggtttgttaggggtttttttataaagattattgagctagtggtggaagggtttaagcgttaaatgtgacctacaattggatcacgatctaatggatcagatggtttgcttgcacgcttgcacagaaggactgcttgcatagcagtcgttgcccttagtaaattacttatttagataaagttattccagggatgggaccatacttcaattgaaattaaatctacaaagttaagcacttgcacattcattagggtttcacttctgttttacctttattaaatattctatcactttaaattaacctagagtctagccacaaaattaggacatgcaaacaatggatgaatataatttaaacatatagagaataacattatgaacattttccaatttaaaccacccaatttggagttcatatgcaaaagatatgaaatttacaagttttagaattcaaaaacactaaatgaaacctatttctgtgattaaaataaagttcaggggcctctctgcaagaaactaggacttaggcgcaagaaaacaggatgacaggttggttctcggaaacccgaggggtttcttaacaaattttccaagcgaacgggtatcaagcgctc

SEQ ID NO: 5816 - DNA, 1191 bp, Zea mays
  Zm_smallRNAprecursor_1305
tagcaccaacgtatcataactgttctcatcatgttcattgattaaagtaaagcaataacataaaactaatcatagtaaccaatttccaaagggtaaacaaggataggaaaacataatactagtcaatccttaggttgatcttgatatgtgggacagtgaattataaagtaaataggacatgatgggtcagaggacacttgccttcaccaggttgctgctcagagaagtctcctgcaacacactcagaaacctcgatctgctcgttttctacgcaaaacaataattcattcaacacacatggaaaatgacaaaggaaaattacaccaatcatatacaacagagtaaccacaggttcagtggaaaagtacaaacacacaagtgaactctagattctagggtagattaatatacctagtggtctatggttttccaactactgcctatctcagtagattaactacctaactatgtctatcttagtaaaggcaacgactgttatgcaagcagtccttctgtgcaagcgtgcaagcaaaccatctgatccattagattacgatctaatcacagatacaaccatggtttgttaggggtttttttataaagattattgagctagtggtggaagggtttaagcgttaaatgtgacctacaattggatcacgatctaatggatcagatggtttgcttgcacgcttgcacagaaggactgcttgcatagcagtcgttgcccttagtaaattacttatttagataaagttattccagggatgggaccatacttcaattgaaattaaatctacaaagttaagcacttgcacattcattagggtttcacttctgttttacctttattaaatattctatcactttaaattaacctagagtctagccacaaaattaggacatgcaaacaatggatgaatataatttaaacatatagagaataacattatgaacattttccaatttaaaccacccaatttggagttcatatgcaaaagatatgaaatttacaagttttagaattcaaaaacactaaatgaaacctatttctgtgattaaaataaagttcaggggcctctctgcaagaaactaggacttaggcgcaagaaaacaggatgacaggttggttctcggaaacccgaggggtttcttaacaaattttccaagcgaacgggtatcaagcgctct

SEQ ID NO: 5817 - DNA, 1188 bp, Zea mays
  Zm_smallRNAprecursor_1306
agcaccaacgtatcataactgttctcatcatgttcattgattaaagtaaagcaataacataaaactaatcatagtaaccaatttccaaagggtaaacaaggataggaaaacataatactagtcaatccttaggttgatcttgatatgtgggacagtgaattataaagtaaataggacatgatgggtcagaggacacttgccttcaccaggttgctgctcagagaagtctcctgcaacacactcagaaacctcgatctgctcgttttctacgcaaaacaataattcattcaacacacatggaaaatgacaaaggaaaattacaccaatcatatacaacagagtaaccacaggttcagtggaaaagtacaaacacacaagtgaactctagattctagggtagattaatatacctagtggtctatggttttccaactactgcctatctcagtagattaactacctaactatgtctatcttagtaaaggcaacgactgttatgcaagcagtccttctgtgcaagcgtgcaagcaaaccatctgatccattagattacgatctaatcacagatacaaccatggtttgttaggggtttttttataaagattattgagctagtggtggaagggtttaagcgttaaatgtgacctacaattggatcacgatctaatggatcagatggtttgcttgcacgcttgcacagaaggactgcttgcatagcagtcgttgcccttagtaaattacttatttagataaagttattccagggatgggaccatacttcaattgaaattaaatctacaaagttaagcacttgcacattcattagggtttcacttctgttttacctttattaaatattctatcactttaaattaacctagagtctagccacaaaattaggacatgcaaacaatggatgaatataatttaaacatatagagaataacattatgaacattttccaatttaaaccacccaatttggagttcatatgcaaaagatatgaaatttacaagttttagaattcaaaaacactaaatgaaacctatttctgtgattaaaataaagttcaggggcctctctgcaagaaactaggacttaggcgcaagaaaacaggatgacaggttggttctcggaaacccgaggggtttcttaacaaattttccaagcgaacgggtatcaagcgct

SEQ ID NO: 5818 - DNA, 1189 bp, Zea mays
  Zm_smallRNAprecursor_1307
agcaccaacgtatcataactgttctcatcatgttcattgattaaagtaaagcaataacataaaactaatcatagtaaccaatttccaaagggtaaacaaggataggaaaacataatactagtcaatccttaggttgatcttgatatgtgggacagtgaattataaagtaaataggacatgatgggtcagaggacacttgccttcaccaggttgctgctcagagaagtctcctgcaacacactcagaaacctcgatctgctcgttttctacgcaaaacaataattcattcaacacacatggaaaatgacaaaggaaaattacaccaatcatatacaacagagtaaccacaggttcagtggaaaagtacaaacacacaagtgaactctagattctagggtagattaatatacctagtggtctatggttttccaactactgcctatctcagtagattaactacctaactatgtctatcttagtaaaggcaacgactgttatgcaagcagtccttctgtgcaagcgtgcaagcaaaccatctgatccattagattacgatctaatcacagatacaaccatggtttgttaggggtttttttataaagattattgagctagtggtggaagggtttaagcgttaaatgtgacctacaattggatcacgatctaatggatcagatggtttgcttgcacgcttgcacagaaggactgcttgcatagcagtcgttgcccttagtaaattacttatttagataaagttattccagggatgggaccatacttcaattgaaattaaatctacaaagttaagcacttgcacattcattagggtttcacttctgttttacctttattaaatattctatcactttaaattaacctagagtctagccacaaaattaggacatgcaaacaatggatgaatataatttaaacatatagagaataacattatgaacattttccaatttaaaccacccaatttggagttcatatgcaaaagatatgaaatttacaagttttagaattcaaaaacactaaatgaaacctatttctgtgattaaaataaagttcaggggcctctctgcaagaaactaggacttaggcgcaagaaaacaggatgacaggttggttctcggaaacccgaggggtttcttaacaaattttccaagcgaacgggtatcaagcgctc

SEQ ID NO: 5819 - DNA, 1187 bp, Zea mays
  Zm_smallRNAprecursor_1308
gcaccaacgtatcataactgttctcatcatgttcattgattaaagtaaagcaataacataaaactaatcatagtaaccaatttccaaagggtaaacaaggataggaaaacataatactagtcaatccttaggttgatcttgatatgtgggacagtgaattataaagtaaataggacatgatgggtcagaggacacttgccttcaccaggttgctgctcagagaagtctcctgcaacacactcagaaacctcgatctgctcgttttctacgcaaaacaataattcattcaacacacatggaaaatgacaaaggaaaattacaccaatcatatacaacagagtaaccacaggttcagtggaaaagtacaaacacacaagtgaactctagattctagggtagattaatatacctagtggtctatggttttccaactactgcctatctcagtagattaactacctaactatgtctatcttagtaaaggcaacgactgttatgcaagcagtccttctgtgcaagcgtgcaagcaaaccatctgatccattagattacgatctaatcacagatacaaccatggtttgttaggggtttttttataaagattattgagctagtggtggaagggtttaagcgttaaatgtgacctacaattggatcacgatctaatggatcagatggtttgcttgcacgcttgcacagaaggactgcttgcatagcagtcgttgcccttagtaaattacttatttagataaagttattccagggatgggaccatacttcaattgaaattaaatctacaaagttaagcacttgcacattcattagggtttcacttctgttttacctttattaaatattctatcactttaaattaacctagagtctagccacaaaattaggacatgcaaacaatggatgaatataatttaaacatatagagaataacattatgaacattttccaatttaaaccacccaatttggagttcatatgcaaaagatatgaaatttacaagttttagaattcaaaaacactaaatgaaacctatttctgtgattaaaataaagttcaggggcctctctgcaagaaactaggacttaggcgcaagaaaacaggatgacaggttggttctcggaaacccgaggggtttcttaacaaattttccaagcgaacgggtatcaagcgct

SEQ ID NO: 5820 - DNA, 1167 bp, Zea mays
  Zm_smallRNAprecursor_1309
ctcatcatgttcattgattaaagtaaagcaataacataaaactaatcatagtaaccaatttccaaagggtaaacaaggataggaaaacataatactagtcaatccttaggttgatcttgatatgtgggacagtgaattataaagtaaataggacatgatgggtcagaggacacttgccttcaccaggttgctgctcagagaagtctcctgcaacacactcagaaacctcgatctgctcgttttctacgcaaaacaataattcattcaacacacatggaaaatgacaaaggaaaattacaccaatcatatacaacagagtaaccacaggttcagtggaaaagtacaaacacacaagtgaactctagattctagggtagattaatatacctagtggtctatggttttccaactactgcctatctcagtagattaactacctaactatgtctatcttagtaaaggcaacgactgttatgcaagcagtccttctgtgcaagcgtgcaagcaaaccatctgatccattagattacgatctaatcacagatacaaccatggtttgttaggggtttttttataaagattattgagctagtggtggaagggtttaagcgttaaatgtgacctacaattggatcacgatctaatggatcagatggtttgcttgcacgcttgcacagaaggactgcttgcatagcagtcgttgcccttagtaaattacttatttagataaagttattccagggatgggaccatacttcaattgaaattaaatctacaaagttaagcacttgcacattcattagggtttcacttctgttttacctttattaaatattctatcactttaaattaacctagagtctagccacaaaattaggacatgcaaacaatggatgaatataatttaaacatatagagaataacattatgaacattttccaatttaaaccacccaatttggagttcatatgcaaaagatatgaaatttacaagttttagaattcaaaaacactaaatgaaacctatttctgtgattaaaataaagttcaggggcctctctgcaagaaactaggacttaggcgcaagaaaacaggatgacaggttggttctcggaaacccgaggggtttcttaacaaattttccaagcgaacgggtatcaagcgctct

SEQ ID NO: 5821 - DNA, 1048 bp, Zea mays
  Zm_smallRNAprecursor_1310
ttggttacaagaaacaaggcacgactggttgctcagggtttcactcaagtggaaggacttgattttggtgaaacctatgcaccagtagcaaggttagagtccataagaatattaattgcctatgctactaaccatgatttcaaattgtatcaaatggatgtcaaaagtgctttcctaaatggaccactgcaagaattggtttatgtggagcaaccaccgggctttgaagatcctaagaagccaaaccatgtctaccttcttcacaaagcgctctatgggcttaaacaagctcctagagcatggtatgaatgtcttaaagatttcttgcttaaaaatggttttgaaataggaaaagtagactctactttattcactcgtaaagttgacaatcaattatttgtttgtcaaatatatgtcgacgacattatatttggcagtactgatgaaactttttgtgaggaatttagtagggttatgacaaataggtttgagatgtccatgatgggtgagctcaagtacttcctgggttttcaagttaaacaactcaaggaaggaacctttctgtgccaaaccaagtacacacaagacatgctcaaaaagtttggcatggaaaaggcaaagcacgccaagacaccaatgacttcaagtggtcatctcgacttaaatgaagaaggtaaaactgtagatcaaaagctttatagattaatgataggatctctactgtatttatgtgcatctaggccagatatcatgcttagtgtgtgcatgtgtgcccgttttcaagctaacccaaaagagtgtcacttagtggccgttaagagaattttgagatatctagttcacacccaaaatctaggtctctggtatcctaagggctcctttttcgatttatttggctactctgattcagactatgccggttgtaaagtagatcgaaaaagcacctcggggacttgccaattccttgggcggtccctggtgtcttgggagctctaagaagcaaaactgtgttgcactttccactgtcgaggccgaatatatagctgct

SEQ ID NO: 5822 - DNA, 1032 bp, Zea mays
  Zm_smallRNAprecursor_1311
cggttctggaatcttttccaggctgatttctacaattctgtcattttatccaagaaacacccagtcgtcaggcataggtttatagactgggagggttgtgagaacatgggcgatgctgacatgacgtcaactctccaaaacttagagagaaagggtttaaaaaatattatgaccatggaatacccctggaacgacgaggtggtagctcagttttatgccaccctctggatcaagaaagtagatgaggaagctgttgggtatgattaccctgtcatgtatttcttcatccagggtaactggcacaaagtcagttatcgtcgttttgcccatattctgggcttctctgatgctgatattcagggcagcaacatgcgagtgcataacattaggctgcccatgcgggaagagactgaatttattcatgtctctaatgatcgggagttctggacaaccgctaacatgcataggtactacaggtaccttaactcttcgtccaggatgaccgttctcccaaagggcgggaatcaaatgaacgtccttggggagagtcgggtcttccttctcctccttgctcccaacagtctcgcccacattaatgtgtttgacatgatctgggaagagatcatctgtgcttcctggtctcctctcaaagggtgtcttcatgcaccctttatcatgaagatgatcgaagtggtcacccagactcacttcaaaaaacctgtcaaacactcccgctacgtaccctactgggttgattcctccaacccagctgctcgtacgaagcgggctccctcagggtctggaggccctacctcctctgctgagccacctccccagcctcctcatcatccatcttcctctcgcaccaccgctgcctcgcgtccctctcctagccgcggatctcccatgccacgtggtcgtggtcgtggtcgaggtcgtggccgagggatgggtgctcgcttggtccatgggattgcggcatttttctctatgtgccgaaacatctctactgatgtacatgagctggcaagg

SEQ ID NO: 5823 - DNA, 1040 bp, Zea mays
  Zm_smallRNAprecursor_1312
ttgcggcatttttctctatgtgccgaaacatctctactgatgtacatgagctggcaaggcgtcagcgggagactgacgacaatcttcgtcgtcaagcttccactatgggtatgccctttgcccctcgctcgcctgacgtgcctctccatcctcctcccccggagatcaatgagtggcaccggcaggcctacggggtgccatttatgtcagcagacaacgaagaagaagaagaagcctacgttgatgatcgcgagcagtttgccccgcctccctacgatggggatccgggtcaatcatcctctcaccctccccctccctactcgagtcagggacccactcccggtgaccctaggccatccggctctggttaccatcaccaccctccacctcctcctcatcatcgtacatcttcggcatctattttttctgcggctgatgagccacctagggaatcctcattcgaggaagacgtgatgaggaccctcttccctgactacacatcataccctccatcatatcctccgtcctatcctcctcctggaggatattgattcatgtatccatgtctctctcttcgtttttggtacttgttgccaaaaaaggggagaaaatccaaaatttctagtcattctatttgtggttctttcggttatgtatttcttttggattatttttgttttggccactgttgtggcttgtatcctcttatcattgtatgaaataaaactgctgggttattattcaaagtgatatgatggtcttctggccatcatcttttgtcccatcagtttgtaatgattgctttgctatgaagtaaaaatgatgtgtatttagagatagtcatatgcatcacaactcctgttatgacactcttgcacccctcggatggttgtattcagtatggtttttgtcactatctctaaatgtgttgctcacatgacatattatgtcaaaacattggattcacaatcgtgcacacatttagggggagccatctacatacaatcattcaaaagaaattttctattgcaattgtttat

SEQ ID NO: 5824 - DNA, 1194 bp, Zea mays
  Zm_smallRNAprecursor_1313
ttgatggtcaatggcgatatatcattttctgcgtgaaattatattgttttgagatttgatttaaacattaagttgcgattatgcagatgtaaatgtttacgctattcattgtatacattttttcagcagaggcttaatgtgagatgcaatccccaagacgttatagtaagcatccagattttaaatgacagacagcgccaagctattgcacggagggggttctccagtattcttgatatgagagttgacgcacttggcagtagatctcatttagcttggctgatggaaaagcttgaccataatgacatgacaatttgagccggcccagggaaggagctcaaaattacaaaggagacggtgcaacttattttggggttaccaaatgctggtggagaaacggcattaggcattgatgaagctgttgctgcaaacaatttaagggctaaacttggtttatcaaaagaagattttagtgttgcagctcttcaagatcgtttaaggaaagggtttgacgatgatctaagcagcagatccttcttcctgatactgtgcaataggttgttgttccctactgccagctggggaataactaaccatgaggttcttttaactgaggaaatgtatcgtttccacgagatagactggtaccagctaatattcaatgatttatgccaaactgccaagaagtgacatactaggagcgttacaaatgtttctacaacaatttacggatgttccatcatcattcttgtaagcatgtcactttttgtcttttatatgtagccatatttttttatgcaaaattcatatacatttagattatattttgttatgtctcacaatgattcatgttatgcttttgcagctgtattatttggatcatcttcatgattcagctacacctcagaataaacgtggaacaccacgcatcaaatattttgataggaatattattcaagcattgacaagagctgacaagggcaagatacgccaaggacaagaaccatttgtacattgttcggtatttttttatgcgtttatcatattttttttatcaatttaatttgtcttatatatggtatatggatagaagcagtgtcgtttatatttacaaatgaaactccactttatatgatgtgcagtgtcatttaaattttatgttgtcaacaatctcgtgttatgcttgttttctct

SEQ ID NO: 5825 - DNA, 1096 bp, Zea mays
  Zm_smallRNAprecursor_1314
tgcaatccccaagacgttatagtaagcatccagattttaaatgacagacagcgccaagctattgcacggagggggttctccagtattcttgatatgagagttgacgcacttggcagtagatctcatttagcttggctgatggaaaagcttgaccataatgacatgacaatttgagccggcccagggaaggagctcaaaattacaaaggagacggtgcaacttattttggggttaccaaatgctggtggagaaacggcattaggcattgatgaagctgttgctgcaaacaatttaagggctaaacttggtttatcaaaagaagattttagtgttgcagctcttcaagatcgtttaaggaaagggtttgacgatgatctaagcagcagatccttcttcctgatactgtgcaataggttgttgttccctactgccagctggggaataactaaccatgaggttcttttaactgaggaaatgtatcgtttccacgagatagactggtaccagctaatattcaatgatttatgccaaactgccaagaagtgacatactaggagcgttacaaatgtttctacaacaatttacggatgttccatcatcattcttgtaagcatgtcactttttgtcttttatatgtagccatatttttttatgcaaaattcatatacatttagattatattttgttatgtctcacaatgattcatgttatgcttttgcagctgtattatttggatcatcttcatgattcagctacacctcagaataaacgtggaacaccacgcatcaaatattttgataggaatattattcaagcattgacaagagctgacaagggcaagatacgccaaggacaagaaccatttgtacattgttcggtatttttttatgcgtttatcatattttttttatcaatttaatttgtcttatatatggtatatggatagaagcagtgtcgtttatatttacaaatgaaactccactttatatgatgtgcagtgtcatttaaattttatgttgtcaacaatctcgtgttatgcttgttttctctcaagtttatgatataattatcaccgctgtacagtcataaacttcac

SEQ ID NO: 5826 - DNA, 1206 bp, Zea mays
  Zm_smallRNAprecursor_1315
tccatttctgtaggactatagccttcaaaaaggaaaaaacaaaagggaatagaatctgcctgggcaatgttatctagtcatctgttagtcaagcttattgcttccttggtgccgatcggttataaactactaattgcaactaatcatcttatcggtgtcctccccattataagtctaggctaggtttgtcactgcttcattctgaggctgggactcaatttgtccatacttttgttactttattctaaatatatctatgttatcatcttataggacctagcaccccttttcgtggcggcggtgctccttttggtacagatgtcccatttggaccaccaggtcctgacatgctcccgacatttgtcaattggagtacctatggagctgtgacaccaatacaagatcaaggagactgtggtaagcatgcaatgtcactacctattagcaattcgctactgtaacttatatgcatagttgctgagcgcacactattagacctgagcttgtaatttgttctttaggttcgtactgggcatttggtgtcaccggtctcatagaggcagctcacttcatacgaaacaaggagttaataaaactttctgagcaacacctgatagatggaaacaacctcaggaactttggatgcaaacatggatcatgctccgaggccctagactacattatgagaaacggtggaattatcaatgcagaaagttacccatacaaggaagcccaagggcctgtccggtctatcacggtacataattcaacctccccaccacacttgtttccacatcaaaatatcaaaccctacttcataaaggtatgtataattcacatcattgcatatatcttcacccacacaatttgagcatacaatgagtccaaaagaacaggtccgtgaacctttatcaaacttaaaggctctatgataaataactgaaccataatcgcacaagaacagtaagatcaatgaagataataactaaactatatatatatatttagcaccatgcacataataatttatttccttatacaaattaggtgagacaacaagtcattttagcctatttagaaattagatgcgcattgatttgggccttgtttggaatagctctagctctaggaaatttggtagagcaggtcattaggtgctccaaaaaatcatggagctgaagttgtaaacttttagaagccatttca

SEQ ID NO: 5827 - DNA, 1147 bp, Zea mays
  Zm_smallRNAprecursor_1316
ggcatgttgagagggattattactccataatcacacagaattgcagggttgagctgcagcgtcgccaatgggggctgtcataccagacaccacattgtgatatgcttaaaaattttgaggctgcagcaaagtaataactcatccaattctgtaaggtatggttcaactttctctgaacatggtttagcagtaataatgtatttctgtgccatgtcgaagattttctctagagtttgccgttcggctgccctatatctaacggctgcagcagctgtggaataataaacaaagcagcaccaaagaagcagcagcttgcagcgtcagccaagaaaaagagcagccgaacggcttacttatctgctttgtatgataacttgctttgctttgtatgctatgttcttaacacttgttttatttttggtttaatactaataaccctgtccttactggtgaataactgtaggcaacgactgctatgcaagcagtccttctgtgcaagcgtgcaagcaaaccatttgatccattagatcatgatccaaccgtaggtcacatttaacacttaaactcttccaccacaagctcaataatctttataaaaaaccccctaacaaaccatggttgtatctgtggttggatcgtaacctaatggatcagatgatttgcttgcacgcttgcacagaagaactgcttgcataacagtcgttgccataactgtatatgcattgcaggcaagtcatgctttccatatggttttgcttgttaaatagaggaagcagaagctgacagtttaattttttttaatatttgagtgtctgtagagtgtttggtaaccagagatcgatgaaaaaaataatttgatcaatggtgcgcttatacagtgttttcctttcttatctttttcatgttgctggggctgtctgaatagtgtttcttaaatgtacctagctgggtggagatgcatagctgcatgcctgacaccctagataggtgattatatcctttccaggaggcatgcgtgttactccactgccttttgggcgtcttgaggggagagtggaggagagcagattgagggagagaacgcagggggtaggaggacagaggtcggttccgatcagccaggatcaccgaaggaaccatcccaaac

SEQ ID NO: 5828 - DNA, 1110 bp, Zea mays
  Zm_smallRNAprecursor_1317
agccaatgattacttaattaatatgcagatatgcttttgtgatacaaaacataagtttcttgtcatatgaacctagtaacattcaatacatcttttttgtgctcttctaaatgtgatttcttttaaactaactcaattaaatcttccagtggaaagcatgggcctctgaagttatcctctaccagagtgatcagcatttcagagtatttcaaggaagtgtctttgctggacagggcacctaggaaccgtttcattgaagatattgacgatgacctcccgttcttaactcatgatagggttcacaagctactgagatctggattacccccttgtatttcagcaagacctgtggcttatcgattcttgacaccgatttcattgaagaaaaccttggtgtgctgcctgagttggatttactggtattcagatcactgaacatgagtcgctctgagtctgaaatagataattgctacaaaccattcgtgaagctcttcaaggctcttgagggtaagtatgctggaagggatgcaatcttcaagctacccaagtcacttgatctgcatttgtagtaccttgagttgcctattgtcaaggactatcgtgtgatatggtccaaccctcttccctaagcttttgatctctataatgtactgcaaagtgcatcgacttttgagggagaagtgcccggcacgtggacagggtgctgcagccaatgcaatcatggtgacgattgaagagaaaatctttgacttcatgaagtcatgcagtacaaatgctatgctaattagttattctggtgctcatggtgagaggacaaagaagcacattgtgggcagtgaagatagaggagatgaggcgctgatatctgaagttagtgatgtcactaaagatctcaaagcgtcgaatgtcccactgaaagttagaaattttatgggcaacaaggagctcagtgttgagggcaaaacaaccaccgcagaaggaaacgttgagattgttccaggagatgagctgacagctactctcttggacgctgtgaatactattcagcgcactactactggatatgatcagattcgttcagcaaagaaaaaagtgatgtcacacgtcaaa

SEQ ID NO: 5829 - DNA, 1199 bp, Zea mays
  Zm_smallRNAprecursor_1318
tcttgtcatatgaacctagtaacattcaatacatcttttttgtgctcttctaaatgtgatttcttttaaactaactcaattaaatcttccagtggaaagcatgggcctctgaagttatcctctaccagagtgatcagcatttcagagtatttcaaggaagtgtctttgctggacagggcacctaggaaccgtttcattgaagatattgacgatgacctcccgttcttaactcatgatagggttcacaagctactgagatctggattacccccttgtatttcagcaagacctgtggcttatcgattcttgacaccgatttcattgaagaaaaccttggtgtgctgcctgagttggatttactggtattcagatcactgaacatgagtcgctctgagtctgaaatagataattgctacaaaccattcgtgaagctcttcaaggctcttgagggtaagtatgctggaagggatgcaatcttcaagctacccaagtcacttgatctgcatttgtagtaccttgagttgcctattgtcaaggactatcgtgtgatatggtccaaccctcttccctaagcttttgatctctataatgtactgcaaagtgcatcgacttttgagggagaagtgcccggcacgtggacagggtgctgcagccaatgcaatcatggtgacgattgaagagaaaatctttgacttcatgaagtcatgcagtacaaatgctatgctaattagttattctggtgctcatggtgagaggacaaagaagcacattgtgggcagtgaagatagaggagatgaggcgctgatatctgaagttagtgatgtcactaaagatctcaaagcgtcgaatgtcccactgaaagttagaaattttatgggcaacaaggagctcagtgttgagggcaaaacaaccaccgcagaaggaaacgttgagattgttccaggagatgagctgacagctactctcttggacgctgtgaatactattcagcgcactactactggatatgatcagattcgttcagcaaagaaaaaagtgatgtcacacgtcaaacagatgaggatgtaccagattcggctttttaagctgctacaagagaaagttatgcacaaagatctggaaattgatcttgagggtccaaagaatgcctctgtgaagttaaaagctgtgaatgcttctgctattgttgacacacacag

SEQ ID NO: 5830 - DNA, 1083 bp, Zea mays
  Zm_smallRNAprecursor_1319
tgctggaagggatgcaatcttcaagctacccaagtcacttgatctgcatttgtagtaccttgagttgcctattgtcaaggactatcgtgtgatatggtccaaccctcttccctaagcttttgatctctataatgtactgcaaagtgcatcgacttttgagggagaagtgcccggcacgtggacagggtgctgcagccaatgcaatcatggtgacgattgaagagaaaatctttgacttcatgaagtcatgcagtacaaatgctatgctaattagttattctggtgctcatggtgagaggacaaagaagcacattgtgggcagtgaagatagaggagatgaggcgctgatatctgaagttagtgatgtcactaaagatctcaaagcgtcgaatgtcccactgaaagttagaaattttatgggcaacaaggagctcagtgttgagggcaaaacaaccaccgcagaaggaaacgttgagattgttccaggagatgagctgacagctactctcttggacgctgtgaatactattcagcgcactactactggatatgatcagattcgttcagcaaagaaaaaagtgatgtcacacgtcaaacagatgaggatgtaccagattcggctttttaagctgctacaagagaaagttatgcacaaagatctggaaattgatcttgagggtccaaagaatgcctctgtgaagttaaaagctgtgaatgcttctgctattgttgacacacacagacatggaatggctcatgctatgcagcctgataatgtaaatcttgtggagcatctgcctgaaggcaatcaagagagcctctccaaagagccatatgacgtgaatgatgtagtagatctgtttcagtacaagtgttcagagtatttgactattgctgttgctgaatttgatgagcgggaaatttgaaatctactgcacagtcatatgagaactgggtaggcagatcgagtagattccacatttctcgctcatcaaattcagcaacagcaatagtcaaatactctgagcacttgtactgaaacagatctactacatcattcacgtcatatgactctttggagag

SEQ ID NO: 5831 - DNA, 1163 bp, Zea mays
  Zm_smallRNAprecursor_1320
tagtgatgtcactaaagatctcaaagcgtcgaatgtcccactgaaagttagaaattttatgggcaacaaggagctcagtgttgagggcaaaacaaccaccgcagaaggaaacgttgagattgttccaggagatgagctgacagctactctcttggacgctgtgaatactattcagcgcactactactggatatgatcagattcgttcagcaaagaaaaaagtgatgtcacacgtcaaacagatgaggatgtaccagattcggctttttaagctgctacaagagaaagttatgcacaaagatctggaaattgatcttgagggtccaaagaatgcctctgtgaagttaaaagctgtgaatgcttctgctattgttgacacacacagacatggaatggctcatgctatgcagcctgataatgtaaatcttgtggagcatctgcctgaaggcaatcaagagagcctctccaaagagccatatgacgtgaatgatgtagtagatctgtttcagtacaagtgttcagagtatttgactattgctgttgctgaatttgatgagcgggaaatttgaaatctactgcacagtcatatgagaactgggtaggcagatcgagtagattccacatttctcgctcatcaaattcagcaacagcaatagtcaaatactctgagcacttgtactgaaacagatctactacatcattcacgtcatatgactctttggagaggctctcttgattgcctttaggcagatgctccacaagatttacattatcaggctgcacagcatgagtcattccatgtctgtgtgtgtcaacaatagcagaagcattcacaacttttaacttcacagaggcattctttgggccctcaagatcaatatccagatctttgtgcatacctttctcttgtagcagcttaagaagccgaatctagcacatcctcatctgtttgacgtgtgacatcaattttttctttgctaaacgaatctgatcatatccagtagtaatgcactgaatagtattcacaacgtccaagagagtagctgtcagctcatctcctgaaataatctcaatgtttccttctgcggtagttcttttgccctcaacactgagcttcttgttgcccataaaatttctaactttcagtgggacattcgacgcttt

SEQ ID NO: 5832 - DNA, 1100 bp, Zea mays
  Zm_smallRNAprecursor_1321
tttgatgagcgggaaatttgaaatctactgcacagtcatatgagaactgggtaggcagatcgagtagattccacatttctcgctcatcaaattcagcaacagcaatagtcaaatactctgagcacttgtactgaaacagatctactacatcattcacgtcatatgactctttggagaggctctcttgattgcctttaggcagatgctccacaagatttacattatcaggctgcacagcatgagtcattccatgtctgtgtgtgtcaacaatagcagaagcattcacaacttttaacttcacagaggcattctttgggccctcaagatcaatatccagatctttgtgcatacctttctcttgtagcagcttaagaagccgaatctagcacatcctcatctgtttgacgtgtgacatcaattttttctttgctaaacgaatctgatcatatccagtagtaatgcactgaatagtattcacaacgtccaagagagtagctgtcagctcatctcctgaaataatctcaatgtttccttctgcggtagttcttttgccctcaacactgagcttcttgttgcccataaaatttctaactttcagtgggacattcgacgctttgagatctttagtgacattactaacttcagatgtcagcgcctcatctcctccatcttcactgcacacaatttgcttatttgccctctcaccatgagcaccagaatagctaattagcataacatttgtactgcatgacttcatgaagtcaaagattttctcttcaatcgtcaccatgattgcattggctgcagcactctgtccacgtgccgggcactgctccctcaaaagtcgatgcacttcgcagtacattatagagatcaaaagcttcgggaagagggttcgaccatatatcacacgataatccttgacaataggcaactcaagatacttcaaatgcagatcaagtgacttgggtagcttgaagattgcatcccttacaacatacttaccctcaagagccttgaagagcttcacgaatggtttgtagcaattatctatttcagactcagagcgactcatgttcagtgatctgaataccagtaaa

SEQ ID NO: 5833 - DNA, 1070 bp, Zea mays
  Zm_smallRNAprecursor_1322
tgtttctaacgagtctagctgcatgactgttatagagatcctatatttatgaaagaaataaaacattcaaatcagatttttttttgtttccatgtatgcatcagttgacaaataaaatttctaatttctcgcgcatgcaaatgaaaacaaactacacgacgcatgcgggaggtaggctggcggccacgctatagtggtgtatggctggggcttcttgtatgctatggaagactagggctcccagtaacattaccatatatatataattaataagtgatgatttgtgtgtgaattgcgaattaataagtgatgatttgtattaatttgttgttacattatctgtgaaactataaatataactaatattttctatcgtgcattgcccgtttggcgctggagctggagcacgatcgatgcgtgtcctgcggatcgaggagtggataggcagcataggccgggcccggccctcgaagaaaattcctggtatgccatcagattttatactcatcccttgtgtgccactgagtggcatataggtatattttttggtgtctatgacatgtggggccagtggcatacaaggaatgagtatattttacagtggcatacagggaattggcccggagaaaattcctggtatgccatcagattttatactcatcccttgtgtgccactgagtggcatataggtatattttttggtgtctatgacatgtggggccagtggcatacaaggaatgagtatattttacagtggcatacagggaattggccctgagaaaattcctggtatgccatcagattttatactcatcccttgtgtgccactgagtggcatataggtatattttttggtgtctatgacatgtggggccagtggcatacaaggaatgagtatattttacagtggcatacagggaattggcccatatactagctgtgctgtgcatgcatgcatgtgtgtggtcctactgctacaactagctgtagctgtagttgtatctcactcatctgatctatcgatccactggccagcgagcatgcatggctagggtagcatagcagctgta

SEQ ID NO: 5834 - DNA, 1223 bp, Zea mays
  Zm_smallRNAprecursor_1323
tgtttctaacgagtctagctgcatgactgttatagagatcctatatttatgaaagaaataaaacattcaaatcagatttttttttgtttccatgtatgcatcagttgacaaataaaatttctaatttctcgcgcatgcaaatgaaaacaaactacacgacgcatgcgggaggtaggctggcggccacgctatagtggtgtatggctggggcttcttgtatgctatggaagactagggctcccagtaacattaccatatatatataattaataagtgatgatttgtgtgtgaattgcgaattaataagtgatgatttgtattaatttgttgttacattatctgtgaaactataaatataactaatattttctatcgtgcattgcccgtttggcgctggagctggagcacgatcgatgcgtgtcctgcggatcgaggagtggataggcagcataggccgggcccggccctcgaagaaaattcctggtatgccatcagattttatactcatcccttgtgtgccactgagtggcatataggtatattttttggtgtctatgacatgtggggccagtggcatacaaggaatgagtatattttacagtggcatacagggaattggcccggagaaaattcctggtatgccatcagattttatactcatcccttgtgtgccactgagtggcatataggtatattttttggtgtctatgacatgtggggccagtggcatacaaggaatgagtatattttacagtggcatacagggaattggccctgagaaaattcctggtatgccatcagattttatactcatcccttgtgtgccactgagtggcatataggtatattttttggtgtctatgacatgtggggccagtggcatacaaggaatgagtatattttacagtggcatacagggaattggcccatatactagctgtgctgtgcatgcatgcatgtgtgtggtcctactgctacaactagctgtagctgtagttgtatctcactcatctgatctatcgatccactggccagcgagcatgcatggctagggtagcatagcagctgtactgtgcaatcgcgtcgcatgcatgcaacaaaccgctccggcgagatcttgccgggatcaaatgcatctgcagttgtgcatgcatcatcgtcgacgttgaccagactaattcggtggtcggccgtcgtacagcatgcatgcaacaatgcacacg

SEQ ID NO: 5835 - DNA, 1085 bp, Zea mays
  Zm_smallRNAprecursor_1324
aatcagatttttttttgtttccatgtatgcatcagttgacaaataaaatttctaatttctcgcgcatgcaaatgaaaacaaactacacgacgcatgcgggaggtaggctggcggccacgctatagtggtgtatggctggggcttcttgtatgctatggaagactagggctcccagtaacattaccatatatatataattaataagtgatgatttgtgtgtgaattgcgaattaataagtgatgatttgtattaatttgttgttacattatctgtgaaactataaatataactaatattttctatcgtgcattgcccgtttggcgctggagctggagcacgatcgatgcgtgtcctgcggatcgaggagtggataggcagcataggccgggcccggccctcgaagaaaattcctggtatgccatcagattttatactcatcccttgtgtgccactgagtggcatataggtatattttttggtgtctatgacatgtggggccagtggcatacaaggaatgagtatattttacagtggcatacagggaattggcccggagaaaattcctggtatgccatcagattttatactcatcccttgtgtgccactgagtggcatataggtatattttttggtgtctatgacatgtggggccagtggcatacaaggaatgagtatattttacagtggcatacagggaattggccctgagaaaattcctggtatgccatcagattttatactcatcccttgtgtgccactgagtggcatataggtatattttttggtgtctatgacatgtggggccagtggcatacaaggaatgagtatattttacagtggcatacagggaattggcccatatactagctgtgctgtgcatgcatgcatgtgtgtggtcctactgctacaactagctgtagctgtagttgtatctcactcatctgatctatcgatccactggccagcgagcatgcatggctagggtagcatagcagctgtactgtgcaatcgcgtcgcatgcatgcaacaaaccgctccggcgagatcttgccgggatcaaatgcatctgcagttgtgcatgcat

SEQ ID NO: 5836 - DNA, 1238 bp, Zea mays
  Zm_smallRNAprecursor_1325
aatcagatttttttttgtttccatgtatgcatcagttgacaaataaaatttctaatttctcgcgcatgcaaatgaaaacaaactacacgacgcatgcgggaggtaggctggcggccacgctatagtggtgtatggctggggcttcttgtatgctatggaagactagggctcccagtaacattaccatatatatataattaataagtgatgatttgtgtgtgaattgcgaattaataagtgatgatttgtattaatttgttgttacattatctgtgaaactataaatataactaatattttctatcgtgcattgcccgtttggcgctggagctggagcacgatcgatgcgtgtcctgcggatcgaggagtggataggcagcataggccgggcccggccctcgaagaaaattcctggtatgccatcagattttatactcatcccttgtgtgccactgagtggcatataggtatattttttggtgtctatgacatgtggggccagtggcatacaaggaatgagtatattttacagtggcatacagggaattggcccggagaaaattcctggtatgccatcagattttatactcatcccttgtgtgccactgagtggcatataggtatattttttggtgtctatgacatgtggggccagtggcatacaaggaatgagtatattttacagtggcatacagggaattggccctgagaaaattcctggtatgccatcagattttatactcatcccttgtgtgccactgagtggcatataggtatattttttggtgtctatgacatgtggggccagtggcatacaaggaatgagtatattttacagtggcatacagggaattggcccatatactagctgtgctgtgcatgcatgcatgtgtgtggtcctactgctacaactagctgtagctgtagttgtatctcactcatctgatctatcgatccactggccagcgagcatgcatggctagggtagcatagcagctgtactgtgcaatcgcgtcgcatgcatgcaacaaaccgctccggcgagatcttgccgggatcaaatgcatctgcagttgtgcatgcatcatcgtcgacgttgaccagactaattcggtggtcggccgtcgtacagcatgcatgcaacaatgcacacgatcgagaagctagcaaaaccaggcagctcatcagcacgtgccgacttattcgttccggccgattgcgcgattaattatattcta

SEQ ID NO: 5837 - DNA, 1070 bp, Zea mays
  Zm_smallRNAprecursor_1326
acacgacgcatgcgggaggtaggctggcggccacgctatagtggtgtatggctggggcttcttgtatgctatggaagactagggctcccagtaacattaccatatatatataattaataagtgatgatttgtgtgtgaattgcgaattaataagtgatgatttgtattaatttgttgttacattatctgtgaaactataaatataactaatattttctatcgtgcattgcccgtttggcgctggagctggagcacgatcgatgcgtgtcctgcggatcgaggagtggataggcagcataggccgggcccggccctcgaagaaaattcctggtatgccatcagattttatactcatcccttgtgtgccactgagtggcatataggtatattttttggtgtctatgacatgtggggccagtggcatacaaggaatgagtatattttacagtggcatacagggaattggcccggagaaaattcctggtatgccatcagattttatactcatcccttgtgtgccactgagtggcatataggtatattttttggtgtctatgacatgtggggccagtggcatacaaggaatgagtatattttacagtggcatacagggaattggccctgagaaaattcctggtatgccatcagattttatactcatcccttgtgtgccactgagtggcatataggtatattttttggtgtctatgacatgtggggccagtggcatacaaggaatgagtatattttacagtggcatacagggaattggcccatatactagctgtgctgtgcatgcatgcatgtgtgtggtcctactgctacaactagctgtagctgtagttgtatctcactcatctgatctatcgatccactggccagcgagcatgcatggctagggtagcatagcagctgtactgtgcaatcgcgtcgcatgcatgcaacaaaccgctccggcgagatcttgccgggatcaaatgcatctgcagttgtgcatgcatcatcgtcgacgttgaccagactaattcggtggtcggccgtcgtacagcatgcatgcaacaatgcacacg

SEQ ID NO: 5838 - DNA, 1223 bp, Zea mays
  Zm_smallRNAprecursor_1327
acacgacgcatgcgggaggtaggctggcggccacgctatagtggtgtatggctggggcttcttgtatgctatggaagactagggctcccagtaacattaccatatatatataattaataagtgatgatttgtgtgtgaattgcgaattaataagtgatgatttgtattaatttgttgttacattatctgtgaaactataaatataactaatattttctatcgtgcattgcccgtttggcgctggagctggagcacgatcgatgcgtgtcctgcggatcgaggagtggataggcagcataggccgggcccggccctcgaagaaaattcctggtatgccatcagattttatactcatcccttgtgtgccactgagtggcatataggtatattttttggtgtctatgacatgtggggccagtggcatacaaggaatgagtatattttacagtggcatacagggaattggcccggagaaaattcctggtatgccatcagattttatactcatcccttgtgtgccactgagtggcatataggtatattttttggtgtctatgacatgtggggccagtggcatacaaggaatgagtatattttacagtggcatacagggaattggccctgagaaaattcctggtatgccatcagattttatactcatcccttgtgtgccactgagtggcatataggtatattttttggtgtctatgacatgtggggccagtggcatacaaggaatgagtatattttacagtggcatacagggaattggcccatatactagctgtgctgtgcatgcatgcatgtgtgtggtcctactgctacaactagctgtagctgtagttgtatctcactcatctgatctatcgatccactggccagcgagcatgcatggctagggtagcatagcagctgtactgtgcaatcgcgtcgcatgcatgcaacaaaccgctccggcgagatcttgccgggatcaaatgcatctgcagttgtgcatgcatcatcgtcgacgttgaccagactaattcggtggtcggccgtcgtacagcatgcatgcaacaatgcacacgatcgagaagctagcaaaaccaggcagctcatcagcacgtgccgacttattcgttccggccgattgcgcgattaattatattctattctattctatatagacaagggtacaaggcgcggcgtgcgccacatctcgccaagctagtaatgcatcg

SEQ ID NO: 5839 - DNA, 1085 bp, Zea mays
  Zm_smallRNAprecursor_1328
tatggaagactagggctcccagtaacattaccatatatatataattaataagtgatgatttgtgtgtgaattgcgaattaataagtgatgatttgtattaatttgttgttacattatctgtgaaactataaatataactaatattttctatcgtgcattgcccgtttggcgctggagctggagcacgatcgatgcgtgtcctgcggatcgaggagtggataggcagcataggccgggcccggccctcgaagaaaattcctggtatgccatcagattttatactcatcccttgtgtgccactgagtggcatataggtatattttttggtgtctatgacatgtggggccagtggcatacaaggaatgagtatattttacagtggcatacagggaattggcccggagaaaattcctggtatgccatcagattttatactcatcccttgtgtgccactgagtggcatataggtatattttttggtgtctatgacatgtggggccagtggcatacaaggaatgagtatattttacagtggcatacagggaattggccctgagaaaattcctggtatgccatcagattttatactcatcccttgtgtgccactgagtggcatataggtatattttttggtgtctatgacatgtggggccagtggcatacaaggaatgagtatattttacagtggcatacagggaattggcccatatactagctgtgctgtgcatgcatgcatgtgtgtggtcctactgctacaactagctgtagctgtagttgtatctcactcatctgatctatcgatccactggccagcgagcatgcatggctagggtagcatagcagctgtactgtgcaatcgcgtcgcatgcatgcaacaaaccgctccggcgagatcttgccgggatcaaatgcatctgcagttgtgcatgcatcatcgtcgacgttgaccagactaattcggtggtcggccgtcgtacagcatgcatgcaacaatgcacacgatcgagaagctagcaaaaccaggcagctcatcagcacgtgccgacttattcgttccggccgattgcgcgattaattatattcta

SEQ ID NO: 5840 - DNA, 1070 bp, Zea mays
  Zm_smallRNAprecursor_1329
gtgatgatttgtattaatttgttgttacattatctgtgaaactataaatataactaatattttctatcgtgcattgcccgtttggcgctggagctggagcacgatcgatgcgtgtcctgcggatcgaggagtggataggcagcataggccgggcccggccctcgaagaaaattcctggtatgccatcagattttatactcatcccttgtgtgccactgagtggcatataggtatattttttggtgtctatgacatgtggggccagtggcatacaaggaatgagtatattttacagtggcatacagggaattggcccggagaaaattcctggtatgccatcagattttatactcatcccttgtgtgccactgagtggcatataggtatattttttggtgtctatgacatgtggggccagtggcatacaaggaatgagtatattttacagtggcatacagggaattggccctgagaaaattcctggtatgccatcagattttatactcatcccttgtgtgccactgagtggcatataggtatattttttggtgtctatgacatgtggggccagtggcatacaaggaatgagtatattttacagtggcatacagggaattggcccatatactagctgtgctgtgcatgcatgcatgtgtgtggtcctactgctacaactagctgtagctgtagttgtatctcactcatctgatctatcgatccactggccagcgagcatgcatggctagggtagcatagcagctgtactgtgcaatcgcgtcgcatgcatgcaacaaaccgctccggcgagatcttgccgggatcaaatgcatctgcagttgtgcatgcatcatcgtcgacgttgaccagactaattcggtggtcggccgtcgtacagcatgcatgcaacaatgcacacgatcgagaagctagcaaaaccaggcagctcatcagcacgtgccgacttattcgttccggccgattgcgcgattaattatattctattctattctatatagacaagggtacaaggcgcggcgtgcgccacatctcgccaagctagtaatgcatcg

SEQ ID NO: 5841 - DNA, 1043 bp, Zea mays
  Zm_smallRNAprecursor_1330
tacatagaactgcatcttgatcgacggacagtacagccactacttgataatgtatgaagaactattttaactgatgatacgaatggtttattaaagacattcatccacttgtcatatcttgcagaaacatcgcttaggacatgaaaatttgaccccacttaccagtccaaaccttcgaagagcccctctccctttattgcagatgttttgaaaatcgcccattggcggctcttaattttgtgtagttctaatgactctgtaatggcagcatcatcgagtgcacctggaagataaacaaaaatctaggcgagaaataaatttaagcggacacaccaacgacataaacaaaaaaaaacaaaaaaaatgcaaactatggggcttgaacccacgaccacatggttagaagccttgtgctctaccaagtgggctagatgggctttgtgctcatgtccgcaacaaatattttaataacacaaccgagctcggcgccaagatctgtggcgccgagctcggttccacgtcgacgccacgcgtctggggtgtgccaacgcaacacgacctcggcgccataggctatggcgccgagcaaagggtccaaaactgcatttaaaatttttttaggtctaaacgtgattttacttctgtttaagggctaaaatacaaaaaattcggacccccacctacccctaccaatccgtcgactcctcacaggaccgaagctccactcgactgctcagccttcatcccactcgagcgccaagcaccagccattaggcaagcaacgagctggcccgcaacctccgtcctaactcatgcgactgcgaggcgatacaaagttgaagcatcacgaccagtcccccaatgtgatcatgcttttcgtgtcggggatggggatccgttagagactcaatactcgaatggggatgtatatgggatggatcttatacccgtgatgggtatggagatggatatagtttcatgaaaatggggatagggcgttaaaatccgacggagaatttttttcattgacacctctatttgca

SEQ ID NO: 5842 - DNA, 1044 bp, Zea mays
  Zm_smallRNAprecursor_1331
tacatagaactgcatcttgatcgacggacagtacagccactacttgataatgtatgaagaactattttaactgatgatacgaatggtttattaaagacattcatccacttgtcatatcttgcagaaacatcgcttaggacatgaaaatttgaccccacttaccagtccaaaccttcgaagagcccctctccctttattgcagatgttttgaaaatcgcccattggcggctcttaattttgtgtagttctaatgactctgtaatggcagcatcatcgagtgcacctggaagataaacaaaaatctaggcgagaaataaatttaagcggacacaccaacgacataaacaaaaaaaaacaaaaaaaatgcaaactatggggcttgaacccacgaccacatggttagaagccttgtgctctaccaagtgggctagatgggctttgtgctcatgtccgcaacaaatattttaataacacaaccgagctcggcgccaagatctgtggcgccgagctcggttccacgtcgacgccacgcgtctggggtgtgccaacgcaacacgacctcggcgccataggctatggcgccgagcaaagggtccaaaactgcatttaaaatttttttaggtctaaacgtgattttacttctgtttaagggctaaaatacaaaaaattcggacccccacctacccctaccaatccgtcgactcctcacaggaccgaagctccactcgactgctcagccttcatcccactcgagcgccaagcaccagccattaggcaagcaacgagctggcccgcaacctccgtcctaactcatgcgactgcgaggcgatacaaagttgaagcatcacgaccagtcccccaatgtgatcatgcttttcgtgtcggggatggggatccgttagagactcaatactcgaatggggatgtatatgggatggatcttatacccgtgatgggtatggagatggatatagtttcatgaaaatggggatagggcgttaaaatccgacggagaatttttttcattgacacctctatttgcaa

SEQ ID NO: 5843 - DNA, 1041 bp, Zea mays
  Zm_smallRNAprecursor_1332
catagaactgcatcttgatcgacggacagtacagccactacttgataatgtatgaagaactattttaactgatgatacgaatggtttattaaagacattcatccacttgtcatatcttgcagaaacatcgcttaggacatgaaaatttgaccccacttaccagtccaaaccttcgaagagcccctctccctttattgcagatgttttgaaaatcgcccattggcggctcttaattttgtgtagttctaatgactctgtaatggcagcatcatcgagtgcacctggaagataaacaaaaatctaggcgagaaataaatttaagcggacacaccaacgacataaacaaaaaaaaacaaaaaaaatgcaaactatggggcttgaacccacgaccacatggttagaagccttgtgctctaccaagtgggctagatgggctttgtgctcatgtccgcaacaaatattttaataacacaaccgagctcggcgccaagatctgtggcgccgagctcggttccacgtcgacgccacgcgtctggggtgtgccaacgcaacacgacctcggcgccataggctatggcgccgagcaaagggtccaaaactgcatttaaaatttttttaggtctaaacgtgattttacttctgtttaagggctaaaatacaaaaaattcggacccccacctacccctaccaatccgtcgactcctcacaggaccgaagctccactcgactgctcagccttcatcccactcgagcgccaagcaccagccattaggcaagcaacgagctggcccgcaacctccgtcctaactcatgcgactgcgaggcgatacaaagttgaagcatcacgaccagtcccccaatgtgatcatgcttttcgtgtcggggatggggatccgttagagactcaatactcgaatggggatgtatatgggatggatcttatacccgtgatgggtatggagatggatatagtttcatgaaaatggggatagggcgttaaaatccgacggagaatttttttcattgacacctctatttgca

SEQ ID NO: 5844 - DNA, 1042 bp, Zea mays
  Zm_smallRNAprecursor_1333
catagaactgcatcttgatcgacggacagtacagccactacttgataatgtatgaagaactattttaactgatgatacgaatggtttattaaagacattcatccacttgtcatatcttgcagaaacatcgcttaggacatgaaaatttgaccccacttaccagtccaaaccttcgaagagcccctctccctttattgcagatgttttgaaaatcgcccattggcggctcttaattttgtgtagttctaatgactctgtaatggcagcatcatcgagtgcacctggaagataaacaaaaatctaggcgagaaataaatttaagcggacacaccaacgacataaacaaaaaaaaacaaaaaaaatgcaaactatggggcttgaacccacgaccacatggttagaagccttgtgctctaccaagtgggctagatgggctttgtgctcatgtccgcaacaaatattttaataacacaaccgagctcggcgccaagatctgtggcgccgagctcggttccacgtcgacgccacgcgtctggggtgtgccaacgcaacacgacctcggcgccataggctatggcgccgagcaaagggtccaaaactgcatttaaaatttttttaggtctaaacgtgattttacttctgtttaagggctaaaatacaaaaaattcggacccccacctacccctaccaatccgtcgactcctcacaggaccgaagctccactcgactgctcagccttcatcccactcgagcgccaagcaccagccattaggcaagcaacgagctggcccgcaacctccgtcctaactcatgcgactgcgaggcgatacaaagttgaagcatcacgaccagtcccccaatgtgatcatgcttttcgtgtcggggatggggatccgttagagactcaatactcgaatggggatgtatatgggatggatcttatacccgtgatgggtatggagatggatatagtttcatgaaaatggggatagggcgttaaaatccgacggagaatttttttcattgacacctctatttgcaa

SEQ ID NO: 5845 - DNA, 1125 bp, Zea mays
  Zm_smallRNAprecursor_1334
tcctcccaggcccagctgttgtagcagcaagacccctcccctctccgtggctccgaccttgtgcgggaaccaaaacccccaagaaagcaggagtttttgaaggggggggaggagacgaagaagccccaatgccctgggtgggcggcggtggttcacctatgagcccatgaacatgggagggagttgaaccaccacagccctactctactctactctactctacctgtgtttgggtggagcagtggtgttgccaagatctggtttgggtcccctccctttctctgtccgtccaagagtagagcagagatttggaagcttgctggtgcgcaaggcgctagagattggtggagcaggggtgatgggccatgggagaggagggggcggatcggatgaatgcgacggacggggaagatgatggacggagtagttagagagaggctatttgtttggggaacgtatcatgtgctcatggagctcttgtgctcatatgagcactttaaatctggtgccttcatttctcatctaagtgtgaatagacattttctagtttcttctgtgcgtcacccttgaccacctgcgccgtctgtcgcttctatgtgccactgctgctctcacccctggatgagaaatgaaggcaccagatttaaagtgctcatatgagcacaagagctccatgagcacaggatatgttcccatttgtttgttggctgctggcagtaaatttgctttgcttgagcttccgtttcacatccaatacccgtgttccagttccactttggttttgtgcgatgaaatgaacaagggtcaaggaagggcagagaggccagaggaagatcacgtgctacgcatggatgactctggccgtggtcggtcacagcaaaattcagttggcaacgtatctagtgcaaatcaacctatctatataaccatgcaaacttttaatctaaatcacttgatgttgatgtaagggacgcggaacgtggataatcttacacttaaccgcctgctgttaatcacactttttcaaatccctcttccactccttcgcacgtctccttatatcaacatcatgtgattcaaattaaaagtttatatggttatacggatgagtctcacaatagatga

SEQ ID NO: 5846 - DNA, 1043 bp, Zea mays
  Zm_smallRNAprecursor_1335
ttctctttctttctcaaattttgcttcacattgtcttgcctcttctcatttgcttgagccttcttctcaagattgttgggacaccttgaggcaaagtgacccatatcatcacacatgtagcacttgatttgagccaaaccatccttcttcttttgatttgtgctcatcatgttatcttgattatatattgaatgtcttcttgttttctttttcttccccacatcaccattatattcatggttaatcttgatttgcttttggggatccttcctttgctcaactcgtggctttggttgaggcttcacttgtggcttcactaatttcttggttgggcacattgaggtgaggtgaccccaagtgtggtacttgaagcactcgtcatgttttagcctcctttcttccttcttcaacttgagcttccttttattggggcatgcctttgcaagatgacccatctcatggcatttatagcacatgaagtgagatagctcatttccttttaatttgaattgtctgcctttgatattgctcttgttgaaaccaaggccactcttgtcatcatatcttctttgatttttcaatataagatcatgagtgacttttgatttatgccatctctcaaacatgttgcttaaattcttcactttgtttttgagcttattattttccttcaaaaggttagtctcacaagacaaggaagaatagtaataatctatacttgaagaacatggcatagctaataaatcatcacaagaggtggatacatgcttcttgtcttcatcacatggattagcaacatttttcaattgatcatataattcatgggatgaattatcactagttttattttctttactaaaaaactcgttagtgagaaaagcatgctcttgtatcaaattttcatgagcaacactaagttcctcatgactcaattttagctcctcatgtgaacaagtaacaacataaagtagatgcttttgttgttcacatgaatactttagaaatgagttttcattttccaagtttcttgttttatctttctc

SEQ ID NO: 5847 - DNA, 1067 bp, Zea mays
  Zm_smallRNAprecursor_1336
tccccacatcaccattatattcatggttaatcttgatttgcttttggggatccttcctttgctcaactcgtggctttggttgaggcttcacttgtggcttcactaatttcttggttgggcacattgaggtgaggtgaccccaagtgtggtacttgaagcactcgtcatgttttagcctcctttcttccttcttcaacttgagcttccttttattggggcatgcctttgcaagatgacccatctcatggcatttatagcacatgaagtgagatagctcatttccttttaatttgaattgtctgcctttgatattgctcttgttgaaaccaaggccactcttgtcatcatatcttctttgatttttcaatataagatcatgagtgacttttgatttatgccatctctcaaacatgttgcttaaattcttcactttgtttttgagcttattattttccttcaaaaggttagtctcacaagacaaggaagaatagtaataatctatacttgaagaacatggcatagctaataaatcatcacaagaggtggatacatgcttcttgtcttcatcacatggattagcaacatttttcaattgatcatataattcatgggatgaattatcactagttttattttctttactaaaaaactcgttagtgagaaaagcatgctcttgtatcaaattttcatgagcaacactaagttcctcatgactcaattttagctcctcatgtgaacaagtaacaacataaagtagatgcttttgttgttcacatgaatactttagaaatgagttttcattttccaagtttcttgttttatctttctcaatttctaaagcaatgttcatgcttgcaagtataccaacaagctcatcatatgaatatgaatgattagtcatattagcattatataccttcgtattaccttgtgacatgaagcaatgtgatgtaatggatgggcttgtagtagcgatatcattgtccgagcatgaacaatcaccataatcatcaagtatgcttgagatagatgagagcacctagagggggggtgaataggtgatcctg

SEQ ID NO: 5848 - DNA, 1198 bp, Zea mays
  Zm_smallRNAprecursor_1337
tagtgataaatgtgcaagggccttcacatctgtctcaacgggtgcgaggggtaaggaagctagttgagccggctagaatccgtgtaggtagttggaacgtacggtcccttacaattaagctaagagagttagtggatgcagcgagcaggaggcgtgttagtatcctatgtgtccaggaggttatgaaaagtttgaaaccagtgttctccacctccttcgccttttgacaatcttttcagtggtaagaatgagactatggacaccctattggatgactcctttgatgatttcaatagatgctttgtacgcaggatccaagaatcagaggtcaaagaagctttaaagatgatgaaaggggtcctttgatgatttcaatagatgctttgtagtttgtacgcaggatacaagaatcagaggtcaaagaagctttaaagaggatgaaaggggcaaggcgataggcccggatagtataccgatacaggtgtggaaatgccttggggatattgctatcgtttggctaaccaagttgttccaccatatttttcgatcaaacgagatgcccgatgagtggaggaggagtacattagtaccaatcttcaaaaacaagggagatattcaaagttgtaccaactatcgagggattaagctcatgagccacactatgatgctatgggagagagttattgagcatcgcctgagaggaatgacgcatatcaccatgaaccaatttagattcatgcctgggaaggtcaaccatgaaagcaattttcttaataaggcaggtcatggagcgatataaggagcagaaggacttgcacatggtttttatcgacttggaaaatacctatgataaaatacccaggaatctcacgtggtgggcattggataagcataaagtcccaacaaagtatgttacgctcatcaaggacatgtatgacaaggttgtgactagcgtccgaacaactgatggttatacaaatgtttttccgattaacataggactacatcaaggttcagctttgagcccttatctatttgccttagtgatagatgaggtcacgagggaaatacaaggagatatcctttggtctacgcttttcgctaacgatgtagtcctagtagacgaaagccgggaaggagtaaatagaaagctagagttatggcgtcagaccctagagtcaaaaggatttagaattag

SEQ ID NO: 5849 - DNA, 1063 bp, Zea mays
  Zm_smallRNAprecursor_1338
agggagcgccgccaggaaacgacacgcgcgagaggttttggcccttcgcccacttcttatatactccgtatagaagtataccgtagtgctaccaccagtacgtacattacgatcattatttaactaggaatacgctgcctgctgtgatgtcacaactttggccctatttaatggccttgtgtgtgcgttgccgtcgtctactttcctttctcgctcgctccttccttgcaaccatcgaaaacccatctgccttcttcttcgcgagatccagggagaaactgaacactgcacgccatgaggtgctcagaaacggatcgatcaaccagcagtagcaagcgcggttgtgcatcatgcatgcatgtttgttcttcttttcttttgatttgttgttggtcgtttaatttgtcgccgccgccgccgtcatggttagttgcgacgacgatggctggatggaagagagcgtccttcagtccactcaggggcggtgctagggtcgaattagctgccgactcattcacccacatgccaagcaaacggccatggaaaccagctttgcagatgagtgaatgaagcgggaggtaaaagcttcgatctcgcaccgtctttgcttggactgaagggtgctccctcctccctcgctccttgtttacctttatcgatccatgcatcagcttcgtcatatctcatggttttactagcttcatggtctgtctttgcttgagctgcttaacttacatgtttggttggcatctgatgcatacatatatagcagctgccaaaacgacgggcatattttatttagtcccttatcatgtgcgtgcttactgttcttctctgctggttaattgttatatagcagttacgttctgtgtgtatatataatggagatccaaagcttttttttgtactttccttgcgcttttgatatataaactagctctaaatccttgatctgctcgttgaatctacatatatattgttctcttccaaaaaaagagatcccatttcgttctgaagaaaagaaaaggagatcgaacttcatttgctttgcttgtttttgttt

SEQ ID NO: 5850 - DNA, 1063 bp, Zea mays; identical to SEQ ID NO: 5849
  Zm_smallRNAprecursor_1339

SEQ ID NO: 5851 - DNA, 1064 bp, Zea mays
  Zm_smallRNAprecursor_1340
agggagcgccgccaggaaacgacacgcgcgagaggttttggcccttcgcccacttcttatatactccgtatagaagtataccgtagtgctaccaccagtacgtacattacgatcattatttaactaggaatacgctgcctgctgtgatgtcacaactttggccctatttaatggccttgtgtgtgcgttgccgtcgtctactttcctttctcgctcgctccttccttgcaaccatcgaaaacccatctgccttcttcttcgcgagatccagggagaaactgaacactgcacgccatgaggtgctcagaaacggatcgatcaaccagcagtagcaagcgcggttgtgcatcatgcatgcatgtttgttcttcttttcttttgatttgttgttggtcgtttaatttgtcgccgccgccgccgtcatggttagttgcgacgacgatggctggatggaagagagcgtccttcagtccactcaggggcggtgctagggtcgaattagctgccgactcattcacccacatgccaagcaaacggccatggaaaccagctttgcagatgagtgaatgaagcgggaggtaaaagcttcgatctcgcaccgtctttgcttggactgaagggtgctccctcctccctcgctccttgtttacctttatcgatccatgcatcagcttcgtcatatctcatggttttactagcttcatggtctgtctttgcttgagctgcttaacttacatgtttggttggcatctgatgcatacatatatagcagctgccaaaacgacgggcatattttatttagtcccttatcatgtgcgtgcttactgttcttctctgctggttaattgttatatagcagttacgttctgtgtgtatatataatggagatccaaagcttttttttgtactttccttgcgcttttgatatataaactagctctaaatccttgatctgctcgttgaatctacatatatattgttctcttccaaaaaaagagatcccatttcgttctgaagaaaagaaaaggagatcgaacttcatttgctttgcttgtttttgtttt

SEQ ID NO: 5852 - DNA, 1064 bp, Zea mays; identical to SEQ ID NO: 5851
  Zm_smallRNAprecursor_1341

SEQ ID NO: 5853 - DNA, 1065 bp, Zea mays
  Zm_smallRNAprecursor_1342
gatctgcctcatcaacagctgcagtatttgctagccacatatatatacacagttcgacacgtagttataacggaagagagaagcaaagagagaggcagagtgactgcaaccatcagtagttctatgattttattttttaccgttttgttgctgtttcatggtgtttatttgattgtagggtggaggagaggtgaaagctgacagaagagagtgagcacacatggtgcctttcttgcatgatgtatgatcgagagagttcatgctcgaagctatgcgtgctcacttctctctctgtcagccattagaactcctctatctctcaatctcgatctccctctttctttgttgatctctcccatggtgatatttatttgcttcctacgtgttgtgttctctttcttcagcacacacacaacctgttcatgttaccttagggttaaagtttttgcactttgcgtgaagatggaaagacaaacagtagatgagttttttgaaggtttgacagaagagagtgagcacacacggtggtttcttaccatgagtgtcatgctaggagctgtgcgtgctcaccctctatctgtcagtcactcatcaagcccatctgtcttattagcttgtttccgctgctaataaatattctagactcaagtttatttgacacagagatcgatcgctatcttgttcgatgcatatatatatatatatatagaagtattatttacatgtgcggatctcgtgtatatcttcttcctgattagctgatgatcttattctcatgtgtagtttatttgtcttcgtatctaactttttcgcaggggccaagccatgattgcgaagaaaggaatgtaaaagatggctcagaactccatcacaaagtctacatacggtcgaaataagatctccatcagatcggagagctttatttattgattgtttttttagagttctagagcaaagcccatgtcttagcattaccaagacaaaagaataatccatatatatatcctttggatggttcacatccttcactccaggtttaagtttaaccaacacaaataaaaatat

SEQ ID NO: 5854 - DNA, 1065 bp, Zea mays; identical to SEQ ID NO: 5853
  Zm_smallRNAprecursor_1343

SEQ ID NO: 5855 - DNA, 1064 bp, Zea mays
  Zm_smallRNAprecursor_1344
ttccactatgctgagactctcctggagggataccttctcttgcgtaagctctttgacttgctgctctaggctttccactcgggagtttaggtgggtacaatgggaggagagctcatcgtagtggttgtcgagggtgtggaggtattcggccatgtagacgatagtgggatcatcttctatggaatctcctcctgacagagcctggagtcttttcttccaggttggggtgtttttgttgctgggtgggaaatatcggaggggagtttcaaaggtctctcggctatagttttggcatagttgtttgagggcttttcgagcaacgctctggcatgtgtctgggaagcggtgcccgatgaaggtaatttggaaaggagggtggtttgggtagttccggctttctcccaagtagaccgccatagagcacttttccattccattttcacggtactctttccagacatattcgggcttcttgcggatccccaagcgcagtgcgcagcttcgaagaaggtgaggaaagccttcctcctctgagcaataggaagtcctaatcacccaggggttttccatctggtagacgaaaggaaaggtctattaatatcggggaaaaggggaaagagtgtttcttggaggtaagaggtgttttcttgttaaggcaacttttaaggtcagggttgtggtctacggccagtcctataggctccgataccacctgaagcgtcccgatcctttgggactcaaatgtgatataattactagtcccaggaggctagtaaccacattcattacttcaaatagttacagagtctgaataatgttattacaataccggggatacaagctcgaaagtgagccgaaaaacataatgcgcagaggaagataaaatagcccaagccacaggcagaactgggtgaagacgcagccccatcaatcaagcatagcagaaaagaagtcttcagctgctgaaaaacataaatgaatctgagtgaatacactaggttgggggatagagagggagatgggcttcaccttgggtgtatggagatgggccacggttgacaccc

SEQ ID NO: 5856 - DNA, 1143 bp, Zea mays
  Zm_smallRNAprecursor_1345
tggtaatggaactcaactcagccattatgaaaaaaaataactttatcataaataactagactaaatacaagattcctcagagctatctgggaagaaaaaagggctctgcttatattgaattatttattaaacaatcaataacagagtgattggaacaagggtataagagaaatacgttacttacaagtgcagaactggaatgtcttccacttttcaacactgcctgagccttatcagtggaattctgcagataagatttgaagagaggcacaggtggaaatttcccaagcaaatcagcctcatgggcaacatatatagcctctatagcattccctgactttattagttcctcaacaatatctgaaaagaagcgccaaagtagcttttgtcaactcttgtttctcgtttaaaaaatgcttgttattagagtacagttgatttgaccaaaaaactaaatgaaattgccggcaacgactgttatgcaagcagtccttctgtgcaagcaaaccatctgattcattagatcgtcatccaaccgtaggtcacatttaacacttaaacccttccaccaccagctcaataatctttataaaaaaacccctaacaaatcatggttgtatctgtggttggatcgtaatctaatggatcagatggtttgcttgcacgcttgcacagaagaactgcttgcataacagtcattgccgaaattgacagatgtgacaaaatccaacatagatcaaggaaagcctggttcatttctcacctaaaagaaaaatcttcaatttaaaatatgcgctacgttagtctggttaacagatccaggaaacacattgttcaataaaaaaacaagattagaactggttatacataaacttgagactacgttaactttagtaaatcaatatgcactctcctgagaggctgagacgaactattaaaacaacaaacacagttgaatgtcggtcaactacagtgtggactgagcgatggggagctcaaaccatgttctgcatatgaaagcctctttgaaaatcaaaatcatggtagttttcagtttaatgaaatccaacgatgatttcagaagtttacatttttctaaaaaaaatgccccatactcaaaatatgggtgtttttcagcaccaa

SEQ ID NO: 5857 - DNA, 1126 bp, Zea mays
  Zm_smallRNAprecursor_1346
taacttctgttttcggatcagtacccatagggttaaacaagccaaaattgcgaggacgaagtggtggaaactcaaaggggagacatccgaagtttttagggaaagtttttgtggagggcgcttggtccgaagaagatgcaaacatcatgtgagtgaagatggcaacttgtattaggaaggtggcgtcagaggtgtttggagtgaccaaagggagcaacgatgaatctaaggatacttggtggtggaccgaggatgttcaaaaggcaataaaggagaagaaagaatgttataggagcttgttccatgacaggagcgcggtcaacatagaaaggtataagatggcaaagaaggctgcaaagcgagctgtgagtaaggcaaagggtcgagcctatgatgatctttaccgaagactaagtacaaaggaaggggagaaagatgtctataagatagctaggattcggaaaaggaagacgagggacctcaaccaagttaaatgcattaaggatgagatggatcaactcttggtgaaagtacaagacatcaaacagaggtggcagaggtattttaacaatcttttcaatggtgagaatgggactatagttatccagttggatgactccttcgatgatttaaatagatgctttgtacgcggaatccaagaatcagaagtcaaagaagctttaaagaggatgaaagggggcaaggcgatgggcccagattgtatcccaatagaggtgtggaaatgccttgggtatattgctatcgtttggctaaccaagttgttcaaccatatttttcgatcaaatagtatgcccgatgagtggaggagtacattagtaccaatcttcaagaataagggagatattcaaagttatactaactatcgagagattaagctcatgagccacactatgaagctatgggagagagttattgagcatcgcctgagaggaatgacgtatatcaccatgaaccaatttgattcatgcccggaagatcaaccacggaagcaatttttcttaataaggcaggtcatggagcgatataaggagcagaaaaaggacttgcacatggtttttatcgacttggaaaaggcctacgataaaatacctaggaatctcatgtg

SEQ ID NO: 5858 - DNA, 1126 bp, Zea mays
  Zm_smallRNAprecursor_1347
cctgcttcaccccaaggtggacggcgtcgcagagtttgctctgcatgtagccactcggggcatgcatgtggctctgcgaggactcacccgaggggacgtccccggcttcgaggctttggtcgaagtccaccatcgtgtcagataggtccttcagcttggcgatcttttggtccatggcctgggaacgcgtctaggaggtctcgatggaggtgtccaaatcccaccggagctctggaggataaccaagacactaagcagggcccgacaaaaaccatatagacaaagcgaaggtaacaacgcgtacctcccatttgggccttcaggccttgggcctcagatcgctcggcctctagatcctttgcaagtgagtcagcttgggaggaggcctcggtggcttggcaccgagactcatctcgttcgccaatcagcgcaaggaggctttccctcaagggaatgtatcctgtgttcatggagctcttgtgctcatatgagcactttaaatctggtgccttcatttctcatccagggggtgagggcagcagcggcacacagaagagacaggcggcgcggcgcaacaagggtggcacacagaagaaactaggaaatgtctattcacacttggatgagaaatgaaggcaccagatttaaagtgctcatatgagcacaagagctccatgagcacaggatatgttcccttccctcaattaccgcacctcctcctccagtggcgtcaccttcttattcagcagtcgcacctcctcctccagcggcgccaccttcgcgcgcaaggacgcgacctcgtccttcagctccgcgcacagcaaggtcaggccagccgcctcagcactcttctaggctagctgcttgtttgaacgatacatcagacccttctagcgctgcagcatggcccaaacattgcgctcacgaaggatgaagacagacttggccgcagacttcaccattagaccctgagaaggaaaaacaacatcattacaccactcctggaaagggatctctcatgcagagaaggtatgattctcttacccaagccatagtctggaactcggaaaacatttgattctcctccacgtcgtcgaggataaagtagggcaggccattagtagcc

SEQ ID NO: 5859 - DNA, 1065 bp, Zea mays
  Zm_smallRNAprecursor_1348
tgactttgttcttcaccttggtcttccgctgccaattgattcaacactacaactggcacttgaggttcaactataactatgttctcatcttccaatccacacacatacttggaatcaaacaacaaatcatcaagatgacattcggcagacattctaaaaggtatctggtgaaaattggagaggtgtatcttgtgggacaagaatacactggaacaacataacaggttactagttcacatgaaacagtcagcccatgacaagtttcagtttccaagtttctgatggcacatttcagatagaaaagcatcaacattacaaaccttattataaatataatatcatataagtagatgcagctcataacatcaagatcacataacttgtcataggagttaatatcttgcactgcagacaccataaaaatagacaccgtatcttatgagcaaggagccctgctgctcccatgagcaaaatcaatccaggccacaccctccacatccaacggtgctgcgtcagggggttttttgtaaaatgtacagagttgcaaagaacattttacaaaaccccctgacacagcaccgttggatgtggagggtgtggtctgcattgattttgctcatgggagcaccaacgctccttgcgcacaagatacgttctcataaaaatatgtacaaaatctctatttttaacctgtttagccaagctgttggagttgctagctctaacataaagataaggataaaaagttttttttcttccgaaaaaatgcataaggaaggtaaaattattgttttgagatacaatacatgtaaagagagttagttttaatggctgattgtataatttgaattaacggctgattattagtttgcatgtgatacgatatgagttggacaggcgggacccaaaatgcgccgaccaacacccacgctttccgggctcaattatacgctcctcccggctggccggccgggtcacacacatgtagcctgcactgcacccctgcactgcgctgcactgactgaagctaagctgcatgcattgcattgggtagccctgcctgga

SEQ ID NO: 5860 - DNA, 1066 bp, Zea mays
  Zm_smallRNAprecursor_1349
agtattatattaaacgtcctaatcttaacaggagatcttacatccatccacaagtacgtgcatgtgtatgaattgatgtttggtacgtgtactgcagctacctctagctagaaaattaagactgtgaaatgcatgtggtgcgtgcgtgaccataacttcctatatatctcggatcagcctaccccccacttcaaaagatctgcagatggtaacgtgcattcaagtatattttttccagaattgcaggcccttgaattctctcaccgaccttcccttcaggaatggcatctatactactagctataaagagagagagcccatcaatcatcagcacgtctgtgtccctctcgtagcctcgctctccctttctcagcggcgcttctcctctcttcctcaagctgtggccgcaagctctctcatcagccatggccgccgggcgtcggcgccggcggacctccctcgcccgcggcctaacattaggctcggggactatggtgcagccaaggatgacttgccgatcgatgtgacgcctcttgatctcgtcgtcgtcagatcgtcgccgatcatcggcaagttgttcttggctacaccgtggctcctgctcctgatgtaaggctccgtctacggcgacacttggccgtcagatgatcgacgacaagcaaggccaatcaaggtatttatatatacacacacatatagttctacaacatcgtctgttctaataatcatcatatatgccaacgctttcactcgcgcgctgctctgaaatgcgctaataataaaggtgctggtactattccgatcaaatatttttgagttattccccgatgcatctcgtcagctcagagtggaatctaaatatctcgaaaagtaaagatatcttagaaattaaaaagattgatagagattttattatttggccaatttacgagtgtgctcggaacaccttgcactgcagttgatgcatgcttgcagcaacaatttctcagctgcgcgactgtagtagcagtaacaactgaaactgtaccagtattctttccgccctaaattatactacatttattct

SEQ ID NO: 5861 - DNA, 1065 bp, Zea mays
  Zm_smallRNAprecursor_1350
gtattatattaaacgtcctaatcttaacaggagatcttacatccatccacaagtacgtgcatgtgtatgaattgatgtttggtacgtgtactgcagctacctctagctagaaaattaagactgtgaaatgcatgtggtgcgtgcgtgaccataacttcctatatatctcggatcagcctaccccccacttcaaaagatctgcagatggtaacgtgcattcaagtatattttttccagaattgcaggcccttgaattctctcaccgaccttcccttcaggaatggcatctatactactagctataaagagagagagcccatcaatcatcagcacgtctgtgtccctctcgtagcctcgctctccctttctcagcggcgcttctcctctcttcctcaagctgtggccgcaagctctctcatcagccatggccgccgggcgtcggcgccggcggacctccctcgcccgcggcctaacattaggctcggggactatggtgcagccaaggatgacttgccgatcgatgtgacgcctcttgatctcgtcgtcgtcagatcgtcgccgatcatcggcaagttgttcttggctacaccgtggctcctgctcctgatgtaaggctccgtctacggcgacacttggccgtcagatgatcgacgacaagcaaggccaatcaaggtatttatatatacacacacatatagttctacaacatcgtctgttctaataatcatcatatatgccaacgctttcactcgcgcgctgctctgaaatgcgctaataataaaggtgctggtactattccgatcaaatatttttgagttattccccgatgcatctcgtcagctcagagtggaatctaaatatctcgaaaagtaaagatatcttagaaattaaaaagattgatagagattttattatttggccaatttacgagtgtgctcggaacaccttgcactgcagttgatgcatgcttgcagcaacaatttctcagctgcgcgactgtagtagcagtaacaactgaaactgtaccagtattctttccgccctaaattatactacatttattct

SEQ ID NO: 5862 - DNA, 1065 bp, Zea mays; identical to SEQ ID NO: 5861
  Zm_smallRNAprecursor_1351

SEQ ID NO: 5863 - DNA, 1132 bp, Zea mays
  Zm_smallRNAprecursor_1352
aatgcaggtccataaccaggaatatattaccaaagcggaatacaaaatccttagtggctacaataccaaaattttcagactactacaggtactaatattacaacagaggatacactcatagacctagtgcccatttattcctctacatcagtgtctatctctgacataccagtacgccctagagaaccaccaccaggtgcaaccataggagctgcttcttcctctaggtctgtatcacgctcacccccatcagctaacacaacactaccctctgcctctgtggctcctggtgcatcatcgggttgcagctggtaataaagttggtgaacttcctcatgcagctcattagagtaatcctccagatcattgtaagctaggaccaaatcttggaaacggcccctcagatgattctcacaaccaaaagctacctccctggatcgcattgtcgcggcaagttgtttcttctgctcagctaactccttctgaagctgcttctttttcgccagcagctccagaatatgagccgcatcaaggcaccgctcattgaaggacacatttagattctgctatagctgctcagctgcgactggggtgcatgatggctacagtctgcctccacctgcaatggaggtttacgactgctactgccggtctccactgtacgggaggccagctgatgcttgggcacgcctcgcggtccaacccgcatacggggcttcttcttagggggagccattctgaattttttaaagaataaagataaaaggaaaaaagatcaaggaattagtaggattagtaagaataattggaaacccacatatatattctgataaccatatagctttaggggaaagcttttattaaaggagttgaatgttatgatgcatgcttcgtttcctaatcgcctctcaactactgccaacatatttggctagcacgcttcatggtggtggcaaacctactcactccgaagttcactagccgtaatcctctaaggttttgttagtgtacctatagaagattctattccagcctaagttgtcggttagtggttagtaccttaaactaagccacctattagtccttaacttactatagtactaactgcacttttactaccagacatgtaatc

SEQ ID NO: 5864 - DNA, 1170 bp, Zea mays
  Zm_smallRNAprecursor_1353
ttagtaagaataattggaaacccacatatatattctgataaccatatagctttaggggaaagcttttattaaaggagttgaatgttatgatgcatgcttcgtttcctaatcgcctctcaactactgccaacatatttggctagcacgcttcatggtggtggcaaacctactcactccgaagttcactagccgtaatcctctaaggttttgttagtgtacctatagaagattctattccagcctaagttgtcggttagtggttagtaccttaaactaagccacctattagtccttaacttactatagtactaactgcacttttactaccagacatgtaatcctagtttagatttttccaaaaattcatttgaactcaatttcatttaaagatatattctaacaaatattctattatttgcaaaaatgtgtgaaaagctctgataccagctgtcacaacccaaccaagttatcgggcccatgtgcaccaattcttgccatcaaggccttggatagatatgtaagtgaatcagttaacttacctggggtgctgagtttcgataaatttgttcattttcaaggaccattgacccatagttgcaaatattacaataaccagacatgaacataaactttaaccataggagttgagccgaagactttacaataagataatatacattagaaaacctttaagtttacaaaccaaaaagtgtatattattacatgcccggggtaggttcaagtgtaacttattacaacatctgggaagaaaccctattcccgcagttcacacataataaatataagtaaaagtctccagtatgagtttaacaaaactcaaacgtgttaatagtttctcctacagcaacaatgggaatataaccctgagtacgcaattactcagcaatacttacctgactaaagaaaagactctcaagggtatgctggtttatttggaatcaaggtacagcttatcaaatttcaaagacccattttgcagaagagcttactagtagtggattcttatgctaaacttttacttcaccagttaaatacttttcctgattttagatttgcctaatctagagcattcacttgtcctacactagcttcattttagcagatttagtttcacttgttaagtacgatacagggcagtgatccagtctt

SEQ ID NO: 5865 - DNA, 1055 bp, Zea mays
  Zm_smallRNAprecursor_1354
cgaataggaaacgaagcatgcatcataacattcactcctttaataaaagtttccccctaaagctatatggttatcagaatatatatatatatatatatgtgggtttccaattattcttattattcctactaattccttgatcttttcttttatctttattccttaaaaattcagaatggctccccctaagcagacgccccgtatgcgggttggaccgcgaggcgtgtccaagcatcagctggcctcctgtacagtggagaccggcagtaacagtcgtacacctccgttgcaggtggaggcagatagtagccgtcgtgcaccccagtcgcaggtggagcagctacaatagaatctaaatgagtcctttaatgagcggtgccttgatgcagctcatattctggagctgctggcggaaaagaagcagcttcagaagtagttagctgagcagaaggaacaactagccatgacaatgcgatccatggaggcagcttttggtcgtgagaatcatctgaggggtcgtttccaggatttggtcctagcttacaatggtttggaggattactctaatgagctgcatgagaaagttcaccaactttactaccagctgcatccgatgacgcaccaggagccgcggaggcagaatgtggtgttgtgttagctgatgggggtgagcctgatgcagacctagaggtagaagcagctactatggttgcatcagttagtggttctccacggggcagtagtgtgtcagagatagacactgacacagaggaataaaatgggcactaggtctatgggtgtatcctttgttgtaatattagtaccagcagtagtctggaaattttggtattgtagcccctacggattttgtatcccgctttggtaataaattcctggttgtggacctgcatttatgagttctgttttatttcatatgtctaagcgtattcgattatctgatgtggctggcacctctcagagtggcgcgtaagatgatcctaatcctccaccgccaccaatccctccaacactagctgatgcaattgccgcactgg

SEQ ID NO: 5866 - DNA, 1136 bp, Zea mays
  Zm_smallRNAprecursor_1355
acagtcgtacacctccgttgcaggtggaggcagatagtagccgtcgtgcaccccagtcgcaggtggagcagctacaatagaatctaaatgagtcctttaatgagcggtgccttgatgcagctcatattctggagctgctggcggaaaagaagcagcttcagaagtagttagctgagcagaaggaacaactagccatgacaatgcgatccatggaggcagcttttggtcgtgagaatcatctgaggggtcgtttccaggatttggtcctagcttacaatggtttggaggattactctaatgagctgcatgagaaagttcaccaactttactaccagctgcatccgatgacgcaccaggagccgcggaggcagaatgtggtgttgtgttagctgatgggggtgagcctgatgcagacctagaggtagaagcagctactatggttgcatcagttagtggttctccacggggcagtagtgtgtcagagatagacactgacacagaggaataaaatgggcactaggtctatgggtgtatcctttgttgtaatattagtaccagcagtagtctggaaattttggtattgtagcccctacggattttgtatcccgctttggtaataaattcctggttgtggacctgcatttatgagttctgttttatttcatatgtctaagcgtattcgattatctgatgtggctggcacctctcagagtggcgcgtaagatgatcctaatcctccaccgccaccaatccctccaacactagctgatgcaattgccgcactggtaaatacgacggctgataatgcacatgtgttacgtgaagtgctccagaatcagaattagcacggggcttgagtatttcccaataatgccagaaatgcttcttatatggaattcatggagtctcgacctcccagttttataaaggctgatgagccacttaaagctgatgaatggctttgggtggtggagcaaaaatccagtttgatccagtgtacagaagtgcagaagcctcagtttatggcaaagttacttcgtggtccagccagcacttggtgggcaaactttgtgaccgtccaaccaaacaggacatcaagttacttggactgaatttaaggaagcttttagagcaca

SEQ ID NO: 5867 - DNA, 1170 bp, Zea mays
  Zm_smallRNAprecursor_1356
acagtcgtacacctccgttgcaggtggaggcagatagtagccgtcgtgcaccccagtcgcaggtggagcagctacaatagaatctaaatgagtcctttaatgagcggtgccttgatgcagctcatattctggagctgctggcggaaaagaagcagcttcagaagtagttagctgagcagaaggaacaactagccatgacaatgcgatccatggaggcagcttttggtcgtgagaatcatctgaggggtcgtttccaggatttggtcctagcttacaatggtttggaggattactctaatgagctgcatgagaaagttcaccaactttactaccagctgcatccgatgacgcaccaggagccgcggaggcagaatgtggtgttgtgttagctgatgggggtgagcctgatgcagacctagaggtagaagcagctactatggttgcatcagttagtggttctccacggggcagtagtgtgtcagagatagacactgacacagaggaataaaatgggcactaggtctatgggtgtatcctttgttgtaatattagtaccagcagtagtctggaaattttggtattgtagcccctacggattttgtatcccgctttggtaataaattcctggttgtggacctgcatttatgagttctgttttatttcatatgtctaagcgtattcgattatctgatgtggctggcacctctcagagtggcgcgtaagatgatcctaatcctccaccgccaccaatccctccaacactagctgatgcaattgccgcactggtaaatacgacggctgataatgcacatgtgttacgtgaagtgctccagaatcagaattagcacggggcttgagtatttcccaataatgccagaaatgcttcttatatggaattcatggagtctcgacctcccagttttataaaggctgatgagccacttaaagctgatgaatggctttgggtggtggagcaaaaatccagtttgatccagtgtacagaagtgcagaagcctcagtttatggcaaagttacttcgtggtccagccagcacttggtgggcaaactttgtgaccgtccaaccaaacaggacatcaagttacttggactgaatttaaggaagcttttagagcacactatattcctgatggagtcttgcaaatgaaacta

SEQ ID NO: 5868 - DNA, 1078 bp, Zea mays
  Zm_smallRNAprecursor_1357
gcaggtggagcagctacaatagaatctaaatgagtcctttaatgagcggtgccttgatgcagctcatattctggagctgctggcggaaaagaagcagcttcagaagtagttagctgagcagaaggaacaactagccatgacaatgcgatccatggaggcagcttttggtcgtgagaatcatctgaggggtcgtttccaggatttggtcctagcttacaatggtttggaggattactctaatgagctgcatgagaaagttcaccaactttactaccagctgcatccgatgacgcaccaggagccgcggaggcagaatgtggtgttgtgttagctgatgggggtgagcctgatgcagacctagaggtagaagcagctactatggttgcatcagttagtggttctccacggggcagtagtgtgtcagagatagacactgacacagaggaataaaatgggcactaggtctatgggtgtatcctttgttgtaatattagtaccagcagtagtctggaaattttggtattgtagcccctacggattttgtatcccgctttggtaataaattcctggttgtggacctgcatttatgagttctgttttatttcatatgtctaagcgtattcgattatctgatgtggctggcacctctcagagtggcgcgtaagatgatcctaatcctccaccgccaccaatccctccaacactagctgatgcaattgccgcactggtaaatacgacggctgataatgcacatgtgttacgtgaagtgctccagaatcagaattagcacggggcttgagtatttcccaataatgccagaaatgcttcttatatggaattcatggagtctcgacctcccagttttataaaggctgatgagccacttaaagctgatgaatggctttgggtggtggagcaaaaatccagtttgatccagtgtacagaagtgcagaagcctcagtttatggcaaagttacttcgtggtccagccagcacttggtgggcaaactttgtgaccgtccaaccaaacaggacatcaagttacttggactgaatttaaggaagcttttagagcaca

SEQ ID NO: 5869 - DNA, 1132 bp, Zea mays; identical to SEQ ID NO: 5863
  Zm_smallRNAprecursor_1358

SEQ ID NO: 5870 - DNA, 1170 bp, Zea mays; identical to SEQ ID NO: 5864
  Zm_smallRNAprecursor_1359

SEQ ID NO: 5871 - DNA, 1055 bp, Zea mays; identical to SEQ ID NO: 5865
  Zm_smallRNAprecursor_1360

SEQ ID NO: 5872 - DNA, 1136 bp, Zea mays; identical to SEQ ID NO: 5866
  Zm_smallRNAprecursor_1361

SEQ ID NO: 5873 - DNA, 1170 bp, Zea mays; identical to SEQ ID NO: 5867
  Zm_smallRNAprecursor_1362

SEQ ID NO: 5874 - DNA, 1078 bp, Zea mays; identical to SEQ ID NO: 5868
  Zm_smallRNAprecursor_1363

SEQ ID NO: 5875 - DNA, 1041 bp, Zea mays
  Zm_smallRNAprecursor_1364
tcggattctagcagcttctggccaccaaaagctgctgcggactgccaaacgctcagcttttcagccagcttctataaaattcgttgggacaaaaaccatccaaaatcaatataaacacataatcggttaagtcattataataataggaatccatcactttctagatcctgagtcctatggacaactttattttcttccacacgtaatcgtaatgatactcagattctctccacagccagattctcctcacagccagattttcagaaaagctggtcagaaaaaagctgaaccaaacagcccattcgtcgtctggactatggagatgagacgaggcaaaggaagccggccggtgcgtccgaattttttgtattttagcccctaaactgaagtaaaatcacgtttagacctaaaaaaattttaaatgcagttttggaccctttgctcggcgccataggccgtggcgccgagctaacacagctcggcgccataggctatggcgccgaggtcgtgttgcgttggcacgacccagacgcgtggcgtcgacgtggaaccgagctcggcgccacagatcttggcgccgagctcggttgtgttattaaaatatttgttgcagacatgagcacaaagcccatctagcccacttggtagagcacaaggcttctaaccatgtggtcgtgggttcaagccccatagtttgcattttttttgttttttttgtttatatcgttggtgtgtccgcttaaatttatttctcgcctagattttttttatcctgcgcctgtagctagcaaataatactcacgcctgagcgacaatatttctagctatacactcacacacatgtgctatacgtaattatgtagcaaaaatcccgggtaacgagatcatcaacaggctgaataaaacccgggtagaacgccgggcgccagactttgaaaggtgcttaattactaacacacagacacgctgatctgcccatgcacgtacgccgtgcatatcatgcttaattataatcagttgattaataatctttgtcccctc

SEQ ID NO: 5876 - DNA, 1041 bp, Zea mays; identical to SEQ ID NO: 5875
  Zm_smallRNAprecursor_1365

SEQ ID NO: 5877 - DNA, 1042 bp, Zea mays
  Zm_smallRNAprecursor_1366
tcggattctagcagcttctggccaccaaaagctgctgcggactgccaaacgctcagcttttcagccagcttctataaaattcgttgggacaaaaaccatccaaaatcaatataaacacataatcggttaagtcattataataataggaatccatcactttctagatcctgagtcctatggacaactttattttcttccacacgtaatcgtaatgatactcagattctctccacagccagattctcctcacagccagattttcagaaaagctggtcagaaaaaagctgaaccaaacagcccattcgtcgtctggactatggagatgagacgaggcaaaggaagccggccggtgcgtccgaattttttgtattttagcccctaaactgaagtaaaatcacgtttagacctaaaaaaattttaaatgcagttttggaccctttgctcggcgccataggccgtggcgccgagctaacacagctcggcgccataggctatggcgccgaggtcgtgttgcgttggcacgacccagacgcgtggcgtcgacgtggaaccgagctcggcgccacagatcttggcgccgagctcggttgtgttattaaaatatttgttgcagacatgagcacaaagcccatctagcccacttggtagagcacaaggcttctaaccatgtggtcgtgggttcaagccccatagtttgcattttttttgttttttttgtttatatcgttggtgtgtccgcttaaatttatttctcgcctagattttttttatcctgcgcctgtagctagcaaataatactcacgcctgagcgacaatatttctagctatacactcacacacatgtgctatacgtaattatgtagcaaaaatcccgggtaacgagatcatcaacaggctgaataaaacccgggtagaacgccgggcgccagactttgaaaggtgcttaattactaacacacagacacgctgatctgcccatgcacgtacgccgtgcatatcatgcttaattataatcagttgattaataatctttgtcccctcg

SEQ ID NO: 5878 - DNA, 1042 bp, Zea mays; identical to SEQ ID NO: 5877
  Zm_smallRNAprecursor_1367

SEQ ID NO: 5879 - DNA, 1043 bp, Zea mays
  Zm_smallRNAprecursor_1368
tcggattctagcagcttctggccaccaaaagctgctgcggactgccaaacgctcagcttttcagccagcttctataaaattcgttgggacaaaaaccatccaaaatcaatataaacacataatcggttaagtcattataataataggaatccatcactttctagatcctgagtcctatggacaactttattttcttccacacgtaatcgtaatgatactcagattctctccacagccagattctcctcacagccagattttcagaaaagctggtcagaaaaaagctgaaccaaacagcccattcgtcgtctggactatggagatgagacgaggcaaaggaagccggccggtgcgtccgaattttttgtattttagcccctaaactgaagtaaaatcacgtttagacctaaaaaaattttaaatgcagttttggaccctttgctcggcgccataggccgtggcgccgagctaacacagctcggcgccataggctatggcgccgaggtcgtgttgcgttggcacgacccagacgcgtggcgtcgacgtggaaccgagctcggcgccacagatcttggcgccgagctcggttgtgttattaaaatatttgttgcagacatgagcacaaagcccatctagcccacttggtagagcacaaggcttctaaccatgtggtcgtgggttcaagccccatagtttgcattttttttgttttttttgtttatatcgttggtgtgtccgcttaaatttatttctcgcctagattttttttatcctgcgcctgtagctagcaaataatactcacgcctgagcgacaatatttctagctatacactcacacacatgtgctatacgtaattatgtagcaaaaatcccgggtaacgagatcatcaacaggctgaataaaacccgggtagaacgccgggcgccagactttgaaaggtgcttaattactaacacacagacacgctgatctgcccatgcacgtacgccgtgcatatcatgcttaattataatcagttgattaataatctttgtcccctcgc

SEQ ID NO: 5880 - DNA, 1043 bp, Zea mays; identical to SEQ ID NO: 5879
  Zm_smallRNAprecursor_1369

SEQ ID NO: 5881 - DNA, 1075 bp, Zea mays
  Zm_smallRNAprecursor_1370
ttttcaattcataagacggatctaaaccgaatccttagcgaatggaagaaaggaatgggatcggagtcggaggtgaggggaagtaatctcacctgaagtaaagcaagctccggagcctggagcctgaaggggagcgatcaatttggccagcaaggggaggggagcgtgcgtgcagtgctgagctctccaagtctcctgtctgcttgcctgctgggcttatccaccggccgatgccagagcagcacgcagctgggccagagtggaatgggagcgaacagcggagtacacgagccggcgcgcgggggcggtggggcgcgcgtggggtggcggcggggcgctggcggcaggcgcgcgattggcaggtagcggcgggcgcgcatggtagacagagcgaaagaagagagacgcacggggttagggatttaggttttgggttaagttcgacggtgtccatgtggcccacgaatttaacttaagaacgtgggtacccacgtttctaatacgataagttcgacggttttagcacgggcccacgaatttaatttaagaacgtgggtacccacgttcttaaattaacccacgaacataactcaattaagaacgtcggtacccacgttcttaaattaacccacgaacatttattagtttcttgtagtgaattctggacagccccccctctatctaatcgcaaacacaacatctaatcaattgaatcacagcgcaaatgaacaagggatgaacacaaaagaaaaatcaccttggttctccccttttccttcctcccttcttccctccaccaaaacgattggagattcgcaccaagagacgatgatccgagcggcacggagtagcacctagggaggaggggattgggggggcagctagggttttggtggctgcaacaatggagagaggaggaggtgggcagggggggcggcggccaaggggaaaggaggagtgggggggcggctgcacatggggggggtagttaggagggtggcggctagggtttgggagggctaatgggccgaaacaccaattgcggcccaactatcccacgcgacagctcccgacc

SEQ ID NO: 5882 - DNA, 1052 bp, Zea mays
  Zm_smallRNAprecursor_1371
ggccacttcggacacctggtaaggccctcgatgcaattcgccgcttccccaatcttcgattagcaccggtttgactcaggattagggcgctgggccgcggaccataggattccgatgggttcggcacggtggctgtgagcggcgccgctgtcttgtgagcgcagagagagagaaaggaagccgtcgcagtggaattcgaggaggaagggagcagatgccttgcagaggccatggatgtgatcaccggtgtctttctaacctgtttggcttatcgtcgtgctcgattgggggttggagcgcttctaatttctcgccggaattggtgcttcaccgtggaaccgcataccaccgtgggccggactttctgcgccgccatcatcagtgagaacctctcctccgatctcgcccttgtctctgctccgtgtagcatccttcggtttgtaatttggcatatttagtcgctgcgccgcctccctccggtgagagtgtgagagaccgatatgcacgccctgggttagtaccacctcgcctagccaagggggccgtgttgcacttataagggcgggcctccctcctctctcagcctaggttttgagagcgaggtgcccatctgaataggctgcgcacgagcgcatgaacgtccgacgctggtgatgatgggctttaggcggactagcccagtgggtgcgttacaattggtatcggagcccacattgccgctgctgcctgggagagctttgggcctcttaggggggtgggatgtgagagaccgatatgcacgccctgggttagtaccacctcgcctagacaagggggtcgtgttgcacttataagggcgggcctccctcctctctcagcctaggttttgagagcgaggtgcccgtctgaataggctgcgcacgagcgcatgaacgtccgacgctggtgatggtgggctttaggcggactggcccagtgggtgcgttacagagagtccggccgcgggtgctcagcaccgtcgcacgtctccagctgtggaggaagacgagggtaggaccgttgatcttgtagca

SEQ ID NO: 5883 - DNA, 1224 bp, Zea mays
  Zm_smallRNAprecursor_1372
atcttcgattagcaccggtttgactcaggattagggcgctgggccgcggaccataggattccgatgggttcggcacggtggctgtgagcggcgccgctgtcttgtgagcgcagagagagagaaaggaagccgtcgcagtggaattcgaggaggaagggagcagatgccttgcagaggccatggatgtgatcaccggtgtctttctaacctgtttggcttatcgtcgtgctcgattgggggttggagcgcttctaatttctcgccggaattggtgcttcaccgtggaaccgcataccaccgtgggccggactttctgcgccgccatcatcagtgagaacctctcctccgatctcgcccttgtctctgctccgtgtagcatccttcggtttgtaatttggcatatttagtcgctgcgccgcctccctccggtgagagtgtgagagaccgatatgcacgccctgggttagtaccacctcgcctagccaagggggccgtgttgcacttataagggcgggcctccctcctctctcagcctaggttttgagagcgaggtgcccatctgaataggctgcgcacgagcgcatgaacgtccgacgctggtgatgatgggctttaggcggactagcccagtgggtgcgttacaattggtatcggagcccacattgccgctgctgcctgggagagctttgggcctcttaggggggtgggatgtgagagaccgatatgcacgccctgggttagtaccacctcgcctagacaagggggtcgtgttgcacttataagggcgggcctccctcctctctcagcctaggttttgagagcgaggtgcccgtctgaataggctgcgcacgagcgcatgaacgtccgacgctggtgatggtgggctttaggcggactggcccagtgggtgcgttacagagagtccggccgcgggtgctcagcaccgtcgcacgtctccagctgtggaggaagacgagggtaggaccgttgatcttgtagcagacgctccagattagaagagagagtgctcccttcgatgaagggatctgtgccgtaggtaatggcatggttgggcaggattgaatcgggcgtggggttggtgtaaaccgttcgatgacgatctgacggccaggatacgataccggttcactggaatcgcaatctaatatgggacgttcatgctagatcggacggtcaggattgaaccataccccttcagccctg

SEQ ID NO: 5884 - DNA, 1052 bp, Zea mays
  Zm_smallRNAprecursor_1373
tcgtgctcgattgggggttggagcgcttctaatttctcgccggaattggtgcttcaccgtggaaccgcataccaccgtgggccggactttctgcgccgccatcatcagtgagaacctctcctccgatctcgcccttgtctctgctccgtgtagcatccttcggtttgtaatttggcatatttagtcgctgcgccgcctccctccggtgagagtgtgagagaccgatatgcacgccctgggttagtaccacctcgcctagccaagggggccgtgttgcacttataagggcgggcctccctcctctctcagcctaggttttgagagcgaggtgcccatctgaataggctgcgcacgagcgcatgaacgtccgacgctggtgatgatgggctttaggcggactagcccagtgggtgcgttacaattggtatcggagcccacattgccgctgctgcctgggagagctttgggcctcttaggggggtgggatgtgagagaccgatatgcacgccctgggttagtaccacctcgcctagacaagggggtcgtgttgcacttataagggcgggcctccctcctctctcagcctaggttttgagagcgaggtgcccgtctgaataggctgcgcacgagcgcatgaacgtccgacgctggtgatggtgggctttaggcggactggcccagtgggtgcgttacagagagtccggccgcgggtgctcagcaccgtcgcacgtctccagctgtggaggaagacgagggtaggaccgttgatcttgtagcagacgctccagattagaagagagagtgctcccttcgatgaagggatctgtgccgtaggtaatggcatggttgggcaggattgaatcgggcgtggggttggtgtaaaccgttcgatgacgatctgacggccaggatacgataccggttcactggaatcgcaatctaatatgggacgttcatgctagatcggacggtcaggattgaaccataccccttcagccctggccgacttttaaaagagaccctggtttctttcttattaaacccgccgtcca

SEQ ID NO: 5885 - DNA, 1088 bp, Zea mays
  Zm_smallRNAprecursor_1374
aaggttgattctgtaattacacatgcatcatgctaagaattatactaataaaattttcccccttagaaagatgccgccgcgcacaaggaaaacgacatgcaagtcaactggcccaatcggtgtgccccggcatcaacttgcccctcgacatgaggatagtagcagcgggagcaatgatccaataggggatcttgaagcacgagtaaatcaacttcaaacggaattgcaacgcaggaccaacatatgggttgcggatggagatagaataaatgaattaaaaagcgacatccgccgcctgcgggatcagcttgctgatcgggacttggcgctcgactgggcagttcagtcccgtttgcttgcttgtgctaaagaggcaagggctcaagcccgagtcaaggaacttagctcagctatcgacaacctgcaggtctattgcaatactttacatgaggaagtccatgtactgtattcgcaattacaccctagtgcacctgcgcaccctgttgagtcggaagccggaccctcgcatgttgcgggacacgcgcttggtggtgagttagacctttttcagccccctccttccatgaggctggtcgacgaatggtctcccacacccgacgacgaggctgccaaaagcaatgggaagcaggactagtggtgtagtagaagtagaagtagaagtagtgtattgtataataggttgtgctattgtataataggtagtgctattgtataataggtaatgtatcctgttgtaagagtctgagtctgtaacattacttttggtaatgtaaaacggatggcttttctttggcatatcatattgtttccaaatgttgttgccacagatgccgtccaggactcgagcacaggatgcagctggaacttccagtgggagggagtctaccccaaatccacctcctgttcctcccacactggccgaggcgattgccgccttagtgaatgcgactgctgataatacccgctttctgagagaaatggcgggccaacagctccagcagcaaggtgggcggggttatcaacagggcccccgcgaaacttcttacctggacttctcagagacacgt

SEQ ID NO: 5886 - DNA, 1043 bp, Zea mays
  Zm_smallRNAprecursor_1375
ctcaaattttgcttcacattgtcttgcctcttctcatttgcttgagctttcttctcaagattgttgggacaccttgaggcaaagtgacccatatcaccatacatgtagcacttgatttgagccaaatcatccttcttcttttgatttgtgctcatcatgttatcttgattatatattgaatgccttcttctttctcttcttgttttctttttcttccccacatcaccattatattcatggttaatattgatttgcttttggggatccttcctttgctcaactcgtggctttggttgaggcttcacttgtggcttcactaatttcttggttgggcacattgaggtgaggtgaccccaagtgtggcacttgaagcacttgtcatgctttagcctcctttcttccttcttcaacttgagcttccttttattggggcatgcctttgcaagatgacccatctcatggcatttatagcacatgaagtgagatagcttatttccttttaatttgaattgtctgcctttgatattgctcttgttgaaaccaaggccactcttgtcatcatatcttctttgatttttcattataagatcatgagtgacttttgatttatgccacctctcaaacatgttgcttaaattcttcactttgtttttgagcttattattttccttcaaaaggttagtcccacaagacaaggaagaataataataatctatagttgaagaacattgcatagctaataaatcttcacaagaggtggatacattcttcttatcttcatcacatggattagcagcattttgcaattgatcatataaatcatgtgatgagttctcactagttttaatttcttcactataaatcttgttagtgagaaaaacatgatcttgtaccaaattttcatgagcaacactaagttcctcatgactcaattttagttcctcatgtgaacaagtgataacataaagtagatgtttttgttgttcacatgaattctttagaaataagttttcactttccaaatttcttgttttatctttctc

SEQ ID NO: 5887 - DNA, 1189 bp, Zea mays
  Zm_smallRNAprecursor_1376
ttgtttttgtgtttaaatgattttcaaattttaattaacatatataaagacatctatgaaaatttggcccagatgtgttcaaagggattttatgcaatactaaatcagaactgcattgtgtgatgccaatgatccatgtgtacggattttctaaagctgaggatccagagcatgacttccatgaggtaagcaccgtttactgccataacaacatttttcttttatgttgagattcgttttttatcgtattcagtatctgttatctacataatttcgtttatcagcatctatgcctaaatttgcagaggataaatttaacgttaggcgagaacatcgacactgttgaaatgcacagagtacggcttgttgcacccggaaaatggatgatatgtgcaacttttactcttccacagtcagtggcgtctgcacagccgaattacattacctgttgattttttgtactctctccgtcttaaaatattggcaacgactgttatgcaagcagtccttctgtgcaagcgtgcaagcaaaccatatgatccattagattacgatccaatcacagatacaaccatgtttgttagaggttttttataaagattattgagctgttggtggaagggtttaagtgttaaatgtgacatacggttggatcacgatctaatggatcaaatggtttgcttgcacgcttgcacagaaggactgcttgtatagcagtcgttgcctaaaatattagtcgttttagctcagctctggatttttatgtctatatccaaagacatgtaaaacatataaatcaaatgttatatgaatttattaattgtcgaaaatgaattttaatttgggatagagggagtactattcttactgcagcccctcgtatcttctgtactgtcgtcgaatacttcctatcagattatatagatgatgcccttgatcatctcacactgaatttggaaaggaccacgtgaaaagagatcatttgactgaactgtgaatttactaattagggcatgcacaatctagatatagttttgcgattctccaaacgttagataactttagatacaacttagggggtgtttgaatacactagagctaatagtttgtggctaaaattagttgagacatctaaatatcctagctaatagttcatctattaactatttttggtaaattaattaatagt

SEQ ID NO: 5888 - DNA, 1187 bp, Zea mays
  Zm_smallRNAprecursor_1377
tgtttttgtgtttaaatgattttcaaattttaattaacatatataaagacatctatgaaaatttggcccagatgtgttcaaagggattttatgcaatactaaatcagaactgcattgtgtgatgccaatgatccatgtgtacggattttctaaagctgaggatccagagcatgacttccatgaggtaagcaccgtttactgccataacaacatttttcttttatgttgagattcgttttttatcgtattcagtatctgttatctacataatttcgtttatcagcatctatgcctaaatttgcagaggataaatttaacgttaggcgagaacatcgacactgttgaaatgcacagagtacggcttgttgcacccggaaaatggatgatatgtgcaacttttactcttccacagtcagtggcgtctgcacagccgaattacattacctgttgattttttgtactctctccgtcttaaaatattggcaacgactgttatgcaagcagtccttctgtgcaagcgtgcaagcaaaccatatgatccattagattacgatccaatcacagatacaaccatgtttgttagaggttttttataaagattattgagctgttggtggaagggtttaagtgttaaatgtgacatacggttggatcacgatctaatggatcaaatggtttgcttgcacgcttgcacagaaggactgcttgtatagcagtcgttgcctaaaatattagtcgttttagctcagctctggatttttatgtctatatccaaagacatgtaaaacatataaatcaaatgttatatgaatttattaattgtcgaaaatgaattttaatttgggatagagggagtactattcttactgcagcccctcgtatcttctgtactgtcgtcgaatacttcctatcagattatatagatgatgcccttgatcatctcacactgaatttggaaaggaccacgtgaaaagagatcatttgactgaactgtgaatttactaattagggcatgcacaatctagatatagttttgcgattctccaaacgttagataactttagatacaacttagggggtgtttgaatacactagagctaatagtttgtggctaaaattagttgagacatctaaatatcctagctaatagttcatctattaactatttttggtaaattaattaatag

SEQ ID NO: 5889 - DNA, 1188 bp, Zea mays
  Zm_smallRNAprecursor_1378
tgtttttgtgtttaaatgattttcaaattttaattaacatatataaagacatctatgaaaatttggcccagatgtgttcaaagggattttatgcaatactaaatcagaactgcattgtgtgatgccaatgatccatgtgtacggattttctaaagctgaggatccagagcatgacttccatgaggtaagcaccgtttactgccataacaacatttttcttttatgttgagattcgttttttatcgtattcagtatctgttatctacataatttcgtttatcagcatctatgcctaaatttgcagaggataaatttaacgttaggcgagaacatcgacactgttgaaatgcacagagtacggcttgttgcacccggaaaatggatgatatgtgcaacttttactcttccacagtcagtggcgtctgcacagccgaattacattacctgttgattttttgtactctctccgtcttaaaatattggcaacgactgttatgcaagcagtccttctgtgcaagcgtgcaagcaaaccatatgatccattagattacgatccaatcacagatacaaccatgtttgttagaggttttttataaagattattgagctgttggtggaagggtttaagtgttaaatgtgacatacggttggatcacgatctaatggatcaaatggtttgcttgcacgcttgcacagaaggactgcttgtatagcagtcgttgcctaaaatattagtcgttttagctcagctctggatttttatgtctatatccaaagacatgtaaaacatataaatcaaatgttatatgaatttattaattgtcgaaaatgaattttaatttgggatagagggagtactattcttactgcagcccctcgtatcttctgtactgtcgtcgaatacttcctatcagattatatagatgatgcccttgatcatctcacactgaatttggaaaggaccacgtgaaaagagatcatttgactgaactgtgaatttactaattagggcatgcacaatctagatatagttttgcgattctccaaacgttagataactttagatacaacttagggggtgtttgaatacactagagctaatagtttgtggctaaaattagttgagacatctaaatatcctagctaatagttcatctattaactatttttggtaaattaattaatagt

SEQ ID NO: 5890 - DNA, 1185 bp, Zea mays
  Zm_smallRNAprecursor_1379
gtttttgtgtttaaatgattttcaaattttaattaacatatataaagacatctatgaaaatttggcccagatgtgttcaaagggattttatgcaatactaaatcagaactgcattgtgtgatgccaatgatccatgtgtacggattttctaaagctgaggatccagagcatgacttccatgaggtaagcaccgtttactgccataacaacatttttcttttatgttgagattcgttttttatcgtattcagtatctgttatctacataatttcgtttatcagcatctatgcctaaatttgcagaggataaatttaacgttaggcgagaacatcgacactgttgaaatgcacagagtacggcttgttgcacccggaaaatggatgatatgtgcaacttttactcttccacagtcagtggcgtctgcacagccgaattacattacctgttgattttttgtactctctccgtcttaaaatattggcaacgactgttatgcaagcagtccttctgtgcaagcgtgcaagcaaaccatatgatccattagattacgatccaatcacagatacaaccatgtttgttagaggttttttataaagattattgagctgttggtggaagggtttaagtgttaaatgtgacatacggttggatcacgatctaatggatcaaatggtttgcttgcacgcttgcacagaaggactgcttgtatagcagtcgttgcctaaaatattagtcgttttagctcagctctggatttttatgtctatatccaaagacatgtaaaacatataaatcaaatgttatatgaatttattaattgtcgaaaatgaattttaatttgggatagagggagtactattcttactgcagcccctcgtatcttctgtactgtcgtcgaatacttcctatcagattatatagatgatgcccttgatcatctcacactgaatttggaaaggaccacgtgaaaagagatcatttgactgaactgtgaatttactaattagggcatgcacaatctagatatagttttgcgattctccaaacgttagataactttagatacaacttagggggtgtttgaatacactagagctaatagtttgtggctaaaattagttgagacatctaaatatcctagctaatagttcatctattaactatttttggtaaattaattaata

SEQ ID NO: 5891 - DNA, 1186 bp, Zea mays
  Zm_smallRNAprecursor_1380
gtttttgtgtttaaatgattttcaaattttaattaacatatataaagacatctatgaaaatttggcccagatgtgttcaaagggattttatgcaatactaaatcagaactgcattgtgtgatgccaatgatccatgtgtacggattttctaaagctgaggatccagagcatgacttccatgaggtaagcaccgtttactgccataacaacatttttcttttatgttgagattcgttttttatcgtattcagtatctgttatctacataatttcgtttatcagcatctatgcctaaatttgcagaggataaatttaacgttaggcgagaacatcgacactgttgaaatgcacagagtacggcttgttgcacccggaaaatggatgatatgtgcaacttttactcttccacagtcagtggcgtctgcacagccgaattacattacctgttgattttttgtactctctccgtcttaaaatattggcaacgactgttatgcaagcagtccttctgtgcaagcgtgcaagcaaaccatatgatccattagattacgatccaatcacagatacaaccatgtttgttagaggttttttataaagattattgagctgttggtggaagggtttaagtgttaaatgtgacatacggttggatcacgatctaatggatcaaatggtttgcttgcacgcttgcacagaaggactgcttgtatagcagtcgttgcctaaaatattagtcgttttagctcagctctggatttttatgtctatatccaaagacatgtaaaacatataaatcaaatgttatatgaatttattaattgtcgaaaatgaattttaatttgggatagagggagtactattcttactgcagcccctcgtatcttctgtactgtcgtcgaatacttcctatcagattatatagatgatgcccttgatcatctcacactgaatttggaaaggaccacgtgaaaagagatcatttgactgaactgtgaatttactaattagggcatgcacaatctagatatagttttgcgattctccaaacgttagataactttagatacaacttagggggtgtttgaatacactagagctaatagtttgtggctaaaattagttgagacatctaaatatcctagctaatagttcatctattaactatttttggtaaattaattaatag

SEQ ID NO: 5892 - DNA, 1070 bp, Zea mays
  Zm_smallRNAprecursor_1381
attgtcaggctcagcgtctatatctgggctctccgaagccaggcggtggagccgtttgccgacagcttctgtcgagttcatgagctgcattaccaaactaaggccagaaaagatggactgcatgaaaattttggttgctataattttgcttatcggaaaaccacgaagtttcccgtgatcagctaccgaagcaaatggccggcaggctggaaatcagaatggttttatgtcaaagttgacgaagacaaagagaagctggttcagagccctcttgaactaatcttcggagaaacaagaccccgatgcaaaatggcagtagaaggtccaacttgggctgcactgggcaaattcaaaattattgcagaacatattggcactagagatttagtgcaggaattcctggccttcagggtttttccaactatgaaagagtggaccatgccgaagcttaaacgggaaaagaaagaagggccaattctctgtatgccactagaaaatatactcattccttgtatgccactgaccccacatgtcatagacattaaaaaatatacctatatgccactcagtggcacacaaggaatgagtataaaatttgatggcataccaggaattttctcaaaagaaagagggggaacttgtcagactgccttattattataagttcaagaaatattttaaagtaccctgccaagaatggcttgatacaattgaaataatgagtaatgaaattcttgggaattactctaaaaaagaggaccaactgatgacagcggccttcggcactcggccgaaacgaaggctgaacagggtgcttgatgccataggatttgaatatgctgactacggccgactgggcggagatgctggaggcccgaagcgaaaaaggattgccagcgctactgacgaagaggtcgtcaaggtagccaaaaagaaaaagaaagattctgaaaatcttagcgctgaagagttaaatcctgggccgaaggtggctactacaagaaagagaaaaagtgcatccccagagccggaaacgccggtccgagaagaagatactcctgcttctcctt

SEQ ID NO: 5893 - DNA, 1172 bp, Zea mays
  Zm_smallRNAprecursor_1382
aatcagctcatcgctgcaccaactcgcagcctgcgcgcccaaccaacatgtctcgtctatactttttgaaccccctgcagaagtcgagatctgggtatgcagcccccctgcacggccaaagagggtcgtctccttcattcgggcaactgccttggtgctggacatacccaacataagaacggaccggttcctctttcacctttcatccaacgtgaagtccgcagttcagctctttccttgggatccaggaggacaggaggacatagctgcagttcaaatttatattttagtttcacaattattttgtattttcgtcttaaataataaaggtaagccgagatgtaaaaggcttaaccttaagtcgtgtcaggtaagtctatggcagctcgaggacgagctggtcctcaagggagggggagatgtcatgggcatcatagggagcgagacgcaacagccaggctgggataaggctagagaataagattgagatgagctgggataaggctagagaataagattgggatgagagaattgtggagagttggttagcatcagataagtccaagaaagtaggagttagttgagagtttgtaggagaagttggttagccatagggctatttataagccgcatggcagcagggaataaatcaagcaagatcattaccaaaccaatctctctcccttgcaatgaccctctcaagcgcctagggctgctaccctagaaccaagcctgcggcagaggggtataacctcgccggagaagacaatcccatggaccgaaggtccatgacaatatcataggtctctttctatctacgggagcggggtgggcttgcggaatacctagtgtattcacccagatttatttatgttttttcagcagccgaggacttcttttctgctatgcttgattaagagggctgtgtctgcacccagttctgcctgtggcttgggctagtatattttcctactgcgtttcttaatttggctctctcgagcttgtaccccggtattgtaataatttttatctaaactctatactatttgaagtaaggaatgtgtttactagcctcctgagactagtaattgtttcacatttgagtcccaaaggatcgggacgcttcagttcccttcctttcagctcgaggacgagctggacttcgaggcggg

SEQ ID NO: 5894 - DNA, 1071 bp, Zea mays
  Zm_smallRNAprecursor_1383
gaaggttccccaagacccatcgcagaacattgtccatacttcggcatctttatttgtttcttcatcctgagcccctggcgtccaatcggcgataaaatctgccaacgcttgggactggatcgaagatctatgcacataatcaatgcaaaattcattgagctctgcagcccattttccaatccgcccagtagcttctctatttctcataatatccttcaacggctgcgaagaaggaacaataacattgtatgcttgaaagtaatgccgaagcttcctggatgccatcaaaacaacatataacaccttctctaattctgtatagttcttctttgatatactaagaacttcagatacaaaatacactgggacctgcttcttgacttggccgtcaagcttctgctggacaagtgctgcacttaccgctgagtgcgaagctgccacatataataacaacggagcccctggcgttggtggagttaatgttgtcaaatctatcaaatattgcttcaggtcctcgaaggctttttgttggcttggtccccattgaaagacttcgactgatttcagtacttcgaagaatggtagatttctttctgctgatctggatataaatctattaagagatgccagcctccctgtcaatctttgggcccccttttttgtagttggtggctccattcgaagtatagcttcaattttacttggattagcttcaattccctttgttgaaaccaagcatccaagaaatttccccttcttgactccgaagacacatttttctggattcaactttaggccagcttgcctaaaactggcgaaggtctcttgcaaatcagcaatgtgattttcctgcttcgtgctttttacaatgatatcatcaacataagttagcacatttctgcctatctgagattggagaaccttcgcagtcattctgctgaaacttcctccagcgttcttgagcccctcaggcatccgaagataacaatatgtaactggtctttggcttatcctccttcttcatccaaatttgatgatagcctgaataacaatcgagaagactcataagct

SEQ ID NO: 5895 - DNA, 1070 bp, Zea mays
  Zm_smallRNAprecursor_1384
cattagaacactaatgaatagacctacactgaacttgcagtcattagaacattaaagaatagacctacactgaacttgtcatacaaatagttccaaacatcaagtctctgcacacctgtaattagtgctaactagtatagtaattagcactcaacttgtcataaaacatttacaaagaagaagcacatcgcagtgaggggggcaggggcccgggcgtagggaagaatgacagctgcagcgagtcgaactgtggtggtgcagcgatgggaacgtggaagcaacgcaacggcggaagaccgatggaggcccgaccgcccgagggctattgaatgggggcggcgggagagaatggcggcagctcaaagaggaagtaccaggggttatccaaaaataaaaatgctttggtgggagggtttaaacgaaaattcgccaacgaccatcagatgttaattcgaggctctagattaagggccaattccctgtatgccactgaaaaatatactcattccttgtatgccactggccccacatgtcatagacacaaaaaaatatacttatatgccactcagtggcacacaagggatgagtataaaatctgatggcataccaggaattttctcctagattaacgatttgcacgtttgcaccgttacactgtttgaagcccaaacgttccctttaaagttaggctgtatttgatatggctctgctccaccctagagcagctctgggtggagcagctctgctccagagtttatattgtttctcataaccggtggcagtggcgggtaaataactccaaaatccatgactaggttgttttttggagttttcggagcagcaaaacagatactccaaaaaattgtactacagctccaaaaactctatagagtttacaactctggagttagagtgtttggcaatgccctggccagctcctccttgaagttttactctggagccatgccaaactcgcccttaatgtctagactagcatgctagtgatatacagtactagcacggtatgattagacactttagtgccatgacacgattactaatagtgcatg

SEQ ID NO: 5896 - DNA, 1048 bp, Zea mays
  Zm_smallRNAprecursor_1385
caactgagcacaacaagcaccaacaactatgtattcagcctcggcagtggaaagtgcaacacagttttgcttcttagagctccaagacaccagggaccgcccaaggaattggcaagtccccgaggtgctttttcgatcaactttacaaccggcatagtctgaatcagagtagccaaataaatcaaaaaaggagcccttgggataccagagacctagattttgggtgtgaactagatatctcaaaaattctcttaacgaccactaagtgacactcttttgggtttgcttgaaaacgagcacacatacacacactaagcatgatatctggcctagatgcacataaatatagtagagatcctatcattgatctataaagcttttgatctacagttttgccttcttcatttaagtcgagatgaccacttgaagccattggtgtcttggcgtgctttgccttttccatgccaaactttttgagcatgtcttgtgtgtacttggtttggcacagaaaggttccttccttgagttgtttaacttgaaaacctaggaagtacttgagctcacccatcatggacatctcaaacctatttgtcataaccctactaaattcctcacaaaaagtttcatcagtactgccaaatataatgtcgtcgacatatatttgacacacaaataattgattgtcaattttgcgagtgaataaagtagagtctacttttcgtatttcaaaaccatttttaagcaagaaatctttaaggcaatcataccaagctctaggggcttgtttaagcccgtagagtgccttgtgaagtaggtaaacatggtttggcttctttggatcttcaaagcccggtggttgctccacatagaccctctcttgtactagtccatttaggaatgcgctcttgacatccatttgatataacttgaaatcatggttagtagcataggcaattaatattctaattgactctaaccttgctaccgacgcatatgtttcaccaaaatcaagtccttccacttgagtgtagccttgggcaaccaaccg

SEQ ID NO: 5897 - DNA, 1061 bp, Zea mays
  Zm_smallRNAprecursor_1386
tcccgcaactgtctccctatctgcgcttgccccccagtgccggaggctgtgatggtcaccttcagagtctcccctccatctggagtcttctcggccaccactttcctgcaagaaaatttacaatccccatcggcctttttagcatcgccgatgattgtttctttgcttttgcctttatcggctgtgtttggccgaactaggactttcttgccctcgaagtcgatcatgttcatcggaaagggctctgtatccacctgcatttcctgaaatttcaatcgtccttcgttaatggccgattgaatctgtcgccgaaatacattacaataattagtggcatgagaaaatgagttatgccacttgcagtacgcacgacgttttagctcgtcggcggatggaacagtgtgatttattttaatgttgccatttttgagtaattcgtcaaatattttatcacacttaccaacattacactacaggaattcacttaattcccgtcggcctgaaaccgacgggaataagccctaaaccgacgggaataagtaattcccgtcggtttagggcttattcccgtcggtttcaggccgacaggcgtcccttatcggggataaggttatccccgtcggcggctgacgggaattattaattcccgtcggctagatagtggccgacgggaattaaggctaattcccgtcggttttgctggccgacgggcgtcacatattaattcccgtcggttccccaggccgacgagagttattaattaattcccgtcagccctacgtggccgacgagaattaactgggccgacgggagttagtaattaattcccgtcggttcgaccatagccgacgggaattaactgggccgacgggaattactctatactgctacaaaaacaacactaaattatgtcactatttctgcacacataacatatatcaaacataatataaatcacatataacagccacattacaaacacatatagagatacgacatccacaaacacatgcatttagacataaacacttgcatttataattaaaacatccaccaacgtg

SEQ ID NO: 5898 - DNA, 1175 bp, Zea mays
  Zm_smallRNAprecursor_1387
tctctttctctgtggtttatggtcgatttagttccattttggaagttgaacatatatgttcatatagctgcagcataaaagatatatgtaggcagtgcctattagtttactaatgttatgaagtagtggtttatgattgttgagtgattaatttggacatgattgatgaccatatttatgtgaaaaatatgatccagtaagtatataaaaagtgaaatgcatttcagtttatctgaataatatatagtagcacgaagtcatgagcagcacacttgtttccacatcaaaatatcaaccactacttcataaaggtatgtataattcacatcattgcatatatcttcacccacacaatttgagcattcaatgagtctaaaacaacaggtccgtgaacctttatcaaagctaaaggctctatgataaacaactgaaccataatcgcacaagaacagtaagatcaatgacgaccgttggtgggcgtgtaaaataccaatgtgacgcggtggcggaggattgacagcagcggccggctcgacgacactatcaacggcggcgccgattagggttgagttctcgcggggacaaatgaaggcgattcacactgccggaagggaggaaggagattaggaagttgcattgtaaagcgtaaatttaaaagaccaactcgagcaccttggaatccggacgacatagcgaccgcggacgtgagccaatgagacgtggggcgcgcaagattgacaacggcagaggctcgacgatgctgtcaacagcggcggcgattaaagttgagggcgtgcggcggaggaggacagcgaaacgcgctggcagcggcggatgaagaagaatcgccctggcgacccctgaagaaacgaggcgagtcggccaggaaggttgaccgtgcgggggttagggtatagaaatgtttgaccgcgtgggaagtggggtagtgggccaattcctttatttctggaacgtgggtcggctgaagtagttacgctaaatcactattatgtataaacagaagaatggaatagcgtaaacatgtgttgactaaggaagatatggttgaccacgtggaaagtgggcctaagccgctatttctggaacgagggctcgcggctgttactctgtttacgctaaaatgggtttctgtttacgctaaatcagttcgcttg

SEQ ID NO: 5899 - DNA, 1135 bp, Zea mays
  Zm_smallRNAprecursor_1388
cgtggaacaccttacagcctgctgaggtgtacttataatacttgctctaagtgcatgcaccgccacggggctagtgcgccaagtttagcctgccgtggatgcgtcctctttcctctataaatacagtcccatgtccatcgtccaaggcaaagctaaggtcctgcaaggggagagttcaaatatatcgcttcatcttgcctttttttcttttccttgtcccatctttcttcttggtcttgtgtgttaatttgctgttcttcttccagctcgatatatctcacttctaccacattgcaagaatctttgttttttttgcactggtgtctttaatttccagtagatgctaggattttgaaatcaagtgaaggctacctgaggttaattttcttgagaggagtatggagaagacgaagggatggacagatagagagagagagagagagagatgttagctagtttgattcatcctggatgaaaacacaaatgctcttgcgaatgagtgaagctgccagcatgatctagctctgatttggttggcaccatattagcaggcgtccacgcacagctagactagagtggcctcgcgcgctctcgtctggtctgtgtctcgctttgtgcctgcaaatcgttgttagatcatgcatgacagcctcattccttcacaattctggggcatgtattgctgatgacgctgcgccttcttgtttttttgctgcaactttgagaaagatagatccatctgcatgcttttttccgctgctatggtgtatggttgtgtgctgcagattttggatctgacttgtgagaaccgtcgacggacccctgcacacagtacgtgagacgatcgaggaggatggaggcacgcagtacgttttgttctcgatctctgctacagcatgtcatcttaattaagcctactggttgcatgcatgggtgaggattattcatcgctaagtttccatgtacgtagcatactatcacatgtacaatgaaataggcaaatagcctagacgttcttctcatgacgaccatgtctgccaattaaatatattgcaggtagtaaacctcaagtactgatagccattaattcttggttggagttcgacagagaagatcgaaaagacatgtatagaat

SEQ ID NO: 5900 - DNA, 1135 bp, Zea mays; identical to SEQ ID NO: 5899
  Zm_smallRNAprecursor_1389

SEQ ID NO: 5901 - DNA, 1185 bp, Zea mays
  Zm_smallRNAprecursor_1390
atatatgtggttgtgcaaaactccgaaatttgaaataggagacacagttgataattctacgctctacgcacgggcggcggactgcactactagttcatcggatgcgttagcgtgccactcctcatcttgtttccttgtacgtactagtgcaatccgtcagccgcacggctccagtccactccagtccagcaacagcgtcacctccagctccgaaaggcttatccttgcaacaaacatcgtacgaaaaaggcgcaggacaaaagaaaatggatcgaaatgcaacaaataaaaaagggcatcaaaatacgctgcgagtgagcgagacgttggcctccccatcccatatatatatagctatagctatccctcggttcttcaattcattcctcgctctctccatctctctaccctctccctctctctcggatagctagctcttcttcctccttcctccgtttggatcagacgagagggtatgtagtggtgcaccacgagttggtgaagctgccagcatgatctggttatgatggtggtggtatatgtaagatggatgtaatctatactactaccggcccctgtcactctctctctctcccccgtccctgactgtcatatatggatcgacgaatccaagatgagaggggaagggagagagagagagggtaattaatgagcaccaggaccaggtcatgctgtagtttcatctgctggtggccgcacatcgaaaaccctagctagctcaccctcctgcaattcatatccatgctgcactcgccagagaccaccagtcaagctagcttatttccgccgttgacgacgttgattaattatccgtgataataatggccttgtcgatctagtttcctctctctttttttattattatgcctttgcttctctcttggttcggttgtgtatattgctgtctctgtcttcgtcatcactgtgtgcctacaatcctgctcacgataatgcagatgggaagttgtgcattgccggaagtcttcttttcgaaggtaaaaaaaaaactaactcgacaactgttttgtagcttgaattaataagtgttgcaggtagaatacccaagattaccttcggctcaccttcggcggggatggttgcaatgcaacaacgaatacaaaagcgcaagcttcggagtaacagcatgtgcacatgaggggtgaa

SEQ ID NO: 5902 - DNA, 1185 bp, Zea mays; identical to SEQ ID NO: 5901
  Zm_smallRNAprecursor_1391

SEQ ID NO: 5903 - DNA, 1184 bp, Zea mays
  Zm_smallRNAprecursor_1392
tatatgtggttgtgcaaaactccgaaatttgaaataggagacacagttgataattctacgctctacgcacgggcggcggactgcactactagttcatcggatgcgttagcgtgccactcctcatcttgtttccttgtacgtactagtgcaatccgtcagccgcacggctccagtccactccagtccagcaacagcgtcacctccagctccgaaaggcttatccttgcaacaaacatcgtacgaaaaaggcgcaggacaaaagaaaatggatcgaaatgcaacaaataaaaaagggcatcaaaatacgctgcgagtgagcgagacgttggcctccccatcccatatatatatagctatagctatccctcggttcttcaattcattcctcgctctctccatctctctaccctctccctctctctcggatagctagctcttcttcctccttcctccgtttggatcagacgagagggtatgtagtggtgcaccacgagttggtgaagctgccagcatgatctggttatgatggtggtggtatatgtaagatggatgtaatctatactactaccggcccctgtcactctctctctctcccccgtccctgactgtcatatatggatcgacgaatccaagatgagaggggaagggagagagagagagggtaattaatgagcaccaggaccaggtcatgctgtagtttcatctgctggtggccgcacatcgaaaaccctagctagctcaccctcctgcaattcatatccatgctgcactcgccagagaccaccagtcaagctagcttatttccgccgttgacgacgttgattaattatccgtgataataatggccttgtcgatctagtttcctctctctttttttattattatgcctttgcttctctcttggttcggttgtgtatattgctgtctctgtcttcgtcatcactgtgtgcctacaatcctgctcacgataatgcagatgggaagttgtgcattgccggaagtcttcttttcgaaggtaaaaaaaaaactaactcgacaactgttttgtagcttgaattaataagtgttgcaggtagaatacccaagattaccttcggctcaccttcggcggggatggttgcaatgcaacaacgaatacaaaagcgcaagcttcggagtaacagcatgtgcacatgaggggtgaa

SEQ ID NO: 5904 - DNA, 1184 bp, Zea mays; identical to SEQ ID NO: 5903
  Zm_smallRNAprecursor_1393

SEQ ID NO: 5905 - DNA, 1050 bp, Zea mays
  Zm_smallRNAprecursor_1394
tcaacgctgattccgccgaaagtaaaaggcgaagaagctccaaagtcgttcctaagggaatgcagagcttacagcgaaaagtcaacgctgattccgccgaaagtaaaaggcgaagaagctccaaagtcgttcctaagggaagcttatagcgaaaagttagcactgatatgtgattgtttctaaggaaataatggctgtgattatggcttcggatatgcgtttggacattcatttgcacatcacattacatcatagcatttgcattcataaacattcatccaggcatatgtaggataatcatcatcatagcataagtggttgcttcggcaaaaagaaaaaaaaagaagagcttcttcgtgtacgaaaagaagagcttcggaagaaagggaaatgttgttttctatgcttcgctgtgtacgaaaagaagggaaggtgttttttcgccttcggctcaaaaagataatttcgtccacatcaaagcacctctcatacattaatggaaggataagagcatattacaagggacttcagcttcggcgtcattctttttaaccatcggcttcggcttcgtcatcctacatgaattaagttgttgtaagtcaaaatcgagcttgaaggaagaggtaagcacaaggtatgatttcttactggttcaagatgactccgagcttcgtctccagccttttctcacccgccttttgtccatatcatctttacaaatctattggaaatgcttcgggcgagatcaggaatgtcatctagcattgatggtgataaagtgaaattggtcctattgacaatctttccatgatcgcagctagcttttaggaaagctgcagcagtgccccgagaagctacccaggcgcagaagtcaccgtgcccggctataacttcgtcaagctcatcaatttcaccctcaatatgttcgaaggtctttggtaaatcttcagctgacggggtgaatttctcactgctagctccaactgagtggaaaatttttcttagtcgttgaatacatttgttgctaaattccaaacatttgtcttgaag

SEQ ID NO: 5906 - DNA, 1071 bp, Zea mays
  Zm_smallRNAprecursor_1395
gaaggttccccaagacccatcgcaaaacactgtccatacttcggcatctttatttgtttcttcatcctgagcccctggtgtccaatcggcgataaaatctgccaacgcttgggactggatcgaagatctatgcacataatcaatgcaaaattcattgagctctgcagcccattttccaatccgcccagtagcttctctatttctcataatatccttcaacggctgcgaagaaggaacaataacattgtatgcttgaaagtaatgccgaagcttcctggatgccatcaaaacagcatataacaccttctctaattctgtatagtttttctttgatatactaagaacttcagatacaaaatacactgggacctgcttcttgacttggccgtcaagcttctcctggacaagtgctgcacttaccgctgagtgcgaagctaccacatataataacaacggagcccctggcgttggtggagttaatgttgttaaatctatcaaatattgcttcaggtcctcgaaggctttttgttggcttggtccccatcgaaagacttcgactgatttcaatacttcgaagaatggtagatttctttctgctgatctggatataaatctattaagagatgccagcctccctgtcaatctttgggcccccttttttgtagttggtggctccattcgaagtatagcttcaattttacttggattagcttcaattccctttgttgaaaccaagcatccaagaaatttccccttcttgactccgaagacacatttttctggattcaactttaggccagcttgcctaaaactggcgaaggtctcttgcaaatcagcaatgtgattttcctgcttcgtgctttttacaatgatatcatcaacataagttagcacatttctgcctatctgagattgaagaaccttcgcagtcattctgttgaaacttcctccagcgttcttgagcccctcaggcatccgaagataacaatatgttccactaggggttatgaaactggtctttggctcatcctccttcttcatccaaatttaatgatagcctgaataacaatc

SEQ ID NO: 5907 - DNA, 1176 bp, Zea mays
  Zm_smallRNAprecursor_1396
ctctctttctctgtggtttatggtcgatttagttccattttgggtgttgaacatatatgttcatatagctgcagcacaaaagataaatgtaggcagtgcttattagtttactaatgttatgaagtagtggtttatgattgttgagtgattaatttggacatgattgatgaccatatttatgtgaaaaatatgatccagtaagtatataaaaagtgaaatgcattacagtttatttgaataatatatagtagcatgaagtcatgcgcagcacacttgtttcctcatcaaaatatcaaccctacttcataaaggaatgtataattcacaacattgcatatatcttcacccacagaatttgagcatacaatgagtctaaaacaacaggtccgtgaacctttatcaaagctaaaggctctatgataaacaactgaaccataatcgcacaagaacagtaagattaatgaagaccgttggtgggcatgtaaaatacctatgggacgcggtggcggaggattgacagcagcggccggctcgacgacactgtcaacggcggcgccgattagggttgagttcgcgcggagacaaatgaaggtgattcacactgccggaaggggggaaggagattaggaaagttgcattgtaaagcataaatttaaaaaatcaactcgagcaccttggaatccggacgacatagcgaccgcggacgtgagccaatgtgacgtggggcgcgcaagattgacaacggcagcggctcgacgatgctgtcaacggcggcgacgattaatgtagggcgtgcggtggtggaggacggcgaaacgcgctggcggcggcggatgaacaagaatcgccctggcgacccctgaagaaacgcggcgagtcggccaggaaggttgaccgcgcgggggttagggtatagaaatgtttgaccgcgtgggaagtggagtagtgggccaattcctttatttctggaacatgggtcggctgaagtagttatgctaaatcactattatgtataaacggaagaatggaatagcgtaaacatgtgttgactaaggaagatatggttgaccacgtggaaagtgggcctaagccgctatttctggaacgagggctcgcggttgttactctgtttacgctaaaatgggtttacgtttacgctaaatcagttcgcttgcg

SEQ ID NO: 5908 - DNA, 1171 bp, Zea mays
  Zm_smallRNAprecursor_1397
atactgaaatctggccaatattaaaaatctgacatggctgcgcttatagccatgtttgagtgatcaaatctatttggattggcttgaaattcagtgtacttgctctatgcatatgatagcaaagtctgtgcaaatttcataatcattggataagtgaaacttcttgattaagtcaatcttgtcagtacaaacacatcagttttcagcatgtacctactatgggagatgttatggctggtagcacatatgaagtcaaatgagtctcaactttttacagctgttagcagacttattaaagcacatctccaccaattttcgtgatcataggatctgtacatcaaaatttatggatgtttctttggagtatatagaatctgtcataagtgacaagtatttgaaatattgaaagtcactttgattggaagactctcatataggataaatcacataagttgtttgagagaccatagtttggtttttaattgaactataatcatgaaaagtgaaggggtacaaggatatttgttgagaaatattttggcacttatcttggtactccaagttgaagatgaagaccaaagatgatcaaaattgaggttatcatataacagattgcataatcttctttcttacatatggcaatccaaatgcttaaattggttgtaagtatttcttggcacatttcaatttgattactctattattgccatgatctagacataaaagagaaaaaccccgtgttcatgaatgaataaggtgctaagtaagaaattcaaattcttaaagcacttatcaaaaggggaattctctatatgtgtagagttgtgaaactaatgtttttacctaagtgatctatgtagtttcacagcatgagaatgagtttctcaaatggactatgcaattaaacgtataaagaagaacaatccaaaactatgtgatgtattctctcttgtacatttggatttatttcttctacattaaatactcaccatgatatgatttaaaattagcctttgaacttaatcaattaatcattcatgtttaatttgttaaaattaagcattgaagattaagagaaatttagtttatataataaggtttccttgttttagtaactgcctactttatatattcaaagtgttataaaagggaaattggtgcttatattact

SEQ ID NO: 5909 - DNA, 1088 bp, Zea mays
  Zm_smallRNAprecursor_1398
cccctttgtgtttcgtctcacgccgacccatctgggatgggacacgcagcgacaatttactcgtcggtccagggaccccccggggtcgaaacgccgacacctcttttctttgtccaacactgtcacctctgcctcaagcggtctgcgcttgatgaaagacattttcaaacctctggtcttttcatgcaatgtcttcatcacaactgggattatcatgtggccatgaaacctctcaagtgcaattctttgacgcaactcaaactttaccataagcatttgtcgaatcttatctggcaactccaccaaatgaagcccctttgtttttctgatccatgcattgaatgactccaccaagttattgttcacatagtccaccttgcacccttcaccaaatttgcttctagcccatagatatttgtgatgactttcaatgtatatttttaacctagagtttgtgtacagttgattcacatgatagttatgctttctaaggctatatgtcaatgatgttggccataagttgtcatcaatcaactttcccttgaatgatttgcccaagtttgaagcaaaatgcttcatgcattccctatgctctactccaggaaacacataatccactgcagtttctaaacccttgcaagcatctgtgtgtatagtcaatccatgtggaaaccctataacctgacgcaaattctgttggaaccatgtccaactttttgttgactctggctcgaggacaccataagccattggaaagagccaattatgtgcatcaatgacacaagcagctactaactggcctctaaacctcccataaagagctgttgcatccactgctaaataaggcctgcaaccagctaagaacccactccaacatgctttgaatgaaacgaacacccttctaaaacattctttgttcaaaatctttccattcactttataatccaccgtatgatggtcaatctcaacaacactacctgggcacgccttctccacttcaactttgaaagtgaataataagttaaagctttccttctatgggccataaatcttgtcaagagccgtttccttgccataatacactctca

SEQ ID NO: 5910 - DNA, 1139 bp, Zea mays
  Zm_smallRNAprecursor_1399
atagtgttcttcacctatttcaagatcatctccttcattccaatgtttgcatcttgttgtccacacttgacaagcgaactataaaatgtcttgaccttctcaatttccttcgtggcctgctcagaaactgcctcgctactaccagatggtttaactaaatccacatttcagttgtttatctccacatacacctctgccacaccatcctcagtaatgcattcaaacatgtatagacaagtcttatcatcagcaagccttctcaatccattgcttaactctgctccagtaaataactagtgaaatccacaatgacttgttcactcagagcaacatgatccaacaaataaccctttagttatagcaagctcaagttgtccctgtctatgtgagagacattgcaatagagccatcaacatagttcaaggaatgcccatcaaactcaaattcgcctccaaaatggaatctaagactatctccaacaacttactcatactcatacacatattcaaactacactctataaacaatgcaaaaatagtgttttggtgaccatataggtgaaccgttgtatattgcaccgatatggtcatccaaaacactgttttgcactatttcacattgtacattgcactgtttgtagagtgtagtttgaatatgggtatgagtatgagtaagctgctgaagatagtcggaatgaagtctagtggatccataggcctctcaatagattgaatagagttcatgaaacccctatccacaaaaactagggatgtcaatgggtcgagttcaggtcgggtggagcaaaaacccgcccgcgatcacacccgtaaagtctacctaaactcgcctgcgatggcacccgcgggtgcaattctaaacccgtacccaaacccatcaggtttcaggtgggttttgggttacccgcgggattttactcagtgtatacttttaaacaataattcagctataaacaattaaatatcagcaataattgagttatatatatgattttaagccttctcacatttagcaataacaaaacacttcatgaatcattagccaagttacttattcaaaataattaccattgtatctgtcgggtgtgataattaggggtacccatattatccctctaaaaa

SEQ ID NO: 5911 - DNA, 1134 bp, Zea mays
  Zm_smallRNAprecursor_1400
aagatggactatgataagaagctgaagaagctcgcccccacgaagaaaattcaaaaggagaccagaaaccaaggaggccaagctgagtggaggaagaaggctcccccaacaccatctcccgccaggatagagaatttgtccgacatcgaggatatgtccctagctagccttgatgaccttctcaaggaatttggggacactttagaaaaagagttcggtagtccctcgaagaacgctcgcgtgtagtacgacttgtagtagccatatgcttgtaatgtattggtgtaatgaataaaatgacttggttgaaaacaattggcatgtgcataatagtgactctctccccctggcagatggcttcggataaaaccatgcctaccgcctccgggattggagcagggtttcccctgagagctaaaagggaagccgacagagaggaaagtgagacccacctccccgcacctccagaactacccttagatctagcccaagttctagccaaccaaacccgactcatcgaggtcctcactcgaagtctggaaaatcaacgtccgaatggtggaagaccacaagacaggatgggagatttcctaaggctcaagcctcccacgtttgccggatctagcaatcccctcgatgctgacgattggctgtgcacgattaaaagaaagctagaagccatcggatgcccagaaaatcagcgtgttcaactggctgctcatcaacttttcgggatggccttagcctggtgggataccttcaatgtcaccatcagagatgctacctgggtagagtttgaaacagctttccgggagcaccatgtgccccaagggatcgttcagctcaaggaagacgaattccgggaactaactcaagacggaagatctgtcagtgaatatgtgcacaagttcacggagttggcccgctacgcgccagatgacgtcagcactgaagtcaagaagatggcccacttcctgaagggactcagaccagaactcaagaccatcctgggccagccaagacttcctcagtttctcgcacctctccaacaaagccatgcaagtggaaagggcaaaggaggaagaaaaaggccatctcaagaggaaattccaagtcctccgggctcagcagcaa

SEQ ID NO: 5912 - DNA, 1040 bp, Zea mays
  Zm_smallRNAprecursor_1401
ccaaaacaattaaggtcaaaaagataaacatttgcaatagaaaatttcttttgaatgattgtatgtagatggtccccctaaatgtgtgcacgattgtgaatccaatgttttgacataatatgtcatgtgagcaacacatttagagatagtgacaaaaaccatactgaatacaaccatccgaggggtgcaagagtgtcataacaggagttgtgatgcatatgactatctctaaatacacatcatttttacttcatagcaaagcaatcattacaaactgatgggacaaaagatgatggccagaagaccatcatatcactttgaataataacccaacagttttatttcatacaatgataagaggatacaagccacaacagtgaccaaaacaaaaataatctaaaagaaatacatacccaagaactacaaacagaatgactagaaattttggattttctccccctttttggcaacaagtacaaaaaactaagagagagacatggatacatgaatcaatatcctccaggaggaggataggacggaggatatgatggagggtatgatgtgtagtcagggaagagggtcctcatcacgtcttcctcgaatgaggattccctaggtggctcatcagccgcagaaaaaacagaagccgaagatgtacgatgatgaggagtaggtggagggtggtgatggtaaccagagccggatggcctagggtcaccaggagtgggtccctgacccgagtagagaggcggagggtgagaggatgattgacccagatccccatggtagggaggcgggacaaactgctcgcgatcatcaacgtaggcttcttcttcttcgtcgtcgtctgctgacataaatggcaccccgtaggcctgtcggtgccactcattgatctccgggggaggaggatggagaggcacgtctggcgagcgaggggtaaagggcatacccatagtggaagcttgacgacgaagattgtcgttagtttcccgctgacgccttgccagctcatgtacatcagcagaaatgtttcaaca

SEQ ID NO: 5913 - DNA, 1154 bp, Zea mays
  Zm_smallRNAprecursor_1402
ctgaatcagagtagccaaataaatcgaaaaaggagcccttaggataacacagacctagattttgggtgtgaactagatatctcaaaattctcttaacggccactaagtgacactcttttgggttagcttgaaaacgggcacacatgcacacactaagcatggagcctagatgcacacaaatatagtagagatcctatcattgatctataaagcttttgatctacagttttaccttcttcatttaagtcgagatgaccacttgaagccattggtgtcttggcatgctttgccttttccatgccaaactttttgagcatgtcttgtgtgtacttggtttggcacagaaaggtcctttccttgagttgtttaacttgaaaacccaggaagtactgagctcacccatcatggacatctcaaacctatttgtcataaccctactaaattcctcacaaaaagtttcatcagtactgccaaatataatgtcgtcgacatatatttgacaaacaaataattgattgtcaactttgcgagtgaataaagtagagtctactttttctatttcaaaaccattattaagcaagaaatccttaaggcaatcataccaagctctaggggcttgtttaagcccgtagagtgccttgtgaagtaggtaaacatggtttggcttctttggatcttcaaagcccggtggttgctccacatagaccctctcttgtagtggtccatttagaaatgcgctctttacatccatttgatatagcttgaaatcatggttagtagcataagcaattaatattctaattgactctaaccttgctaccggcgcatatgtttcaccaaaatcaagtccttccacttgagtgtagccttgggcaaccaaccgtgctttgtttcttgtaaccacgccatgttcatcttgtttgttcctaaagacccattttgtcccaatcacattttgtttgggtctttggactaaggaccaaacttcattccgggagaagttgttcaactcctcttgcatgacaattatctaatccggatcacccaatgcttcttcaaccttaagtggctcaagagaggaaacaaacgagtaaaattcacaaaaaatagctaaacgagatcgagttgttacccctctcctgatgctacccagg

SEQ ID NO: 5914 - DNA, 1050 bp, Zea mays
  Zm_smallRNAprecursor_1403
ctaacgaggagaatgcaaactttgatattcttgtgcaacatgacctgctaaacaaggacatatccaatttgagcatggcttggctttatacttttcttataggtgctggctcttccttgaacttatcatcggtggctttataggaataaaaactcgtggtgtggcttcaataacttgcagtacatttcacaagtttattcccataggttgtagcagacaacgtgctgctctgtccaacatgataagttctgtagggcatcagctgtggtgagttgatgcttgagagagaaggttgtccacatgaggttccacatgagcctttccttgcactgaacttagctatgtgtgatccatgtgcaaagaacaaaaatatcgtgatgtctttcaaagaatcgcttcctctagtgaggatgatctgattcattagatccatgttggaccattcactggccattggagaaacacttaaagggcttgtttgggagcaagtggaatggatgggtttgagggggctagaatccctcactattcaattttgaataatgagggattctggccccctcaaacccatgttacccatccattcccattgcttccaaacaagccctaaagcttaaatgctgcataaaaataaatattagactggcaccagctattccataaagataacttctaatgtcacaactcacaagtagcttgtgagtgccaattatgtgggtatccttgtgtaacagtgtttacaatcctgttgtttcttacaaaaactgtttacaattctgtcatttaggatcaacgttttcttatcagttgatcgttgctggtcgccagagggctgatcagccgatctaattgattaattgaacgatctgattaatcggtttcttcaaccatatggaagggaggcaccagtggagagttgtgtcggccgggaatggaggcgtgctggtgttgtgctggcatggaagggaagcgtgctggagttgtgttggcgaggaagggaggtccgtgcagaggagagagaaccacgagggactgagggagttgttggct

SEQ ID NO: 5915 - DNA, 1136 bp, Zea mays; identical to SEQ ID NO: 5040
  Zm_smallRNAprecursor_1404

SEQ ID NO: 5916 - DNA, 1064 bp, Zea mays; identical to SEQ ID NO: 4679
  Zm_smallRNAprecursor_1405

SEQ ID NO: 5917 - DNA, 1063 bp, Zea mays; identical to SEQ ID NO: 4680
  Zm_smallRNAprecursor_1406

SEQ ID NO: 5918 - DNA, 1040 bp, Zea mays
  Zm_smallRNAprecursor_1407
aaaaaagataaacatttgcaatagaaaatttcttttgaatgagtgtatgtagatggctccccctaaatgtgtgcacgattgtgaatccaatgttttgacataatatgtcatgtgagcaacacatttagagatagtgacaaaaaccatactgaatacaaccatccgaggggtgcaagagtgtcataacaggagttgtgatgcacatgactatctctaaatacacatcatttttacttcatagcaaagcaatcattacaaactgatgggacaaaagatgatggccagaagaccatcatatcactttgaataataacccagcagtttaatttcatacaatgataagaggatacaagccacaactgtggccaaaacaaaaataatccaaaagaaatacataaccgaaagaaccataaacagaatgactagaaattttggctagaaattttggattttctccccctttttggcaacaagtaccaaaaacgaagagagagacatggatacatgaatcaatatcctctaggaggaggataagatggaggatatgatggagggtatgatgtgtagtcagggaagagggtcctcatcacgtcttcctcgaatgtggagtccctaggtggctcatcagccgcagaaaaaacagatgtcgaagttgtacgatgatcaggaggaggtggagggtggtgatggtaaccagagccggatggcctagggtcaccaggaatgggtcccggacccgggtagggaggcggagggtgagaggatgattgacccggatccccatggtagggaggcggggcaaactgctcacgatcatcaacgtaggattcttcttcttcttcgtcgtctgctgacataaatggcaccccgtaggcctgctggtgccactcattgatctccgggggaggaggatggagaggcacgtcaggcgagcgaggggcaaagggcatacccatagtggaagtttgacgacgaagattgtcgtcagtctcccgctgacgccttgccagctcatgtacatcagcagaaatgtttcggca

SEQ ID NO: 5919 - DNA, 1048 bp, Zea mays
  Zm_smallRNAprecursor_1408
caactgagcacaacaagcaccagcagctatgtattcagcctcggcagtggaaagtgcaacacaattttgcttcttagagctccaaagacactagagaccgcccaaggaattggcaagtccccgaggtgctttttcgatctactttacaaccggcatagtctgaatcagagtagccaaataaatcgaaaaaggagcccttaggataccagagacctagattttgggtgtgaactagatatctcaaaattctcttaacggccactaagtgacactcttttgggttagcttgaaaacgggcacacatgcacacactaagcatgatgtctggcctagatgcacacaaatatagtagagatcctatcattgatctataaagcttttgatctacagatttaccttcttcatttaagtcgagatgaccacttgaagccattggtgtcttggtgtgctttgccttttccatgccaaactttttgagcatgtcttgtgtgtacttggtttggcacagaaaggttccttccttgagttgtttaacttgaaaacccaggaagtacttgagctcacccatcatggacatctcaaacctatttgtcataaccctactaaattcctcacaaaaagtttcatcagtactgccaaatataatgtcgtcgacatatatttgacaaacaaataattgattgtcaactttgcgagtgaataaagtagagtctacttttcttatttcaaaaccatttttaagaaagaaatccttaaggcaatcataccaagctctaggggcttgtttaagcccgtagagtgccttgtgaagtaggtaaacatgatttggcttctttggatcttcaaagcccggtggttgctccacatagaccctctcttgtagtggtccatttagaaatgcgctcttgacatccatttgatatagcttgaaatcatggttagtagcataggcaattaatattctaattgactctaaccttgctaccggcgcataggtttcaccaaaatcaagtccttccacttgagtgtagccttgggcaaccaaccg

SEQ ID NO: 5920 - DNA, 1125 bp, Zea mays
  Zm_smallRNAprecursor_1409
tttgtttttcggatcagtacccatagggttaaacaagccaaaattgtgaggacgaagtggtggaaactcaaaggggagacatccgaaatttttagggaaagagtttttgtggagggcacttggtccgaagaagaagatgcaaacatcatgtgggtgaagatggcaacttgtattaggaaggcggtgttagaggtgtttagagtgaccaaagggagcaccggtgaatctaaggatacttggtggtggaccgaggatgttcaaaaggcaataaaggagagaaataatgttataggagcttgttccatgatagaagagcggtcaacatagagaggtataaggtggcaaagaagactgtaaagcaagctgtgagcaaggcaaagggtcgagcctatgatgatctttaccgaagattaagttcaaaggaaggggagaaagatgtctataagatagctaggatttgggaaaggaagacaagggacctcaaccaagttaaatgcattaaggatgagatggatcaactcttggtgaaaggacaagacatcaaatagaggtggcagaggtatttgacaatcttttcaatggtgagaatgagactatggacatccaattggatgactccttcgatgatttaaatagatgctttgtacacaggatccaagaatcagaggtcaaaaaagctttaaagaggatgaaagagggcaagacgatgggcccggatggtatcccaatagaggtgtggaaatgacttggggatattggtatcgtttggctaaccaagttgttcaaccatatttttcgatcaggcaggatgcccgatgagtggaggaatacattagtaccaatctcaagaacaagggagatattcaaagttgtaccaactatcgagggattaagctcatgagccacactatgaagctatgagagagagttattgaacatcgcctgagaggaatgacgcatatcatcatgaaccaatttggattcatgcctagaagatcaaccatggaagcaattttcttaataaggcaggtcatggagcgatataaggagcagaagaaggacctacacatggtttttatcgacttggaaaaggcctatgataaaatacttaggaatctcatgtgg

SEQ ID NO: 5921 - DNA, 1078 bp, Zea mays
  Zm_smallRNAprecursor_1410
acgtaaagaaagttttgtaaattcaatacttttggtaagcaaatgcttgtggcttatttttgttttggtcgactatgcaggttggtaaggcatattttgaattagttgattatttggaagctgatcattattttgagctggcacaccgactatcgccttgtacgcttgatggaatggacatctattctactgttctttatgtaagtgaaatcagtgcattgggcttggctacatttattggcacatttatctccaagctcacaagcttcttatgcagcatctgaatgaggaaatgagactaagctaccttgctcaagagcttatttccattgatcgactatctcctcaagcatggtatgtatttttatctcagaaagagtgacaatgttagggccttttcttgccacactattttgattttatttttttaactccatcttttaacacatttttttttgggttttttaaggtggtgccctcagttttgctggtgtactcatttttacccttagtcgtgtttttttgctcagttttgcccttccagtgctatagaacagaaaggcaaaactgagcaaaaaacacgactaagggtaaaaatgagcacaccagcaaaaccgaggacaccagcttaaaatatcctttttttatttttttgtggggaggggagagagatggggttaggttaatgttcttggttttgactatttacatgcagtattggtttcattgcagtgaaaaacagctggatgagtctaggccacaaagccttagtctaaaagctgggttctcatttttcatttctaatatatctgtctggaatatgcaacaggtgtgcagtgggcaattgctttgccttgagaaaagatcatgagactgctttgaagaattttcaacgttcggtacagcttgactcaagatttgcatatgctcacactctatgtggtcatgagtatgttgtggctctcataaatattctatatgtttctattttcatgctccagatcttatatgcaaatctgaagctacatcctgaaaattcatgttcgagataatcatttcaaaatttctaaatgaaccc

SEQ ID NO: 5922 - DNA, 1042 bp, Zea mays
  Zm_smallRNAprecursor_1411
tgcagatgtagatgagatatatataagagcaattcaaataattaatactagtcttgtctagtcctgtcaagaaaaatgcacctaaaaacttaaatatctatatattcatctcaatctatatgaattaaaacagtttggtttgtagaatttaaactaaattctacaccaaatcacttcaatatatatagattgagtgaatatatgtatggatatctaaacaaggccttcatatgtgtcatttaatataccacagggaggaatgatgccttaccctcttctgcatatattcgatctccgcgagcagcagctcatgctgacaaaaactcaaaggtgcaaaacgttaagtattatcaggatcagagcgaggtatatggtaatggcctataattttaggcccaaagcaaattcacaggacgtctcaactatttgggtgtatatacatcaaataatcagctgactatatattactgtagtggtttgtatagatatactccctccgtttctttttattagtcgccggatagtgcaaatttgtactatccggcgactaataaaaagaaacggagggagtacctttttggaccggatcctcccaatgcctctttcaagcctgctttcaaggccctttagctcctttgcagtcatattgccagtagattcacccatcaggtgcctgacaagtaggagtagaatttaccaaaggaacggtcacttccgggtttttttggccaaaattaagtcacttccgtataaatgttgtagtgcctatcctatgcaaacggataaaattagaacagttgcaggaactagttatgaattatgcgccatacctgtttgaattctgcaaggtttgtatctgctggcgcagttttgccgcttcttgctgaaagtattgctaaaaaattccaatgtgacgtgggatcatccgttaaaaaagatcggaagcaataacaagttttaactttatatatatatatatatatatatataaaagtagtgtgtgtattatattaacatttgttagttgtttcacacgtacgcg

SEQ ID NO: 5923 - DNA, 1034 bp, Zea mays
  Zm_smallRNAprecursor_1412
gatgtagatgagatatatataagagcaattcaaataattaatactagtcttgtctagtcctgtcaagaaaaatgcacctaaaaacttaaatatctatatattcatctcaatctatatgaattaaaacagtttggtttgtagaatttaaactaaattctacaccaaatcacttcaatatatatagattgagtgaatatatgtatggatatctaaacaaggccttcatatgtgtcatttaatataccacagggaggaatgatgccttaccctcttctgcatatattcgatctccgcgagcagcagctcatgctgacaaaaactcaaaggtgcaaaacgttaagtattatcaggatcagagcgaggtatatggtaatggcctataattttaggcccaaagcaaattcacaggacgtctcaactatttgggtgtatatacatcaaataatcagctgactatatattactgtagtggtttgtatagatatactccctccgtttctttttattagtcgccggatagtgcaaatttgtactatccggcgactaataaaaagaaacggagggagtacctttttggaccggatcctcccaatgcctctttcaagcctgctttcaaggccctttagctcctttgcagtcatattgccagtagattcacccatcaggtgcctgacaagtaggagtagaatttaccaaaggaacggtcacttccgggtttttttggccaaaattaagtcacttccgtataaatgttgtagtgcctatcctatgcaaacggataaaattagaacagttgcaggaactagttatgaattatgcgccatacctgtttgaattctgcaaggtttgtatctgctggcgcagttttgccgcttcttgctgaaagtattgctaaaaaattccaatgtgacgtgggatcatccgttaaaaaagatcggaagcaataacaagttttaactttatatatatatatatatatatatataaaagtagtgtgtgtattatattaacatttgttagttgtttcacacgta

SEQ ID NO: 5924 - DNA, 1152 bp, Zea mays
  Zm_smallRNAprecursor_1413
gcaaaatcccccaaggatgtaaatgtaaaagctgagaacgcaccatcgagtgccgaaaagtaaaaggcgaagaagctccaaagtcgttcctaagggaatgtagagcttacagcgaaaagtcaacgctgattccgccgaaagtaaaaggcgaagaagctccaaagtcgttcctaagggaatgcagagctgatgtgtgattgtttctaaggaaataatggctgtgattatggcttcgtatatgtgtttggacattcatttgcacatcacattacatcatagcatttgcattcataaacattcatccaggcatgtgtaggataatcatcatcatagcataagtggttgcttcggcaaaaagaaaaaaaaagaagagcttcggaagaaagggaaatgttgttttctatgcttcgctgtgtacgaaaagaagggaaggtgtttttttgcctttggctcaaaaagataatttcgtccacatcaaagcacctctcatacgttaatggaaggataagagcatattacaaggtatgaacaaaattcattaaagacaagttcagttacatttacaaaagttatctcaaaagtttcttgagtctgtctacagtctactcctatttaatcttcaagggacttcagcttcggcgttattctttttaaccatcggcttcggcttcgtcatcctacatgaattaagttgttgtaagttaaaatcgagcttgaaggaagaggtaagcacaaggtataatttcttactggttcaagatgactccgagcttcgtctccagccttttctcgcccgccttttgtccatatcatctttacgaatctattggaaatgcttcgggcgagatcaggaatgtcatctagaattgatggtaataaagtgaaattgggcctattgacaatctttccatgatcgcagccagcttttaggaaagctgcagcagtgccccgagaagctacccaggcgcagaagtcaccgtgcccggctataacttcgtcaagctcatcaatttcaccctcaatatgttcgaaggtctttggtaaatcttcagctgacggggtgaatttctcactgctagctccaactgagtggaaaattttcttagtcgttgaatacatttgttgctaaattccaaacatttttcttgaagg

SEQ ID NO: 5925 - DNA, 1195 bp, Zea mays
  Zm_smallRNAprecursor_1414
tctgatttttcagcttgaattctttttcatgaacgcgatcaactaaagaagtataagagagaaaaagaagagagcaaagcgagctgtgagtgagacaaagggtcaagcctatgatgatctttaccgaagactaagtacaaaggaaggggaggaagacgtctataagatagctaggattcgggaaaggaagacgagggaccttaaccaagttaaatgcattaaggatgagatggatcgactcttggtgaaaggacaagacatcaaacagaggacatccaattggatgattcctcttttaaggcagaggtattttgacaatcttttcaatggtgagaatgagactatggacatctaattggatgactccttcaatgatttaaatagatgctttgtatgccggatccaaggatcagaggtcaaagaagctttaaagaggatgaaagggggcaaggcgatgggcccgaatggtatcccaatagaggtgtggaaatgccttggggatattgctatcgtttggctaaccaagttgttcaaccatatttttcgatcaaacaggatggccgatgagtggaggagtacattagtaccaatcttcaagaacaagggagatattcaaagttgtaccaactatcgagggattaagctcatgagccacactatgaagctatgtgagagagttattgagcatcgcctgagaggaatgacgcatatcaccatgaaccaatttggattcatgcctggaaggtcaaccatggaagcaattttcttaataaggcaggtcatggagcgatataaggagcagaagaaggacttgcacatggtttttatcgatttggaaaagacctatgacaaaatacctaggaatctcatgtggtgggtattggataagcataaagttccaacaaagtatgttacgctcatcaaggacatgtacgacaaggttgtgactagcgtccgaacaactgatggtgatacaattgttctcccgattaacataggactacatcaaggttcagctttgagcccttatctatttgccttaatgatagatgaggtcacgagggatatacaaggagatatcccttggtgtatgcttttcgctgacgatgtagttctagtagatgaaagccgggaaggagtaaatagaaagctagagttatgacgtcagaccctagagtcaaaaggatttagaatt

SEQ ID NO: 5926 - DNA, 1105 bp, Zea mays
  Zm_smallRNAprecursor_1415
ctactcaaccttttttctctctctccttttctgctaaagaaaactctacttaattaagctaataatgtcatacatatatatccacagtaacatgctactcgctgtaacagtacatcggatgaataaatatacggtcaacaaggtaaaatggttctttaaaaaatatatctgaatcctgagtgcatcgcattttcttttctcaccaaacacgtggatcgagtcaccttcccgttggattgctggaagaagatcaacaggaagggaaacgatagtcagtagtgctgcctgatctggaccaactgactagttcagttcacccgttcgcggacattctgcacgcagtacgcacgccgttttcccaagcagctgccgaggtttactttagccggttgcagtgttttaagcaccttgtttgaaaggggccagtgcttccatgagcacacaagatatacaaaaccgtggccttcagttggctcgctccggattaaacaatcccttaggccttgttcgtttatgtcggattgcacccggaatcattccacctaatcaaagtttatataaattagagaaacaatccggttaggaatcgttccgacacaccaatccggcagaaacgaacaaggccttaaacaaaaggacttggagttggggattctcagggttccttagctctaaaagcaacctttcacctacctgtacccgcgggtaaccgatttctgtgttccatgggcattataaatgttatctgaagtgaaggtacctgtgtcatgttgagttcactggttgtaaagccattccgaagggcatagccatggtatgttcaggagcatcatatcctactcgaacaacttggtatcacatgacctctacatcttatggttcgtcttcaagtcttgattctgttacctgttgtttgtaggatcgccaaagcgaggatgttaactacgaagaggtcggctctttttgccatagcactctagttgtagtcgtggtcgctttgctctgctgagatcttcacactttcccacacgcaggagtttgtcgtgaatccccggggcaacaagctgttcgtttgcagctggacaccacagcaggatcgccagcc

SEQ ID NO: 5927 - DNA, 1041 bp, Zea mays
  Zm_smallRNAprecursor_1416
ctcggctgcacacgagcgcgaggggagaaagattattaatcaactgattataattaagcatgatatgcacggcgtatgtgcatgggcagatcagcgtgtctgtgtgttagtaattaagcacctttcaagtctggcgcccggcgttctacccgggttttattcagcctgttgatgatctcgttacccgggatttttgctacataattacgtatagcacatgtgtgtgagtgtatagctaggaatattgtcgctcaggcgtgagtattatttgctagctacaggcgcaggataaaaaaaatctaggcgagaaataaatttaaacggacacaccaacgatataaacaaaaaaaacaaaaaaaatgcaaactagggggcttgaacccacaaccacatggttaaaagccttatgctctaccaagtgggctagatgggctttgtgctcatgtctgcaacaaatattttaataacacaaccgagctcggcgccaagatctgtggcgccgagctcggttccacgtcgacgccacgcgtctgggttgtgccaacgcaacacgacctcggcgccatagcctatgtcgccgagcaaagggtccaaaactgtatttaaaatttttttaggtctaaacgtgattttacttttgtttaagggctaaaatacaaaaaaattcggggcaagcgcggtcgctgcctttcgccgcgctccaaacaatgctgccatccttgggcaggagaagctccagctccagcctccaggacgcgcgtgtgcgtgcatccggccctggccccgtccgtctctggacgaccacgatctgcctccgcaggtggtccgatgcatccggcacgcgcggaccccacacgcggtggctatcctgagctcgacacgcacgcctgtgcacgttaggcgggtggcggtgcactgctccgtcggtccgtccctgaaattcggttgcatcggacggttggccctgtgaagcaccagtagggacgatgcactgcacagtagcctgctcgctggcggatggccaggcccgagttcagggct

SEQ ID NO: 5928 - DNA, 1040 bp, Zea mays
  Zm_smallRNAprecursor_1417
tcggctgcacacgagcgcgaggggagaaagattattaatcaactgattataattaagcatgatatgcacggcgtatgtgcatgggcagatcagcgtgtctgtgtgttagtaattaagcacctttcaagtctggcgcccggcgttctacccgggttttattcagcctgttgatgatctcgttacccgggatttttgctacataattacgtatagcacatgtgtgtgagtgtatagctaggaatattgtcgctcaggcgtgagtattatttgctagctacaggcgcaggataaaaaaaatctaggcgagaaataaatttaaacggacacaccaacgatataaacaaaaaaaacaaaaaaaatgcaaactagggggcttgaacccacaaccacatggttaaaagccttatgctctaccaagtgggctagatgggctttgtgctcatgtctgcaacaaatattttaataacacaaccgagctcggcgccaagatctgtggcgccgagctcggttccacgtcgacgccacgcgtctgggttgtgccaacgcaacacgacctcggcgccatagcctatgtcgccgagcaaagggtccaaaactgtatttaaaatttttttaggtctaaacgtgattttacttttgtttaagggctaaaatacaaaaaaattcggggcaagcgcggtcgctgcctttcgccgcgctccaaacaatgctgccatccttgggcaggagaagctccagctccagcctccaggacgcgcgtgtgcgtgcatccggccctggccccgtccgtctctggacgaccacgatctgcctccgcaggtggtccgatgcatccggcacgcgcggaccccacacgcggtggctatcctgagctcgacacgcacgcctgtgcacgttaggcgggtggcggtgcactgctccgtcggtccgtccctgaaattcggttgcatcggacggttggccctgtgaagcaccagtagggacgatgcactgcacagtagcctgctcgctggcggatggccaggcccgagttcagggct

SEQ ID NO: 5929 - DNA, 1070 bp, Zea mays
  Zm_smallRNAprecursor_1418
tccttacatttggcaaaaaagaactaaacgagactaaaaatcagggactaacacttgtgagtctcaaacacaccttctctttcggggacttatctatgctttagatatgagtattttaaatctaatatatttatgagcaatctagtgatacgacaacttttcagcatgaatgctacctggccacaacataacgaataacgggtcaaagaagcaatagaagccggtatagattaaagccatctgtttgaactggtgaagcaacaatttatatagacaaaacaccgtaaaaagtagtaaaagcccatacggattaaagccaaacgaataggctgaaaccctaaacctaaacacacgttaagagagtgagaagaaataaattaattttaatgttttgttcatagatatctctaacctaatttataccatcaagttatctagatttatacctgacgtccaatactttaatcctttaatttaagttttggtgttgtgctcatctatacccttagtcgtgttttttgctcagctgtgcccttccagtgctatagaacagaagggcatagctgagcaaaaaacacgactaagggtatagatgagcacaacactaaaactaagggcacgaaattaaaaaaccctttaatttaatccctaaaacacaatatcgtcctatatgcatcgatgcatgatttcccattgtttctcactctttcgttgatgtacaaaaattgattgttttgtcttatgatttttctgaaaaacttttatatataattttgatcgattgtatatgagaccgtcgagcgatgccatctcttccctggggtgttagcaggctcgtgtggcccacaattgggccatatgggtcaggcctcgtattgcctagaagatacgtctcgtgtttgaagcggtcattaacatttgaaaaatttagaaactgaacggccagagtattgctgaaaacttaatttgacacacaaaaaagaacactgtacaattcttgtagctgtaggttgcttatgcgatgactgaaatactatgttggcagttaaatggatgactgaaaggctata

SEQ ID NO: 5930 - DNA, 1060 bp, Zea mays
  Zm_smallRNAprecursor_1419
ccccggctaattaatcccagcaaaagaaacaactgtcagatcgagtacagatgatatacaattgtacaaaccctaagtagctacccagcctatatatatgctattgtatggtccttggtgctgtgagcatcagcatcgaatgcaagacaagatcggtttttcaacatatatattcctctgtatgcccgctatctctctttatatagagagaaagaggggaccactcattgcttttccaagtttaaaatcctgccaaaatttagctcctcccttttgatctttaacctcttttgcgaagtgctaataaacatgaactgacgatatgccttgtcgcttcagcttctaatactagctgctgctctatatatgtggagctcccgtgccctaaccctccccaccccgcccctcgcccatcatcctgtggcaccatatagtgaaccttttagtagataagaccatgtacaccgatactgtgtgttcgtgcaccttattaagcagctgaagctgccagcatgatctgatctttcgtttactggcaactttggatacctaagatccagatcgtgctgcgcagtttcacctgctaattggagcacagaaaaactagacgtctagacggcgcgcgcccttgatttctattctaccctgtgaatttcttctgccgtcccacatcaccaccaccacggtcgctatgtatacttgtacattgatgtccggtgagtcattatttgggccctcgatgcggttcactggttaattctctctatgcatggaaatgttgctctctatcctcacgacctcaccgcctcagttcatcaccagatgtacttgtttgttgttccagtaatttaagagcggcacatttctgctagatctctggtaactgttgtcactgtgtatatagtcagactatttcctatcgttgtttgtttctgaattctgattgtttctttttttattccttttcttttcactccagtgtacctctttgtatttttttcacagtcgatctgcaactcccttatgcgttttcattgattagatgtgttagttctgaatg

SEQ ID NO: 5931 - DNA, 1096 bp, Zea mays
  Zm_smallRNAprecursor_1420
gaaatcggggttggatatagatcgaacatcgagaaattggattcggatacagctcgactagcaactgtcgagcgcttgattaaatgagttttggacgagatttataaatagagaatgactttcgagtttgcatttgcgtcgagaataaaagtttttaacaggctccaaattcggccttctggagatcgagtaaaatcagaaatcggtgaaaccttcacaagtaacttgataaatggagataaacgtgatcgagaaatagaaaatttcactgagcgtccgagattaggacaaatctcccgtcataacacgaaactgacacctggggtgtcacagaggcggaggagaagggacgggagattcctcctgaatctcgtcggagtcgctgctaaactcaatcacagaggggttgcgatgacgcaccatgattgaaaaaggtggtgaaactgcgaaccggttgaggtgtgtgaaagagtggctctaaaggttgtgaagcgactaaggcgagagtgaatgaagtgggagaagagaagtggagagtcaagtatatataggcaattgagctggtcctcaggaccagttcaaccgcccccatgggccagttcagctggttctgaccagtgtggtcagagaaccagaaacagcagagggaagatgccaaaaaaaatcaaatttctgacacaggattctgaaaaagtgtattgcggagattccatgcgcctaaaaaaattagaaccaagtgtctgcgcagatgagaccggacgacaaaagtttccttgctgcgcgggtgacacagtgactggtcacaagagcaaaaggctgcgcacacggcagtagtgtggggctgtgaaaaattttgcgcgcagctgctggaagcgactggacaggaaagaaaaattggcgcccctgacacgcatgcatggcgcacgggctgagcaggagcgtccaaaaaaaactgcgcgcgcccagcagagaagtgaccggacagagagaaaataaatttctgcatgcacagctgctgaccggacagccccaaaaaaaattactggcgcgcattgacgagaagcgaccagacagaaaaagtggcgcgcagaccttg

SEQ ID NO: 5932 - DNA, 1094 bp, Zea mays
  Zm_smallRNAprecursor_1421
cccactacatatgaagctgctatgagaagtgcaaattcatccaaatggttatctgccatggaagatgaattagaatccatgagaatgaacaaagtttgggacttagaagtcattccccatggagccaaaacagtaggctgtaaatgggtctacaagacaaagcgtgactccagagggaacatagaaagatacaaggctagacttgtggccaaagggttcacacagagagaaggcattgactaccatgaaaccttctcacctgtctcaacaaaagattcattcaggatcataatggcactagttgctcattttgatctagagctccatcagatggatgtaaagacagcattcctaaatggagagttagaagaaaacgtgttcatggcacaaccaaagggttttgttgtgagcggtaaagaacacatgggatgtcacttgaggaggtccatttatggattaaaacaggcctccagacagtggtacatcaagtttgatcagactataagaaagtttggtttcgaggaaaacaaggaagacaattgcatttatgcaaaatttaagaaaggaaagtatatcttccttgttctgtatgtcgatgacatactcttagctagtagtgataaggatctactagcggaaacaaaagggtttctttcctcgaattttgatatgaaagacatgggagaagcctcttatgttcttggaatagaaattcgcaaagacagacaaaagggagtactaggactctcacagaagtcatatatagaaaatgtactaaagaggtataatatgcacaagtgtaatgcctcgcctggtccaatagtcaagggtgataagtttggggaatatcagtgtcccaagaatcagtatgagaaaaacaagatgaagtcagtaccatatgcttcagctatcggaagcattatgtatgctcaagtatgtactcgccctgacttagcttttaccaccgggatgcttggacgctatcagaagaatccaggcatagaacactggaaagcagtcaagaaggctctaaggtaccttcaaggtactaaaggtctcatgcttacgtacagaagatctaattccctacaaat

SEQ ID NO: 5933 - DNA, 1197 bp, Zea mays
  Zm_smallRNAprecursor_1422
atagttaaatttcagctaccaaattgggcatacttgagtactgttttgttcggaatggtgcttatattctatgtcgacaatgttactgaagaaaagtaagattatttcttggaaggaaagcattctttttttttgttaaaagcttatttaaaaattaaaatattatcatgcatcatcagatcataaagcgaaccatgagcacttgttttgttatcatcgatctgatccacgaacgagcctctagttgagctgtttaagtggctctagtagcactcaggttttgggttcgtgtccctgtggacacgagtttcagttgggttaaaaagaactccctctcatatatcccatgccaaagcacaaatctaaggctatctctaacaggtcgcctattccatcccctatctcattccctatttcaaactttgctttgcaaacagtgtaatctacagttccgcgtcccctattttgctggagacagtctaaccatgtactcccttcgttcttaaatatatgacgtcattgactttttaaaaaaaatttgaccactcgtttgatttaaaataaatcgtgagttatcatttgttttgttgtgatttgttttatcacttaaggtagtttgagcattacttaaaattttacattttcgaataagtattttgaataagacgagtggtcaatttttttgaaaaaagtcaatggcgtcatatatttaagaacagaggtagtatttggttgcgggacagccccgttccctggcttcccctctcgtctgtccaattttgacggttaattggggacaacactgtgatggtcttgtcccaacccttgaccttgaaccaaacaatcttatttaataaatcgtcctatctcgtcccatcccgttattccaaccgaacacaccctaagtctcggtctaggttgtggtcatccttacatgggctatgtgctgctctgctgtgtagtcgtgtagaatggggaagaatttcaggttttttacatgtgtgaggtcttgttctagcaaaatgcctggggctgtcatacccctgctggtcgaaaatttttcagtcagatccagatcttcaggagatcatagatttggttattattcctcaaatatcttcatttataacaatatgaaagaatacttctcttgtcttggatgcttcttaaagtatttttattgacttttgtactatt

SEQ ID NO: 5934 - DNA, 1154 bp, Zea mays
  Zm_smallRNAprecursor_1423
catagtctgaatcagagtagccaaataaatcgaaaaaggagcccttaggataccagagacctatattttgggtgtgaactagatatctcaaaattctcttaacggccactaagtgacattcttttgcgttagcttaaaaacgggcacacatgcacacactaagcatgatatctagcctagatgcacacaaatatagtagagatcctatcattgatctataaagcttttgatctacagatttaccttcttcatttaagtcgagatgaccacttgaagtcattggtgtcttagcgtgctttgccttttccatgccaaactttttaagcatgtcttatgtgtacttggtttggcacagaaatgttcgtttaacttgaaaacccaggaagtacttgagctcacccatcatggacatctcaaacatatttgtcataaccctactaaattcctcacagaaagtttcatcagtactgccaaatataatgtcgtcgacatatatttgacaaacaaataattgattgtcaactttgcgagtgaataaagtatagtctacttttcctatttcaaaaccatttttaagcaaaaaaattttaaggcaatcataccaagctctaggggcttgtttaagcccgtagagtgccttgtgaagtaggtaaacatggtttggcttctttggatattcaaagcccggtggttgctctacataaaccctctcttgtagtggtccatttagaaatgcgctcttgacatctatttgatatagcttgaaattatggttagtaccataggcaattaatattctaattgactttaaccttgctaccgacgcatatgtttcaccaaaatcaagtccttccacttgagtgtagccttgggcaaccaaccgtgctttgtttcttgtaaccacgccatgttcatcttgtttgttcctaaagacccattttgtcccaatcacattttgtttgagtttttggactaaggaccaaacttcgttccgggagaagttgttcaactcctcttgcatggcaattatccaatccggatcacccaatgcttcttcaaccttaagtggctcaagagaggaaacaaacgagtaaaattcataaaaatttgctaaatgagatcgagttgttacccctctcctgatgctacccatg

SEQ ID NO: 5935 - DNA, 1061 bp, Zea mays
  Zm_smallRNAprecursor_1424
tattggggcgacgtgctccccttgttatatatggaggtcaactctgaagcggttgcaaagacgaccgacactttcagggtcctcggcagggggattatgttcatcccgaccgtacgctggcctgatatgatggtgatggatggttgctaacctaaccgcgaccagatcgaggccgtacgtctactacacacgtactaacgcggtcacacaggcacgacgtgcacaccagctaggtgtgcgcgtgcaccgtacgtgccgccaacaccgcgtaggccgccgcggccggacgatgcaacgaaacagtgttcatatgattcataatagatatatactactctctctatacaaactttgttgaggaagtactgcgttttttatttctcgctcagctgccagccaatttatatctgcatactcgtgcgtcttattatgccggccggcggcgtcgtctaattattgaagttccatcactacaggaattcacttaattcccgtcggcctgaaaccgacgggaataagccctaaaccgacgagaataagtaattcccgtcggtttagagcttattcccgtcggtttcaggccgacaggcgtcccttgtcggggataaggttatccccgtcggcggctgacgggaataattaattcccgtcggctagaaagcggccgacgggaattaaggctaactcccgtcggttcccccggccgacgggagttattagttaatttccgtcggttcccaggccggcgggaattattaattaattcccgtcggccttacgtggccgacgggaattaactgggccgacgggagttagtagctaattcccgtcggttcgatcatagccgacgggaattaactgggccgacgagaattaccctatactgctacaaaaacagcactaaattatgtcactatttctgcacacataacatatatcaaacataacataaatcacatatgacagccacattacaaacacatgtagagagacgacatccacaaacacatgcatttagacatagtattgaaacatcaaacaacgagtacgacatagtattc

SEQ ID NO: 5936 - DNA, 1166 bp, Zea mays
  Zm_smallRNAprecursor_1425
gcaccaacgtatcataactgttctcatcatgttcattgattaaagtaaagcaataacataaaactaatcatagtaaccaatttccaaagggtaaacaaggataggaaaacataatactagtcaatccttaggttgatcttgatatgtgggacagtgaattataaagtaaataggacatgatgggtcagaggacacttgccttcaccaggttgctgctcagagaagtctcctgcaacacactcagaaacctcgatctgctcgttttctacgcaaaacaataattcattcaacacacatggaaaatgacaaaggaaaattacaccaatcatatacaacagagtaaccacaggttcagtggaaaagtacaaacacacaagtgaactctagattctagggtagattaatatacctagtggtctatggttttccaactactgcctatctcagtagattaactacctaactatgtctatcttagtaaaggcaacgactgttatgcaagcagtccttctgtgcaagcgtgcaagcaaaccatctgatccattagattacgatctaatcacagatacaaccatggtttgttaggggtttttttataaagattattgagctagtggtggaagggtttaagcgttaaatgtgacctacaattggatcacgatctaatggatcagatggtttgcttgcacgcttgcacagaaggactgcttgcatagcagtcgttgcccttagtaaattacttatttagataaagttattccagggatgggaccatacttcaattgaaattaaatctacaaagttaagcacttgcacattcattagggtttcacttctgttttacctttattaaatattctatcactttaaattaacctagagtctagccacaaaattaggacatgcaaacaatggatgaatataatttaaacatatagagaataacattatgaacattttccaatttaaaccacccaatttggagttcatatgcaaaagatatgaaatttacaagttttagaattcaaaaacactaaatgaaacctatttctgtgattaaaataaagttcaggggcctctctgcaagaaactaggacttaggcgcaagaaaacaggatgacaggttggttctcggaaacccgaggggtttcttaacaaattttcca

SEQ ID NO: 5937 - DNA, 1167 bp, Zea mays
  Zm_smallRNAprecursor_1426
gcaccaacgtatcataactgttctcatcatgttcattgattaaagtaaagcaataacataaaactaatcatagtaaccaatttccaaagggtaaacaaggataggaaaacataatactagtcaatccttaggttgatcttgatatgtgggacagtgaattataaagtaaataggacatgatgggtcagaggacacttgccttcaccaggttgctgctcagagaagtctcctgcaacacactcagaaacctcgatctgctcgttttctacgcaaaacaataattcattcaacacacatggaaaatgacaaaggaaaattacaccaatcatatacaacagagtaaccacaggttcagtggaaaagtacaaacacacaagtgaactctagattctagggtagattaatatacctagtggtctatggttttccaactactgcctatctcagtagattaactacctaactatgtctatcttagtaaaggcaacgactgttatgcaagcagtccttctgtgcaagcgtgcaagcaaaccatctgatccattagattacgatctaatcacagatacaaccatggtttgttaggggtttttttataaagattattgagctagtggtggaagggtttaagcgttaaatgtgacctacaattggatcacgatctaatggatcagatggtttgcttgcacgcttgcacagaaggactgcttgcatagcagtcgttgcccttagtaaattacttatttagataaagttattccagggatgggaccatacttcaattgaaattaaatctacaaagttaagcacttgcacattcattagggtttcacttctgttttacctttattaaatattctatcactttaaattaacctagagtctagccacaaaattaggacatgcaaacaatggatgaatataatttaaacatatagagaataacattatgaacattttccaatttaaaccacccaatttggagttcatatgcaaaagatatgaaatttacaagttttagaattcaaaaacactaaatgaaacctatttctgtgattaaaataaagttcaggggcctctctgcaagaaactaggacttaggcgcaagaaaacaggatgacaggttggttctcggaaacccgaggggtttcttaacaaattttccaa

SEQ ID NO: 5938 - DNA, 1191 bp, Zea mays
  Zm_smallRNAprecursor_1427
gcaccaacgtatcataactgttctcatcatgttcattgattaaagtaaagcaataacataaaactaatcatagtaaccaatttccaaagggtaaacaaggataggaaaacataatactagtcaatccttaggttgatcttgatatgtgggacagtgaattataaagtaaataggacatgatgggtcagaggacacttgccttcaccaggttgctgctcagagaagtctcctgcaacacactcagaaacctcgatctgctcgttttctacgcaaaacaataattcattcaacacacatggaaaatgacaaaggaaaattacaccaatcatatacaacagagtaaccacaggttcagtggaaaagtacaaacacacaagtgaactctagattctagggtagattaatatacctagtggtctatggttttccaactactgcctatctcagtagattaactacctaactatgtctatcttagtaaaggcaacgactgttatgcaagcagtccttctgtgcaagcgtgcaagcaaaccatctgatccattagattacgatctaatcacagatacaaccatggtttgttaggggtttttttataaagattattgagctagtggtggaagggtttaagcgttaaatgtgacctacaattggatcacgatctaatggatcagatggtttgcttgcacgcttgcacagaaggactgcttgcatagcagtcgttgcccttagtaaattacttatttagataaagttattccagggatgggaccatacttcaattgaaattaaatctacaaagttaagcacttgcacattcattagggtttcacttctgttttacctttattaaatattctatcactttaaattaacctagagtctagccacaaaattaggacatgcaaacaatggatgaatataatttaaacatatagagaataacattatgaacattttccaatttaaaccacccaatttggagttcatatgcaaaagatatgaaatttacaagttttagaattcaaaaacactaaatgaaacctatttctgtgattaaaataaagttcaggggcctctctgcaagaaactaggacttaggcgcaagaaaacaggatgacaggttggttctcggaaacccgaggggtttcttaacaaattttccaagcgaacgggtatcaagcgctctcg

SEQ ID NO: 5939 - DNA, 1189 bp, Zea mays
  Zm_smallRNAprecursor_1428
caccaacgtatcataactgttctcatcatgttcattgattaaagtaaagcaataacataaaactaatcatagtaaccaatttccaaagggtaaacaaggataggaaaacataatactagtcaatccttaggttgatcttgatatgtgggacagtgaattataaagtaaataggacatgatgggtcagaggacacttgccttcaccaggttgctgctcagagaagtctcctgcaacacactcagaaacctcgatctgctcgttttctacgcaaaacaataattcattcaacacacatggaaaatgacaaaggaaaattacaccaatcatatacaacagagtaaccacaggttcagtggaaaagtacaaacacacaagtgaactctagattctagggtagattaatatacctagtggtctatggttttccaactactgcctatctcagtagattaactacctaactatgtctatcttagtaaaggcaacgactgttatgcaagcagtccttctgtgcaagcgtgcaagcaaaccatctgatccattagattacgatctaatcacagatacaaccatggtttgttaggggtttttttataaagattattgagctagtggtggaagggtttaagcgttaaatgtgacctacaattggatcacgatctaatggatcagatggtttgcttgcacgcttgcacagaaggactgcttgcatagcagtcgttgcccttagtaaattacttatttagataaagttattccagggatgggaccatacttcaattgaaattaaatctacaaagttaagcacttgcacattcattagggtttcacttctgttttacctttattaaatattctatcactttaaattaacctagagtctagccacaaaattaggacatgcaaacaatggatgaatataatttaaacatatagagaataacattatgaacattttccaatttaaaccacccaatttggagttcatatgcaaaagatatgaaatttacaagttttagaattcaaaaacactaaatgaaacctatttctgtgattaaaataaagttcaggggcctctctgcaagaaactaggacttaggcgcaagaaaacaggatgacaggttggttctcggaaacccgaggggtttcttaacaaattttccaagcgaacgggtatcaagcgctctc

SEQ ID NO: 5940 - DNA, 1190 bp, Zea mays
  Zm_smallRNAprecursor_1429
caccaacgtatcataactgttctcatcatgttcattgattaaagtaaagcaataacataaaactaatcatagtaaccaatttccaaagggtaaacaaggataggaaaacataatactagtcaatccttaggttgatcttgatatgtgggacagtgaattataaagtaaataggacatgatgggtcagaggacacttgccttcaccaggttgctgctcagagaagtctcctgcaacacactcagaaacctcgatctgctcgttttctacgcaaaacaataattcattcaacacacatggaaaatgacaaaggaaaattacaccaatcatatacaacagagtaaccacaggttcagtggaaaagtacaaacacacaagtgaactctagattctagggtagattaatatacctagtggtctatggttttccaactactgcctatctcagtagattaactacctaactatgtctatcttagtaaaggcaacgactgttatgcaagcagtccttctgtgcaagcgtgcaagcaaaccatctgatccattagattacgatctaatcacagatacaaccatggtttgttaggggtttttttataaagattattgagctagtggtggaagggtttaagcgttaaatgtgacctacaattggatcacgatctaatggatcagatggtttgcttgcacgcttgcacagaaggactgcttgcatagcagtcgttgcccttagtaaattacttatttagataaagttattccagggatgggaccatacttcaattgaaattaaatctacaaagttaagcacttgcacattcattagggtttcacttctgttttacctttattaaatattctatcactttaaattaacctagagtctagccacaaaattaggacatgcaaacaatggatgaatataatttaaacatatagagaataacattatgaacattttccaatttaaaccacccaatttggagttcatatgcaaaagatatgaaatttacaagttttagaattcaaaaacactaaatgaaacctatttctgtgattaaaataaagttcaggggcctctctgcaagaaactaggacttaggcgcaagaaaacaggatgacaggttggttctcggaaacccgaggggtttcttaacaaattttccaagcgaacgggtatcaagcgctctcg

SEQ ID NO: 5941 - DNA, 1187 bp, Zea mays
  Zm_smallRNAprecursor_1430
accaacgtatcataactgttctcatcatgttcattgattaaagtaaagcaataacataaaactaatcatagtaaccaatttccaaagggtaaacaaggataggaaaacataatactagtcaatccttaggttgatcttgatatgtgggacagtgaattataaagtaaataggacatgatgggtcagaggacacttgccttcaccaggttgctgctcagagaagtctcctgcaacacactcagaaacctcgatctgctcgttttctacgcaaaacaataattcattcaacacacatggaaaatgacaaaggaaaattacaccaatcatatacaacagagtaaccacaggttcagtggaaaagtacaaacacacaagtgaactctagattctagggtagattaatatacctagtggtctatggttttccaactactgcctatctcagtagattaactacctaactatgtctatcttagtaaaggcaacgactgttatgcaagcagtccttctgtgcaagcgtgcaagcaaaccatctgatccattagattacgatctaatcacagatacaaccatggtttgttaggggtttttttataaagattattgagctagtggtggaagggtttaagcgttaaatgtgacctacaattggatcacgatctaatggatcagatggtttgcttgcacgcttgcacagaaggactgcttgcatagcagtcgttgcccttagtaaattacttatttagataaagttattccagggatgggaccatacttcaattgaaattaaatctacaaagttaagcacttgcacattcattagggtttcacttctgttttacctttattaaatattctatcactttaaattaacctagagtctagccacaaaattaggacatgcaaacaatggatgaatataatttaaacatatagagaataacattatgaacattttccaatttaaaccacccaatttggagttcatatgcaaaagatatgaaatttacaagttttagaattcaaaaacactaaatgaaacctatttctgtgattaaaataaagttcaggggcctctctgcaagaaactaggacttaggcgcaagaaaacaggatgacaggttggttctcggaaacccgaggggtttcttaacaaattttccaagcgaacgggtatcaagcgctct

SEQ ID NO: 5942 - DNA, 1188 bp, Zea mays
  Zm_smallRNAprecursor_1431
accaacgtatcataactgttctcatcatgttcattgattaaagtaaagcaataacataaaactaatcatagtaaccaatttccaaagggtaaacaaggataggaaaacataatactagtcaatccttaggttgatcttgatatgtgggacagtgaattataaagtaaataggacatgatgggtcagaggacacttgccttcaccaggttgctgctcagagaagtctcctgcaacacactcagaaacctcgatctgctcgttttctacgcaaaacaataattcattcaacacacatggaaaatgacaaaggaaaattacaccaatcatatacaacagagtaaccacaggttcagtggaaaagtacaaacacacaagtgaactctagattctagggtagattaatatacctagtggtctatggttttccaactactgcctatctcagtagattaactacctaactatgtctatcttagtaaaggcaacgactgttatgcaagcagtccttctgtgcaagcgtgcaagcaaaccatctgatccattagattacgatctaatcacagatacaaccatggtttgttaggggtttttttataaagattattgagctagtggtggaagggtttaagcgttaaatgtgacctacaattggatcacgatctaatggatcagatggtttgcttgcacgcttgcacagaaggactgcttgcatagcagtcgttgcccttagtaaattacttatttagataaagttattccagggatgggaccatacttcaattgaaattaaatctacaaagttaagcacttgcacattcattagggtttcacttctgttttacctttattaaatattctatcactttaaattaacctagagtctagccacaaaattaggacatgcaaacaatggatgaatataatttaaacatatagagaataacattatgaacattttccaatttaaaccacccaatttggagttcatatgcaaaagatatgaaatttacaagttttagaattcaaaaacactaaatgaaacctatttctgtgattaaaataaagttcaggggcctctctgcaagaaactaggacttaggcgcaagaaaacaggatgacaggttggttctcggaaacccgaggggtttcttaacaaattttccaagcgaacgggtatcaagcgctctc

SEQ ID NO: 5943 - DNA, 1165 bp, Zea mays
  Zm_smallRNAprecursor_1432
ctactgtattttcaaaatgttggtgattaggacacaatattctttttagactaggaatttagagtaggatgagtgcggatagccttatgttgtcaacactcgtataactctcaaaggaatattttgtctttgtcagtaaattttttactctataatataatcctctgcagccatttttaccccacatctcaaccctatacccactaccatatattatatcatttttaatttttcttctacacatacgttgtcgcatgctgctgctgctgctgcaaacacagggtacagcgaatagaccggtgtgtttggttttagctagtgaaaataacttcttagggcttgtttgggtaatctcggattggagtggattgaggtggtacgtggtgtattgaagtgtaatatgaactaattttttttcaattccctttaatacacttcaatccacttcaatccctctgtacccaaacaaagccttagggggtgtttggttgtagggactaaagtttagtccgggtcacatcaagcatttgactttcaaataggagtatgaaatatagacccaaccaactggactagattcgtctcgtcttttaatcttcggctgagaaattagttttataatccgactacatttaatacccggaacggaggttcaaacattcgatatgacaggggctaaattttagtttggggtaaccaaacaccctcttagtttttaagaaactggaaatgcggtttctataaactcagacatagaccggtgagtctggaaccgctctaatttgtataaactagctttcttaaaaaagtggtgcttctaagcagatccttatagaatataagtgtggtgaggggaaagcaaaaccaaaaggttgttcgcaataatgacgaggagagattggatgcagagagacgcagcgcaggagtgtctctacagctggagcccccttcaaatcagggaggggggtgtattagcggcgccgaagttgattttgcagtgcaggaccagagttttgttcgcgctcaggccagcatcgccttgcgatggagatcacgtgcgtctatacgtgtagtagtacctgacagatggcgtaggctcctgcactcatttcatgctgacagatggcgtcgagtgcatccgcgagaacgactggattggatggat

SEQ ID NO: 5944 - DNA, 1068 bp, Zea mays
  Zm_smallRNAprecursor_1433
tgagccacctcctcagcctcctcatcacccatcctcctctcgcgccaccgctgcctcgcgtccgatggaccgtagcgggagaggaagtggtccgggccagggtcagggctgtggccgaggacttttcattcatctggccaagggccttcttggtgtcttcgccatttgccgcacccgggcggtcgaggagtctgtgcgccgtcgcaggaccgaccggctgcatgaggatcttcgccgttatgcagccgagactggtcatcctctccctcctgggtcccctccacctccagcccctaccttccccgcagaccttaatgagtggcaccaacaggagtttggtgtgccattcattacctcggaggatgaggtagaggactatgatgacccattcttcacctcggaccctcctcatcctcctcctccctacccgggtccgggacccattcctggtgacccgcggccttccggctctggttaccatcaccaccctccacctcctcctcatcatcgtacatcttcggcatccggtttttctgcgggtgatgagccccctagggactcctcactcgaggaagacgtgatgaggactttcttccctgactacacatcataccctccatcatatcctccgtcctatcctcctcctagaggatattgattcatgtgtcctcttctccctctctctctttgttttttggtacttgttgccaaaaagggagagaaaatccaaaatttctagtcattctgtttgtggttctttcggttatatatttctttttgattattttttgttttggccactgttgtggcttgtatcctcttatcattgtatgaaataaaactgttgggttattatttaatgtgatatgatgtcttttgtcccatcagtttgtaatgattgctttgctatgaagtaataatgatgtgtatttagagatagtcatatgcatcacaactcctgttatgacacgcttgcacccctcggatggttgtataaagtatggtgtttatcactatctctaaatgtgttgctcacatgacatattatgtcaaaaacattggattcac

SEQ ID NO: 5945 - DNA, 1178 bp, Zea mays
  Zm_smallRNAprecursor_1434
gaccgtagcgggagaggaagtggtccgggccagggtcagggctgtggccgaggacttttcattcatctggccaagggccttcttggtgtcttcgccatttgccgcacccgggcggtcgaggagtctgtgcgccgtcgcaggaccgaccggctgcatgaggatcttcgccgttatgcagccgagactggtcatcctctccctcctgggtcccctccacctccagcccctaccttccccgcagaccttaatgagtggcaccaacaggagtttggtgtgccattcattacctcggaggatgaggtagaggactatgatgacccattcttcacctcggaccctcctcatcctcctcctccctacccgggtccgggacccattcctggtgacccgcggccttccggctctggttaccatcaccaccctccacctcctcctcatcatcgtacatcttcggcatccggtttttctgcgggtgatgagccccctagggactcctcactcgaggaagacgtgatgaggactttcttccctgactacacatcataccctccatcatatcctccgtcctatcctcctcctagaggatattgattcatgtgtcctcttctccctctctctctttgttttttggtacttgttgccaaaaagggagagaaaatccaaaatttctagtcattctgtttgtggttctttcggttatatatttctttttgattattttttgttttggccactgttgtggcttgtatcctcttatcattgtatgaaataaaactgttgggttattatttaatgtgatatgatgtcttttgtcccatcagtttgtaatgattgctttgctatgaagtaataatgatgtgtatttagagatagtcatatgcatcacaactcctgttatgacacgcttgcacccctcggatggttgtataaagtatggtgtttatcactatctctaaatgtgttgctcacatgacatattatgtcaaaaacattggattcacaatcgtgcacacatttagggggagccatctacatacaatcattcaaaagaaattttctatttaaaatgtttatctttttgaccttaattgttttggcatcaatcaccaaaaagtgggagattgtaagtgcaatcaaccccaagtgagggttttggtgatttaatgacaaaacaaata

SEQ ID NO: 5946 - DNA, 1068 bp, Zea mays
  Zm_smallRNAprecursor_1435
caccgctgcctcgcgtccctctcctagccgcggatctcccatgccacgtggtcgtggtcgtggtcgaggtcgtggccgagggatgggtgctcgcttggtccatgggattgcggcatttttctctatgtgccgaaacatctctactgatgtacatgagctggcaaggcgtcagcgggagactgacgacaatcttcgtcgtcaagcttccactatgggtatgccctttgcccctcgctcgcctgacgtgcctctccatcctcctcccccggagatcaatgagtggcaccggcaggcctacggggtgccatttatgtcagcagacaacgaagaagaagaagaagcctacgttgatgatcgcgagcagtttgccccgcctccctacgatggggatccgggtcaatcatcctctcaccctccccctccctactcgagtcagggacccactcccggtgaccctaggccatccggctctggttaccatcaccaccctccacctcctcctcatcatcgtacatcttcggcatctattttttctgcggctgatgagccacctagggaatcctcattcgaggaagacgtgatgaggaccctcttccctgactacacatcataccctccatcatatcctccgtcctatcctcctcctggaggatattgattcatgtatccatgtctctctcttcgtttttggtacttgttgccaaaaaaggggagaaaatccaaaatttctagtcattctatttgtggttctttcggttatgtatttcttttggattatttttgttttggccactgttgtggcttgtatcctcttatcattgtatgaaataaaactgctgggttattattcaaagtgatatgatggtcttctggccatcatcttttgtcccatcagtttgtaatgattgctttgctatgaagtaaaaatgatgtgtatttagagatagtcatatgcatcacaactcctgttatgacactcttgcacccctcggatggttgtattcagtatggtttttgtcactatctctaaatgtgttgctcacatgacatattatgtcaaaacattgg

SEQ ID NO: 5947 - DNA, 1158 bp, Zea mays
  Zm_smallRNAprecursor_1436
atatagtggggttcggtagagctcaaagtttccatgagggattgaagttgaagctgaaaattgtacaggaatatcagttatcaataataaatacgtagaaagaacattaaggagaatgaacaagctcgtgttcctattttgatgtactagaacataaaaagaaaaataattgtattggttacatgcttaccaaaggtaaaaccaaaaaaaatcaaaaagggtaaagcactcattagtcataatggcatgtgtcatggtcataatagggagcgagaggcaacagccaggctgggataaggctagagaataagattgagatgagctgggataaggttagagaataagattgaaatgagagaattgtggagagttggttagcatcagataagtccaagaaagtaggagttagttgagagtttgtaggagaagttggttagccatagggctatttataagccgcatggcagcagggaataaatcaagcaagatcattatcaaaccaatctctctcccttgcaatgaccctctcaagcgtctagggctgctaccctagaaccaagcctgcggcagaggggtataacctcgccatcatagggagcgagacgcaacagccaggctaggataaggctagagaataagattgagatgagctgggataaggctagagaataagattgggatgagagaattgtggagagttggttagtataagataagtccaagaaagtaggagttagttgagagtttgtaggagaagttggttagccatagggctatttataagccgcatagcagcagggaataaatcaagcaagatcattatcaaaccaatctctctctctcttgcaatgaccctctcaagcgcctagggctgctaccctagaaccaagcctgcggcagaggggtataacctcgccgaagaagacagctatctccatggaccgaaggtccatgacacctggtatcagctccaggttatcctcaccaccaccagccgcccatccctcaccaccaccagtcgccgcgccatctgccgccgcaacgccctcccacccgccctctccaactccagatgcattcactcgactcgaagagaagtgggatcaattcgttgtgatgttccaccgctacaaggagaagacagagaaggaactccaa

SEQ ID NO: 5948 - DNA, 1194 bp, Zea mays
  Zm_smallRNAprecursor_1437
ggtgataattatatcataaacttgagagaaaataagcataacacgaggttgttgacagcataaaatttaaacgacactgcacatcatataaagtggagtttcatttgtaaatataaacgacagtgcttctatctatgtaccatatataaggcaaattaaattgataaaaaatatgataaacgcataaaaaatactgaacaatgtccaaattgttcttattctttgcgtatcttgcccttgtcagctcttgtcaatgcttgaataatattcttatcaaaatatttgatgcgtggtgttccacgtttattctgaggtgcagctgaatcatgaagatgattcaaataatacagttgcaaaagcataacatgaatcgttgtgagacataacaaaacataatctaaatgtatatgaattttgcataaaaaatatggctacatataaaagacaaaaaagtgatatgcttacaagaatgatgatggaacatccgtaaattgttgtagaaacatttgtaacgctcctagtatgtcacttcttggcagtttggcataaatcattgaatattagttggtaccagtctatctcgtggaaacgatacatttcctcagttaaaagaacctcatggttagttattccccagctggcagtagggaacaacaacctattgcacagtatcaggaagaaggatctaatgcttagatcatcgtcaaaccctttccttagacgatcttacgatgtcttatgtttccgtttacgaaacagtaatccacgtgtcggtccatgggccttcgcgttgatttcgcccagcagattacgtgtatcgggcccacgaatccagcaaccaagcacgcagtttttccagctctcctcacccgtaacgctcgcggcggccgaaccctagctttatcgccgccatctgcttcttctccactgcggttgccgaaccctagagattctccccccgtcgcccgaacgtcgtcgcattcaccttctccaccgcatagagggagacgatgtcgccttgttcttcttcaccggtgagggacccagaatcgcagagaaggtggcgctgcccccttgttcttctccaccgcagagaacgagccgcatttgatccaccgcggcgccgaaccctaggcaatccacccgccgtcgcgagcaccgtctccaacgctgagtccgacccgccgtcaactt

SEQ ID NO: 5949 - DNA, 1070 bp, Zea mays
  Zm_smallRNAprecursor_1438
agcacgtcgtcgggggatgcggaggagccgaaggcgtcgatgacgtcgccgaagatgaaggtcatgagcggttgtgccatcccgttggccaccgccgcgacggcgcccacggccataagcacagcgtccgtccggtccgcgaacgcgaagagccggtacagcggcacgcgccccaccaccgccggcttcgaactgatctcgcggcccgcagatcctcctcctcctccatcgccggcgtcgtcgtccctccctccggcgctagcttcggtcctctccctcctgtcgtctcccgtcatggtcaactactgtccaagaactcgggtgcagccttgatgatgcttgcgtttggcctggctagttagttagtcgattgctagtggaggatgcctgtaactgtaagcttgcgtcctcttggtgcggcggcacgtttgacgcccccgggctcgcagcgcggcgtggcatataaaagggccaattccctgtatgccactggaaaatatactcattccttgtatgccactgaccccacatgtcatagacaccaaaaaatatacctatatgccactcagtggcacacaaggaatgagtataaaatctgatggcataccaggaattttctccatataaaacggtcacgacttgcgcgtgccgtgcttgggctgcacggcgtgacgatccgagatggcctggccgtcgttgttcgccgctgactgacggaaggacagcagttcatctctcatgtaattaatgtaatgacgcatgcttgtgttgcttctctctctatatttttttcaaactcttgcgtgtgtacgtggtgctcacacagatttagccccaaggtccgggttccggattgatactattttcttttttaactaggtaggtgcccgtgcgttgcgacgacacataaattgttgagggagatctatgactactcgtccggatcgatgacagactattattgttgctaggcaccatcatccgtataaggatagaagtatctgggataggatgagcgtgaagttctacacaaagccaaacaggtgcttggtggctcttatcttacgaaa

SEQ ID NO: 5950 - DNA, 1070 bp, Zea mays; identical to SEQ ID NO: 5949
  Zm_smallRNAprecursor_1439

SEQ ID NO: 5951 - DNA, 1049 bp, Zea mays
  Zm_smallRNAprecursor_1440
tggatagtttatgtgagtattgttatattgttatgttaatatattttttatgcaatgctctgttttatatgcgaactaaattgcagtgaatgataatcaacgctagcaaatcgaggtagtacgtagttggaccgctccctttgcatgccctgacgcggccggtaaaacatacgtattgcatgcactgatcgatgggcgcggtaaaaactacctgcatatatatatatatatatatatatatatatatatatatatatatacctgcaggcagcagcaacgatgccgcagccgcagccatggttagttgtttgtataataatactctgccgttttgcacccctggttagcgctacaactcctccgccgcgcctatccaccacatctatttcgccctatccaccaggacttacgatgatctgtatagcgagctatcgaggctgctcagggactcgagcaggcctgcatatacgatcccccagtcccccacacgtgatgcaaagataatacatccatgtcgtcggcgccggggaagaagacaaggtaactctgaacatcgatggccttatatattatcggcttcagtaacggcactggccattggtacaagtttagtggcggagactcgttctggttcaaaggtctgccggtgccgggagccaccgagctccccggtcacaatgaactatggacaactgatccagggagggcacgccgatcgagctttggcgggttcctctggggaagaagtcagccatacatgccaccaggcagcttgcgacgtacgaccccgccgtcacccctgaatcccagctccaggacgaaaatggggtgctactggaggtcagtaccggtggatggctgacgcgaagtcgaggataatatagtcaggtcaaaggtgccaacgatgcttcggcgatcgttggttttctgcttcgctcaaaagaaacagtacctactgataattagttagtttccacacatatgattaatatagttttctttcttttttgcatcatcgatgcctgaatcgacttgttatgcaaaaaaaa

SEQ ID NO: 5952 - DNA, 1041 bp, Zea mays
  Zm_smallRNAprecursor_1441
cctttttaagcacccatccaccttagagcatctccaacaatgcctcaaactagtgcctcaaattaaaatatggggctctacacagggaaaactactcacagtgccctatttcataattttttgtcaaaaaactataggacaccctctcaagtgactcaaatatactacaccgtagtgggctgccctataatctagatttggggatttactgtttgagcgaggtgttttgttagtgccctaaattctataaaatatacttatttttaaattatagggcatttttataggtcacgttgttggagatgctctaacctaggcgactaatctccctgccaccactctgctgacgcccaccccgaattttttgtattttagcccttaaacagaagtaaaatcacgtttagacctaaaaaaattttaaatgcagttttggaccctttgctcggcgccatagcctatggcgccgagctaacacagctcggcgccataggctatggcgccgaggtcgtgttgcgttggcacaccccagacgcgtggcgtcgacgtggaaccgagctcggcgccacagatcttggcgccgagctcggttgtgttattaaaatatttgttgcagacatgagcacaaagcccatctagcccacttggtagagcacaaggtttctaaccatgtggtcgtgggttcaagccccatagtttgcattttttttgtttttttttgtttatgtcgttggtgtgtccgcttaaatttatttctcgcctagatttttttttatctttgttttgtcactgaagtcagttcagcttatataatttacctatacttacactgaagttgccacagacctattcttgatctcaacctgggggtacatctaatgtagtatccaaaaaatttaacacgcactttacagataattgatggcggtgtagaacttctggagttaaaacaaagagaatgggatttgcgcgctgacttgcaagcatcggctattctttagcctccagcaaatgattcatgacgaggcggaggctccttagctg

SEQ ID NO: 5953 - DNA, 1041 bp, Zea mays; identical to SEQ ID NO: 5952
  Zm_smallRNAprecursor_1442

SEQ ID NO: 5954 - DNA, 1042 bp, Zea mays
  Zm_smallRNAprecursor_1443
cctttttaagcacccatccaccttagagcatctccaacaatgcctcaaactagtgcctcaaattaaaatatggggctctacacagggaaaactactcacagtgccctatttcataattttttgtcaaaaaactataggacaccctctcaagtgactcaaatatactacaccgtagtgggctgccctataatctagatttggggatttactgtttgagcgaggtgttttgttagtgccctaaattctataaaatatacttatttttaaattatagggcatttttataggtcacgttgttggagatgctctaacctaggcgactaatctccctgccaccactctgctgacgcccaccccgaattttttgtattttagcccttaaacagaagtaaaatcacgtttagacctaaaaaaattttaaatgcagttttggaccctttgctcggcgccatagcctatggcgccgagctaacacagctcggcgccataggctatggcgccgaggtcgtgttgcgttggcacaccccagacgcgtggcgtcgacgtggaaccgagctcggcgccacagatcttggcgccgagctcggttgtgttattaaaatatttgttgcagacatgagcacaaagcccatctagcccacttggtagagcacaaggtttctaaccatgtggtcgtgggttcaagccccatagtttgcattttttttgtttttttttgtttatgtcgttggtgtgtccgcttaaatttatttctcgcctagatttttttttatctttgttttgtcactgaagtcagttcagcttatataatttacctatacttacactgaagttgccacagacctattcttgatctcaacctgggggtacatctaatgtagtatccaaaaaatttaacacgcactttacagataattgatggcggtgtagaacttctggagttaaaacaaagagaatgggatttgcgcgctgacttgcaagcatcggctattctttagcctccagcaaatgattcatgacgaggcggaggctccttagctgc

SEQ ID NO: 5955 - DNA, 1042 bp, Zea mays; identical to SEQ ID NO: 5954
  Zm_smallRNAprecursor_1444

SEQ ID NO: 5956 - DNA, 1043 bp, Zea mays
  Zm_smallRNAprecursor_1445
cctttttaagcacccatccaccttagagcatctccaacaatgcctcaaactagtgcctcaaattaaaatatggggctctacacagggaaaactactcacagtgccctatttcataattttttgtcaaaaaactataggacaccctctcaagtgactcaaatatactacaccgtagtgggctgccctataatctagatttggggatttactgtttgagcgaggtgttttgttagtgccctaaattctataaaatatacttatttttaaattatagggcatttttataggtcacgttgttggagatgctctaacctaggcgactaatctccctgccaccactctgctgacgcccaccccgaattttttgtattttagcccttaaacagaagtaaaatcacgtttagacctaaaaaaattttaaatgcagttttggaccctttgctcggcgccatagcctatggcgccgagctaacacagctcggcgccataggctatggcgccgaggtcgtgttgcgttggcacaccccagacgcgtggcgtcgacgtggaaccgagctcggcgccacagatcttggcgccgagctcggttgtgttattaaaatatttgttgcagacatgagcacaaagcccatctagcccacttggtagagcacaaggtttctaaccatgtggtcgtgggttcaagccccatagtttgcattttttttgtttttttttgtttatgtcgttggtgtgtccgcttaaatttatttctcgcctagatttttttttatctttgttttgtcactgaagtcagttcagcttatataatttacctatacttacactgaagttgccacagacctattcttgatctcaacctgggggtacatctaatgtagtatccaaaaaatttaacacgcactttacagataattgatggcggtgtagaacttctggagttaaaacaaagagaatgggatttgcgcgctgacttgcaagcatcggctattctttagcctccagcaaatgattcatgacgaggcggaggctccttagctgct

SEQ ID NO: 5957 - DNA, 1043 bp, Zea mays; identical to SEQ ID NO: 5956
  Zm_smallRNAprecursor_1446

SEQ ID NO: 5958 - DNA, 1041 bp, Zea mays
  Zm_smallRNAprecursor_1447
tagaactgcatcttgatcgacggacagtacagccactacttgataatgtatgaagaactattttaactgatgatacgaatggtttattaaagacattcatccacttgtcatatcttgcagaaacatcgcttaggacatgaaaatttgaccccacttaccagtccaaaccttcgaagagcccctctccctttattgcagatgttttgaaaatcgcccattggcggctcttaattttgtgtagttctaatgactctgtaatggcagcatcatcgagtgcacctggaagataaacaaaaatctaggcgagaaataaatttaagcggacacaccaacgacataaacaaaaaaaaacaaaaaaaatgcaaactatggggcttgaacccacgaccacatggttagaagccttgtgctctaccaagtgggctagatgggctttgtgctcatgtccgcaacaaatattttaataacacaaccgagctcggcgccaagatctgtggcgccgagctcggttccacgtcgacgccacgcgtctggggtgtgccaacgcaacacgacctcggcgccataggctatggcgccgagcaaagggtccaaaactgcatttaaaatttttttaggtctaaacgtgattttacttctgtttaagggctaaaatacaaaaaattcggacccccacctacccctaccaatccgtcgactcctcacaggaccgaagctccactcgactgctcagccttcatcccactcgagcgccaagcaccagccattaggcaagcaacgagctggcccgcaacctccgtcctaactcatgcgactgcgaggcgatacaaagttgaagcatcacgaccagtcccccaatgtgatcatgcttttcgtgtcggggatggggatccgttagagactcaatactcgaatggggatgtatatgggatggatcttatacccgtgatgggtatggagatggatatagtttcatgaaaatggggatagggcgttaaaatccgacggagaatttttttcattgacacctctatttgcaac

SEQ ID NO: 5959 - DNA, 1040 bp, Zea mays
  Zm_smallRNAprecursor_1448
agaactgcatcttgatcgacggacagtacagccactacttgataatgtatgaagaactattttaactgatgatacgaatggtttattaaagacattcatccacttgtcatatcttgcagaaacatcgcttaggacatgaaaatttgaccccacttaccagtccaaaccttcgaagagcccctctccctttattgcagatgttttgaaaatcgcccattggcggctcttaattttgtgtagttctaatgactctgtaatggcagcatcatcgagtgcacctggaagataaacaaaaatctaggcgagaaataaatttaagcggacacaccaacgacataaacaaaaaaaaacaaaaaaaatgcaaactatggggcttgaacccacgaccacatggttagaagccttgtgctctaccaagtgggctagatgggctttgtgctcatgtccgcaacaaatattttaataacacaaccgagctcggcgccaagatctgtggcgccgagctcggttccacgtcgacgccacgcgtctggggtgtgccaacgcaacacgacctcggcgccataggctatggcgccgagcaaagggtccaaaactgcatttaaaatttttttaggtctaaacgtgattttacttctgtttaagggctaaaatacaaaaaattcggacccccacctacccctaccaatccgtcgactcctcacaggaccgaagctccactcgactgctcagccttcatcccactcgagcgccaagcaccagccattaggcaagcaacgagctggcccgcaacctccgtcctaactcatgcgactgcgaggcgatacaaagttgaagcatcacgaccagtcccccaatgtgatcatgcttttcgtgtcggggatggggatccgttagagactcaatactcgaatggggatgtatatgggatggatcttatacccgtgatgggtatggagatggatatagtttcatgaaaatggggatagggcgttaaaatccgacggagaatttttttcattgacacctctatttgcaac

SEQ ID NO: 5960 - DNA, 1058 bp, Zea mays
  Zm_smallRNAprecursor_1449
cagaaatgttgcggcacgcggagaaaaatgtcgcaagcccatggagcaagcgagcacccatcccacgggccacgacctcgaccacgaccactagcacgtggcatgggagatccgcggccaggagagggacgcgaggcagcagcggggggagaggaggaaggatggtgaggaggctggcgaggtggctcagaggaggaggcagggcctccagaccgtgagggaacccgcttcgtacgagcagctgggttggaggaatcaacccagtagggtacgtagcgggagtgtttgacgggtttttcgaagtgggtctgggtgaccacttcgatcatcttcatgataaagggtgcatgaagacaccctctgtgaggagaccaggaagcacgaacgatctcctcccagatcatgtcaaacacattgatgcgggcgagacggtttggagcaaggaggaggaggaggactcgactctccccaaggacgttcatttgattaccgccctttgggagaacggtcatccgggacaaggaattaaggtacctatagtacctatgcatgttagcggttgtccagaactcccgctcagtagagacatgaatgaattctgtctcttcccgcatgggcagccgaatgtcatgcactcgcatgttgctgccctgaatgtctgtatcagagaagcccagaatatgggcaaaacgacgataactgactttgtgccagttaccctggataaagaaatacatgactgggtactcatacccatcggcttcctcatctactttctttatccagagggtggcatagaactgagctaccacctcatcgttccaggggtattccatggtcataatgttacgtaacccctttctctctaagtgaacgagagctgacgacatgtcaacatctcccatattctcacaaccctcccagtcaataaatctatgtcggacgactgggtgtttcttggtaagaatgacagaatcgtagaagtcagcctggaaaagattccagaaccgagggtcctggacaccaggatgacgaggagtgagagtagggttggaaaa

SEQ ID NO: 5961 - DNA, 1057 bp, Zea mays
  Zm_smallRNAprecursor_1450
agaaatgttgcggcacgcggagaaaaatgtcgcaagcccatggagcaagcgagcacccatcccacgggccacgacctcgaccacgaccactagcacgtggcatgggagatccgcggccaggagagggacgcgaggcagcagcggggggagaggaggaaggatggtgaggaggctggcgaggtggctcagaggaggaggcagggcctccagaccgtgagggaacccgcttcgtacgagcagctgggttggaggaatcaacccagtagggtacgtagcgggagtgtttgacgggtttttcgaagtgggtctgggtgaccacttcgatcatcttcatgataaagggtgcatgaagacaccctctgtgaggagaccaggaagcacgaacgatctcctcccagatcatgtcaaacacattgatgcgggcgagacggtttggagcaaggaggaggaggaggactcgactctccccaaggacgttcatttgattaccgccctttgggagaacggtcatccgggacaaggaattaaggtacctatagtacctatgcatgttagcggttgtccagaactcccgctcagtagagacatgaatgaattctgtctcttcccgcatgggcagccgaatgtcatgcactcgcatgttgctgccctgaatgtctgtatcagagaagcccagaatatgggcaaaacgacgataactgactttgtgccagttaccctggataaagaaatacatgactgggtactcatacccatcggcttcctcatctactttctttatccagagggtggcatagaactgagctaccacctcatcgttccaggggtattccatggtcataatgttacgtaacccctttctctctaagtgaacgagagctgacgacatgtcaacatctcccatattctcacaaccctcccagtcaataaatctatgtcggacgactgggtgtttcttggtaagaatgacagaatcgtagaagtcagcctggaaaagattccagaaccgagggtcctggacaccaggatgacgaggagtgagagtagggttggaaaa

SEQ ID NO: 5962 - DNA, 1058 bp, Zea mays
  Zm_smallRNAprecursor_1451
agaaatgttgcggcacgcggagaaaaatgtcgcaagcccatggagcaagcgagcacccatcccacgggccacgacctcgaccacgaccactagcacgtggcatgggagatccgcggccaggagagggacgcgaggcagcagcggggggagaggaggaaggatggtgaggaggctggcgaggtggctcagaggaggaggcagggcctccagaccgtgagggaacccgcttcgtacgagcagctgggttggaggaatcaacccagtagggtacgtagcgggagtgtttgacgggtttttcgaagtgggtctgggtgaccacttcgatcatcttcatgataaagggtgcatgaagacaccctctgtgaggagaccaggaagcacgaacgatctcctcccagatcatgtcaaacacattgatgcgggcgagacggtttggagcaaggaggaggaggaggactcgactctccccaaggacgttcatttgattaccgccctttgggagaacggtcatccgggacaaggaattaaggtacctatagtacctatgcatgttagcggttgtccagaactcccgctcagtagagacatgaatgaattctgtctcttcccgcatgggcagccgaatgtcatgcactcgcatgttgctgccctgaatgtctgtatcagagaagcccagaatatgggcaaaacgacgataactgactttgtgccagttaccctggataaagaaatacatgactgggtactcatacccatcggcttcctcatctactttctttatccagagggtggcatagaactgagctaccacctcatcgttccaggggtattccatggtcataatgttacgtaacccctttctctctaagtgaacgagagctgacgacatgtcaacatctcccatattctcacaaccctcccagtcaataaatctatgtcggacgactgggtgtttcttggtaagaatgacagaatcgtagaagtcagcctggaaaagattccagaaccgagggtcctggacaccaggatgacgaggagtgagagtagggttggaaaac

SEQ ID NO: 5963 - DNA, 1171 bp, Zea mays
  Zm_smallRNAprecursor_1452
cgcatgggcagccgaatgtcatgcactcgcatgttgctgccctgaatgtctgtatcagagaagcccagaatatgggcaaaacgacgataactgactttgtgccagttaccctggataaagaaatacatgactgggtactcatacccatcggcttcctcatctactttctttatccagagggtggcatagaactgagctaccacctcatcgttccaggggtattccatggtcataatgttacgtaacccctttctctctaagtgaacgagagctgacgacatgtcaacatctcccatattctcacaaccctcccagtcaataaatctatgtcggacgactgggtgtttcttggtaagaatgacagaatcgtagaagtcagcctggaaaagattccagaaccgagggtcctggacaccaggatgacgaggagtgagagtagggttggaaaacctaagacgctgaagggtttctattcccttctgagtgaagtcgatgggagattcatgcggaccgcggctgacgttcgccggatgcatgtgcagtccggtgacgtagagagcatcaggcgccggaaggtcgacgaagtcgtcgaaagccccatcctcctcttggcagggagcataccctgaggaagacgtgctacgacgaggacgagaggcgccaaccttttggcgtctcccgcgagtcggctgcgaaggcatggaagagccctcgccaggcatccgaccagagccacgtcctctcttagagagggagcgacgaggcggaggagaggggacgggagattcctcctgaatctcgtcggagtcgctgctaaactcaaccacagaggggttgcggcgacgcaccatgattgaaaacggtggtgaactgtgaagcggttgaagtgtgtgaaggaaaggctctaaaggatgtgaagcgaccaaggcgagagtgaatgaagtgggaaaagagaaggagagagtgtcaaatatatataggcagttgagctggtcctcaggaccagttcaactgcccccatggcccagttcagctggttttgctgcgcagcgaccaaaaaaactgctcaaaaaaatgtctgcgctccctgcacttgagcgaggcaagaaagaaagaaaatatgcatggcgcgaggagaaggaactggacagagaaaataaataaagaaagt

SEQ ID NO: 5964 - DNA, 1043 bp, Zea mays
  Zm_smallRNAprecursor_1453
cactctttcagctgtacacacgtagctggcacgacgtgtgcagtgcgcgtaggtatatacgcccagatgtagcacaggacatacatgtcttattggcatgcatgcatcatctaggatggcagggatcgatcggaccattttgtaaattaagaaaacgttaacttggttgaaacctagattaatttgtatattcgtgccgagaatatatatggtttatcgtctcagctagagctaggaataatggcatgcagacgacataggttatggcgccaaggtacgtgatacgccgagattaaaaaaaatctaggcgagaaataaatttaagcggacacaccaacgacataaacaaaaaaaaacaaaaaaatgcaaactatggggcttgaacccatgaccacatggttagaagccttgtgctctaccaagtgggctagatgggctttgtgctcatgtctgcaacaaatattttaataacacaaccgagctcggcgccaagatctgtggcgccgagctcggttccacgtcgacgccacgcgtctgggttgtgccaacgcaacacgacctcggcgccatagcctatggcgccgagctgtgttagctcggcgccataggctatggcgccgagcaaaggatccaaaactgcatttaaaatttttttaggtctaaacgtgattttacttctgttaagggctaaaatacaaaaaattcggccctgatggtggtgtaaactgtttgtcatatcctacatgtgagtgaaaaggccggaatgatgtttttccattatctaaaaatagaagaatagggtaagaggagtgcggctcgatgaaactaatgcttaaatgcctagtttagttgtaaatttagcaaagatagaatgtcttatgaaatttactcaaacaacacaggactttcgaatctaaaatacatgcatccttaattacaacaaagccatagcatcctaggacaaaacgctgcttttggcatgcttgaggtcgtaaatgctctctctctctctcctctagaagcccctagtagagtatgttttt

SEQ ID NO: 5965 - DNA, 1044 bp, Zea mays
  Zm_smallRNAprecursor_1454
cactctttcagctgtacacacgtagctggcacgacgtgtgcagtgcgcgtaggtatatacgcccagatgtagcacaggacatacatgtcttattggcatgcatgcatcatctaggatggcagggatcgatcggaccattttgtaaattaagaaaacgttaacttggttgaaacctagattaatttgtatattcgtgccgagaatatatatggtttatcgtctcagctagagctaggaataatggcatgcagacgacataggttatggcgccaaggtacgtgatacgccgagattaaaaaaaatctaggcgagaaataaatttaagcggacacaccaacgacataaacaaaaaaaaacaaaaaaatgcaaactatggggcttgaacccatgaccacatggttagaagccttgtgctctaccaagtgggctagatgggctttgtgctcatgtctgcaacaaatattttaataacacaaccgagctcggcgccaagatctgtggcgccgagctcggttccacgtcgacgccacgcgtctgggttgtgccaacgcaacacgacctcggcgccatagcctatggcgccgagctgtgttagctcggcgccataggctatggcgccgagcaaaggatccaaaactgcatttaaaatttttttaggtctaaacgtgattttacttctgttaagggctaaaatacaaaaaattcggccctgatggtggtgtaaactgtttgtcatatcctacatgtgagtgaaaaggccggaatgatgtttttccattatctaaaaatagaagaatagggtaagaggagtgcggctcgatgaaactaatgcttaaatgcctagtttagttgtaaatttagcaaagatagaatgtcttatgaaatttactcaaacaacacaggactttcgaatctaaaatacatgcatccttaattacaacaaagccatagcatcctaggacaaaacgctgcttttggcatgcttgaggtcgtaaatgctctctctctctctcctctagaagcccctagtagagtatgtttttt

SEQ ID NO: 5966 - DNA, 1041 bp, Zea mays
  Zm_smallRNAprecursor_1455
ctctttcagctgtacacacgtagctggcacgacgtgtgcagtgcgcgtaggtatatacgcccagatgtagcacaggacatacatgtcttattggcatgcatgcatcatctaggatggcagggatcgatcggaccattttgtaaattaagaaaacgttaacttggttgaaacctagattaatttgtatattcgtgccgagaatatatatggtttatcgtctcagctagagctaggaataatggcatgcagacgacataggttatggcgccaaggtacgtgatacgccgagattaaaaaaaatctaggcgagaaataaatttaagcggacacaccaacgacataaacaaaaaaaaacaaaaaaatgcaaactatggggcttgaacccatgaccacatggttagaagccttgtgctctaccaagtgggctagatgggctttgtgctcatgtctgcaacaaatattttaataacacaaccgagctcggcgccaagatctgtggcgccgagctcggttccacgtcgacgccacgcgtctgggttgtgccaacgcaacacgacctcggcgccatagcctatggcgccgagctgtgttagctcggcgccataggctatggcgccgagcaaaggatccaaaactgcatttaaaatttttttaggtctaaacgtgattttacttctgttaagggctaaaatacaaaaaattcggccctgatggtggtgtaaactgtttgtcatatcctacatgtgagtgaaaaggccggaatgatgtttttccattatctaaaaatagaagaatagggtaagaggagtgcggctcgatgaaactaatgcttaaatgcctagtttagttgtaaatttagcaaagatagaatgtcttatgaaatttactcaaacaacacaggactttcgaatctaaaatacatgcatccttaattacaacaaagccatagcatcctaggacaaaacgctgcttttggcatgcttgaggtcgtaaatgctctctctctctctcctctagaagcccctagtagagtatgttttt

SEQ ID NO: 5967 - DNA, 1042 bp, Zea mays
  Zm_smallRNAprecursor_1456
ctctttcagctgtacacacgtagctggcacgacgtgtgcagtgcgcgtaggtatatacgcccagatgtagcacaggacatacatgtcttattggcatgcatgcatcatctaggatggcagggatcgatcggaccattttgtaaattaagaaaacgttaacttggttgaaacctagattaatttgtatattcgtgccgagaatatatatggtttatcgtctcagctagagctaggaataatggcatgcagacgacataggttatggcgccaaggtacgtgatacgccgagattaaaaaaaatctaggcgagaaataaatttaagcggacacaccaacgacataaacaaaaaaaaacaaaaaaatgcaaactatggggcttgaacccatgaccacatggttagaagccttgtgctctaccaagtgggctagatgggctttgtgctcatgtctgcaacaaatattttaataacacaaccgagctcggcgccaagatctgtggcgccgagctcggttccacgtcgacgccacgcgtctgggttgtgccaacgcaacacgacctcggcgccatagcctatggcgccgagctgtgttagctcggcgccataggctatggcgccgagcaaaggatccaaaactgcatttaaaatttttttaggtctaaacgtgattttacttctgttaagggctaaaatacaaaaaattcggccctgatggtggtgtaaactgtttgtcatatcctacatgtgagtgaaaaggccggaatgatgtttttccattatctaaaaatagaagaatagggtaagaggagtgcggctcgatgaaactaatgcttaaatgcctagtttagttgtaaatttagcaaagatagaatgtcttatgaaatttactcaaacaacacaggactttcgaatctaaaatacatgcatccttaattacaacaaagccatagcatcctaggacaaaacgctgcttttggcatgcttgaggtcgtaaatgctctctctctctctcctctagaagcccctagtagagtatgtttttt

SEQ ID NO: 5968 - DNA, 1061 bp, Zea mays
  Zm_smallRNAprecursor_1457
ctgagtgctttggtcctgacactcgtcaaaacttgtgcctttaccgagtgctatatttgccggcaaagcaagtttctaggtggtcaagtctggtcactttatcgagtgtcatgaacattgcactcggcgaagtcatattttatacacatatatttattcatataatcctggccggctaactaaacccatatatattattgtttatccatgtacatatactccctccgtttctttttatttgtcgctggatagtgtaattttgcactacccagcgacaaataaaaagaaacggagggagtatactgtagcatgcccatatacgataactggacgacgtacgatcccatcgtttccatgctgctcatctacaagctaggagctcattggagctggcctcaagatctgggttttcaggtatatatatagacaccgtatcttatgagcaaggagccctgctgctcccatgagcaaaatcaatccagaccacaccctccacatccaacggtgctgcgtcagggggttttttataaaatgtacagagttgcaaagaacattttacaaaaccccctgacacagcaccgttggatgtggagggtgtggtctggattgattttgctcatgggagcaccaacgctccttgacacgaaactaactaaaacacatgttttttcttcttcttttcgtctgcatgcaattgcacagtggtgacacggacactgcggtgccgctgagcgcgaccaggcgctagcagctctctcgccgccctgccctgggccttcccgtaaagaccagttggtacccctggtacatcgtcgtggcgaccgaggttggcggctggagcatggagtacgacgaagggctgagcctgcttggtcaccgtccgcggcgccgggcacgaggtcccgctgcaccaccgcccggagcaggcgctcttcgtgttccagcaattcctgctgggcgaacccatgccggccgaggtgatcgatcagggttgatttggtgacaagggaatcacgggaggattggagatgattgagggggaaatgaactaatttccccct

SEQ ID NO: 5969 - DNA, 1175 bp, Zea mays
  Zm_smallRNAprecursor_1458
acgtccgaacactttttacgcaagcgaacagatttagtgtaaacggaaacccattttagcgtaaacagagtaacaaccgcgagccctcgttccagaaatagcggcttaggcccactttccacgtggtcaaccatatcttccttagtcaacacatgtttacgctattccattcttccgtttatacataatagtgatttagcataactacttcagccgacccacgttccagaaataaaggaattggcccactaccccacttcccacgcggtcaaacatttctataccctaacccccgcgcggtcaaccatcctggccgactcgccgcgtttcttcagcgatcgccagggcgattcttgttcatccgccgccgccagcgcgtttcgccgtcctccaccgccgcacgccctcaacattaatcgccgccgccgttgacagcatcgtcgagccgctgccgttgtcaatcttgcgcgccccgcgtcacattggctcacatccgcggtcgctatgtcgtccggattccaaggtactcgagttgattttttaaatttatgctttacaatgcaacttcctaatctccttcccccctttcggcagtgtgaatcgccttcatttgtctccgcgcgaacttaaacctaatcggcgccgccgttgacagtgtcgtcgagccggccgctgctgtcaatcctccgccaccgcgtcccataggtattttacatgcccaccaacggtcttcattgatcttactgttcttgtgcgattataattcagttgtttatcatagagcctttagctttgataaaggttcacggacctgttgttttagactcgttgtatgctcaaattgtgtgggtgaagatatatgcaatgatgtgaattatacatacctttatgaagtaggggttgatattttgatgtggaaacaagtgtgctgctcatgacttcgtgctactatatattattcaaataaactgtaatgcatttcactttttatatacttactggatcatatttttcagataaatatggtcatcaatcatgtccaaattaatcactcaacaatcataaaccactacttcataacattagtaaactaataggcactgcctacatttatcttttgtgctgcatctatatgaacatatatgttcaacttccaaaatggaactaaatcgacc

SEQ ID NO: 5970 - DNA, 1088 bp, Zea mays
  Zm_smallRNAprecursor_1459
ctttgacaaacagcgggggtcgcgtctctgagaagtccaagtaagaggtttcacggggaccctgttgataaccccgcccgccttgctattgaaactgttgacccgccatctctctaagaaaacgggtattatccacggttgcatttaccaaggcggcaatcgcctcggccagtgtgggaggaacaggaggtggatttgggatagactccctcccactggaagttccagctgcatcctgtgatcgggtcttggacggcatttgtggcaacaatatttggaaacaatatgatatgccaaaggaaaaaccatccattttacattaccaaaacgagtaatgtacatacacggatttttttacaaaaggatacattacctattatacaaatacactacctattatacaatagtacaacctgttatacaatacactacttctacttctactacaccattattcctgcttcccgttgcttttggcggcctcgtcgtcgggggtgggagaccattcgtcgaccagcctcatggaaggagggggttgaaaaaggtctaactcaccaccaagtgtgtgtcctgcaacatgcgagggtccggcttccgactcaacaggattcgtaggctcactgggatgcagttgcgaatataatacatgaacctcttcatgtaaggtattgcaatatgtctgcaggtcttcaacggccaagttgagcttggctactcgagcttgagctttttgcatcttgtcccatgcaagcaaacgggattgaacaacccagtcgagtgccaaatcccggtccgcgagctgatctcgcagatggcggatatctcttctcaactcatttatgtggtcgccatctacgacccagatagccgtcctgtggcggagttccgcttggagccgacttacttcagcttcgagatcccctataggatcattgcttccgctactactattatcatgccttggggccagctggtgactcggcacaccaatcggtccagtatgtttgcgcgttgttctccttgtgcgcggcggcattttctaagggggaaaattgattagtatggttcttagcatgatgcatgtataa

SEQ ID NO: 5971 - DNA, 1133 bp, Zea mays
  Zm_smallRNAprecursor_1460
tcgagttttctggtgccggtcttgctgctgagctctgaggacttggaatttcctcttgagatggcctttttcttcttcctttgccctttccacttgcatggctttgttggagaggtgcgagaaactgaggaagtcttggctggctaggatggtcttgagttctggtctgagccccttcagaaagtgggccatctttttgacttcggtgctgacgtcatccggcgtgtagcgggccagctccgtgaatttgtgcacgtactcactgacagatcttccgtcttgagttagttctcggaattcatcttccttgagctgaacgatcccttggggcacatggtgctcccggaaagccgtttcaaactctgcccaggtcgcatctctgatggtaacattgaaggtatcccaccaggctaaggccattccggaaagttgatgagcagccagttgaacacgctgattttccaggcatacgatggcttccagcttcctcttaatcgtgcgcagccaatcgtcagcatcgagggggttgctagatccggcaaacgtgggaggcttgagcctcaggaaatctcccatcctgtcttgcagtcttccaccattcgggcgttgattttccagacttcgagtgaggacctcgatgagtcgggtttggttggctagaacttgggctaaatctagaggtagttctggaggtgcggggaggtgggtctcacttccttccctaccggcttctctttcagctcttaggggaaaccctgctccaatcccggaggcggtaggcgtggttttatccgaagccatctgccaggggaagagagtcactattatgcacatgccatttttttcaaccaagttattttattcattacaccaatacattacaagcttacagctactacaagtcgtactacacgtgagcattccctgaggtacttccaaactctttttctaaagtgtccccaaattccttgagaaggtaatcaaggctagctagggacatatccttgacgtcggacaaattctctatcctggcgggagttggtgctagaggggccttcttcctccgctcagcttggcctccttggttcttggtcttcttttggattttcttcgtgggggcgagcttcttcagc

SEQ ID NO: 5972 - DNA, 1067 bp, Zea mays
  Zm_smallRNAprecursor_1461
agttcacttgataataatgattgtgttggctctaactcaagtaatgcaaatgatggttctatctcaagcatacttgatgattatggtgattgttcatgctcggacaatgatatcgctactacaagcccatccattacatcacattgcttcatgtcacaaggtaatacgaaggtatataatgctaatatgactaatcattcatattcatatgatgagcttgttggtatacttgcaagcatgaacattgctttagaaattgagaaagataaaacaagaaacttggaaaatgaaaactcatttctaaagtattcatgtgaacaacaaaagcatctactttatgttgttacttgttcacatgaggagctaaaattgagtcatgaggaacttagtgttgctcatgaaaatttgatacaagagcatgcttttctcactaacgagttttctagtaaagaaaataaaactagtgataattcatcccatgaattatatgatcaattgaaaaatgttgctaatccatgtgatgaagacaagaagcatgtatccacctcttgtgatgatttattagctatgccatgttcttcaagtatagattattactattcttccttgtcttgtgagactaaccttttgaaggaaaataataagctcaaaaacaaagtgaagaatttaagcaacatgtttgagagatggcataaatcaaaagtcactcatgatcttatattgaaaaatcaaagaagatatgatgacaagagtggccttggtttcaacaagagcaatatcaaaggcagacaattcaaattaaaaggaaatgagctatctcacttcatgtgctataaatgccatgagatgggtcatcttgcaaaggcatgccccaataaaaggaagctcaagttgaagaaggaagaaaggaggctaaagcatgacaagtgcttcaagtgccacacttggggtcacctcacctcaatgtgcccaaccaagaaattagtgaagccacaagtgaagcctcaaccaaagccacgagttgagcaaaggaaggatccccaaaagcaaatcaagattaaccatga

SEQ ID NO: 5973 - DNA, 1042 bp, Zea mays
  Zm_smallRNAprecursor_1462
tgaacattgctttagaaattgagaaagataaaacaagaaacttggaaaatgaaaactcatttctaaagtattcatgtgaacaacaaaagcatctactttatgttgttacttgttcacatgaggagctaaaattgagtcatgaggaacttagtgttgctcatgaaaatttgatacaagagcatgcttttctcactaacgagttttctagtaaagaaaataaaactagtgataattcatcccatgaattatatgatcaattgaaaaatgttgctaatccatgtgatgaagacaagaagcatgtatccacctcttgtgatgatttattagctatgccatgttcttcaagtatagattattactattcttccttgtcttgtgagactaaccttttgaaggaaaataataagctcaaaaacaaagtgaagaatttaagcaacatgtttgagagatggcataaatcaaaagtcactcatgatcttatattgaaaaatcaaagaagatatgatgacaagagtggccttggtttcaacaagagcaatatcaaaggcagacaattcaaattaaaaggaaatgagctatctcacttcatgtgctataaatgccatgagatgggtcatcttgcaaaggcatgccccaataaaaggaagctcaagttgaagaaggaagaaaggaggctaaagcatgacaagtgcttcaagtgccacacttggggtcacctcacctcaatgtgcccaaccaagaaattagtgaagccacaagtgaagcctcaaccaaagccacgagttgagcaaaggaaggatccccaaaagcaaatcaagattaaccatgaatataatggtgatgtggggaagaaaaagaaaacaagaagaagacattcaatatataatcaagataacatgatgagcacaaatcaaaagaagaaggatggtttggctcaaatcaagtgctacatgtgtgatgatatgggtcactttgcctcaaggtgtcccgacaatcttgagaagaaggctcaagcaaatgagaagaggcaagactatgtgaa

SEQ ID NO: 5974 - DNA, 1067 bp, Zea mays; identical to SEQ ID NO: 5972
  Zm_smallRNAprecursor_1463

SEQ ID NO: 5975 - DNA, 1042 bp, Zea mays; identical to SEQ ID NO: 5973
  Zm_smallRNAprecursor_1464

SEQ ID NO: 5976 - DNA, 1177 bp, Zea mays
  Zm_smallRNAprecursor_1465
atgttcactattatgttgttgttcatgttagtcgtgttgcagtcgtgtcactattatgagtcttgtcgtgttacaaaataaacatgtcgtacgcatgattttccccttcgaacaattttgcaattattcgagttgaacatgtatttgaataatcagagttgtatgtttgtgaacaatgtcaatctgtgaactttctttcacctatgatacatgaatatgtgtattatatattgtgcttatacatgaatatgtgcctgctgtttgtgtgcatgcagatgtgtgaccctgctgcacacacatatgatgatgacacggatgacagagatggacaattgcgtgttgccctatatgctgtagacatttggggcaggccttccagtgaggtttctagaagaacaatggttgaaacatgtattcaatgggttgagcgaactttggagaatagtaacgactgctttgacatgttttgcatgcgacgtactgtttttagacgattgcatgatacgttggtggaaagttatggtctgcttccaagccgtggtgtcagtgctatggaagctctaggtattttcttgtgggcatgtgggggtccacaatcatttaggcagataaggaataagtttggtcactccttggaaactattagtcgcaagtatagtgaagtacttaatgcactatataagatgtcatctgacgtaatcaagcccaaagacccaaatttcatagagattcatcctcgtttgcgagaggggagattttggccccacttcaaggattgcataggagcaattgatggtagtcactttccagcgtctgtcccggcctcggagcaagccaaatatattggtcggcacggttacgcatcacagaatgtaatggccgtttgtgacttcgatatgaggttcacatttgttgtcacaggttggccaggttcagtacatgacactagagtattacaagatactttgataacttatgcggacaggttcccccatccaccagaaggtaaataagtatgttgtacttttgtatcatacgatattcatttatgtcttaagtattgaactttatatttctgtttgtgcaggtaaatactatcttgtggattcaggttatccaaatagaaaggggtaccttgcaccttataagggtcagaagtaccacatttcagaatggc

SEQ ID NO: 5977 - DNA, 1070 bp, Zea mays
  Zm_smallRNAprecursor_1466
tccgatctttgcggtttattgatcgcgtcattgactgtcatcgatgtttatctaccaaatatatagtctttaccgtcagcctgcaatcatttcatctcttttacaatcattaatttgaaatgaaacgtaatattttagtgaaacaaaaaacaccacagtatataatcaagcaaataaaaattatataatacataaaaaacactttgttaggatagatatgggtggttggcctctaagttccttctctctgtcttgctcggggacgcttggccgccttatgcctatgacgaggcctattcacggccttttgttggtgtgactgatctatgttatatttcgaatagtcgtatggttggacacggacatgttcagtttttcagaatatgcttgcctcatccatcgcacacctagtcatgttcccaaactacaacatctctggagcctgtcctacgggagcctggttggttcttgagaaaattcctggtatgccatcagattttatactcatcccttgtgtgccactgagtggcatataggtatattttttggtgtctatgacatgtggggccagtggcatacaaggaatgagtatatttttcagtggcatcttggttcttctgagatgcgagctaggtttcactcaccaacagatcaaacacgctgagtggtccaaagggggaaactgtttgttttctgatccttcgtgttcaaatttgagtgaattacatgggaccacactacgcacgggccgaaagctgacgagcagttgagcttaaataaacacaaagtgccgggacaacgaaacgatttatttattactactactttgccatcttaaaactcaacagccacactgattatctatgaacacacaatggccctgtttggcacagcttattttcagcttcttcacaaatttaagctgaagtcctgccaaacagacagcttctgtagcagcttatcagttcagctgcttctcaaaatgaactaaaagcagacaacaagcagaagctgctttttaccagcttatcagataagctgctttttcaacaagcagcagctgtcccaaa

SEQ ID NO: 5978 - DNA, 1043 bp, Zea mays
  Zm_smallRNAprecursor_1467
ccccccctcccccaaaaaaaaagtgtttcactttattttttaggaattaaaaagtgctataattgattccatggaattgtttgaacaatagcgaatcacacccatgtgcttaaccaaataaccaggtccatgtgctttattgctttgcgggctttactgcacagtgcacacgtttatttttggaagctaggaaatgagttcgtgcatggacgcttttgtgctggcagcaaaagccccaagacaaaaaaatatacctaatgagttatttaaaaaaatgagtagtggctagataaaaaaaatctaggcgagaaataaatttgaacggacacaccagtgacataaacaaaaaaagaacaaataaaaatgcaaactgtggggcttgtacccacgaccacaaagttagaagtcttgtgctccaccaagtgggctagacaggctttgtgctcatgtttgcaacaaatatattaataacacaaccgagctcggcgccaagatctgtggcgccgagctcggttccacgtcgacgccacgcgtccgtgttgtgccaacgcaacacgacctcgggcgccatagcctatggcgccgagctgtgttacttcggcgccataggctatgacgccgagcaaagggtccaaaaatgacattaaaattttttaagatctaaacgtgaatttttttccgaaaaatggctaaaatacaaaaaattcggtcaaagtgactgccggaataggagccgtcgatcgcatatttgcatgcacaattaattcccttgccacgcgcgccttgattgcatgcatctgccccatctccctatcgcctgaaatacctgctgggcctaattactaagttgggtcgcggcccgactgacatagcagaccagcagtagcgttagcgtgatgcggtatatcattagtcccacctcacctatccaatagcaccaatgcacaaactcttctatataaagagacagagggcgctgggatcaagcataaggatctgtcttacttatgcagtctagtttaattaattgaattaatttattg

SEQ ID NO: 5979 - DNA, 1044 bp, Zea mays
  Zm_smallRNAprecursor_1468
ccccccctcccccaaaaaaaaagtgtttcactttattttttaggaattaaaaagtgctataattgattccatggaattgtttgaacaatagcgaatcacacccatgtgcttaaccaaataaccaggtccatgtgctttattgctttgcgggctttactgcacagtgcacacgtttatttttggaagctaggaaatgagttcgtgcatggacgcttttgtgctggcagcaaaagccccaagacaaaaaaatatacctaatgagttatttaaaaaaatgagtagtggctagataaaaaaaatctaggcgagaaataaatttgaacggacacaccagtgacataaacaaaaaaagaacaaataaaaatgcaaactgtggggcttgtacccacgaccacaaagttagaagtcttgtgctccaccaagtgggctagacaggctttgtgctcatgtttgcaacaaatatattaataacacaaccgagctcggcgccaagatctgtggcgccgagctcggttccacgtcgacgccacgcgtccgtgttgtgccaacgcaacacgacctcgggcgccatagcctatggcgccgagctgtgttacttcggcgccataggctatgacgccgagcaaagggtccaaaaatgacattaaaattttttaagatctaaacgtgaatttttttccgaaaaatggctaaaatacaaaaaattcggtcaaagtgactgccggaataggagccgtcgatcgcatatttgcatgcacaattaattcccttgccacgcgcgccttgattgcatgcatctgccccatctccctatcgcctgaaatacctgctgggcctaattactaagttgggtcgcggcccgactgacatagcagaccagcagtagcgttagcgtgatgcggtatatcattagtcccacctcacctatccaatagcaccaatgcacaaactcttctatataaagagacagagggcgctgggatcaagcataaggatctgtcttacttatgcagtctagtttaattaattgaattaatttattgt

SEQ ID NO: 5980 - DNA, 1041 bp, Zea mays
  Zm_smallRNAprecursor_1469
ccccctcccccaaaaaaaaagtgtttcactttattttttaggaattaaaaagtgctataattgattccatggaattgtttgaacaatagcgaatcacacccatgtgcttaaccaaataaccaggtccatgtgctttattgctttgcgggctttactgcacagtgcacacgtttatttttggaagctaggaaatgagttcgtgcatggacgcttttgtgctggcagcaaaagccccaagacaaaaaaatatacctaatgagttatttaaaaaaatgagtagtggctagataaaaaaaatctaggcgagaaataaatttgaacggacacaccagtgacataaacaaaaaaagaacaaataaaaatgcaaactgtggggcttgtacccacgaccacaaagttagaagtcttgtgctccaccaagtgggctagacaggctttgtgctcatgtttgcaacaaatatattaataacacaaccgagctcggcgccaagatctgtggcgccgagctcggttccacgtcgacgccacgcgtccgtgttgtgccaacgcaacacgacctcgggcgccatagcctatggcgccgagctgtgttacttcggcgccataggctatgacgccgagcaaagggtccaaaaatgacattaaaattttttaagatctaaacgtgaatttttttccgaaaaatggctaaaatacaaaaaattcggtcaaagtgactgccggaataggagccgtcgatcgcatatttgcatgcacaattaattcccttgccacgcgcgccttgattgcatgcatctgccccatctccctatcgcctgaaatacctgctgggcctaattactaagttgggtcgcggcccgactgacatagcagaccagcagtagcgttagcgtgatgcggtatatcattagtcccacctcacctatccaatagcaccaatgcacaaactcttctatataaagagacagagggcgctgggatcaagcataaggatctgtcttacttatgcagtctagtttaattaattgaattaatttattg

SEQ ID NO: 5981 - DNA, 1042 bp, Zea mays
  Zm_smallRNAprecursor_1470
ccccctcccccaaaaaaaaagtgtttcactttattttttaggaattaaaaagtgctataattgattccatggaattgtttgaacaatagcgaatcacacccatgtgcttaaccaaataaccaggtccatgtgctttattgctttgcgggctttactgcacagtgcacacgtttatttttggaagctaggaaatgagttcgtgcatggacgcttttgtgctggcagcaaaagccccaagacaaaaaaatatacctaatgagttatttaaaaaaatgagtagtggctagataaaaaaaatctaggcgagaaataaatttgaacggacacaccagtgacataaacaaaaaaagaacaaataaaaatgcaaactgtggggcttgtacccacgaccacaaagttagaagtcttgtgctccaccaagtgggctagacaggctttgtgctcatgtttgcaacaaatatattaataacacaaccgagctcggcgccaagatctgtggcgccgagctcggttccacgtcgacgccacgcgtccgtgttgtgccaacgcaacacgacctcgggcgccatagcctatggcgccgagctgtgttacttcggcgccataggctatgacgccgagcaaagggtccaaaaatgacattaaaattttttaagatctaaacgtgaatttttttccgaaaaatggctaaaatacaaaaaattcggtcaaagtgactgccggaataggagccgtcgatcgcatatttgcatgcacaattaattcccttgccacgcgcgccttgattgcatgcatctgccccatctccctatcgcctgaaatacctgctgggcctaattactaagttgggtcgcggcccgactgacatagcagaccagcagtagcgttagcgtgatgcggtatatcattagtcccacctcacctatccaatagcaccaatgcacaaactcttctatataaagagacagagggcgctgggatcaagcataaggatctgtcttacttatgcagtctagtttaattaattgaattaatttattgt

SEQ ID NO: 5982 - DNA, 1040 bp, Zea mays
  Zm_smallRNAprecursor_1471
ttgcgacatttttctccatgtgccacaacatttctgctgatgtccatgaggtggcacgacgtcagcgggaaactgacgacaatcttcgtcgtcaagcttccaccatgggtatgccatttgtccctcgctcgcctgacgtgcctctccatcctcctcccccggagatcaatgagtggcaccagcaggcctacggggtgccatttatgtctgcagacgacgaagaagaagaagaagcctatgttgatgatcgcgagcagtttgccccgcctccctaccatggggatccgggtcaatcatcctctcaccctccgcctccctacccgggtccgggacccattcctggtgatcctaggccatccggctctggttaccatcaccaccctccacctcctcctgatcatcgtacatcttcggcatctgttttttctgcggctgatgagccacctcgggactccacatttgaggaggacgtgatgaggaccctcttccctgactacacttcataccctccatcatatcctccgtcttatcctcctcctggaggatattgattcatgtatccttgtctctctcttcgtttttggtacttgttgccaaaaagggggagaaaatccaacctctagtttgtggttctttcggttttcttttggattatttttgttttggccactgttgtggcttgtatccttttaccattgtatgaaataaaactgttgggttgttattcaaagtaatatgatggtcttctggccatcatcttttgtcctatcagtttgtaatgattactttgctatgaagtaaaaatgatgtgtatttagagatagtcatgtgcatcacaactcctgttatgacactcttgcacccctcagatggttgtattcagtatggtttttgtcaatatctctaaatgtgttgctcacatgacatattatgacaaaacattggattcacaatcatgcacacatttagggggagccatctacatacaatcattcaaaagaaattttctattgcaaatgtatatctttttgaccttaatt

SEQ ID NO: 5983 - DNA, 1111 bp, Zea mays
  Zm_smallRNAprecursor_1472
gtcgagggtgcgcccgttgcttgaggaggccctcgggcgaggcgtgaattcgcctgggactactgttcccgcccgaggctgggctcgggcgaggcgagatcgcgtcccttgagtagacgaagccttgacccgaattgcgcccatcagtctctgcagcttgtgctgatggtggttaccagccgtgtttaggagtgttgggggtacccctaattacggtacctgacaagtgttaaattggtctagattaattagtaattgatcatattgtagtatatatatgcatattgttttttgactcacaagctaaacgagctaactaaagctcgcaatcgagccgagtcgagctaactttatcttaacgtgatagctcgacactagtacaaagaagctttatagaggcggttctaaatatatctttactgacgtgtttagaaccgccagtgctacagcccaatagaaataaaaatttatatagccagttgtttatgtttcctaaaaaagattagtactaacgattttcttacctcaatcgtcagtggaaattgattttcactagaagttgtgttaattaagaaccgctagtagaaatcgatttccactcgcgattgaggtaagaaaatcgttagtactaatctttttccggaaacgtaaacaaggttttaaaaatagaaaaataacattttaattaggggaggcctcacccgcctaattcgcggcatttttcgcgcaaaactctttgcacgctatgcatgccggtcaaaatcgaacccccaaccttaccctcatgtatagcttgctctacaactcaagcaatcgcttacttcatgtctacatactatttttgttgcccacatattatagcacaatgagtgtaaattgattgcatgaggccgtaaacaaattcaaacaaaaaagttgtcaactacaaagttgaataacttttaaagttctacaacttttattttgctactttttgagtccaaggtcatttgcaaaatttgcattgtaaatttgtcgaattaagatgcaaattttgagagctgaaataatttcaaataaaaagttatcaactacaaagtttcgtaacttttaaaggtctacaacttttttg

SEQ ID NO: 5984 - DNA, 1106 bp, Zea mays
  Zm_smallRNAprecursor_1473
gacggtgcccggcaccagtgccgacacggcgtcgccggcgacggccaacatggcccatcactgcgccaaacctaaattaaaagatcctacacgatgcttagagaagtgcggacaaaaaggtactcaacttaccacagtccggggtgaagatcctcctgtccacgtggtggcacggatccgcggcagtgagcaaccgcgacgagcaattcccactgccatgagactcgattgttctgaccgcgcccgcgagtatcttccccgtgccctatgttctcccccggcctagtccacggggtcgaatcagcgatcaaacggattctcgccacagccgaactcttccaccgccccctttcttctcggtcacgagttgggcgaacagaggaactatctagaggcttgggtcgcggcttatagcctgaggctgttacggacccccagctggcggacttggtcattgcttccgacccaccgatccatccgcggaaggtggcggctctgttaggccttgttcgtttacatcggtttgcacccggaatcgttccagctaatcaaagtttatataaattagagaagcaatccggctaggaatcgttccgacccactaatccgacagaaacgaacaaggccttatggtgccgacggagccgccataattgtggcttggcaccccaggtccacacagcggagaaacagaaggcaacgcaaatcccgcacacagagactagtggggagggaagagtttgtggcccgcgatttcatcggagaaacgatgtcgcgcaatccacgcatttggttgacacgccgacggggatgactagtggggtcagcgtgtcagtcagtagagtgatgcactctgagtcataacatggctgacggaaggggccgcatgtcaggggtcagtagcgcgcgcggtggaaatgagtgggccgcgcgaacgagtgggcgaagtgggccgaaatggtcttcccgacccaagaagacaatccttccttttcttttttttctggttttctttttcttcttattttcaatttccaatttgaatttcaaatatggttgtgaattttgtactcacattaaatacttgacttaaacatactagtgtg

SEQ ID NO: 5985 - DNA, 1070 bp, Zea mays
  Zm_smallRNAprecursor_1474
tcatctcctatatgcaaacaatgtgatgctctaatctagttgccctaaagtcccgctcaagtctttctctcaaattgtgctcaaagaaatactgttggatcagaaagatgatttggatatcatgctctgaaatctataaagttcaaaagatctttgttaaggattataacacctgtaaacccttgaagtatgatgaagctaggagaaatctgaaaccatccttgctccttgactaatcttatcttggaaatcgaaatgttgtgttagctctttatcttaatgtcatacaagccttttatgcagtctgtctcattaactcttttaccctatgactagatgatgaaccctaatggaaatgaagtaaatgatgcccacgacaatattcctaccttaaaaactatgaacgagaaaaatgagtcacagagatattcgatgaatagaatgaagaacaacaaaaggaatagaaaaaagagaaaattcctggtatgccatcagattttatactcatcccttgtgtgccactgagtggcatataggtatattttttggtgtctatgacatgtgggaccagtggcatacaaggaatgagtatattttccagtggcatacagggaattggccctagaaaaaaaggtttggatacatgattagtccacctcaaccacaagcaaaagccacaaaagaatcaagtcaggcttagctatatgagatacaaacacccaatcaaccctcaccccctgttggtcaagcaaagttgactcgcaaagaactcaaagcaagaggtgctttctactagtgcaaaaatgaaggacatattattcgtgaatgccccaagaagcatctagaccgactagagaagaaagttgccaagcatgacctaagcaataattcagaagacccaccattttataagtacgatgatgaaggttgcttgattagtatacattgcggaggaaagtaaggaagttccttaatgttagaagagttcaatgtgaactaagaacctacaaataaaccatttatctcctttgctttcgtgcaagccttccttaatctcgaggacgagattc

SEQ ID NO: 5986 - DNA, 1163 bp, Zea mays
  Zm_smallRNAprecursor_1475
ccttatttgttttgtcattaaatcaccaaaaccctcacttggggttgattgcaattacaatctccccctttttggtgattgatgccaaaacaattaaggtaaaaaagataaacatttgaaatagaaaatttcttttgaatgattgtatgtagatggctccccctaaatgtgtgcatgattgtgaatccaatgttttgacataatatgtcatgtgagcaacacatttagagatagtgacaaaaaccatactaaatacaaccatccgaggggtgcaagagtgtcataacaggagttgtgatgcatatgactatctctaaatacacatcatttttacttcatagcaaagcaatcattacaaactgatggggcaaaagacgatggccagaagaccatcatatcacattgaataataacccaacagttttatttcatacaatgataagaggatacaagccacaacagtggccaaaacaaaaacaataataaaaaagaaatacataaccgaaagaaccacaaacagaatgactagaaattttggattttctccccctttttggcagaaagtaccaaaaacgaagagagagggagaagaggaaacatgaatcaatatcctccaggaggaggataggacggaggatatgatgtgtactcggggaagaaagtcctcatcatgtcttcctcgagtgaggagtccctagggggctcaacattcacagaaaaaatggatgttgaagatgtacgatgatgaggaggaggtggaggaggagggtggtgatggtaaccagagccggaaggccgcaggtcaccaggaatgggtcctagacccgggtagggaggaggaggatagtgaccagagccggacgacctagggtcaccaggaatgggtccctgacccgagtagggaggaggaggatgaggagggtccgaggtgtagaaagagtcatcatagtcctcgacctcatcctccggagtaatgaatggcacaccaaactcctgttggtgccactcattaaggtctgcggggaaagtaggggctggaggtggaggggacccagaagggagaggattaccagtctcggctgcataacgacgaagatcctcatgcagccggtcgggcctgcgacggtgcacagactcctcaactgcccgggtgcggcacatgg

SEQ ID NO: 5987 - DNA, 1163 bp, Zea mays; identical to SEQ ID NO: 5986
  Zm_smallRNAprecursor_1476

SEQ ID NO: 5988 - DNA, 1094 bp, Zea mays
  Zm_smallRNAprecursor_1477
tcggcatctgcatagccaactatttgtagggaattagatcttctgtacgtaagcatgagacctttagtaccttgaaggtaccttagagccttcttgactgctttccagtgttctatgcctggattcttctgatagcgtccaagcatcccggtggtaaaagctaagtcagggcgagtacatacttgagcatacataatgcttccgatagctgaagcatatggtactgacttcatcttgtttttctcatactgattcttgggacactgatattccccaaacttatcacccttgactattggaccaggcgaggcattacacttgtgcatattatacctctttagtacattttctatatatgacttctgtgagagtcctagtactctcttttgtctgtctctgcgaatttctattccaagaacataagaggcttctcccatgtctttcatatcaaaattcgaggaaagaaacccttttgtttccgctagtagatccttatcactactagctaagagtatgtcatcgacatacagaacaaggaagatatactttcctttcttaaattttgcataaatgcaattgtcttccttgttttcctcgaaaccaaactttcttatagtctgatcaaacttgatgtaccactgtctggaggcctgttttaatccataaatggacctcctcaagtgacatcccatgtgttctttaccgctcacaacaaaaccctttggttgtgccatgaacacgttttcttctaactctccatttaggaatgctgtctttacatccatctgatggagctctagatcaaaatgagcaactagtgccattatgatcctgaatgaatcttttgttgagacaggtgagaaggtttcatggtagtcaatgccttctctctgtgtgaaccctttggccacaagtctagccttgtatctttctatgttccctctggagtcacgctttgtcttgtagacccatttacagcctactgttttggctccatggggaatgacttctaagtcccaaactttgttcattctcatggattctaattcatcttccatggcagataaccatttggatgaatttgcacttctcat

SEQ ID NO: 5989 - DNA, 1053 bp, Zea mays
  Zm_smallRNAprecursor_1478
cggttatagatggccaaacgggccgtgctaaatgggccggcactaagcacggcacggcccatagtgcttcggcacgacacgggcacgattcatatagtgccagtgccggcacgacacgagtctagtgccgtgcttgggccgccaccccggcacgatgggttggcacgggcacgacacgattaactggccggcacggttaggcacgacttagaccaacatgtggtttataaatgtgattgtgatatgtgtatgtggttgtacattgttatttgttatgatttacacataatgaattcactttataatgatataaatattcgagttttaaaattatatatataatcttaaagatcttctatatttttttatcttttaaaatgaaatagtgcctgggctggcacgggcactattagatattagtgccgtatagtgccggcacggcacgattaggcactatagtgtagtgcctgggccgctggttaggcactagtgccggcacggcacgacacgattactaatagtgcctaatagtgccgtgcctaatagtgccgtgcctaatagtgcttagtgccgtgccgggccgggcggcccgtttggccatctataagtccggtggtgcaccggacagcgcactatagcctgtccggtgcgcctagtcgttgccctgtcagagctggtgaccgttggcgccgcaggcttttcacaccaaacagtctggtctccacaccggacagtccagtggtgttctctccgggtgccacctggaactagccgttgggctgctgttccctggtgcaccggacagtccggtgctccacacacagatagtccgaaggcagcacacttggacttttcttagatcttttcaatgtcttcttttgaggtgttgcttttcccaattccttagtccaagtaaattttgcatcctgtgaactacaaacataaacactagaaaacttattagttcacggattgtgttgatcatcaaacaccaaaactcaattagtcaaatggcccggggtccattttccttacaatctccccctttttggt

SEQ ID NO: 5990 - DNA, 1097 bp, Zea mays
  Zm_smallRNAprecursor_1479
tagttttatctaaattataatttttaaaatggaattcaattccaacaaaacaaacggggcctaagatttgttgctttgaggactatgggcagaaacatacctggtccaaaatactagcacaagagtaattccgatttctcttttaaaaaaattgggcttacctaacagagatacatttccatgcctctatttataataattaaggattttttattatgttcattttatgaaatatgttgcggtttggcagaggaaaaatgtcatggccatccttctcagctctgcattcctcatgggctttatttaggccgtatgctgcacagtcggcccactatttcgccgccctttgctgtgtcattcagcttagctgcccggatacatcgcaggctccgactccgagcccagtttggatttatctcccacatccataaaccgtacctaatcatgcaatcggtctgtatgcaaaagtcgcactgtctaaagtgttacagctttaggccttgttcgtttctgctggattggtgggtcggaacgattccggaccggattgcttctctaatttatataaactttgattagctggaacgattccgggtgcaatccgacggaaacgaacaagaccttaatggaaaattttctctacctttaggataagcatatatgtcaaggttaagtaaaaacatgttctagaaatataagtagataacacattgtatttctcgaacagttatatattaaatcataacaagataacataaacgatagttttcacatgactcaagactaaatgacaacaaaaaaatgatgactccacatacaactgacaaatggcaccattctagaattcattgtagtccttgaactcatgctagtactcctctaaaacatcatacccctagacagtgattgcattgcaatgcaacatagtatacgttcattttgatgtacatataatgatttcttacatctaacaatatgtatacgtgataatattttgcattaagaacaaatgaagtacatcctgattataatttaaacggggatggggatccccgatggggatttatcccacagagaacggggatggggaagaaatg

SEQ ID NO: 5991 - DNA, 1087 bp, Zea mays
  Zm_smallRNAprecursor_1480
tttgacaaacagcggtggtcgcgtctctgagaagtccaagtaagaggtttcacggggaccctgttgataaccccgcccgccttgctgttgaaactgttgacccaccatctctctgagaaaacgggtattatccgcggttgcatttaccaaggcggcaatcgcctcggcctgtgtgggaggaacaggaggtggatttggggtagattccctcccactggaagttccagctgcatcctgtgatcgggtcttggatgacatctgtggcaacaacatttggaaacaatatgatatgccaaaggaaaaaccatccattttacattaccaaaaggagtaatgtacagactcggatttttacaacaggatacattacctattgtacaaatacactacctattatacaatagtacaacctattatacaatacactacttctatttcaactactacaccactattcctacttttcgttgcttttggcggcctcgtcgtcgggtgtgggagaccattcgtcgaccagcctcatagaaggagggactgaaaaaggtctaactcaccaccaagcgcgtgtcccacaacatgcgagggtccggcttccgactcaacaggattcgtaggctcactgggatgcagctgcaaatataatacatgaacctcttcatgtaaggtattgcaatatgtctgcagttcatcaacggccaagttgagctcggctactcgagcttgagctttttgctccttgtcccatgcaagcgaacgggattgaacaacccagtcgagtgccaaatcccggtccgcgagctgatctcgcagatggcgaacatctcttctcaactcatttatgtggtcgccatctacgacccagatagccgtcctgcgacgaagttccgcttggagccgacttacttcaacttcgagatcccctataggatcattgcttccgctactactattatcatgccttggggccagctggtgactcggcacaccaatcggtccagtatgtttgcgcgttgttctccttgtgcgcgacgacattttctaagggggaaaaatttgattagtatggttcttagcatgatgcatgtat

SEQ ID NO: 5992 - DNA, 1087 bp, Zea mays; identical to SEQ ID NO: 5991
  Zm_smallRNAprecursor_1481

SEQ ID NO: 5993 - DNA, 1040 bp, Zea mays
  Zm_smallRNAprecursor_1482
ttgtggcatttttctctatgtgccgcaacatttctgctgatgtacatgaggtggcaaggcgtcagcgggagactgacgacaatcttcgtcgtcaagcttccactatgggtatgccctttgcccctctctcgcctgacgtgcctctccatcctccgccccaggagatcaatgagtggcaccagcaggcctacggggtgccatttatgtcagcaaacgacgaagaagaagaagaagcctacgttgatgatcgtgagcagtttgccccgcttccctaccatggggatccgggtcaatcatcctctcaccctccgcctccctaccctggtccgggacccattcctggtgaccctaggccatccggctctggttaccatcaccaccctccacctcctcctgatcatcgtacatcttcggcatctgttttttctgcggctgatgagccacctagggactccacattcgaggaggacgtgatgaggaccctcttccctgactacacttcataccctccatcatatcctccgtcctatcctcctcctggaggatattgattcatgtatccctgtctctctctttgtttttggtacttgttgccaaaaagggggagaaaatccaaaacttctagtttgtggttcttttggttttcttttggattatttttgttttggccactgttgtggcttctatcctcttatcattgtatgaaataaaactgctgggttattattcaaagtgatatgatggtcttttggccatcatcttttgtcctatcagtttgtaatgattactttgctatgaagtaaaaatgatgtgtatttagagatagtcatgtgcatcacaactcctgttatgacactcttgcacccctcggatggttgtattcagtatggtttttgtcactatctctaaatgtgttgctcacatgacatattatgtcaaaacattggattcacaatcgtgcacacatttagggggagccatctacatacaatcattcaaaagaaattttctattgcaaatgtatatctttttgaccttaa

SEQ ID NO: 5994 - DNA, 1108 bp, Zea mays
  Zm_smallRNAprecursor_1483
ctagtatactctacttgttcacctgtgtcggtttggggtacggtcagttcaccgggaggatcgccctcccaattcgaagttttttcctggaagtttaaaccgtcgttgactatgacaacagtcgcgaccgactattaagatcctcgcgactatggcagggcggtacgctcatctctctcgcgacctctactctaatcaaaagactaaaggcccgcccctacggaagatgaaaaaggcgaggactgaaatgagaaaggaaggacaagacgacttcggttcacacgtgaaagtgcttcgaaaggtgtcagcaggtgcgcggagccggagccggcatgttcgcccgctgggccgagtgttcgaccacttcagagtcttcgcctttagagaaccgtgtccgcccaaaacggctgcgcgttattgtactaagttaagtactaagtactaacctaacctaacgcgcgacggagcaagagtatgcgcgtgtacggaagcgcaacggctttcgcgctcatcccttgcttcaaaacaaaaggttttagccctccctccgtttgctttgctggtcgccaaagacgagagcttcgcctttggaagcgccagtagcgtagggcgaccgggccagccgagcccctccgaattagttgacggctttgatgactcgacggtgaatattaaggaaaggagagcgaggggaagagggggcagccctcggcccgatcatccaattcgctccgacgatccaggcatggttcagtagtcaaagcaacttcgtcactttcgtgtacccatcggacggcagccctttcgggagttccttagggaccgattcactctgcgtagattgaatgaacgcagaaagcctttcactggcaggcgatcgtgttttcacaggatttctcgttactcatgtcagcattctcacttctgatatctccaggtcttgtcaccaaaaaccttccccgattgacagaacgtcccgctactgacacttgaaaaagcagctttcaaggtctcgtcgcttcggtgaatcacttgagccctgagacattttcggtgccatggagctagaccagtgagctattacactttcttcaaaggatggctgctt

SEQ ID NO: 5995 - DNA, 1107 bp, Zea mays
  Zm_smallRNAprecursor_1484
tgccacatacgtgggttcggtcctccaaggcctgttagagctctcttcaacctgctcatggctagatcgatcggtttcgggtcaaataggaagaacataaatcttccattccacctctagaaagcgcctacacctaatggcttaagccgctgttcccatttcctcgttgaaccatcatgcgaaaggtatgccgttagagtgagtgcgcccgcgctccgctccttcgactgattgttcgcatcggatctcaggttctctattgcactccccgattggggttcttttcacctttccctcacggtacttatacgctatcggtcattgaggaatacttagtcttagagggtggtccccctttctcgcgtaaaagcgatcatcattcgaacacgccgcgttttactgggaaggatcgaaccatgggaacgaatgaacagggctatcaccttctttggctagatcttccaatctttttagaaaaccacttcactgcgtgccccaccccgtcctgtgttgcctatgcttgcgccccaaaacagttgctgactttgtacaactccgtagggcgcgctacggcaacacagcctacgcttgctgcttgctggtttttccatcatccaatccacaacaaatcaaatgaaaccgcttcggatttcttttgatgaaaatccttgttccgctctcgctcgctgctactaacggggtctcggttgattttccttcctttagctactcaaatgtttcagtttgctaagtttgaaaagtccaaagagcgcagactagccatggagcttggatacggtttcccgatcggagatccatggatcacagacgctctctctccccatggcctttcgcctctgaaagcgtccttccttctcaatgcccgggcatccatccaatgcatgattttcgatagcgtcgaacatgagcggtagactgaacacccacacaatctcaattttacacagcaacactttccacctctcttccttcccttggatcagataggaaatcctcacttttccaagacagaagagaagcaagcaacagattgagcaactagcgctaggcgcatcctcttgcttgatttttatacgattttcgtcc

SEQ ID NO: 5996 - DNA, 1069 bp, Zea mays
  Zm_smallRNAprecursor_1485
gaacttatgagtcttctcgattgttattcaggctatcatcaaatttggatgaagaaggaggatgagcttaaaaccagtttcataacccctagtggaacgtattgttaccttcggatgcctgaggggctcaagaatgctggaggaagtttcagcagaatgactgcgaaggttctccagtctcagataggtagaaatgtgctaacttatgttgatgatatcattgtaaaaagcacgaagcaggaaaatcacattgctgatttgcaagagaccttcgccagttttaggcaagctggcctaaaattgaatccagaaaaatgtgttttcggagtcaagaaggggaaatttctgggatgcttggtctcaacaaagggaattgaagctaatccaagtaaaattgaagctatacttcgaatggagccaccaactacaaaaaagggtgcccaaagattgacagggaggctggcatctcttaatagatttatatccagatcagcagaaagaaatctaccattcttcgaagtactgaaatcagccgaagactttcaatggggaccaagccaacaaaaagccttcgaggacctgaagcaatatttgatagatttaacaacattaactccaccagcgctaggggctccgttgttattatatgtggcagcttcgcactcagcggtaagtgcagcacttgtccaggagaagcttgatggccaagtcaagaagcaggtcccagtgtattttgtatctgaagttcttagtatatcaaagaaaaactatacagaattagagaaggtgttatatgctattttgatggcatccaggaagcttcggcattattttcaagcatacaatattattgttccttcttcgcagccgttgaaggatattatgagaaatagagaagctactgggcggattggaaaatgggctgcagagctcaatgaattttgcattgattatgtgcatagatcttcgatccagtcccaagcattggcagattttatcgtcgattggacgccaggggctcaggatgaagaaacaaataaagatgccgaagtatggacagtgttttgcg

SEQ ID NO: 5997 - DNA, 1171 bp, Zea mays
  Zm_smallRNAprecursor_1486
tacccttatttgttttgtcattaaatcaccaaaaccctcacttggggttgattgcacttacaatctccccctttttggtgattgatgccaaaacaattaaggtcaaaaagataaacatttgcaatagaaaatttcttttgaatgattgtatgtagatggctccccctaaatgtgtgcatgattgtgaatcgaatgttttgacataatatgtcatgtgagcaacacatttagagatagcgacaaaaaccatactgaatacaaccatccgaggggtgcaagagtgtcataacaggagttgtgatgcatataactatctctaaatacacatcatttttacttcatagcaaagcaatcattaaaaactgatgggacaaaagatgatggccagaagaccatcatatcactttgaataataacccagcagttttatttcatacaatgataagagaatacaagccacaacagtggccaaaacaaaaataatccaaaagaaatacataaccgaaagaaccacaaacagaatgactagaaattttggattttctccccctttttggcaacaagtaccaaaaacgaagagagagacatgaatacaagaatcaatatcctccaggaggaggataggatggaggatatgatggagggtatgaagtgtagtcagggaagagggtcctcatcacgtcttcctcgaatgtggagtccctaggggctcatcagccgcagaaaaaacagatgccgaagatgtacgatgatgaggaggaggcggagggtggtgatggtaaccagagccggatggcctagggtcaccgggagtgggtccctgacccgagtagggaggcggagggtgagaggataattgacccggatccccatggtagggaggcagggcaaactgctcgcgatcatcaacgtaggcttcttcttcttcttcgtcgtctgctgacataaatggcaccccgtaggcctgctggtgccactcattgatctctgggggaggaggatggagaggcacgtcaggcgagcgaggggcaaagggcatacccatagtggaagcttgacaacgaagattgtcgtcagtctcccgctgacgccttgccagctcatgtacatcagcagaaatgtttcggcacatagagaaaaacgctgcaatcccatggaccaagcgagcacc

SEQ ID NO: 5998 - DNA, 1051 bp, Zea mays
  Zm_smallRNAprecursor_1487
cagggcaaccatggccaagcaggaggtggcacctcgttggctgtcgagtgagtcaacgacgctggcgccccaacgggggacacgtcgggcgttgacctcgcgtctgaggtgaaggcgagcgtcgtttccctgcaacatgccaaccccaagcggacagatgacgccagcacgctcgcgaaggacttgctgggcgttagcctcgtacctgatataacggtgcagtctgtccccgacgcgacttcgtcaccatccgtcgatcaagaggtgccgtccgttttccaccctgtgccttttagattcagcttcgacccaccaagcgaccccgcttcggtggacgctttcataaaggcatatcctaaccttccggggtaccatattgtaacacacccactgggccagtccgcctaaagcccaccatcgccagtgtcggacgttcatgcgctcgtgcacagcctattcagacgggcacctcgctctcaaaacctaggctgagagaggagggaggcccgcccttataagtgcaacacggcccccttggctaggcgaggtggtactaacccagggcgtgcataccagtcccttacatcccaccccctaagaggcccaaagctctcccaggcagcagcggcaatgtgggctctgataccaattgtaacgcacccactgggccaatgcgcctaaccaccatcgccagcgtcggacattcatgcgctcgtgcacaacctattcagatgggcacctcgctctcaaaacctaggctgagagaggagggaggcccgcccttataagtgcaacacggcccccttggctaggcgaggtggtactaacccagggagtgcataccagtcccttacacatatgtggtcaacctgggaccgactgacggccgtctcaacctacgggtccccgggttccgaggaagatgacgagcccgactctggttgggatttctccgggctcggtaaccccagtgccatgcgagacttcatggccgcatgtgactactgcctctccgattactccgatggtggccacagccttgacgacgagg

SEQ ID NO: 5999 - DNA, 1221 bp, Zea mays
  Zm_smallRNAprecursor_1488
agtcaacgacgctggcgccccaacgggggacacgtcgggcgttgacctcgcgtctgaggtgaaggcgagcgtcgtttccctgcaacatgccaaccccaagcggacagatgacgccagcacgctcgcgaaggacttgctgggcgttagcctcgtacctgatataacggtgcagtctgtccccgacgcgacttcgtcaccatccgtcgatcaagaggtgccgtccgttttccaccctgtgccttttagattcagcttcgacccaccaagcgaccccgcttcggtggacgctttcataaaggcatatcctaaccttccggggtaccatattgtaacacacccactgggccagtccgcctaaagcccaccatcgccagtgtcggacgttcatgcgctcgtgcacagcctattcagacgggcacctcgctctcaaaacctaggctgagagaggagggaggcccgcccttataagtgcaacacggcccccttggctaggcgaggtggtactaacccagggcgtgcataccagtcccttacatcccaccccctaagaggcccaaagctctcccaggcagcagcggcaatgtgggctctgataccaattgtaacgcacccactgggccaatgcgcctaaccaccatcgccagcgtcggacattcatgcgctcgtgcacaacctattcagatgggcacctcgctctcaaaacctaggctgagagaggagggaggcccgcccttataagtgcaacacggcccccttggctaggcgaggtggtactaacccagggagtgcataccagtcccttacacatatgtggtcaacctgggaccgactgacggccgtctcaacctacgggtccccgggttccgaggaagatgacgagcccgactctggttgggatttctccgggctcggtaaccccagtgccatgcgagacttcatggccgcatgtgactactgcctctccgattactccgatggtggccacagccttgacgacgaggactgtggcccaagtcgcgaatgtttccatgtcgatctagggggtctcgacgaaggcaaccaccttggtatgccggaggacggcaatccccctaggcttgcgcctcgcgttgacatccttcgggagctagctgtggtcccagtccttgcggggggggggggggtcaggacacacagctcgagcaaatccgcgagatgcaggccaggctcaacgaggaagca

SEQ ID NO: 6000 - DNA, 1032 bp, Zea mays
  Zm_smallRNAprecursor_1489
cgggggtttacatgtctccctgctcgctgtcgaacttgggttctctgctcagcctttagcgctagcgcctcgcccgtgaggttaccgtctcgtcgtgattccttggtggtctgtgtctccgcatgttcaaatcgttaactccgtgcaccatctgctcgctaaatgggaaaccaacagtcttctccctgctcctctgcgcgcagtcgcgttcctctaccggctatcagttgccgctgaaccactgtcagattaattttcagcttccctcgcgcggctctctggagataagctcttcatcggctgtcgcttccaatcttcagttcgccgactgactgtcgtgttccttattttcactcgtcggtcgacttcgtcacgacttagttcgtccatcgtgttgatcgctatcacatactgtacctattagctcggatcctgcccagctcgtcgtcgcgtcgtttgccgtcgagtcgtcaaacacgtcatcccctgctcgacccccacctcaccagctcgctccaaacacgatctcgtcgtcgttccgcgcgtcagcaagaaatctcaagaatcgggtgaagacgaagctagcagcgcgatattccctaaacgctcgacaaattgcctggatcggaaaatcgctaccaatctcgcggattcgtgtcagctgtggaaacggtaagctgataaattattcagaatagctggatcgatgaataaataaatgtgctagtgcgatgctcattaaggtgctcgataaattgtgtaagtcacgaaactttcgtcgacttcgcagttcttgcgattatcgagctaggttcagttatagcaagttatctcgctattccggtcaattagttgaattagtataccgagtagaatattagtaggcctgtggggtgatggaatatttttatcacttataaagatgtagtataatttataaagcaagggattagttcagaatttaattaattaactgataagttgtgattaggctaattgtatttcttgtgtatagtttgttgttcgtgatgt

SEQ ID NO: 6001 - DNA, 1032 bp, Zea mays
  Zm_smallRNAprecursor_1490
ccaggttttgacatgtctccctactcgtcgtcgaacttgggttccctgctcagcctttagcgctagcgcgtcgccgtgaggttaccgtctcgccgtgattccctggtggtccgtgtctctgcatgttcaaatcgtcaacctcgtgcaccacctgctctctaaatgggaaaccaacagtcttctccctgctcctctgcccgcagccgcgttcctctaccggccatcagttgccgctgaaccactgtcggattaattttcagcttccctcgcgcggctctctggagataagctcttcatcgactgtcgctcccaatcttcagttcgccgactgactgtcgtgttccttattttccctcgtcggtcgacctcgtcgcgactttgttcgtccatcgtgctggtcgctatcccatactgtacctattagctcggatcctgcccagctcgttgtcgcgtcgtttgccgtcgagtcgtcaaacacgtcatcccctgctcgacccccacctcaccagctcgctccaaacacgatctcgtcgtcgttccgcgcgtcagcaagaaatcccaagaatcgggtgaaaacgaagctagcagcgcgatattccctaagcgctcgacaaattgcctgtatcggaaaatcgctaccgatcccgcggattcgtgtcagttgtggaaacggtaagctgataaattattcagaatagctcgatcgatgaataaataaatgtgctagtgcgatgcttattaaggtgctcgataaattgcgtaagtcacgaaactctcgtcgacttcgcagttcttgcgattatcgagccaggttcagttatagtgagttatctcgctattccggtcaattagttgaattagtataccgagtagaatattagtaggcctgtgaggtgatgaaatatttttatcacttataaagatgtagtataatttataaagcaagggattagttcagaatttaattaattaactgataagttgtgattaggctaattgtatttcttgtgtatagtttgttgttcgtgatgt

SEQ ID NO: 6002 - DNA, 1048 bp, Zea mays
  Zm_smallRNAprecursor_1491
ttggttacaaggaacaaggcatgactggttgctcagggtttcactcaagtggaaagacttgattttggtgaaacctatgcaccagtagcaaggttagagtccataagaatattaattgcctatgctactaaccatgatttcaaattgtatcaaatggatgtcaaaagtgctttcctaaacggaccactacaagagttggtctatgtggagcaaccaccgggctttgaagatcctaagaagccaaaccatgtctaccttctccacaaagcgctttatgggcttaaacaagctcctagagcatggtatgaatgtcttaaagatttcttgcttaaaaatggtttttaaataggaaaagtagactctactttattcactcgcaaagttgacaatcaattatttgtttgtcaaatatatgtcgatgacattatatttggcagtactgatgaaactttttgtgaggaatttagtagggtcatgacaaacaggtttgagatgtccatgatgggtgagctcaagtacttcctgggttttcaagttaaacaactcaaggaaggaacctttctgtgccaaaccaagtacacacaagacatgctcaagaagtttggcatggaaaaggcaaagcacgccaagacaccaatggcttcaagtggtcatctcaacttaaatgaagaaggtaaaactgtagatcaaaagctttatagatcaatgataggatctctactgtatttatgtgcatctaggccagatatcatgcttagtgtgtgcatgtgtgcccgttttcaagctaacccgaaagagtgtcacctagtggccgttaagagaattttgagatatctagttcacacccaaaatctaggtctctggtatcccaagggctccttttttgatttatttggctactctgattcagactatgccggttgcaaagtagatcgaaaaagcacctcggggacttgccaattccttgggcggtccctggtgtcttggagctctaagaagcaaactgtgttgcactttccacagccgagaccgaatacatagctgctgg

SEQ ID NO: 6003 - DNA, 1032 bp, Zea mays
  Zm_smallRNAprecursor_1492
tcgattttggaatcttttctaggccgatttctccaattcagtcattttgtccaagaaatacctagtcgttaggcatcagtttattgactgggaaggatgtgagaacatgggagatgctaacatgacgttagctctccgtaacttggagagaaaggggttaaaaaatattatgacaatggaatacccctggaacgacgaggtggtagctcagctttatgccaccctctgggtcaagaaagtagatgaagaagccgatgggtatgattaccctgtcatgtatttcttcatccagggaactggcacaaagtcagttatcgtcgttttgcccatattttgggcttctctgatgctgatattcaggacagcaacatgtgagttcatgacattcggctgcccatgcgggagaagactgaattcattcatgtctctatggatcgggagttctggacgaccgccaacatgcataggtactacaggtaccttaactctttgtcaaggatgaccgttctcccaaagggcgggaatcaaatgaacgtccttggggagagtcgggtcttccttctcctccttgctcccaacagtctcgcccgcatcaatgtgtttgacatgatctgggaagagatccttcgtgcttcctggtctcctcttaaggggtgtcttcatgcaccctttattatgaagatgatcgaagtggtcacccagactcacttcgaaaaacccgtcaaacactcctgctacgtaccctactgggttgattcctccaacctagctgctcgtatgaagcgggctccctcagggtctggaggccctccctcctctgatgagccacctcctcagcctccacatcacccatcctcctctcgcaccgccgctgcctcacatccgatggacagcagcgggagaggaagtggtcctggccagggacgtggtagaggccgaggacttttcattcgtctggccaagggccttcttggcgtcttcgccatgtgccgcacccgggcggtcgaggagtctgtgtgccgtcgcaggacc

SEQ ID NO: 6004 - DNA, 1136 bp, Zea mays
  Zm_smallRNAprecursor_1493
cttgcactcgaatagtaaaatatgttccgtaaaaactaacaaacacaatatgttacgtacataataattttttccgttgcaattgttatctataaatatatctatactaatctattaaaaacctaatgtaggtatctgatgttaccacggtggcttcaccctcccacgcctagtgtccgcgcagcgtgcacaaaaaatagtgcagatcaagaactcgaacccatgtttctgttctagaaatttgaggctaaccaccagaccacatataccttattgtttagaaataaataataattatattttcagtctagatgccgctccacccgttctccgcctcatggcaacacacgggcatatatctagttaaccaattaagtactaggttagttatatgggtaatcatatatttccttttctctcttttatggacgacttttgtggtgttgtctatgggaacgtatcctatgctcatggagctcttgtgctcatatgatcactttaaatctggtgccttcatttctcatccaaatgtgaatagacattttctagtttcttctgtgtgccacccttgaccacccttgttgcgccgcgccgcctgtctcttctatgtgccactgctgccctcaccccctggatgagaaatgaaggcaccagatttaaagtgctcatatgagcacaagagctccatgatcacaggatacgttcccgttgtctatttatttgacatcgtctgatgatactatcttgctcctcggtctttgtaggtagggctaaaaaaactcgaggctcgtgagtcggctcgggctcgctcggtccaaagaggctcgcgagtctgaataagctcgagttgagtctacttttgtggctcgctcaagcaacgagctgagcctgaatgagtccaggctggctcacgagtagagatggcaacgggtacaaacccgccgggttttgctatcccaaacccatacccgtgaaaaatatttacacccattaaaaaacccgtacccatgacgggtttgaaattttgcccaaacccgtacccatcgggtttgcgggtacccacgggttacccgcgggtttttatctccaatatgcttattctttttataatcataagcatcgtaatgattaatgag

SEQ ID NO: 6005 - DNA, 1194 bp, Zea mays
  Zm_smallRNAprecursor_1494
ttgatggtcaatgccaatatatcattttctatgtgaaattatgttgtattgagatttgatttaaacattgagttgagattatgcagatgtaaatgtttacgctattcattgtatacattttttcagcagaggcttaatgtgagatacaatccccaagatgttatagtaagcattcagattttaaatgacagacaacgtcaagctattgcatgaagggggttctccagtatacttgatatgagagttgacgcgcttgtcagtagatctcatttagcttggctgatggaaaagcttgaccataatgacctgacaattcgagccggcccagggaaggagctcaaaattacaaaggatacggtgcaccttattttggggttaccaaatgctggtggaggaaaggcattaggcattggtgaagctgttgctgcaaacaatttaagagctgaacttggtttatccaaagaagaatttggtgttgcagctcttaaagatcgtctgaggaaagggtttgacgatgatctaagcatcagatccttcttcctgatactgttcaataggttgttgttccctactgcaagctggggaataactaaccatgaggttcttttaactgaggaaatggatcgtttccacgagatggactggtgcgagctaatattcaatgatttatgccaagctgccaagaagtggcatactaggagcgttacaaatgtttctacaaccatttacggatgtttcatcgtcattcttgtaagcatatcacttttttgtctgttttatgtagccagatttttttatgcaaaattcatctacatttagattatgctttgttatgtctcacaacgattcatgttatgcttttgtagctgtattatctggatcatcttcatgactcagctgcacctcagaataaacgtggaacaccacgcatcaaatattttgataggaatattattcaagtattgacaagagctgacaagggcaagatacaccaaggacaagaaccatttggacattgttcggtattttttcgcgtctattatattttttatcaatttaatttgccttatatatggtacatggatagaagcagtgtcgtttatatttataaatgaaactccattttatatgtgtgtataagttttactccatctttcacgcctttttagttccgaagcagcacagagacctgct

SEQ ID NO: 6006 - DNA, 1181 bp, Zea mays
  Zm_smallRNAprecursor_1495
taccgtaatttgttttgtcattaaatcaccaaaaccctcacttggggttgattgcacttacaatctccccctttttggtgattgatgccaaaacaattaaggtcaaaaagataaacatttgcaatagaaaatttcttttgaatgattgtatgtagatggctccccctaaatgtgtgcacgattgtaaatctaatgttttgacataatatgtcatgtgagcaacacatttagagatagtgacaaaaaccatactgaatacaaccatccgaggggtgcaagagtgtcataacaggagttgcgatgcatatgactatctctaaatacacatcatttttacttcatagcaaagcaatcattacaaactgatgggacaaaagatgatggccagaagaccatcatatcactttgaataataacccagcagttttatttcatacaatgataagaggatacaagccacaacagtggccaaaacaaaaataatccaaaagaaatacataaccgaaagaaccacaaacagaatgactagaaattttggattttctccccctttttggcaacaagtaccaaaaacgaagagagagagagagagagaaaaggatacatgaatcaatatcctccaggaggaggataggacggaggatatgatggagggtatgatgtgtagtcagggaagaaggtcctcatcacgtcttcctcgagtgaggagtccctagggggctcatcacccgcagaaaaactagatgccgaagatgtacgatgatgaggaggaggtggagggtggtgatggtaaccagagccggatggccgcgggtcaccaggaatgggtcccggacccgggttgggaggagaaggatagtgaccagagccggatggcctagggtcaccgggagtgggtccctgacccgagtagggaggaggaggatgaggagggtccaaggtgaagaatgggtcatcatagtcctcgacctcatcctccggggtaatgaatggcacaccaaactcctgttggtgccactcattaaggtctgcggggatggtaggggctggaggtggaggggacccaggagggagaggatgtccagtcgcggctgcataacgacgaagatcctcatgcagccggtcggtcctgcgacggcgcacagactcctcgaccgcctgggtgcggcaaatggcgaaga

SEQ ID NO: 6007 - DNA, 1129 bp, Zea mays
  Zm_smallRNAprecursor_1496
gactagattcgtctcgtcttttaatgttcggctgacaaattagttttataatccgactacatttaatacccggaacggaggttaaatattcgatgggacagaagctatagcggggtataaccaaacacctcctaatttgcggggtgtaacaagagggcgggcaggttttccatgatacgatagcgcctaatttgcgggccgtgtcttgtattggcgtgctcgcatctcaaacggatattgcgatggcagattggcaggcgagcggtgcctactgatcacaaccgccgtgccactgtctcgggacgtcggccggctgatgcgacgtgaggcctgcagcgttttgttcaaatgccaaacatgaatacccccagaagccaccggtataacacctggcatggatacccagtcttgagtgaaaaagataccgcgataacgatctttttcaataaaatcatcgcgcaataaatcaacaaaacctaaagttatttcgcgttccccttctaacttacctactactgtaccggagtggatatgatctccccccgacatacgcaatgctttagctaatacacggaaatgcataccatgatttttctgtctatcaataactgcatgcattgctcggtgaatgtgaagaagtaggccgttgtcgcggcaataatgagacaaagtagtatttgcgacctcctgttaagtagtcatgcattacaataggaacccctaattcccttgcaaatacagctctcttaatcatttattcgcatgtacctgcagtcgcattcaagtaatgccccttgatttcaccggtttcggcttgtgctttataaattgcttcggcacaaaagacaaaacagtctctccagcgcataaatggttgtgagtttacgttttcatcatctttggtaaaataaagtccaccgcgtagacactcataacacgctctaccgtaattttttgcggataatccgtttaatagtacatcccaataaaggacgaccgtacttgttcaacttatccctttcaacttggataccgtgaggcggaccttggaaagtttttgaataagtagggggaattcgtagatcctccaaacgtagagcgcgtaaggctttgaaaccaaatacgttac

SEQ ID NO: 6008 - DNA, 1104 bp, Zea mays
  Zm_smallRNAprecursor_1497
acagcttcttcatgtttttatcaaccttgttcttcgtacacatagcaccaaacttctacgccataatcaaatgtaattgtacctataactccgtgatcctgggggcttggactatctggagacaccgcaatgattgtgttttcaatggtgctcagccttatatagttggattgcttacctcagccagtgatgagttcaatatgtggtgttttgcgggggccaaaggcttcacccgtctttcggacctagcttttgtgttcaaccccggctaggaggcggttatacctcttgttgtttgtgtgtgtgtgtgagtagtgtgttaggtcactataaataccatctttcttctaatgaaatgatacgcagctctcctgcgtgttcgagaaaaaaaaagtgaaggtataaaaaactgaaacagattgactaaattataaagtatcagtaactcacaaaaggatagaccaagggtagtggtgaaagctatctcaaagtcatcaggtcgcgggttcgaagtagcctctccacatttgcagtgtcggatgctcccacgtgagtcgggtctaggaagggataaatcgaggcaagctttgcccccgcaaatgcggagagcctgcttcgaacctgtgacatggtgactcagaagtcagaaacaacccttaccactacaccggacctgctctttggggctttaacaaaagtaacacaaatataattaccacctaatctttagcggtttcaacttaccatggatttctttaagaagttgatcttctgttacatataactttttcagggatttcttgatttttgtctcctagaggtcagccaattcagtcattgagcagacatttcctagaggcctcagatacaacatcttgttcaatgtcctggaatcttctatggtgcatattgtcaatttagcaacatcattctcttttaaaaaaatacctgcaaataaatgttcttccctgaggtaacaaaatttacatgtaaattcagatataagactattagaatagagaaataatactaattgtccatcttcagcagcgatggctagactttgacgccggtgatgtcccccagcagctgcacgagccatat

SEQ ID NO: 6009 - DNA, 1162 bp, Zea mays
  Zm_smallRNAprecursor_1498
ccttgaaaagaaaaagaagcactctcggtgcaaatatattggagtgacttagaaataaaacgaggttgttaacgaaaaaaatctttcaactttaggtgagggatattggaaattggtcgaagagaaccagcaaatatgcctttttactttggaagacatctttgaaaattactcggcaacaaccgcgccttctgtttggaagaccacgtcgtcgtcgttgtgcaaaaaataatgccgtcccggctgggcggcagccaaaacccaaaatgaactgggttcccctagcagagactgcacagtgcacaggagaccggcgcgccagcggaacgcgaaaggccggggcccgggccatcagggcaaccaacttttttggattttagccttttttgagttttttttgcacaactatgccctttacagtttcatttcaaaaaatggacccttacctcggcgccgtcatcattggcgccgaggtaacacacatcgacgccagtaccattggcgccaacttttcctacgtgacagccgatgtggcaagtcccagggggtcggcgccatagatcttggcgccgaccccccttgacggtggggtccggtgctatccaggggggtcggcaccaagatctatggcgccgaccccctgggacttgccacatcggctgccacgtaggaaaagttggcgtcaattatgttggcgccactatgtgttacctcggcgccaatgatgacggcgccgaggtaagggtccattttttgaaatgaaactacaaagggcataattgtgcaaaagaaaccctaaaagggctaaaatgcaaaaaagttggttcagggcaacgacaatcccctcgccgccgcctcggcctctctacctttccacctttcccacccgccgattcactcgctcgcgcggccgcgactccagcctcccctaaatccgctcgcgcccagcgaggaggcggggtcgcagcgagcgaagattccctccgaatcctctcctccaaaaacttccgatccgcttacgatggctacgcagcagcagcacgcggggccggcgtccgggtcggcgtcggcgtcgagctctagctcggggctgcaccttcccgcctcgccctcggccttcggggacaccacccacaccaaggttttcgtgggcggtctcgcc

SEQ ID NO: 6010 - DNA, 1067 bp, Zea mays; identical to SEQ ID NO: 5224
  Zm_smallRNAprecursor_1499

SEQ ID NO: 6011 - DNA, 1042 bp, Zea mays; identical to SEQ ID NO: 5973
  Zm_smallRNAprecursor_1500

SEQ ID NO: 6012 - DNA, 1043 bp, Zea mays
  Zm_smallRNAprecursor_1501
aaaaaaaacatttagtaatttagtgagcttttcatgtagctaaaaaaggttaagaacaaatttcttgaacaaaatctaacttagtaaaaatatagaaaacaattttgcattacgaatcattaactatttctaaatcactataactatttttatacatttttttcttccttatatacatttgctttgataaacagcatgccctacttattattattctccacaacctttcacatacagagatattggccgatcagtacatgagcatatattttgggtcgatttttttcaattgtgaaaaaaaatctaggcgagaaataaatttaagcggacacaccaacgacataaacaaaaaaaacaaaaaaaatgcaaactatggggcttgaacccacgaccacatggttagaagccttgtgctctaccaagtgggctagatgggctttgtgctcatgtctgcaacaaatattttaataacacaaccgagctcggcgccaagatctgtggcgccgagctcggttccacgtcgacgccacgcgtctgggttgtgccaacgcaacacgacctcggcgccatagcctatggcgccgagctgtgttagctcggcgccataggctatggcgccgagcaaagggtccaaaactgcatttaaaatttttttaggtctaaacgtgattttacttctgtttaagggctaaaatacaaaaaattcgggcactgcgcatgtgccgctaaacgcgtacaatgttacgggaggagacgtcgggcgacaaccgatgcaggtactctaagaccgtgcagccaatcaagagacgcgatctcgttaggtcataacttagactatttgcaacgttatctctaaatttccccctataacgcactatgtagccatgttacccgaaacagttccccctaagttttctctctataccccactacaaccataaacctgaacaactcaaggagaggcgtagaggtaagcgttcacaacaacaatccaggatattcccgtcggccgggtaccgacgatttactctaaaaccgacggg

SEQ ID NO: 6013 - DNA, 1044 bp, Zea mays
  Zm_smallRNAprecursor_1502
aaaaaaaacatttagtaatttagtgagcttttcatgtagctaaaaaaggttaagaacaaatttcttgaacaaaatctaacttagtaaaaatatagaaaacaattttgcattacgaatcattaactatttctaaatcactataactatttttatacatttttttcttccttatatacatttgctttgataaacagcatgccctacttattattattctccacaacctttcacatacagagatattggccgatcagtacatgagcatatattttgggtcgatttttttcaattgtgaaaaaaaatctaggcgagaaataaatttaagcggacacaccaacgacataaacaaaaaaaacaaaaaaaatgcaaactatggggcttgaacccacgaccacatggttagaagccttgtgctctaccaagtgggctagatgggctttgtgctcatgtctgcaacaaatattttaataacacaaccgagctcggcgccaagatctgtggcgccgagctcggttccacgtcgacgccacgcgtctgggttgtgccaacgcaacacgacctcggcgccatagcctatggcgccgagctgtgttagctcggcgccataggctatggcgccgagcaaagggtccaaaactgcatttaaaatttttttaggtctaaacgtgattttacttctgtttaagggctaaaatacaaaaaattcgggcactgcgcatgtgccgctaaacgcgtacaatgttacgggaggagacgtcgggcgacaaccgatgcaggtactctaagaccgtgcagccaatcaagagacgcgatctcgttaggtcataacttagactatttgcaacgttatctctaaatttccccctataacgcactatgtagccatgttacccgaaacagttccccctaagttttctctctataccccactacaaccataaacctgaacaactcaaggagaggcgtagaggtaagcgttcacaacaacaatccaggatattcccgtcggccgggtaccgacgatttactctaaaaccgacggga

SEQ ID NO: 6014 - DNA, 1041 bp, Zea mays
  Zm_smallRNAprecursor_1503
aaaaaacatttagtaatttagtgagcttttcatgtagctaaaaaaggttaagaacaaatttcttgaacaaaatctaacttagtaaaaatatagaaaacaattttgcattacgaatcattaactatttctaaatcactataactatttttatacatttttttcttccttatatacatttgctttgataaacagcatgccctacttattattattctccacaacctttcacatacagagatattggccgatcagtacatgagcatatattttgggtcgatttttttcaattgtgaaaaaaaatctaggcgagaaataaatttaagcggacacaccaacgacataaacaaaaaaaacaaaaaaaatgcaaactatggggcttgaacccacgaccacatggttagaagccttgtgctctaccaagtgggctagatgggctttgtgctcatgtctgcaacaaatattttaataacacaaccgagctcggcgccaagatctgtggcgccgagctcggttccacgtcgacgccacgcgtctgggttgtgccaacgcaacacgacctcggcgccatagcctatggcgccgagctgtgttagctcggcgccataggctatggcgccgagcaaagggtccaaaactgcatttaaaatttttttaggtctaaacgtgattttacttctgtttaagggctaaaatacaaaaaattcgggcactgcgcatgtgccgctaaacgcgtacaatgttacgggaggagacgtcgggcgacaaccgatgcaggtactctaagaccgtgcagccaatcaagagacgcgatctcgttaggtcataacttagactatttgcaacgttatctctaaatttccccctataacgcactatgtagccatgttacccgaaacagttccccctaagttttctctctataccccactacaaccataaacctgaacaactcaaggagaggcgtagaggtaagcgttcacaacaacaatccaggatattcccgtcggccgggtaccgacgatttactctaaaaccgacggg

SEQ ID NO: 6015 - DNA, 1042 bp, Zea mays
  Zm_smallRNAprecursor_1504
aaaaaacatttagtaatttagtgagcttttcatgtagctaaaaaaggttaagaacaaatttcttgaacaaaatctaacttagtaaaaatatagaaaacaattttgcattacgaatcattaactatttctaaatcactataactatttttatacatttttttcttccttatatacatttgctttgataaacagcatgccctacttattattattctccacaacctttcacatacagagatattggccgatcagtacatgagcatatattttgggtcgatttttttcaattgtgaaaaaaaatctaggcgagaaataaatttaagcggacacaccaacgacataaacaaaaaaaacaaaaaaaatgcaaactatggggcttgaacccacgaccacatggttagaagccttgtgctctaccaagtgggctagatgggctttgtgctcatgtctgcaacaaatattttaataacacaaccgagctcggcgccaagatctgtggcgccgagctcggttccacgtcgacgccacgcgtctgggttgtgccaacgcaacacgacctcggcgccatagcctatggcgccgagctgtgttagctcggcgccataggctatggcgccgagcaaagggtccaaaactgcatttaaaatttttttaggtctaaacgtgattttacttctgtttaagggctaaaatacaaaaaattcgggcactgcgcatgtgccgctaaacgcgtacaatgttacgggaggagacgtcgggcgacaaccgatgcaggtactctaagaccgtgcagccaatcaagagacgcgatctcgttaggtcataacttagactatttgcaacgttatctctaaatttccccctataacgcactatgtagccatgttacccgaaacagttccccctaagttttctctctataccccactacaaccataaacctgaacaactcaaggagaggcgtagaggtaagcgttcacaacaacaatccaggatattcccgtcggccgggtaccgacgatttactctaaaaccgacggga

SEQ ID NO: 6016 - DNA, 1048 bp, Zea mays
  Zm_smallRNAprecursor_1505
gtggttacaagaaacaaagcacggctggttgcccaaggctacactcaagtggaaggacttgattttggggaaacatatgcgccggtagcaaggttagagtcaattagaatattaattgcctatgctactaaccatgatttcaagttatatcaaatggatgtcaagagcgcatttctaaatggaccactacaagagagggtctatgtggagcaaccaccgggctttgaagatccaaagaagccaaaccacgtttacctacttcacaaggcactctacgggcttaaacaagcccctagagcttggtatgattgccttaaagatttcttgcttaaaaatggttttgaaataggaaaagtagactctactttattcactcgcaaaattgacaatcaattatttgtttgtcaaatatatgtcgacgacattatatttggcagtactgatgaaactttctgtgaggaatttagtagggttatgacaaataggtttgagatgtccatgatgggtgagctcaagtacttcctgggttttcaagttaaacaactcaaggaaggaacctttctgtgccaaaccaagtacacacaagatatgctcaaaaagtttggcatggaaaaggcaaagcacgccaagacaccaatggcttcaagtggtcatctcgacttaaatgaagaaggtaaaactgtagatcaaaagctttatagatcaatgataggatctctactatatttatgtgcatctaggccagatatcatgcttagtgtgtgtatgtgtgctcgttttcaagcaaacccaaaagagtgtcacttagtggctgttaagagaattttgagatatctacttcacacccaaaatctaggtctctggtatcccaagggctcctttttcgatttattgggctactctgattcagaatatgccggttgtaaagttgatcgaaaaagcacctcggggacgtaccaattccttgggcggtccctggtgtcttggagctctaagaagcaaaactgtgttgcactttccactgccgaggctgaatacatagctgctg

SEQ ID NO: 6017 - DNA, 1171 bp, Zea mays
  Zm_smallRNAprecursor_1506
cgcatgggcagccgaatgttatgcactcgcatgttgctgccctgaatatctgcatcagagaagcccagaatatgggcaaaacgacgataactgactttgtgccagttaccctggatgaagaaatacatgactgggtaatcatacccatcggcttcctcatctactttctttatccagagggtggcatagaactgagctaccacctcgtcgttccaggggtattccatggtcataatgtttcgtaacccctttctctctaagttttcaagagcttacgtcatgtcagcatctcccatattctcacaaccctcccagtcaataaacctatgtctgacgactgggtgtttcttggaaagaatgacagaattgtagaagtcagcctggaaaagattccagaaccgagggtcctggacaccaggatgacgaggagtgagagtagggttggtgaacctcaggcgctgaagggtgtctattcccttcagagtgaagtcgacgggaggttcatgcggaccgcggctgacgttcgccggatgcatgtgcagtccggtgacgtagagagcatcaggcgccggaaggtcgacgaagtcgtcgaaagccccatcctcctcctggcagggagcgtacccagaggaagacgtgctacgacgaggacgagaggcgccaaccttgtggcgtctcccgcgagtcggctgcgagggcatggaagagccctcaccatccatccgaccagagccacgtcctctcttagagagagagcgacgaggcggaggagaggggacgggagattcctcctgaatctcgtcggagtcgctgctaaacccaatcactgaagggttgcgacgacgcaccatgattgaaaaagtggtgaaacggcgaactggttgaggtgtgtgaaagagaggctctaaatgttgtgaagcgactaaggcgagagtggatgaagtgggagaagagaaggggagtgtcaaatatatataggcagttgagctggtcctcaggaccggttcaaccgcccccatgggccagttcaactggttctgaccagagtggtcagagagccagaaacagcagagggaagacgccaaaaaaaattaaaaccaagtgtctgcgcagatgagaccggacggcaaaagaaaaagaactgcgcaaaagaaaagttctgcgcgcccat

SEQ ID NO: 6018 - DNA, 1040 bp, Zea mays
  Zm_smallRNAprecursor_1507
acagaacaaataaaaaaaattggcgcgcacagacgctgctgagcggcagcaagcagaaaaaaaataatctgagcgcccagcagaggaagtgaccggtcaataagaaagagaaaaaaatgatgcgcgccctgcaggatgcgacccgattaaaaaaaatttgcacgccaggccgccagcagagatggaagcgaccggtcaataaagaaaaagatgctccgcgactaaaaaggctgcagctgacagacctgcgcggacagaccggtcagagaccggttcaaccggtccactatgccggttcaaccggttttaaccaggatggtcctggtaaaaactggttaaaaaacagctgagctgaagttcagctccgaagttcagctggcctcctccagctgaactagaaagttcagctggtcaagccagttgagccccaaaaaaaaacttagcactaaaattcatttgaattttaacattttcaccaagtttttgaaagatcatcacaaagctttaaaactatcaatcaaaaatagtgaatcaaacaatttttgtgaccgttttcaagttaagttacgagaatccaagatatttaattcacttctaagaaagcaaaacctagtctcatcgaggggttttgtgaagatatcggctagttgattttcggtgctcacatgaaacaattcgatatctcctttggcttcgtggtctctcaagaaatggtgtctgatgtcaatatgtttagttctagagtgttgcacagggttgtttgcaagttttatggcactctcattgtcacacaaaagtggaattttgttaaactcacaaccaaaatctctaagggtttgcttcatccataacaactgtgcacaacatgccccagctgctatgtactcagcttctgcagtggaaagtgcaacacaattttgtttcttggaactccatgatactaaggatcgcccaaggaattggcaagtcccagtagtgctttttcgatctactttgcaaccggcataatctgagtcagaatagccaagtaaatcgaaaag

SEQ ID NO: 6019 - DNA, 1165 bp, Zea mays
  Zm_smallRNAprecursor_1508
ggccctccgcaggccgcagcaccacgaccgggtccacctcgccagtcaccgtcaccgtcaccgtcaccttctgctgcagccggttcacctccacatgctgcactcctgcacaggggcgaatctagggggttatcggggtcagccgaccccgataaattttataaatattttagcaaaatactgttaaagttcataaaaatttgtatgatatagcaaagctgctcttgatgactccgatcatattttcggctagattcgccactgctcctgcaggcaggcgggcagcttcatcagagttattaatcgccacggtaaacttgggctcctcttcaggaaatcacttcgatagttcgattcgaagtggtcaagtggaactttcgctattgttggatgccgccggcatatgctgctgctgtgctgcactactgcagcagtaaaaaaaagcttgttctgaaaggacacgatggtcattagtcagggggtgtttgatttgcccctgctaaaatttagcccctatcacatcgaatgtttgaacctccgttcggggtattaaatgtagtcggattataaaactaatttctcagccgaagattaaaaagtgagacgaatctagtacagttggttgggtctatatttcatactcctatttgaaagtcaaacgcttgatgtgacccggactaaactttagtccatagaaccaaacaccccctcattatactattactgactgactcagtgggtgcagactgcagagaggctcatcatcagggcacagacgagaagagtgatgccaccatgcgatggtcgtgggcgcaatgctggcgagcaacgaaaacttgacgcgaacgcgtaggggccaggccaggccaggggaccagagtgacggatgaccaacctctcatgcatgccggagaaagcattcttgacctcgcgctcgcagttcatcctgaccctcagctccaccgtcccgcaccaggcgccgccgcagcgtcgtcgttcgtcttctccctggggtggggcggccattgatcgctcccagaaagctaagcagctgcctcatggcgcctcccatggggaatgcagcgaggtcctgaagggctagctagctagccggttgatgcgggaactgtctgtcttttgcttgtacgaggccggcacccggcag

SEQ ID NO: 6020 - DNA, 1098 bp, Zea mays
  Zm_smallRNAprecursor_1509
tcgatgtctggtctcagttgtgcatgcagaaacttttcccctgtccggtcacttccattcgctgcgcgcgcgcagagtatttttttcggtcgcttcttgtctgcgcgcacagatttttgtgttgtccggtcaacagcaggggtgcgcatgcagggatttcttttactttttctgtccggtcagcaggggtgtgcatgcagaatcttttttctgggtgtgcatgcagagtccggtcacttctcctctgctggacgctgcgcagcatttttcttggacgtttctgctctgcccgcgcactagccatgcatgcgtgtcaggggcgcaaatttttcctgtccagtcgcttccagcagctgcgcgcacattttttttacagccccacactactgccgtgtgcgcagccttttgctcttgtgaccagtcgctgtgtcacccgcgcagcaagaaattttatttttttgggcatcttccctctgctgtttctggttctctgaccacactggtcagaaccagctgaactggcccatgggggcggttgaactggtcctgaggaccagctcaactgcctatgtatacttgaactctccccttctcttctcccacttcattcactctcgccttggtcgcttcacaacctttagagcctctccttcacactcttcaaccggttcacagtttcaccaccttttcaatcatggtgcgtcgtcgcaacccctctgtgattgagttagcagcgactccgacgagattcaggaggaatctcccatcccctctcctccgcctcgtcgctccctctctaagagaggacgtggctctggtcggatggatggcgagggctcttctatgccctcgcagccgactcgcgggagacgccaaaaggttggcgcctctcgtcctcgtcgtagcacgtcttcctctgggtatgctccctgccaggaggaggatgggttttcgacgacttcgtcgaccttccggcgcctgatgctctctacgtcaccggactccacatgcatccggcaaacgtcagctgcggttcgcatgaatctcccgtcgacttcactctgaagggaatagacacccttcagcgtctgaggttta

SEQ ID NO: 6021 - DNA, 1149 bp, Zea mays
  Zm_smallRNAprecursor_1510
cttctcctctgctggacgctgcgcagcatttttcttggacgtttctgctctgcccgcgcactagccatgcatgcgtgtcaggggcgcaaatttttcctgtccagtcgcttccagcagctgcgcgcacattttttttacagccccacactactgccgtgtgcgcagccttttgctcttgtgaccagtcgctgtgtcacccgcgcagcaagaaattttatttttttgggcatcttccctctgctgtttctggttctctgaccacactggtcagaaccagctgaactggcccatgggggcggttgaactggtcctgaggaccagctcaactgcctatgtatacttgaactctccccttctcttctcccacttcattcactctcgccttggtcgcttcacaacctttagagcctctccttcacactcttcaaccggttcacagtttcaccaccttttcaatcatggtgcgtcgtcgcaacccctctgtgattgagttagcagcgactccgacgagattcaggaggaatctcccatcccctctcctccgcctcgtcgctccctctctaagagaggacgtggctctggtcggatggatggcgagggctcttctatgccctcgcagccgactcgcgggagacgccaaaaggttggcgcctctcgtcctcgtcgtagcacgtcttcctctgggtatgctccctgccaggaggaggatgggttttcgacgacttcgtcgaccttccggcgcctgatgctctctacgtcaccggactccacatgcatccggcaaacgtcagctgcggttcgcatgaatctcccgtcgacttcactctgaagggaatagacacccttcagcgtctgaggtttaccaaccctactctcactcctcgtcatcctggtgtccaggaccctcggttctggaatcttttccaggctgacttctacaattctgtcattctttccaagaaacacccagtcgtccgacatagatttattgactgggagggttgtgagaatatgggagatgctgacatgtcgtcggctctcgtaaacttagagagaaaggggttacgaaacattatgaccatggaatacccctggaacgatgaggtggtagctcagttctatgccaccctctggataaagaaagtagat

SEQ ID NO: 6022 - DNA, 1073 bp, Zea mays
  Zm_smallRNAprecursor_1511
cccgtcgacttcactctgaagggaatagacacccttcagcgtctgaggtttaccaaccctactctcactcctcgtcatcctggtgtccaggaccctcggttctggaatcttttccaggctgacttctacaattctgtcattctttccaagaaacacccagtcgtccgacatagatttattgactgggagggttgtgagaatatgggagatgctgacatgtcgtcggctctcgtaaacttagagagaaaggggttacgaaacattatgaccatggaatacccctggaacgatgaggtggtagctcagttctatgccaccctctggataaagaaagtagatgaggaagccgatgggtatgattacccagtcatgtatttcttcatccagggtaactggcacaaagtcagttatcgtcgttttgcccatattctgggcttctctgatgcagatattcagggcagcaacatgcgagtgcatggcattcggctgcccatgcgggaagagacggaattcattcatgtctctactgagcgggagttctggacaaccgctaacatgcataggtactacaggtaccttaattctttgtctcggatgaccgttctcccgaagggcggaaatcaaatgaacgtccttggggagagtcgagtcttcctcctcctccttgctccaaacagtctcgcccgcatcaatgtgtttgacatgatctgtgaagagatcgtccgtgcttcctggtctcctcacagagggtgtcttcatgcaccctttatcatgaagatgatcgaagtggtcacccagacccacttcgaaaaacccgtcaaacactcccgctacgtaccctactgggttgattcctccaacccagctgctcgtacgaagcgggctccctcacagtctggaggccctgcctcctccactgagccacctcgccagcctccccttcatccatcttcctctccccccgctgctgcctcgcgtccctctcctggccgcggatctcccatgccgcgtgctcgtggtcgtggtcgaggtcgtggccgcgggatgggtgctcgcttggtccatgggttggc

SEQ ID NO: 6023 - DNA, 1127 bp, Zea mays
  Zm_smallRNAprecursor_1512
atgtttatccaatacccaccacatgatattcctaggtgttttatcataggtcttttccaagtcgataaaaccatgtgcaagtctttcttctactccttataccgctccatgatctgtcttattaagaaaattgcttccatggttgaccttacagacatgaatccaaattgattcatgatgatatgcgtcattactctcagatgatgctcaataactctctcccatatcttcatattgtgtctcatgagcttaatccctcgataattggtacaactttgaatatctcccttgttcttgaatattggtactaatatactcctccattcatcggtcatcttatttgatcgaaaaaatacggttgaacaatttggttagccaaatgatagcaatatccccaaggcatttccacacctatattgagataccatccgggctcatcgccttgtcccttttcatcctatttaaagcttctttgacctttgattcttggatcctgcgtacaaagcatctatttaaatcatcaaaggagtcatccaattgggtgtccatagtctcattctcaccattgaaaagattgtcaaaatatctctgccacctatgtttgatgtcttgtcctttcactaagagttgatccatctcatccttaatgcatttaactttgtccaatgaaaggtcttccccaactcttgttaagcttgatcacttgttttgcacggcttgctgggaacaactctacccggactgtattatacgcagcaatgccacaaggctttcagatcattgccctttaactctcagtctcaaagaagattttaagggaaagcgcagatttcactttgaaagtttctggactaagattgcagatttcttagatgtggtggctaattcttgggtgcagccagttcagacctcctgccctctaaagtgtatatccttgaagcttcgtagattggctaggtccttgcagtcctgggggcacaagaatgcaggcaatgtgaaatcccaattggctttagcaaaggaaatccttcacagactcgagatggctcaggatagcaggttgttgtcttctgaggaactatggctcatgaagaggcttaagcaacatagtgtaacaccataaaaac

SEQ ID NO: 6024 - DNA, 1188 bp, Zea mays
  Zm_smallRNAprecursor_1513
ataagatacaatgtgtagtcttaggagttcatgttatcattttccatttcacaagagaacaaactcaaaagacaatgaaattcatctctatagagagataaaaaccaagcaatgccagcaataataacaaaaacaaagtcgtttagtctccagaagggcaggccagagttagaacccaccaagagccaccaatgaggataattaagtaaaatgaaaaaggccttaatgacgcaatcccatcgttgttcctcggccactcttgggttacgactcggatgtgcgccaccctcaggcctgggtgggcctttgcagagtggtagcttgacccggcccgttagtgataggaggacagggttcgggggtttctcgctcaggaccattgccacggccgtctattaatataatactgcgagggtggtcttaccctctccggccgaatcttaataacgctagtaacaataactgtactagttgtaaaaagagaggcaacgactgctatgcaagcagtccttctgtgcaagcgtgcaagcaaaccatctgatccattagatcgtgatccaaccgtaggtcacatttaacgcttaaacccttccaccaccagttcaataatctttataaaaaaaactaacaaaccatggttgtatctgtgattggatcgtaatctaatgggtcagatggtttgcttacacgcttgcacagaaggactgcttgcatagcagtcgttgccaaaaagagatggtagcatatgtcgtctttcgagtgtgtgcagtgcagtacaaagctaattcaaaaaccaaacttgtaccatgatttatttgcattacgataagagaactatctttctcaaataaactgcatgagaaagattctaaaatcaagagaactgtcaggaagtagaacaatataaatcatacagtaacatcgatgcactacacaagaggatttgtaatccctatatacgtgaacctccaacctaacaacacagtaagcactgtgcggaacagaacaagacggctgtacttagatccccttgccaattgtactcacagggattgcaatttacaagttagggctttacttagtcaagagaaaacagacagcaacaccctaggctaccaaatttgcaagcgcgcaggaaagtaaataaggaagaaaggatactctggatgctagcggctgagttgttga

SEQ ID NO: 6025 - DNA, 1189 bp, Zea mays
  Zm_smallRNAprecursor_1514
ataagatacaatgtgtagtcttaggagttcatgttatcattttccatttcacaagagaacaaactcaaaagacaatgaaattcatctctatagagagataaaaaccaagcaatgccagcaataataacaaaaacaaagtcgtttagtctccagaagggcaggccagagttagaacccaccaagagccaccaatgaggataattaagtaaaatgaaaaaggccttaatgacgcaatcccatcgttgttcctcggccactcttgggttacgactcggatgtgcgccaccctcaggcctgggtgggcctttgcagagtggtagcttgacccggcccgttagtgataggaggacagggttcgggggtttctcgctcaggaccattgccacggccgtctattaatataatactgcgagggtggtcttaccctctccggccgaatcttaataacgctagtaacaataactgtactagttgtaaaaagagaggcaacgactgctatgcaagcagtccttctgtgcaagcgtgcaagcaaaccatctgatccattagatcgtgatccaaccgtaggtcacatttaacgcttaaacccttccaccaccagttcaataatctttataaaaaaaactaacaaaccatggttgtatctgtgattggatcgtaatctaatgggtcagatggtttgcttacacgcttgcacagaaggactgcttgcatagcagtcgttgccaaaaagagatggtagcatatgtcgtctttcgagtgtgtgcagtgcagtacaaagctaattcaaaaaccaaacttgtaccatgatttatttgcattacgataagagaactatctttctcaaataaactgcatgagaaagattctaaaatcaagagaactgtcaggaagtagaacaatataaatcatacagtaacatcgatgcactacacaagaggatttgtaatccctatatacgtgaacctccaacctaacaacacagtaagcactgtgcggaacagaacaagacggctgtacttagatccccttgccaattgtactcacagggattgcaatttacaagttagggctttacttagtcaagagaaaacagacagcaacaccctaggctaccaaatttgcaagcgcgcaggaaagtaaataaggaagaaaggatactctggatgctagcggctgagttgttgag

SEQ ID NO: 6026 - DNA, 1186 bp, Zea mays
  Zm_smallRNAprecursor_1515
taagatacaatgtgtagtcttaggagttcatgttatcattttccatttcacaagagaacaaactcaaaagacaatgaaattcatctctatagagagataaaaaccaagcaatgccagcaataataacaaaaacaaagtcgtttagtctccagaagggcaggccagagttagaacccaccaagagccaccaatgaggataattaagtaaaatgaaaaaggccttaatgacgcaatcccatcgttgttcctcggccactcttgggttacgactcggatgtgcgccaccctcaggcctgggtgggcctttgcagagtggtagcttgacccggcccgttagtgataggaggacagggttcgggggtttctcgctcaggaccattgccacggccgtctattaatataatactgcgagggtggtcttaccctctccggccgaatcttaataacgctagtaacaataactgtactagttgtaaaaagagaggcaacgactgctatgcaagcagtccttctgtgcaagcgtgcaagcaaaccatctgatccattagatcgtgatccaaccgtaggtcacatttaacgcttaaacccttccaccaccagttcaataatctttataaaaaaaactaacaaaccatggttgtatctgtgattggatcgtaatctaatgggtcagatggtttgcttacacgcttgcacagaaggactgcttgcatagcagtcgttgccaaaaagagatggtagcatatgtcgtctttcgagtgtgtgcagtgcagtacaaagctaattcaaaaaccaaacttgtaccatgatttatttgcattacgataagagaactatctttctcaaataaactgcatgagaaagattctaaaatcaagagaactgtcaggaagtagaacaatataaatcatacagtaacatcgatgcactacacaagaggatttgtaatccctatatacgtgaacctccaacctaacaacacagtaagcactgtgcggaacagaacaagacggctgtacttagatccccttgccaattgtactcacagggattgcaatttacaagttagggctttacttagtcaagagaaaacagacagcaacaccctaggctaccaaatttgcaagcgcgcaggaaagtaaataaggaagaaaggatactctggatgctagcggctgagttgttg

SEQ ID NO: 6027 - DNA, 1187 bp, Zea mays
  Zm_smallRNAprecursor_1516
taagatacaatgtgtagtcttaggagttcatgttatcattttccatttcacaagagaacaaactcaaaagacaatgaaattcatctctatagagagataaaaaccaagcaatgccagcaataataacaaaaacaaagtcgtttagtctccagaagggcaggccagagttagaacccaccaagagccaccaatgaggataattaagtaaaatgaaaaaggccttaatgacgcaatcccatcgttgttcctcggccactcttgggttacgactcggatgtgcgccaccctcaggcctgggtgggcctttgcagagtggtagcttgacccggcccgttagtgataggaggacagggttcgggggtttctcgctcaggaccattgccacggccgtctattaatataatactgcgagggtggtcttaccctctccggccgaatcttaataacgctagtaacaataactgtactagttgtaaaaagagaggcaacgactgctatgcaagcagtccttctgtgcaagcgtgcaagcaaaccatctgatccattagatcgtgatccaaccgtaggtcacatttaacgcttaaacccttccaccaccagttcaataatctttataaaaaaaactaacaaaccatggttgtatctgtgattggatcgtaatctaatgggtcagatggtttgcttacacgcttgcacagaaggactgcttgcatagcagtcgttgccaaaaagagatggtagcatatgtcgtctttcgagtgtgtgcagtgcagtacaaagctaattcaaaaaccaaacttgtaccatgatttatttgcattacgataagagaactatctttctcaaataaactgcatgagaaagattctaaaatcaagagaactgtcaggaagtagaacaatataaatcatacagtaacatcgatgcactacacaagaggatttgtaatccctatatacgtgaacctccaacctaacaacacagtaagcactgtgcggaacagaacaagacggctgtacttagatccccttgccaattgtactcacagggattgcaatttacaagttagggctttacttagtcaagagaaaacagacagcaacaccctaggctaccaaatttgcaagcgcgcaggaaagtaaataaggaagaaaggatactctggatgctagcggctgagttgttga

SEQ ID NO: 6028 - DNA, 1185 bp, Zea mays
  Zm_smallRNAprecursor_1517
aagatacaatgtgtagtcttaggagttcatgttatcattttccatttcacaagagaacaaactcaaaagacaatgaaattcatctctatagagagataaaaaccaagcaatgccagcaataataacaaaaacaaagtcgtttagtctccagaagggcaggccagagttagaacccaccaagagccaccaatgaggataattaagtaaaatgaaaaaggccttaatgacgcaatcccatcgttgttcctcggccactcttgggttacgactcggatgtgcgccaccctcaggcctgggtgggcctttgcagagtggtagcttgacccggcccgttagtgataggaggacagggttcgggggtttctcgctcaggaccattgccacggccgtctattaatataatactgcgagggtggtcttaccctctccggccgaatcttaataacgctagtaacaataactgtactagttgtaaaaagagaggcaacgactgctatgcaagcagtccttctgtgcaagcgtgcaagcaaaccatctgatccattagatcgtgatccaaccgtaggtcacatttaacgcttaaacccttccaccaccagttcaataatctttataaaaaaaactaacaaaccatggttgtatctgtgattggatcgtaatctaatgggtcagatggtttgcttacacgcttgcacagaaggactgcttgcatagcagtcgttgccaaaaagagatggtagcatatgtcgtctttcgagtgtgtgcagtgcagtacaaagctaattcaaaaaccaaacttgtaccatgatttatttgcattacgataagagaactatctttctcaaataaactgcatgagaaagattctaaaatcaagagaactgtcaggaagtagaacaatataaatcatacagtaacatcgatgcactacacaagaggatttgtaatccctatatacgtgaacctccaacctaacaacacagtaagcactgtgcggaacagaacaagacggctgtacttagatccccttgccaattgtactcacagggattgcaatttacaagttagggctttacttagtcaagagaaaacagacagcaacaccctaggctaccaaatttgcaagcgcgcaggaaagtaaataaggaagaaaggatactctggatgctagcggctgagttgttg

SEQ ID NO: 6029 - DNA, 1165 bp, Zea mays
  Zm_smallRNAprecursor_1518
gagttcatgttatcattttccatttcacaagagaacaaactcaaaagacaatgaaattcatctctatagagagataaaaaccaagcaatgccagcaataataacaaaaacaaagtcgtttagtctccagaagggcaggccagagttagaacccaccaagagccaccaatgaggataattaagtaaaatgaaaaaggccttaatgacgcaatcccatcgttgttcctcggccactcttgggttacgactcggatgtgcgccaccctcaggcctgggtgggcctttgcagagtggtagcttgacccggcccgttagtgataggaggacagggttcgggggtttctcgctcaggaccattgccacggccgtctattaatataatactgcgagggtggtcttaccctctccggccgaatcttaataacgctagtaacaataactgtactagttgtaaaaagagaggcaacgactgctatgcaagcagtccttctgtgcaagcgtgcaagcaaaccatctgatccattagatcgtgatccaaccgtaggtcacatttaacgcttaaacccttccaccaccagttcaataatctttataaaaaaaactaacaaaccatggttgtatctgtgattggatcgtaatctaatgggtcagatggtttgcttacacgcttgcacagaaggactgcttgcatagcagtcgttgccaaaaagagatggtagcatatgtcgtctttcgagtgtgtgcagtgcagtacaaagctaattcaaaaaccaaacttgtaccatgatttatttgcattacgataagagaactatctttctcaaataaactgcatgagaaagattctaaaatcaagagaactgtcaggaagtagaacaatataaatcatacagtaacatcgatgcactacacaagaggatttgtaatccctatatacgtgaacctccaacctaacaacacagtaagcactgtgcggaacagaacaagacggctgtacttagatccccttgccaattgtactcacagggattgcaatttacaagttagggctttacttagtcaagagaaaacagacagcaacaccctaggctaccaaatttgcaagcgcgcaggaaagtaaataaggaagaaaggatactctggatgctagcggctgagttgttgag

SEQ ID NO: 6030 - DNA, 1159 bp, Zea mays
  Zm_smallRNAprecursor_1519
tatgcaatttttccagttaattatgaaaccaacgtggattgattattgtttaaattgcatagaattcagaaaattttgtggtgattgaatattttaaccaacgttgaatattgttaccacaaatttaatacaagtttatgtttttctagatcatccaacgatgatttagaattttgtgatcagaaattttcatagatatggcatggttattatttgaccaacgttgaatatttaattcatgcatgttctatgattcagtattcaatatttatttcagatgtcctaaatattttctgttttaattttgcaaaggtgctcataccgccatgctgattagccagattgctcagatgaaaccgctagatggtagtaattaccattcttggcgggaggatatagacatgataaccacggtgggtgagatagattacgcactgaggtttgataaaccagttgagcccacagtgggcactcccaactatgaccacaggtggatgcaatacagcatcgacaaggtcaagtgggagagatcaaatgacaaatgtatgattattcttaagaggagcatcaaggagcctcttaagagttccataccagagtgcgagactgccaaagaataccttgagagggtagcatctcatcaccaagggtcttctaaggcttatgcttgctctctaatgacagaatttgtcaatgcaaaatacgatggaaatggtgtcagaccattcattcagaaaatgatatccatcgtagccaagataaacaagtacctcgggtctcctttacacgaggaatttgtagtatttatgataatgaagtctctgcccaaggagtttgagacttttcacatacagtacaacactagtgtcactgataagtggaatatagaccaacttttggcacagtgtgtccaggaggaagagaggttaaagcagactggagactctgtcaacctcatcaaaggcaatatccccagacagaacaagaactcaaagaaaaagttcaagaagcaaggtaaacagaataaccaggcttcctcgagcaataataatcagccaagacaaggaggcagtttctcagttccccctgatacctgcctctattgcaagaagacaggtcattacaagagaaagtgccctgaattcctgcagtatctact

SEQ ID NO: 6031 - DNA, 1140 bp, Zea mays
  Zm_smallRNAprecursor_1520
atttatttcagatgtcctaaatattttctgttttaattttgcaaaggtgctcataccgccatgctgattagccagattgctcagatgaaaccgctagatggtagtaattaccattcttggcgggaggatatagacatgataaccacggtgggtgagatagattacgcactgaggtttgataaaccagttgagcccacagtgggcactcccaactatgaccacaggtggatgcaatacagcatcgacaaggtcaagtgggagagatcaaatgacaaatgtatgattattcttaagaggagcatcaaggagcctcttaagagttccataccagagtgcgagactgccaaagaataccttgagagggtagcatctcatcaccaagggtcttctaaggcttatgcttgctctctaatgacagaatttgtcaatgcaaaatacgatggaaatggtgtcagaccattcattcagaaaatgatatccatcgtagccaagataaacaagtacctcgggtctcctttacacgaggaatttgtagtatttatgataatgaagtctctgcccaaggagtttgagacttttcacatacagtacaacactagtgtcactgataagtggaatatagaccaacttttggcacagtgtgtccaggaggaagagaggttaaagcagactggagactctgtcaacctcatcaaaggcaatatccccagacagaacaagaactcaaagaaaaagttcaagaagcaaggtaaacagaataaccaggcttcctcgagcaataataatcagccaagacaaggaggcagtttctcagttccccctgatacctgcctctattgcaagaagacaggtcattacaagagaaagtgccctgaattcctgcagtatctactagagagtggtaaggaccaagttacttttgtaaatgagactttatacttagaatatcccagttattcttggtggattgactcaggtgcaactgttcatgttgcaaactctctacagggactccgtacaagccaaaggctcccaaagggccgaagaacaattagagtggcaaatggagttgaagcagcagtcgaggccattggagatatacatcttaaattagttaatggttttgtactgttgttgaga

SEQ ID NO: 6032 - DNA, 1154 bp, Zea mays
  Zm_smallRNAprecursor_1521
gatcatccggtggacaacatcctgggtagcatcaggagaggggtaacaactcgatctcgtttagctaatttttgtgaattttactcgtttgttttctctcttgagacacttaaggttgaagaagcattgggtgatccggattggataattgtcatgcaagaggagttgaacaacttcacccggaatgaagtttggtccttagtccaaagacccaaacaaaatgtgattgggacaaaatgggtttttaggaacaaacaagatgaacatggcgtggttacaagaaacaaagcacggttggttgcccaaggctacactcaagtggaagaacttgattttggggaaacatatgcgccggtagcaaggttagaatcaattagaatattaattgcctatgcaactaaccatgatttcaagttatatcaaatggatgtcaagagcgcatttctaaatggaccactacaagagagggtctatgtggagcaaccaccgggctttgaagatccaaagaagccaaaccatgtttacctacttcacaaggcactctacgggcttaaacaagcccctagagcttggtatgattgccttaaagatttcttgtttaaaaatggttttgaaataggaaaagtagactctactttattcactcgcaaaattgacaatcaattatttgtttgtcaaatatatgtcgacgacattatatttggcagtactgatgaaactttttgtgaggaatttagtagggttatgacaaataggtttgagatgtccatgatgggtgagctcaagtacttcctgggttttcaagttaaacaactcaaggaaggaacctttttgtgccaaaccaagtacacacaagacatgctcaaaaagtttggcatggaaaagacacagcacgccaagacaccaatggcttcaagtggtcatctcgacttaaatgaagaaggtaaaactgtagatcaaaagctttatagatcaatgataggatctctactatatttatgtgcatctaggccagatatcatgcttagtgtgtgcatgtgtgctcgttttcaagcaaacccaaaagagtgtcacttagtggctgttaagagaattttgagatatctagttcacacccaaaatctaggtctctggtatcccaagggctccttttt

SEQ ID NO: 6033 - DNA, 1058 bp, Zea mays
  Zm_smallRNAprecursor_1522
atttaggattgatcatagttttactattcaaataataataataagatgtacaagaaccaagtatgtcgagtggtgagatgtttaatgatgagagggacttaaggttgcaatatagcgctgttagttggtattgaccaaaagaaaaataaataccacttatggttcctttcatggctataatgatgtcaaataccccatcctcgtagaaactacagaaaaattgtaaagcatgttcaccttcctctgtgggattaactgaattttgttacaacaaaatgagtgtaattttttttctctgggaaaaagactggggccaagggcctcctggcggccactatccctgaggctcaattctagggggttacaacaaaattctaggggggttgtaaagcggaccctaccaacatgcagtaaacaaaatgccacagtagggcacctcaccaacgactgtaattaatcgtagagaggtgagagggcacgcgcaactacatctaaaaatcggaggagattagaggggctaaaatttccttcttattcaaaattgaataaagatgagattttagctcctctaacctcctccggttttgtggctcccaaactagcccttatagcgtacacactctcctactgtaaacagacggaggtggtgaaaactgaaaagggaggaggatttatgcagtgaagggagtgaagtgaaaagaaataatataatatgtggtagttggtataaggttaagatatagagtaaatatgaccgtagaggattgtggtatagagtagataatcttgttgatgaggacataatatttttttagagtataaatttaaagtagtatgagtgcagatagtcttatcgtttttgagttttcgacctccttaagaaagtctgctttagacattcatttcttttttcttaatataatggtttgagagagagaaaaagaccggttttccttagaaagcaccatcagatttcactattccgatatgctatttgatgtcatattagaaaaacttctccaattgaatttgaatgtactgggggtgataacaccctg

SEQ ID NO: 6034 - DNA, 1175 bp, Zea mays
  Zm_smallRNAprecursor_1523
acgtccgatcactttttacgcaagcgaactgatttagcataaacggaaacccattttagcgtaaacagagtaacaaccgcgagccctcgttccagaaatagcggcttaggcccactttccacgtggtcaaccatatcttccttagtcaacacatgtttacgctattccattcttccgtttatacataatattgatttaacataactacttcagccgacccacgttccagaaataaaggaattggcccactaccccacttcccacacggtcaaacatttctataccctaacccccgcgcggtcaaccttcctggccgactcgccgcgtttcttcaggggtcgccagggcgattcttcttcatccgccgccgccagcacgtttcgccgtcctccaccgccgcacgccctcaacattaatcgtcgccgccgttgacagcatcgttgagccgctgccgttgtcaatcttgcgcgccccgcgtcacattggctcacgtccgcgatcgctatgtcgtccggattccaaggtgctcgagttgattttttaaatttatgctttacaatgcaacttcctaatctccttccccccttccggcagtgtgaatcgccttcatttgtctccgcgcgaactcaaccctaatcgacgccgccgttgacagtgtcgtcgagccggccgctgctgtcaatcctccgccaccgcgtcccatatgtattttacatgcccaccaacggtcttcattgatcttactgttcttgtgcgattatggttcaattgtttatcatagagcctttagctttgataaaggttcacggacctgttgttttagactcattgtatgctcaaattgtgtgtgtgaagatatatgcaatggtgtgaattatacgtacctttatggagtaggggttgatattttgatgtggaaacaagtgtgctgctcatgacttcgtgctactatatattattcaaataaactgtaatgcatttcactttttatatacttactggatcatatttttcacataaatatggtcatcaatcatgtccaaattaatcactcaacaatcataaaccactacttcataacattagtaaactaataggcactgcctacatttatcttttgtgctgcagctatatgaccatatatgttcaacttccaaaatggaactaaatcgacc

SEQ ID NO: 6035 - DNA, 1038 bp, Zea mays
  Zm_smallRNAprecursor_1524
aggatatagatggccaaacgggccgtgctaaatgggccggcactaagcacggcacggcccatagtgcttcggcacgacacgggcacgattcatatagtgccagtgccggcacgacacgagtctagtgccgtgcttgggccgccaccccggcacgatgggctggcacgagcacgacacgattaattggccggcacggttaggcacgacttagaccaacatgtggtttataaatgtgattgtgatatgtgtatgtggttgtacattgttatttgttgtgatttacacataatgaattcactttataatgatataaatattcgagttttaaaatcatatatataatcttaaagatcttctatatttttttatcttttaaaataaaatagtgcctgggctggcacgggcactattagatattagtgccgtatagtgccggcacggcacgattaggcactatagtgtagtgcctgggccgctggttaggcactagtgccggcacggcacgacacgattactaatagtgcctaatagtgtcgtgcctaatagtgcttagtgccgtgccgggccgagcggctcgtttggccatctatacctgaggatgctttggtcatcttggaagaggaagtataagacatgaccaacaagaaggctgtgtttgccatggtctctcaagcagtagtagttgacggcgtggttgtcatggttgggcgcgggagcactccacgcgccggtcagcgacgagtagctggtcgcacaggcgaatacagggctccgaaggttggtctccacgcagaccacgcggaacggaccggcggcctggcagtcgaggtggtcgcagccgtcgtccttggcacacagcacagccccggtgcagcaccacacggacaagtaggacgggtaactagcgcggggcatgctcaggtgctgctggctgccggtgagggggtcccagacgatgaaacccctccttgaccagtcgtcctcgtagtggatcagcacgcggccgtggcggcagtcgatggctgaccagcgtctgtg

SEQ ID NO: 6036 - DNA, 1138 bp, Zea mays
  Zm_smallRNAprecursor_1525
taacgcatggatcagtggcaatgatgtgatatccactgcatagttaagtactttttgtctctgggaccaggtgtccaatgccacagtttcaccatagtttccatagcaatgaaacagttgaaaaaaaattatatttgatgaagttaaatgtgaaagatatatggaaattattgtctgcaaaacacaacttgctcgacaccataacaggagggccaggctaatatctactatcgcaatacacggtagtctgtttttcttttggatcatacatcaccttttttttctgaaactgcattcttcactttactaggtgaacgcctaggccagcctaattacttatatgggttaatcgacttcagctatcgcctagagaaatactaaacatcaaaatcatcacttgtttaacgcaagatgtggctaaacgcacgtgatacgtcccattcagggaggattgaagtgaacaatgaaaacagcatgcggcggccccggcagcaagtatccagcaagtgagcacgagatctatctatcttgtccaagaaaattcatccggttaccaacgaggaggcaccaagtaatgatccgaagatttaatctatatgatgtggtaatcgcaaatggcaattcctgtgatagatagatagatctcgtgctcacctgctggatacttgctgccggggccgccgcccaggtgcttgctcagctcagcaaaaagaaaccctgcagtattggataagagcggatgaaaatgcactcgagacagacatcaagattgaagatggagagatgacgcaaaaggttattttaataaaaaaattaggaatcaacgggagggccatctgaacattttcattaatcgaccgaagtgttagttccaccaaattacagggtacgcaaggtataaagagaggcacaagataggggaaagaattgtatgaaatcagattagccggccacagtaactgcggtggccctcgctgtagacgagtgcagtgtgcaggactgaaggctgcgcagcgcatctctatccgctcgcgggcggcgtgaagcctgcctcgacgacgggttgcagacttgcagtagcgccggcggcgcaagagatgtcccgacattaggaatggatagaatcaagtcaagggac

SEQ ID NO: 6037 - DNA, 1172 bp, Zea mays
  Zm_smallRNAprecursor_1526
agttcaaaagagatgacgttagtaatacaagcaccaatttcccttttatagcactttgaatatataaagttggcagttactaaaacaaggaaatcttattatatgaactaaatttctcttaatcttcaatgcttaattttaacaaattaaacatgcatgataaattgattaagttcaaaggctaattttaaatcatatcatggtgagtatttaatgtagaagaaataaatccaaatgtacaagagagaatacatcacatagttttggattgttcttctttatacgtttaattgcatagtccatttgagaaactcattcttatgctgtgaaactacatagatcacctaggtaaaaacattagtttcacaactctagtcatatagataattccccttttgataagtgctttaagaatttgaatttcttacttagcaccttattcattcacgaacacggggtttttctctttcatgtctagatcatggcaataacagagtaatcaaattgaaatgtgccaagaaatacttacaaccaatttaagcatttggattgccatatgtaagaaaaaaagattatgcaatctgttatatgataacctcaattttgatcatatttggtcttgatcttcaacttggagtaccaagataagtgccaaaatatttctcaacaaatatccttgtaccccttcactttccatgattataaatcaattaaaaaccaaactatggtctctcaaacaacttatgtgatttattctatatgagagccttccaatcaaagtgactttcaatatttccaatatttgtcacttatgacagattctgtacactctaaagaaacattcataaattttgatgtacagatcctatgaccacgaaaattggtggagatgtgctttaataagtctgctaacagctgtaaaaagttgagactcatttgacttcatatgtgctgccagccataatatctcccacagtaggtacatgctgaaaactgctgtgtttgtgctgacaagattgacttaatcaagaagtttcacttatccaatgattatgaaatttgcacagactttgctatcatatgtatagagcaagtaaactgaatttcaagccaatctaaatagatttgatcactcaaacatggttatgagcacagccttgtcagattttcaa

SEQ ID NO: 6038 - DNA, 1065 bp, Zea mays
  Zm_smallRNAprecursor_1527
ctcaattttgatcatatttggtcttgatcttcaacttggagtaccaagataagtgccaaaatatttctcaacaaatatccttgtaccccttcactttccatgattataaatcaattaaaaaccaaactatggtctctcaaacaacttatgtgatttattctatatgagagccttccaatcaaagtgactttcaatatttccaatatttgtcacttatgacagattctgtacactctaaagaaacattcataaattttgatgtacagatcctatgaccacgaaaattggtggagatgtgctttaataagtctgctaacagctgtaaaaagttgagactcatttgacttcatatgtgctgccagccataatatctcccacagtaggtacatgctgaaaactgctgtgtttgtgctgacaagattgacttaatcaagaagtttcacttatccaatgattatgaaatttgcacagactttgctatcatatgtatagagcaagtaaactgaatttcaagccaatctaaatagatttgatcactcaaacatggttatgagcacagccttgtcagattttcaatgttggccagatttcagtaaattgagttactcttcttcaagttgaatcaaatctgaaatgaactactttcaaaagacaaatatccattcaaaccacttactaaatgaagtctcttgaatttattcaacataaatcaatccaaacttgattatttagcaaattgtccattcaatcatcttatagcaagcaacatatgcatatatatccaattcaatcaactcatatgcattcaaatgaatttgatcaacaaacattatactttatatacctcatgatcatccaatagcaagtttgaacttaacttatttgcaatccattcataatttaaccaacttgaataaagcacttgtatttggtagaatttggacttcacttattattgacttggcattgggatagaattttattagtcttcaacacttaattcaatagatgatgattaaatgaatattattgaatcaagcctccaatgcccaaggtacctgttca

SEQ ID NO: 6039 - DNA, 1054 bp, Zea mays
  Zm_smallRNAprecursor_1528
aaacatctacacatctcgttcctaaatttatgcgcatacagggaaacatatttgactcttgtatgccttcatattttttgcgtatagagacgtggggtgtagaagggggcatgcaggaaaacgtgtttgattaatgcatgagtttctatgttttgttgtgtcttcggtctgcctgtgtgtctcttccgttttgaagacgcttgatatgtcgccatcatccaaaagcacaattttttctcatactttttttgctgctagcttttataacgtgtcatcacgaatgaaaggtaccttttgtatatgtagctggtggcggctttaatgaacacacggacaatcctatattgctagcaattgcactttcacggcaacgaacaaatatggttgtcgatgtgcccatgtactccgtatatccagatcaacacatacatgcattttcatgtaggagtagcactacaagaaactaataaatgttcgtgtgttaatttaagaacgtgggtaccgacgttcttaattaggttatgttcatgggttaatataagaacgtgggtacccacgttcttaaattaaattcgtgggcccgtggtaaaaccgtcgaacttatcgtattagaaacgtcggtacccattttcttaaattaaattcgtcggccacgtgagcaccgtcgaacttaacccaaaacctaaatctctcaccgccgcgcgtctctcttttttccctctgtataccgcgagcgcccgcaactagctgccagccgcgcgcccgccgctacctgctcgcatccagcgccccgccgccacccctcgcggtgatctatgtgggcgacgtccacggctacatcacgaagctggagagcctctgttccaacctctaggccgcactccccgccgacgccttggccaccgcgctggtcatcttcctcggcgactacaacgaccgcggcccgcacacccgcagggttctcaactttctcctcgcgctcccgacgcgctacccagcgcagcgccatgtcttcctctgcggcaaccatgacctcgccttcgtggcgttcgtt

SEQ ID NO: 6040 - DNA, 1069 bp, Zea mays
  Zm_smallRNAprecursor_1529
gagcttatgagtcttctcgattgttattcaggctaccatcaaatttggatgaagaaggaggatgagccaaagaccagtttcataacccctagtggaacatattgttatcttcggatgcctgaggggctcaagaacgctggaggaagtttcagcaggatgactgcgaaggttcttcaacctcagataggcagaaatgtgctaacttatgttgatgatatcattgtaaaaagcacgaagcaggaaaatcacattgctgatttgcaagagaccttcgccagttttaggcaagctggcctaaagttgaatccagaaaaatgtgtcttcggagtcaagaaggggaaatttcttggatgcttggtttcaacaaagggaattgaagctaatccaagtaaaattgaagctatacttcgaatggagccaccaactacaaaaaagggggcccaaagattgacagggaggctggcatctcttaatagatttatatccaggtcagcagaaagaaatctaccattcttcgaagtactgaaatcagtcgaagtctttcaatggggaccaagccaacaaaaagccttcgaggacctgaagcaatatttgatagatttaacaacattaactccaccaacgccaagggctccgttgttattatatgtggcagcttcgcactcagcggtaagtgcagcacttgtccaggagaagcttgacggccaagtcaagaagcaggtcccagtgtattttgtatctgaagttcttagtatatcaaagaagaactatacagaattagagaaggtgttatatgctgttttgatggcatccaggaagcttcggcattactttcaagcatacaatgttattgttccttcttcgcagccgttgaaggatattatgaggaatagagaagctactgggcggattggaaaatgggctgcagggctcaatgaattttgcattgattatgtgcatagatcttcgatccagtcccaagcgttggcagattttatcgccgattggacgccaggggctcaggatgaagaaacaaataaagatgccgaagtatcgacagtgttttgcg

SEQ ID NO: 6041 - DNA, 1061 bp, Zea mays
  Zm_smallRNAprecursor_1530
atttctaattttttctatcttcttctttatgcaagagcaatcattctaaaaattggtagctttttgcttaagggaaaggtggtaggaatttcttgaactaaatggcctttttcatgaagtattggcaatgggtattaacctaataaaaaatttatttgctcactgttgcacactttttggcttgcttatgatttaattgaaatatggcttaatatcaagttctatttatttaccctactaaaaatgatggactggggtgtttatcattttttgtagtggtattttagtggttacaagtccactggatttttcttaacaattttaaaattgttttcataattctaataattgtttttctagtttgatttgcttaataaaacatttcaccaagaatttgttctggactagggttccctttatttttcctaggttctctattaccgtcggccgctttctagccgacggggataaccttatccccgacaagggacgcctgtcagcctgaaaccgacgggaataagccttaaaacgacgggaattacttattcccgtcggtttagggcttattcccgtcggtttcaggccgacgggaattaagtgaattcctgtagtgactttagtagactaggaaaaataattgcattcactgttcattattttccagtgccttttttattttcctaagttttgggcaaatatgtcttttaataagtaaccttgtctaaatctttaatactggggtgcttactatttttaaacagtgcctaagtggggtttacacttctacaatttttcttaggttcaacacagaagcataactaatttttcttattttaataaggtttggtcagtttctttaatcaatttcaagctctaaaatttaaaacagaaagcatagggttcaataattttatgtgatagttcataatattttgaatcaagcaaaattggtttggctaaatttggtggaatatttctcaagatatgaaatttttaagtcttctgctgaatttaaaaagattaattagaaatggataaagaaaaaggggttttgcactggg

SEQ ID NO: 6042 - DNA, 1125 bp, Zea mays
  Zm_smallRNAprecursor_1531
cttatccaatacccaccacatgagattcctaggtatattatcataggccttttccaagtcgataaaaaccatgtgcaagtccttcttctgctccttgtatcgctctatgacctgccttattaagaaaattgcttccatggttgacctttcaggcatgaatccaaattggtttatggtgatatgtgtcattcctctcaggcaatgctcaataactctctcccatagcttcatagtgtggctcatgagcttaatcccttgatagttggtacaactttgaatatctcccttgttcttaaagattagtactaatgtactcatcttccactcatcgggcatcttgtttgatcgaaaaatatggttgaacaacttggttagccaaacgatagcaatatccccaaggcatttccacacctctattgggataccatccgggtccatcgccttgccccctttcatcctctttaaagcttatttgacctctaatacttggatcctatgtacaaagcatctatttaaatcatcaaaaagccatccaattgggtgcccatagtctcattctcatcattgaaagattgtcaaaatacctctgccacctctgtttgatatcttgtcctttcaccaagagttgatccatctcatccttaatgcatttaatatataaattatgtggatactaaatataagcttgatggtgataaaggtataagacaattgatttttaaatctagagatttggcttggctgaagttaagaaatcatagctttcccaaattgagaaaatctaaattgatgcctaaagccgatagaccttttaaagttttgtaaaaagttaatgagaatgcatataagcttgatcttcctgtaaattttgggcttagtcccacctttaacattgtagatttgaagctatatttgggagaagaagatgagtttttgagtcaaggaaaactcaaatacaaggggaggaggatgagaacatcaacaccatcgatacacccacacaatcaccaccaacccttagtcctatgactcatgctcgtgctcgtcgactcagacatcaagtgagttcctttttaagctcttgttcattatatttagataatggaaacgtgggtgctcttttct

SEQ ID NO: 6043 - DNA, 1172 bp, Zea mays
  Zm_smallRNAprecursor_1532
acgaaaaagagatgttgttagtaacacaagcaccaattctctttttgtaacccattgaatatataaagcaggtaggttactaaaacaagaaaacgttatgatatgaaccaatttttccttaatcttcaatgcttagttttatcaaattaaacaagcatgataaattgattaagttcaaaggaaaattttaaatcatatcaaggtgagtatctaatgtagatgaaataaattcaaatgtacgtgagagaatacatcacatagtttcagatttttcttctttatacgttgaatttgcagagtccattttggaaactcattctcatgctgtgaagctacacaaatcacttagataaaagcattagtcccacaactctagtcatatagagaatttccccttttataagtgctttaagaattcggttttcttacatagcaccttattcatttacgaacacaagatttttctctttatgtctagatcatggcaataatagagtaatcaaattgaaatgtgccaagaaatacttacaaccaatttaagcatgtagatttccatattgtaagaaagaagattatgcaatctgttatatgataaactcaattttgatcatctttggtcttgatcttcaacttggagtaccacaataagtgccaaaatatttctcaacaaatatccttgtaccccttcactttctatgattatagatcaattcaaaaccaaacttatgtctctcaaatacttgaaacaatttatcctttatgagagccttccaatcaaagtgactttcaatacttcaattaattgtcacttgatgacagattctgtctactctaaataaacatccataaatttaacctacttaaataatgcactcgtacttgataaaatttggacttcacttattattcacttatcaatcttcaatatttgattcaacatataatgatgcaacaacaacaacaaaacatttttgtcccaagcacgtcggggtaggctagagatgaaaccccatatgaaaacctcaaagctcaaccccaaagaaaagaaaagggagacaaaggcaaaggagaaccaaaaaacgacgaaacgggaaacacataaaaagagataaaacccacaagaactaggaagatctaaagaggcacaacaaaaggtcaaacgattaaggagg

SEQ ID NO: 6044 - DNA, 1057 bp, Zea mays
  Zm_smallRNAprecursor_1533
gtactcgggttctagaagttgagatgaccagcattaggatctacatcctggtggatggaagtagttgactggagcaagagaacagggaaccaagtattagctgtgtttgaattcagcagcactctcgtttctgccagccaagatggcagggatgtagatcaccgggatttgttttattccatcattttttccctaaaaaaatgtgaccagtacaatggcggtgatgcatgcatgctgttgaaccacgcctcactcaattgcatccagcaaaggcatggatccggagataattgcgtgccacatgcaccggtgcctctactaattctctttcctttcagacaaggcatttgattgcggctgaaagatgctgtgcatagaagcacatgcttgcctttattcttgagaaaattccttcaatgccatccaaacttataccaatcccttcaatgccatcagattttatagcttcccttcaatgccatcaaatttaaattttaatcccttaaatgccattgccgttagtttcaagttaacgccgttagttatatttaaagcaaatccctccaatgccatcaaaatctatactgatcccttcaatgccactagaaattggttcgatctatttgagttttaaaattttcagaatagaaaattttttgaacccaaaaattttgaaacgcaaatataccacattgattttaaaatttatctccatctgttatcattagtgtttgttgttaatttgaaaaaaatattaggaatcaaatagaccgaacagatatagcggagtaatttttggtgtttacaaaaaaatattactaaagtttttaaaaagtgtggaattggtccatatttttttattttagaatttttaaaatctaaatagatcaaaccaatttctagtggcattgaagggattgatatagattttgatggcattgaagagatttgctttaaatagaactaacggcgttaacttgaaactaacggcaatggcatttaagggattagaatttaaatttgatggtattgaaggaaagctataaaatttgatggc

SEQ ID NO: 6045 - DNA, 1142 bp, Zea mays
  Zm_smallRNAprecursor_1534
gtggttctctcattgctcggaagactaagtagcaggtagcagtttctcgtttgagtaccgaggctgagttgcgtgctatggcccttgtgactgcagaggttacttggttacgatagttgcttgaggattttcatgtttctgtttccatgacgactccttttgtctgacagtacaggtgttatcagtattgctcgtgatgcggtgaagcatgagctcaccaagcatattggagttgatgtttcgtatacacgagctcaagtctaggatgatgttatcttgctttggtatgtgcctttagagcttcagttggctaatttcttcacgagggcacaggctcgcgctgagcataaatttttcctctcaaaactcagtgttatagatccaccttgagtttgagggagtattagatagatatgggtttatttgtatttttccattttataagggtattagatagataggcaacgactgctatgcaagtagtcattctgtgcaagcgtgcaagcaaaccatctgatccattatatcgtgatccaaccgtgggtcacatttaacacttaaacccttccaccaccaactcaataatctttataaaaaaacccctaacaaacaatggttatatctgtggttggatcgtaatctaatagatcagatggtttgcttgtacgcttgcacagaatgactgcttgcatagcagttgttgcctagatagatatgggtttatttgtatttttctcttaagggtttttgtgtatatttgtactcatgtacctatatatttgtgctagttgaccccataatgaatagacctgctattcataatatttgcaaaccatgaaaatttgattattacgaactatccaaatactcgaacacatgggcattatagctcacaaaaatggaaggttgagctgctgcttgaagaacctcaacatctttgaacaacaacctcaacgaaacttgtatatgaaccaacttccaaacaatcccttgtggaaggatagtaatgacttcagggcattgatcacacatatccgacggtggaactactgtaacaaccctcttttctgtggaatatagttgaaactctacaacttgaccaaaaccaagatgacgacatatggtggaactaacaaaacaag

SEQ ID NO: 6046 - DNA, 1141 bp, Zea mays
  Zm_smallRNAprecursor_1535
tggttctctcattgctcggaagactaagtagcaggtagcagtttctcgtttgagtaccgaggctgagttgcgtgctatggcccttgtgactgcagaggttacttggttacgatagttgcttgaggattttcatgtttctgtttccatgacgactccttttgtctgacagtacaggtgttatcagtattgctcgtgatgcggtgaagcatgagctcaccaagcatattggagttgatgtttcgtatacacgagctcaagtctaggatgatgttatcttgctttggtatgtgcctttagagcttcagttggctaatttcttcacgagggcacaggctcgcgctgagcataaatttttcctctcaaaactcagtgttatagatccaccttgagtttgagggagtattagatagatatgggtttatttgtatttttccattttataagggtattagatagataggcaacgactgctatgcaagtagtcattctgtgcaagcgtgcaagcaaaccatctgatccattatatcgtgatccaaccgtgggtcacatttaacacttaaacccttccaccaccaactcaataatctttataaaaaaacccctaacaaacaatggttatatctgtggttggatcgtaatctaatagatcagatggtttgcttgtacgcttgcacagaatgactgcttgcatagcagttgttgcctagatagatatgggtttatttgtatttttctcttaagggtttttgtgtatatttgtactcatgtacctatatatttgtgctagttgaccccataatgaatagacctgctattcataatatttgcaaaccatgaaaatttgattattacgaactatccaaatactcgaacacatgggcattatagctcacaaaaatggaaggttgagctgctgcttgaagaacctcaacatctttgaacaacaacctcaacgaaacttgtatatgaaccaacttccaaacaatcccttgtggaaggatagtaatgacttcagggcattgatcacacatatccgacggtggaactactgtaacaaccctcttttctgtggaatatagttgaaactctacaacttgaccaaaaccaagatgacgacatatggtggaactaacaaaacaag

SEQ ID NO: 6047 - DNA, 1071 bp, Zea mays
  Zm_smallRNAprecursor_1536
ctgaggaggtggctcatcggaagaagcagggcctccttaccctgcaggagcccgcttagtacgtgcagcctagaccctgctggagtcaacccagtacggcacataacgggagtgtttgacgggcttctcgaagcgagtctgggtgaccacttcgatcatcttcataataaagggtgcatggtgacaccccttaagaggagaccaagaagcacgaaggatctcttcccagatcatgtcaaacacatttatgcgggcaagactgttaggagtaaggagaagaaggagaatccgactctctccaaggacattcatctggtttccgccctttgggggaacggtcatcctaaacaaagatttaaggtacctatagtacctatgcatattggaagttattcaaaactctcgctccttagaaatatgaacaaattcttgttattcccgcattgatagcctaatgccatggactttaaggttgccgccctgaatatcttcatcccaagatatgggcaaaacgacggtagctaaatttatgccagacaccctggataaagaactacataaccgggtagtcatacccatcagcttcttcatcaactctctttacctagagagtggcatagaactgagcaattactttgtcgttccaggggtattccatagtcattatatttttaaccctttctctcgcagttacggagagctgacatcatgtctgcatcccccataccctcacacccctcccggccaatgaaacgatgtcaaacgactgggtgcttcttggacatgatgacataattataaaaatcagtatggaaaaggttccagaaccaagggtcctggacactaggatgtctgggtgtgagggtgggattcatgaacctaaagcattgaagggagtccactcccttcgaagagaagtcgaccgaaggttcacgaggtccccgggacatggtcgccggatgcatatggagaccggtgatgagtagagcgttggacgacggaggatcgacctcgtcgttgaaagctccatcctcctcttggcaaggggcgtaccctatggaggaggtgctt

SEQ ID NO: 6048 - DNA, 1247 bp, Zea mays
  Zm_smallRNAprecursor_1537
acttcatttcttcatcagattcataaataacaagtgatgccgaattccaacctctatcgaatgttgactgagaatggcttgtaaccatgctaatgtctctgtccttgggtatcatcatgcttccatctgcaacaagacgaggacgcttacaaggtcttcctgtaacccagtacaatcgaccaacagaatccctacccaggcactctcctctcaaggatgccatactaagctgtgactctactgtgctaattgaaccatgcaactgtgaaatcctctccaataaattatttgattcgttcatatcagcatcatggtcaaccagtttagatgtcgatgtttcaatattatcttgggacaatgtcatagcattttcatcaggtaaatctccatttggtgcattgataactgtagcagcatgagtctctcccacattcggatcacaagtaccacttttgccaactaatgatttctcgcaactattggatccttcggcaatagagtcccgatcagtctggtcagtaattatctttgatggttgttctgaaagccccaaagatttatttccttcaataacagatgtgctggatatgccattgtcagtactgcaaggtttacccacatccaatagtgcagcaggaaccccttcagcagggttgttcaggttaactccaacattaacctgttcagcctcttcaagatgctctgaggctgtgggcatagcacgctgctgattctccacgagtcctgaactattgcttacttggtcatttttcatccatctactttgtgtggcataaggattttttatttctacccgataccttaactctttcagttcataattcaggtgacgtaatttctgctggagatcatttgacttgtctgaacactgatctagatgttctctgatgagagctgtgttgtgcaattcgtcacatagaaattttagcaaatagattctctgcaattgaagatcaaaataacatatcagaaggttgtcacttatctgctatagaaaataggatgacaaatagcgtttatggtgatacaacccccgctgatcaaaggcctatttgttatgtaatcttgctgcagattacaaagtttgcatgtagattaaatttatggctatttcctctatacggctcttattagattctttcctaagcatttaaacatgctgacaacacaaactaacatttaaaatctgtgactagtcaaaatgtgatgtataaaagagtcttaat

SEQ ID NO: 6049 - DNA, 1044 bp, Zea mays
  Zm_smallRNAprecursor_1538
gctggctgaaaagctggggcgtttggcgatctgcagcagcttttggtggccagaagctggaaaaagcccaaacaaacaggggctttgtgtgtgtgtgtgtgtgtgtcggacattcgtcatgtcgtccatgtccaaggaggttggaggattcatcattcatcaataattctttcacgctactagtatctgtccctctctttcgttattaccgtaaaaggccatggctttccgttcgacggtcctagccactcttgtcggcgtaagtgctccacggctcctgctctgctgcaagaccatgccttcgctggaaaataaaagcaaaaaaaaaaaaattcaactggactctgcacccatgccttcgctggagctgttgcagtgtttccttgaactccagcgggaaaataaaaggcaaaaaaaggagaaatgctcgagacaaaacaggaaaatgttgctagggaaacaaaagtttataaaacaaaaaaattggcttcgcccgggttcgaaccggagaccttcagtgtgttagactgacgtgataaccaactacaccacgaaaccttcttgttacttctgctgaatgtttagctcttgttgaaggcggcgtatgttgtcaatggcacgcagccatgactcttgccaaaaataggaaaaacccgtactacgggcatgcagctgcacgggattgcatgacgaccgtccgtttgcgtgcctacatactcgccctggaaaatggtgaccacaagaatgtaatcttttcttcaccccaaaaagaaataaaataattttttaaattgctaggggagagagaagagaagaggagtgtagattaatcagtttattcgcaagatttcactttccggcgagcaagatcatactaggaaatcgcgcgcaattatatgtcccacagccaggaattagctccggtccatcctccgcattgctttctctttctccccacctccaccgccccttcgccatcgatcgccctgtccctgtccggccggcggtgcatgtcatctcgtacgtacgtccaagctaggcacc

SEQ ID NO: 6050 - DNA, 1090 bp, Zea mays
  Zm_smallRNAprecursor_1539
caagagcctatggcgtggtgccacggcgcgttgcccatacatcatgcctccatcgatgatccatcctcacttgctataaaaagaggtgtccatggtgctcaagctcagccaagcaaataagacgacttgtttcattgattcttgaagagatcgagcttcttttgcaccacaaggtcgaggatgtcttgcaactgcggatcaagctgcggctgcggctcaagctgcaagtgcgggtaatatatatgataatatataagtgcaccgtgcatgattaatttctccagccttcttcttgtctagttaatttccatttatttattttttccattgcaaaacaaacaaacaaacagacaagaacaaagttaatttggatcgagtagttcaatccatttgcgcgctgtccttttcagcaagaagtaccctgacctggaggagacgagcaccgccgcgcaggccaccgtcgtcctcggcgtggccccggagaagaaggccgcgcccgagttcgtcgaggccgcggcggagtccggcgaggccgcccacggctgcagctgcggtggcaactgcaagtgcgacccctgcaactgctgatcacatcgatcgacgaccatggatatgattattatctatctagcttgtggtggtggttgaacaataataagcgaggccgagctggctgccatacataggtattgtgtggtgtgtgtgagagagagagaaacagagttcttcagtttgctatctctctctgcatgtttggcgtcagtctttgtgctcatgtacgtacgtgtgtctacctgcatgttggttgatccgattgcatctgctgtaaccatatattaattggtccacgatgatatgatttgatactatatatatactaaaaccggacttcttattataatacttgtagtatataagtttcttacgccgcaattgatcgattcagaaggagttctagctagctaaaacatgcagattcagaatatcagatttttaggactactggagatccagaaccttcgtgtccttgtacccgtgattttggatcccctttctccccactacaatcgttggcgcaatcttgttctgc

SEQ ID NO: 6051 - DNA, 1190 bp, Zea mays
  Zm_smallRNAprecursor_1540
ccagagccggatggcctagggtcaccaggaatgggtccaggacccgggtaaggaggcggagggtgggaggatgattgacccggatccccatggtagggaggcgggacaaactcctcgcgatcatcaacatagacttcttcatcttcatcgtctgcagacataaaaggcaccccgtaggcctgctggtgccactcattgatctccgggggaggaggatggagaggcacatcaggcgaacgagggacaaaaggcatgcccatggaggaggcttgacgacgaagattgtcgtcagtctcccgctgacgccgtgccacctcatggacatcagcagaaatgttgcggcacgcggagaaaaatgtcgcaagcccatggagcaagcgagcacccatcccacgggccacgacctcgaccacgaccactagcacgtggcatgggagatccgcggccaggagagggacgcgaggcagcagcggggggagaggaggaaggatggtgaggaggctggcgaggtggctcagaggaggaggcagggcctccagaccgtgagggaacccgcttcgtacgagcagctgggttggaggaatcaacccagtagggtacgtagcgggagtgtttgacgggtttttcgaagtgggtctgggtgaccacttcgatcatcttcatgataaagggtgcatgaagacaccctctgtgaggagaccaggaagcacgaacgatctcctcccagatcatgtcaaacacattgatgcgggcgagacggtttggagcaaggaggaggaggaggactcgactctccccaaggacgttcatttgattaccgccctttgggagaacggtcatccgggacaaggaattaaggtacctatagtacctatgcatgttagcggttgtccagaactcccgctcagtagagacatgaatgaattctgtctcttcccgcatgggcagccgaatgtcatgcactcgcatgttgctgccctgaatgtctgtatcagagaagcccagaatatgggcaaaacgacgataactgactttgtgccagttaccctggataaagaaatacatgactgggtactcatacccatcggcttcctcatctactttctttatccagagggtggcatagaactgagctaccacctcatcgttccaggggtattccatggtcataatgttacgtaacccctttc

SEQ ID NO: 6052 - DNA, 1148 bp, Zea mays
  Zm_smallRNAprecursor_1541
atacccatcggcttcctcatctactttctttatccagagggtggcatagaactgagctaccacctcatcgttccaggggtattccatggtcataatgttacgtaacccctttctctctaagtgaacgagagctgacgacatgtcaacatctcccatattctcacaaccctcccagtcaataaatctatgtcggacgactgggtgtttcttggtaagaatgacagaatcgtagaagtcagcctggaaaagattccagaaccgagggtcctggacaccaggatgacgaggagtgagagtagggttggaaaacctaagacgctgaagggtttctattcccttctgagtgaagtcgatgggagattcatgcggaccgcggctgacgttcgccggatgcatgtgcagtccggtgacgtagagagcatcaggcgccggaaggtcgacgaagtcgtcgaaagccccatcctcctcttggcagggagcataccctgaggaagacgtgctacgacgaggacgagaggcgccaaccttttggcgtctcccgcgagtcggctgcgaaggcatggaagagccctcgccaggcatccgaccagagccacgtcctctcttagagagggagcgacgaggcggaggagaggggacgggagattcctcctgaatctcgtcggagtcgctgctaaactcaaccacagaggggttgcggcgacgcaccatgattgaaaacggtggtgaactgtgaagcggttgaagtgtgtgaaggaaaggctctaaaggatgtgaagcgaccaaggcgagagtgaatgaagtgggaaaagagaaggagagagtgtcaaatatatataggcagttgagctggtcctcaggaccagttcaactgcccccatggcccagttcagctggttttgctgcgcagcgaccaaaaaaactgctcaaaaaaatgtctgcgctccctgcacttgagcgaggcaagaaagaaagaaaatatgcatggcgcgaggagaaggaactggacagagaaaataaataaagaaagtctgcgcgcgcagcagagctgatgtgaccagacaagaacaagaagaaaaaataaaataaaaaattcctgcatgcgcacccctgctgttgaccaaataaaagattttccacccgcatgt

SEQ ID NO: 6053 - DNA, 1126 bp, Zea mays
  Zm_smallRNAprecursor_1542
gctgttgctgcttacgtttgttggctgaggttgtgccggttcgccttgcggatactaggcggatgacgaggaagataagtacgccgaggagcagtgcgtgtgtggcggtgccatggtcgccggcgagctgcaggtagtgatggtacgcagctccaagggccatgccgtcccgaccttgttagtgaacaagtaaccgggaaggcttgcaatggcgagcgttgggctccaactagccgctatatgaaggcagcctccctagtcttcctccacactccagcagctagtccagctaccggcttcagacagagtcgactgtatagtagagtctacatttattttcatagatatataaaaggatatgataatacgtggatgctacgctgccagaaacaaataaataaaagattaggagcagtacaagagaaacgcaaaaacctggacaacctctttcaccatgacaccgtatcttatgagcaaggagccctgctgctcccatgagcaaaatcaatccagaccacatcctccacatccaacggtgctgcgtaggggggtttttgtaaaatgtacagagttgcaaagaacattttataaaaccccctgacgcagcaccgttggatgtggagggtgtggtctggattgattttgctcatgggagcaccagcgctccttgcgcacaagatacggtctctttcaccatacacagcaacaatctaactagaatttctgaaattaattaaagtaaagaaaaacgctcttcacctcgtgggatcctacggaacggaatggacaaaaacttgtccagggcccgtgtggtgtgtatatatatactattagaccaactccagcaatgccctgcatacgaacacgcttccataaaatacgaggccgaggccactgttcacgcggtcagggggctccatatccgggcgcggagaacatgcggcgccggtgctcactcccttttctcgcgtcctctctctcttccccgcacttcaaccgtcgcttttgcaaacgagctggagcagctgagagggaagcggtggcggtcgacgtcttcgggtagtgcttgcttctcgtcggcgattggcccttcgagccctcggtacgccgtccagatctgaactcc

SEQ ID NO: 6054 - DNA, 1116 bp, Zea mays
  Zm_smallRNAprecursor_1543
tgctgcttacgtttgttggctgaggttgtgccggttcgccttgcggatactaggcggatgacgaggaagataagtacgccgaggagcagtgcgtgtgtggcggtgccatggtcgccggcgagctgcaggtagtgatggtacgcagctccaagggccatgccgtcccgaccttgttagtgaacaagtaaccgggaaggcttgcaatggcgagcgttgggctccaactagccgctatatgaaggcagcctccctagtcttcctccacactccagcagctagtccagctaccggcttcagacagagtcgactgtatagtagagtctacatttattttcatagatatataaaaggatatgataatacgtggatgctacgctgccagaaacaaataaataaaagattaggagcagtacaagagaaacgcaaaaacctggacaacctctttcaccatgacaccgtatcttatgagcaaggagccctgctgctcccatgagcaaaatcaatccagaccacatcctccacatccaacggtgctgcgtaggggggtttttgtaaaatgtacagagttgcaaagaacattttataaaaccccctgacgcagcaccgttggatgtggagggtgtggtctggattgattttgctcatgggagcaccagcgctccttgcgcacaagatacggtctctttcaccatacacagcaacaatctaactagaatttctgaaattaattaaagtaaagaaaaacgctcttcacctcgtgggatcctacggaacggaatggacaaaaacttgtccagggcccgtgtggtgtgtatatatatactattagaccaactccagcaatgccctgcatacgaacacgcttccataaaatacgaggccgaggccactgttcacgcggtcagggggctccatatccgggcgcggagaacatgcggcgccggtgctcactcccttttctcgcgtcctctctctcttccccgcacttcaaccgtcgcttttgcaaacgagctggagcagctgagagggaagcggtggcggtcgacgtcttcgggtagtgcttgcttctcgtcggcgattggcccttcgagccctcggtacgccgtccagatctga

SEQ ID NO: 6055 - DNA, 1154 bp, Zea mays
  Zm_smallRNAprecursor_1544
cagaatagccaaataaattgaaaaaggagcccttgggataccagagacctagattttgggtgtgaactagatatctcaaaattctcttaatggccactaagtgacactcttttgggtttgcttgaaaacaagcacacatacacacactaagcatgatatctggcctagatgcacataaatatagtagagatcctatcattgatctataaagtttttgatctactgttttaccttcttcatttaagtcgagatgaccacttgaagccattggtgtcttggcgtgcttttccttttccatgccaaactttttgagcatgtcttgtgtgtacctggtttggcacagaaaggtcccttccttgagttgtttaacttgaaaacccaggaagtacttgagctcgcccatcatggacatctcaaacctatttgtcataaccctactaaattcctcacaaaaagtttcatcagtactgccaaatataatgtcgtcgacatatatttgacaaacaaataattgattgtcaattttgcgagtgaataaagtagagtctacttttcctatttcaaaaccatttttaagcaagaaatctttaaggcaatcataccaagctcttggggcttgtttaagcccgtagagtgccttgtgaagtaggtaaacatggtttggcttctttggatcttcaaagcccagtggttgctccacatagaccctctcttgtagtggtccatttagaaatgcgctcttgacatccatttgatataacttgaaatcatggttagtagcataggcaattaatattctaattgactctaaccttgctaccggcgcatatgtttcaccaaaatcaagtccttccacttgagtgtagccttgggcaaccaaccgtgctttgtttcttgtaaccacgccatgttcatcttgtttgttcctaaagacccattttgtcccaatcacattttgtttgggtctttggactaaggaccaaacttcattccgcttgaagttgttcaactcctcttgcatggcaattatccaatccggatcacccaatgcttcttcaaccttaagtggctcaagagaggaaacaaacaagtaaaattcacaaaaattagctaaacgagatcgagtagttacccctctcctgatgctacccagg

SEQ ID NO: 6056 - DNA, 1041 bp, Zea mays
  Zm_smallRNAprecursor_1545
tataataaaggtggcatgtaagcgattggagatgacgtctatccaaattttcgctcactttggctggagattacgaatcggatcatgtctgtttagatgtcgtcaaagtctgttttatttctcttagttgttttgttttctgttgaattcagttcggtgatttttttatgtggtggtcaaggaccgagccagaaaaaagtttaggaaggactaaactaaactgttgcagtatagaagcccttcgttatattgtatatattttagattagaggagcctctagtgaggctctataggaccggaagcagtagggggctcgagacccgtccgccccatcgctgaatttgtccctggtggccgaattttttgtattttagcccttaaacagaagtaaaatcacgtttagacctaaaaaaattttaaatgcagttttggaccctttgctcggcgccatagcctatggcgccgagctaacacagctcggcgccataggctatggcgccgaggtcgtgttgcgttggcacaacccagacgcgtggcgtcgacgtggaaccgagctcggcgccacagatcttggcgccgagctcggttgtgttattaaaatatttgttgcagacatgagcacaaagcccatctagcccacttggtagagcacaaggcttctaaccatgtggtcgtgggttcaagccccatagtttgcatttttttgttttttttgtttatgtcattggtgtgtccgcttaaatttatttctcgcctagattttttttatctttgttttgtcactgaagtcagttcagcttatataatttacctatacttacactgaagttttgctaaaaatttctagccatctgtcccttccaaggtgtaagggatcaagagcaaaagcccaatacagtacagccgaatgtcgcctcgcaacaccgtcgacatgcatgcatggtcactctttcagctgtacacacgtagctggcacgacgtgtgcagtgcgcgtaggtatatacgcccagatgtagcacaggacatacatgtcttattgg

SEQ ID NO: 6057 - DNA, 1041 bp, Zea mays; identical to SEQ ID NO: 6056
  Zm_smallRNAprecursor_1546

SEQ ID NO: 6058 - DNA, 1042 bp, Zea mays
  Zm_smallRNAprecursor_1547
tataataaaggtggcatgtaagcgattggagatgacgtctatccaaattttcgctcactttggctggagattacgaatcggatcatgtctgtttagatgtcgtcaaagtctgttttatttctcttagttgttttgttttctgttgaattcagttcggtgatttttttatgtggtggtcaaggaccgagccagaaaaaagtttaggaaggactaaactaaactgttgcagtatagaagcccttcgttatattgtatatattttagattagaggagcctctagtgaggctctataggaccggaagcagtagggggctcgagacccgtccgccccatcgctgaatttgtccctggtggccgaattttttgtattttagcccttaaacagaagtaaaatcacgtttagacctaaaaaaattttaaatgcagttttggaccctttgctcggcgccatagcctatggcgccgagctaacacagctcggcgccataggctatggcgccgaggtcgtgttgcgttggcacaacccagacgcgtggcgtcgacgtggaaccgagctcggcgccacagatcttggcgccgagctcggttgtgttattaaaatatttgttgcagacatgagcacaaagcccatctagcccacttggtagagcacaaggcttctaaccatgtggtcgtgggttcaagccccatagtttgcatttttttgttttttttgtttatgtcattggtgtgtccgcttaaatttatttctcgcctagattttttttatctttgttttgtcactgaagtcagttcagcttatataatttacctatacttacactgaagttttgctaaaaatttctagccatctgtcccttccaaggtgtaagggatcaagagcaaaagcccaatacagtacagccgaatgtcgcctcgcaacaccgtcgacatgcatgcatggtcactctttcagctgtacacacgtagctggcacgacgtgtgcagtgcgcgtaggtatatacgcccagatgtagcacaggacatacatgtcttattggc

SEQ ID NO: 6059 - DNA, 1042 bp, Zea mays; identical to SEQ ID NO: 6058
  Zm_smallRNAprecursor_1548

SEQ ID NO: 6060 - DNA, 1043 bp, Zea mays
  Zm_smallRNAprecursor_1549
tataataaaggtggcatgtaagcgattggagatgacgtctatccaaattttcgctcactttggctggagattacgaatcggatcatgtctgtttagatgtcgtcaaagtctgttttatttctcttagttgttttgttttctgttgaattcagttcggtgatttttttatgtggtggtcaaggaccgagccagaaaaaagtttaggaaggactaaactaaactgttgcagtatagaagcccttcgttatattgtatatattttagattagaggagcctctagtgaggctctataggaccggaagcagtagggggctcgagacccgtccgccccatcgctgaatttgtccctggtggccgaattttttgtattttagcccttaaacagaagtaaaatcacgtttagacctaaaaaaattttaaatgcagttttggaccctttgctcggcgccatagcctatggcgccgagctaacacagctcggcgccataggctatggcgccgaggtcgtgttgcgttggcacaacccagacgcgtggcgtcgacgtggaaccgagctcggcgccacagatcttggcgccgagctcggttgtgttattaaaatatttgttgcagacatgagcacaaagcccatctagcccacttggtagagcacaaggcttctaaccatgtggtcgtgggttcaagccccatagtttgcatttttttgttttttttgtttatgtcattggtgtgtccgcttaaatttatttctcgcctagattttttttatctttgttttgtcactgaagtcagttcagcttatataatttacctatacttacactgaagttttgctaaaaatttctagccatctgtcccttccaaggtgtaagggatcaagagcaaaagcccaatacagtacagccgaatgtcgcctcgcaacaccgtcgacatgcatgcatggtcactctttcagctgtacacacgtagctggcacgacgtgtgcagtgcgcgtaggtatatacgcccagatgtagcacaggacatacatgtcttattggca

SEQ ID NO: 6061 - DNA, 1043 bp, Zea mays; identical to SEQ ID NO: 6060
  Zm_smallRNAprecursor_1550

SEQ ID NO: 6062 - DNA, 1041 bp, Zea mays
  Zm_smallRNAprecursor_1551
ctttcagctgtacacacgtagctggcacgacgtgtgcagtgcgcgtaggtatatacgcccagatgtagcacaggacatacatgtcttattggcatgcatgcatcatctaggatggcagggatcgatcggaccattttgtaaattaagaaaacgttaacttggttgaaacctagattaatttgtatattcgtgccgagaatatatatggtttatcgtctcagctagagctaggaataatggcatgcagacgacataggttatggcgccaaggtacgtgatacgccgagattaaaaaaaatctaggcgagaaataaatttaagcggacacaccaacgacataaacaaaaaaaaacaaaaaaatgcaaactatggggcttgaacccatgaccacatggttagaagccttgtgctctaccaagtgggctagatgggctttgtgctcatgtctgcaacaaatattttaataacacaaccgagctcggcgccaagatctgtggcgccgagctcggttccacgtcgacgccacgcgtctgggttgtgccaacgcaacacgacctcggcgccatagcctatggcgccgagctgtgttagctcggcgccataggctatggcgccgagcaaaggatccaaaactgcatttaaaatttttttaggtctaaacgtgattttacttctgttaagggctaaaatacaaaaaattcggccctgatggtggtgtaaactgtttgtcatatcctacatgtgagtgaaaaggccggaatgatgtttttccattatctaaaaatagaagaatagggtaagaggagtgcggctcgatgaaactaatgcttaaatgcctagtttagttgtaaatttagcaaagatagaatgtcttatgaaatttactcaaacaacacaggactttcgaatctaaaatacatgcatccttaattacaacaaagccatagcatcctaggacaaaacgctgcttttggcatgcttgaggtcgtaaatgctctctctctctctcctctagaagcccctagtagagtatgttttttt

SEQ ID NO: 6063 - DNA, 1040 bp, Zea mays
  Zm_smallRNAprecursor_1552
tttcagctgtacacacgtagctggcacgacgtgtgcagtgcgcgtaggtatatacgcccagatgtagcacaggacatacatgtcttattggcatgcatgcatcatctaggatggcagggatcgatcggaccattttgtaaattaagaaaacgttaacttggttgaaacctagattaatttgtatattcgtgccgagaatatatatggtttatcgtctcagctagagctaggaataatggcatgcagacgacataggttatggcgccaaggtacgtgatacgccgagattaaaaaaaatctaggcgagaaataaatttaagcggacacaccaacgacataaacaaaaaaaaacaaaaaaatgcaaactatggggcttgaacccatgaccacatggttagaagccttgtgctctaccaagtgggctagatgggctttgtgctcatgtctgcaacaaatattttaataacacaaccgagctcggcgccaagatctgtggcgccgagctcggttccacgtcgacgccacgcgtctgggttgtgccaacgcaacacgacctcggcgccatagcctatggcgccgagctgtgttagctcggcgccataggctatggcgccgagcaaaggatccaaaactgcatttaaaatttttttaggtctaaacgtgattttacttctgttaagggctaaaatacaaaaaattcggccctgatggtggtgtaaactgtttgtcatatcctacatgtgagtgaaaaggccggaatgatgtttttccattatctaaaaatagaagaatagggtaagaggagtgcggctcgatgaaactaatgcttaaatgcctagtttagttgtaaatttagcaaagatagaatgtcttatgaaatttactcaaacaacacaggactttcgaatctaaaatacatgcatccttaattacaacaaagccatagcatcctaggacaaaacgctgcttttggcatgcttgaggtcgtaaatgctctctctctctctcctctagaagcccctagtagagtatgttttttt

SEQ ID NO: 6064 - DNA, 1065 bp, Zea mays
  Zm_smallRNAprecursor_1553
ctgagtgctttggtcctgacactcgtcaaaacttgtgcctttaccgagtgctatatttgccggcaaagcaagtttctaggtggtcaagtctggtcactttatcgagtgtcatgaacattgcactcggcgaagtcatattttatacacatatatttattcatataatcctggccggctaactaaacccatatatattattgtttatccatgtacatatactccctccgtttctttttatttgtcgctggatagtgtaattttgcactacccagcgacaaataaaaagaaacggagggagtatactgtagcatgcccatatacgataactggacgacgtacgatcccatcgtttccatgctgctcatctacaagctaggagctcattggagctggcctcaagatctgggttttcaggtatatatatagacaccgtatcttatgagcaaggagccctgctgctcccatgagcaaaatcaatccagaccacaccctccacatccaacggtgctgcgtcagggggttttttataaaatgtacagagttgcaaagaacattttacaaaaccccctgacacagcaccgttggatgtggagggtgtggtctggattgattttgctcatgggagcaccaacgctccttgacacgaaactaactaaaacacatgttttttcttcttcttttcgtctgcatgcaattgcacagtggtgacacggacactgcggtgccgctgagcgcgaccaggcgctagcagctctctcgccgccctgccctgggccttcccgtaaagaccagttggtacccctggtacatcgtcgtggcgaccgaggttggcggctggagcatggagtacgacgaagggctgagcctgcttggtcaccgtccgcggcgccgggcacgaggtcccgctgcaccaccgcccggagcaggcgctcttcgtgttccagcaattcctgctgggcgaacccatgccggccgaggtgatcgatcagggttgatttggtgacaagggaatcacgggaggattggagatgattgagggggaaatgaactaatttccccctcaat

SEQ ID NO: 6065 - DNA, 1186 bp, Zea mays
  Zm_smallRNAprecursor_1554
ttcggttgtaatagggaaagaattgtgagtgattaaatcatcttttacttaagtttgactagcaagaaaattaatctttttaattaattttgattaactcctaaccgaacaaattctaaatctacaatataatcgaaaccatgcatgcacaagaacactgaaattccagatcaggcaagatctcgggagatacacaggcataaacacaggaaaatattgtatggatgaataaaataaaccgacgagcggcgaattatctccattggctgaggccgcaagcaggtgcgtgggccagggcccagggcaaagaaatggaatcccagccgtgcaattatcacatcacctctttactacccacctactctcatggaattgcatttcagtccttatttggaacgctttaaagcagcagctagttattggaaaaatatatttttgtacggttaaagccactaatggagtaattatgtataggttttagggaacgaccgctatgcaaccagtccttctgtgcaagcgtgcaagtaaatcatctgatctattagatcgtgattcaaccataggtcatatttaacacttaaacccttccaccaacagctcaataatctttataaaaaacccctaataaaccatggttgtaactgtggttgaatcgtaatctaatgaatcagatgatttgcttgtacgcttgcacagaaggactgcttgcataacagtcgttgcctaggttttagttaaacactttgcaccatttgtcctaacgcttatttttggcaagctcaatgaaacatgcttacaaagtagcaacactactttatttggtatagtgtgttttgtatagctgtagtcaataatactatctccaacagcttatctatactcatactcaaattcaaactcaactctacaaacaatacaatctaaaatgcaaaaggtgtttttggtgaccatatgagtgaactgttgtacgcctgtacattgcacctatatgtcaataaaaacaccgttttgcattgtaaattgtaatgtttatatagtataacttgaatatgggtaaactgctatagatggtctaattacagtactaaacgtcatgttaatatccagacaattgtttgatggatgcatttccaaatatccgtcaatttttaccacacaaacttgatggacatttttggacaacaat

SEQ ID NO: 6066 - DNA, 1187 bp, Zea mays
  Zm_smallRNAprecursor_1555
ttcggttgtaatagggaaagaattgtgagtgattaaatcatcttttacttaagtttgactagcaagaaaattaatctttttaattaattttgattaactcctaaccgaacaaattctaaatctacaatataatcgaaaccatgcatgcacaagaacactgaaattccagatcaggcaagatctcgggagatacacaggcataaacacaggaaaatattgtatggatgaataaaataaaccgacgagcggcgaattatctccattggctgaggccgcaagcaggtgcgtgggccagggcccagggcaaagaaatggaatcccagccgtgcaattatcacatcacctctttactacccacctactctcatggaattgcatttcagtccttatttggaacgctttaaagcagcagctagttattggaaaaatatatttttgtacggttaaagccactaatggagtaattatgtataggttttagggaacgaccgctatgcaaccagtccttctgtgcaagcgtgcaagtaaatcatctgatctattagatcgtgattcaaccataggtcatatttaacacttaaacccttccaccaacagctcaataatctttataaaaaacccctaataaaccatggttgtaactgtggttgaatcgtaatctaatgaatcagatgatttgcttgtacgcttgcacagaaggactgcttgcataacagtcgttgcctaggttttagttaaacactttgcaccatttgtcctaacgcttatttttggcaagctcaatgaaacatgcttacaaagtagcaacactactttatttggtatagtgtgttttgtatagctgtagtcaataatactatctccaacagcttatctatactcatactcaaattcaaactcaactctacaaacaatacaatctaaaatgcaaaaggtgtttttggtgaccatatgagtgaactgttgtacgcctgtacattgcacctatatgtcaataaaaacaccgttttgcattgtaaattgtaatgtttatatagtataacttgaatatgggtaaactgctatagatggtctaattacagtactaaacgtcatgttaatatccagacaattgtttgatggatgcatttccaaatatccgtcaatttttaccacacaaacttgatggacatttttggacaacaatg

SEQ ID NO: 6067 - DNA, 1116 bp, Zea mays
  Zm_smallRNAprecursor_1556
taagattttcttaatgggtgcacgttccttaatgggtaaaattacacccgcggatatgggtacggatgggattctatacccgcgagtgtgcatggtaacctaatggatataatttttttacgaataacggcataaaatggtactagatatattccatttcgtagcagtggacggttgaaccaaccaagtgaacactatttaaactgatgaaatgattaaatattatacttagatatatacttaaggggacttcaacattttgagacgctttagcctgctagttcaatccttgaaactgaagaacaagatatggcagaagctgctcacccaaaatacctgacccctctccttgtccacaccataaataccaggcgtatgcaaccagtgctgccacacacacacacacagacaccaaacgccacagaacttgcaggcatggctgaaggttaagaagaaaaagaggagggcggcctcacatggagatggagagccccttttggtagccaagaatgacttgcctatgcacgccctctgttggcagttccgtccggcagccatggcgacggttgcacaaggtgagtttttgcggcgtggatgatgcaatgtggctgcatcggcaggtcttcttggctagccagtgggctctcgtccaccatgccaggcctccctcttcaaaatttccctgatttttgccctctgcacatggaacttggtgatgtatatatcctgaacgcactctttcaattcttacatctatatatttcacattttcggaaaagcattcctctttgacctttatagataagattttcttttttgtttcttgttcgttcagtaaacttttggatataggccgttctttggcgctgaactcccctgattgaacacagcatgttgtaaatactactcacctggctatgcactcctgagttgcatgcagttgcagaaccaagaaatgttaccgctgttgaaatcattaaaaaaaatagagaaatgcctttgcatggctacgggtgtttcagcttctgcagggcagagatgatcatcaggtttgtccggtctgcagttggcatgcagttctcgccagatccaagaagcggccctgccatgccaaca

SEQ ID NO: 6068 - DNA, 1116 bp, Zea mays; identical to SEQ ID NO: 6067
  Zm_smallRNAprecursor_1557

SEQ ID NO: 6069 - DNA, 1117 bp, Zea mays
  Zm_smallRNAprecursor_1558
taagattttcttaatgggtgcacgttccttaatgggtaaaattacacccgcggatatgggtacggatgggattctatacccgcgagtgtgcatggtaacctaatggatataatttttttacgaataacggcataaaatggtactagatatattccatttcgtagcagtggacggttgaaccaaccaagtgaacactatttaaactgatgaaatgattaaatattatacttagatatatacttaaggggacttcaacattttgagacgctttagcctgctagttcaatccttgaaactgaagaacaagatatggcagaagctgctcacccaaaatacctgacccctctccttgtccacaccataaataccaggcgtatgcaaccagtgctgccacacacacacacacagacaccaaacgccacagaacttgcaggcatggctgaaggttaagaagaaaaagaggagggcggcctcacatggagatggagagccccttttggtagccaagaatgacttgcctatgcacgccctctgttggcagttccgtccggcagccatggcgacggttgcacaaggtgagtttttgcggcgtggatgatgcaatgtggctgcatcggcaggtcttcttggctagccagtgggctctcgtccaccatgccaggcctccctcttcaaaatttccctgatttttgccctctgcacatggaacttggtgatgtatatatcctgaacgcactctttcaattcttacatctatatatttcacattttcggaaaagcattcctctttgacctttatagataagattttcttttttgtttcttgttcgttcagtaaacttttggatataggccgttctttggcgctgaactcccctgattgaacacagcatgttgtaaatactactcacctggctatgcactcctgagttgcatgcagttgcagaaccaagaaatgttaccgctgttgaaatcattaaaaaaaatagagaaatgcctttgcatggctacgggtgtttcagcttctgcagggcagagatgatcatcaggtttgtccggtctgcagttggcatgcagttctcgccagatccaagaagcggccctgccatgccaacaa

SEQ ID NO: 6070 - DNA, 1117 bp, Zea mays; identical to SEQ ID NO: 6069
  Zm_smallRNAprecursor_1559

SEQ ID NO: 6071 - DNA, 1068 bp, Zea mays
  Zm_smallRNAprecursor_1560
cgccgccgcctcgcgtccctctcctagccgcggatctcccatgccacatggtcgtggtcatggtcaaggtcgtggccgagggatgggtgctcgcttggttcatgggattgcggcgtttttctctatgtgccgaaacatttctgctgatgtacatgagctggcacggcgtcagcgggagactgacgacaatcttcgtcgtcaagcttccactatgggtatgccctttgcctctcgctcgcctgacgtgcctctccatcctcctcccccgaagatcaatgagtggcaccgtcaggcctacagggtgccatttatgtcagcagacgacgacgaagaagaagaagcctatgttgatgatcgcgagcagtttgccccgcctccctaccatggggatccggatcaatcatcctctcaccctctgcctccctacccaggtccgggacccattcctggtgacccgcggccattcggctctggttaccatcaccaccctccacctcctcctcatcatcgtacatcttcggcatctattttttctgcggctgatgagccacctagggaatcctcattcgaggaagacatgatgaggaccctcttccctgactacacatcataccctccatcatatcccccgtcctatcctcctcctggaggatattgattcatgtatccatgtctctctcttcgtttttggtacttgttgacaaaaagggggagaaaatccaaaatttctagtcattctgtttgtggttctttcggttatgtatttcttttggattatttttgttttggccactattgtggcttgtatcctcttatcattgtatgaaataaaactgctgagttattattcaaagtgatatgatggtcttctggccatcatcttttgtcccatcagtttgtaatgattgctttgctatgaagtaaaaatgatgtgtatttagagatagtcatatgcatcacaactcctgttatgacactcttgcacccctcggatggttgtattcagtatggtttttgtcactatctctaaatgtgttgctcacatgacatattatgtcaaaacattgg

SEQ ID NO: 6072 - DNA, 1069 bp, Zea mays
  Zm_smallRNAprecursor_1561
cgccgccgcctcgcgtccctctcctagccgcggatctcccatgccacatggtcgtggtcatggtcaaggtcgtggccgagggatgggtgctcgcttggttcatgggattgcggcgtttttctctatgtgccgaaacatttctgctgatgtacatgagctggcacggcgtcagcgggagactgacgacaatcttcgtcgtcaagcttccactatgggtatgccctttgcctctcgctcgcctgacgtgcctctccatcctcctcccccgaagatcaatgagtggcaccgtcaggcctacagggtgccatttatgtcagcagacgacgacgaagaagaagaagcctatgttgatgatcgcgagcagtttgccccgcctccctaccatggggatccggatcaatcatcctctcaccctctgcctccctacccaggtccgggacccattcctggtgacccgcggccattcggctctggttaccatcaccaccctccacctcctcctcatcatcgtacatcttcggcatctattttttctgcggctgatgagccacctagggaatcctcattcgaggaagacatgatgaggaccctcttccctgactacacatcataccctccatcatatcccccgtcctatcctcctcctggaggatattgattcatgtatccatgtctctctcttcgtttttggtacttgttgacaaaaagggggagaaaatccaaaatttctagtcattctgtttgtggttctttcggttatgtatttcttttggattatttttgttttggccactattgtggcttgtatcctcttatcattgtatgaaataaaactgctgagttattattcaaagtgatatgatggtcttctggccatcatcttttgtcccatcagtttgtaatgattgctttgctatgaagtaaaaatgatgtgtatttagagatagtcatatgcatcacaactcctgttatgacactcttgcacccctcggatggttgtattcagtatggtttttgtcactatctctaaatgtgttgctcacatgacatattatgtcaaaacattgga

SEQ ID NO: 6073 - DNA, 1171 bp, Zea mays
  Zm_smallRNAprecursor_1562
ggtcgtggccgagggatgggtgctcgcttggttcatgggattgcggcgtttttctctatgtgccgaaacatttctgctgatgtacatgagctggcacggcgtcagcgggagactgacgacaatcttcgtcgtcaagcttccactatgggtatgccctttgcctctcgctcgcctgacgtgcctctccatcctcctcccccgaagatcaatgagtggcaccgtcaggcctacagggtgccatttatgtcagcagacgacgacgaagaagaagaagcctatgttgatgatcgcgagcagtttgccccgcctccctaccatggggatccggatcaatcatcctctcaccctctgcctccctacccaggtccgggacccattcctggtgacccgcggccattcggctctggttaccatcaccaccctccacctcctcctcatcatcgtacatcttcggcatctattttttctgcggctgatgagccacctagggaatcctcattcgaggaagacatgatgaggaccctcttccctgactacacatcataccctccatcatatcccccgtcctatcctcctcctggaggatattgattcatgtatccatgtctctctcttcgtttttggtacttgttgacaaaaagggggagaaaatccaaaatttctagtcattctgtttgtggttctttcggttatgtatttcttttggattatttttgttttggccactattgtggcttgtatcctcttatcattgtatgaaataaaactgctgagttattattcaaagtgatatgatggtcttctggccatcatcttttgtcccatcagtttgtaatgattgctttgctatgaagtaaaaatgatgtgtatttagagatagtcatatgcatcacaactcctgttatgacactcttgcacccctcggatggttgtattcagtatggtttttgtcactatctctaaatgtgttgctcacatgacatattatgtcaaaacattggattcacaatcgtgcacacatttagggggagccatctacatacaatcattcaaaagaaattttctattgcaaatgtttatctttttgaccttaattgtgttggcatcaatcaccaaaaagggggagattgaaagggaaatatgcttacaccttttcctaattgattttggt

SEQ ID NO: 6074 - DNA, 1126 bp, Zea mays
  Zm_smallRNAprecursor_1563
ttccgttttcggatccgtacccataggtctaaacaagtcaaatttgcgaggatgaagtggtggaaactcaaaggggagacattcaaagtttttaaggaaagagttattgtggagggtgcttggtccgcagaagaagatgcaaacaacatgtgggtgaagatggcaacttgtattaggaaggtggcatcagaggtgtttggagtgaacaaagggagcagaggtgaacctaaagatacttggtggtggaccgaggacgttcaaaaggcaataaaggagaagaaagaatgttacaagagcttgtttcatgcaggagcgtagtcaacatagagaggtataaggtggcaaagaagattgcaaaacgagctgtgagtgaggcaaagggtcgagcctatgatgatctttactgaagactaagtacaaaataaggagagaaggatgtctataatatggctaagattcgggaaaggaagacgagaaacctcaaccaagttaaatgcattaaggatgagatggatcaactcgtggtgaaaggacaagacatcaaacagaggcggcgcaggtattttgacaatcttttcaatggtgagaatgagactatggacactcagttggatgactcctttgatgatttaaatagatgctttgtacgcaggatccaagagttagaggtcaaagaagccttaaagaggatgaaagtgtgcaagatgatgggcccggatggtatcccaatagaggtgtggaaatgtcttggggatattgctatagtttggctaaccaagttgttcaaccatattttttgatcaaataagatggccgatgagtggaggagtacattagtaccaatcttcaagaacaagggagatattcaaagttgttccaactctcgagggattaagctcatgacccacactatgaagctatgggaaagagttattgagcatcgcctgagaggaatgtcgcatatcaccatgaaccaatttggattcatgctcagaaggtcaatcatggaagcaattttcttaataagacaagtcatggagcaatataaggagcagaaggactcgcacatagtttctattgacttggaaaaggcctatgataaaatacttaggaatatcatgtggtg

SEQ ID NO: 6075 - DNA, 1039 bp, Zea mays
  Zm_smallRNAprecursor_1564
actaaaaagccagagcagctagctccacgcgagtgccagaacaaggcgccgtgcttttgcagcttttcaacaagggtcaagggggcagcaaggcatactctgtgtgatttgtgaagggcagcagcccgggtaggtgtaactgaaaaacagatgctgctgctgctctcctgagtcctgaactcccaacggtgcctgccttctctaggaggcctataaatttgggtcgagcagcagagcaacgccttcacagccaatgcagggtagcttctcacctccaaacagctagtctctgttcttacccattccaccctgttacgaaaagctagaaaagtgtcaggcactgaaagtgagagttggaggaaagcaaaccggctgggtatcggattcagcaacggagggtgctgccggtcggtttgttttcctccaatatctcaccttcagtcgatagtctgatgaagatgtacactaccaacatccattcatttgtgccatctgaagtgaggattagaggcaactgaaccatcatctattgcaaaggttcagtttcctctaatatctcatctcgaatgggcccatcgccggagatgtttgtttgcatatagctgaaaatgcagtcacccaaagtgagtgctgaaaggaatttctaacacctaggttgaattgagtgatactgaagtgtttggccatctgctagtactaaccactagtcaaacagatggcaatccacgttgtcatcgagttggctgaacagatttgctcggaaaggtatacattctccatttgggacatgtgtgggagccaggggatggagcagattggaggggattttagcctctcgaatcccctccatttcgctggctcctaaacaagccgcccttgaagtgctgatttgaggtaagtaaaccgaccggagaagcagggacaaagaagtatcgtttcatcagatgtgatgcaccaacttctaccgttattttgacaaagcactgcatgtaaatctgcagtggtttatccaatagcaaacttgttctctactttgtca

SEQ ID NO: 6076 - DNA, 1066 bp, Zea mays
  Zm_smallRNAprecursor_1565
ccatcaaaacatggatgatcataaacaggtaccttgggcattggaggcttgattcaataatattcatttaatcatcatctattgaattaagtgttgaagactaataaaattctatcccaatgccaagtcaataataagtgaagtccaaattctaccaaatacaagtgctttattcaagttggttaaattatgaatggattgcaaataagttaagttcaaacttgttattggatgatcatgaggtatataaagtataatatttgttgatcaaattcatttgaatgcatatgagttgattgaattggatatatatgcatatgttgcttgctataagatgattgaatggacaatttgctaaataatcaagtttggattgatttatgttgaataaattcaagagacttcatttagtaagtggtttgaatggatatttgtcttttgaaagtagttcatttcagatttgattcaacttgaagaagagtaactcaatttactgaaatctggccaacattgaaaatctgacaaggctgtgctcataaccatgtttgagtgatcaaatctatttagattggcttgaaattcagtttacttgctctatacatatgatagcgaagtctgtgcaaatttcataatcattggataagtgaaacttcttgattaagtcaatcttgtcagcacaaacacagcagttttcagcatgtacctactgtgggagatattatggctggcagcacatatgaagtcaaatgagtctcaactttttacagctgttagcagacttattaaagcatatctccaccaattttcgtggtcataggatctgtacatcaaaatttatgaatgtttctttagagtgtacagaatctgtcataagtgacaaatattggaaatattgaaagtcactttttgattggaaggctctcatataggataaatcacataagttgtttgagagaccatagtttggtttttaattgatctataatcatggaaagtgaaggggtacaaggatatttgttgagaaatattttggcacttatcttggtactccaagttgaagatcaag

SEQ ID NO: 6077 - DNA, 1171 bp, Zea mays
  Zm_smallRNAprecursor_1566
actgaaatctggccaacattgaaaatctgacaaggctgtgctcataaccatgtttgagtgatcaaatctatttagattggcttgaaattcagtttacttgctctatacatatgatagcgaagtctgtgcaaatttcataatcattggataagtgaaacttcttgattaagtcaatcttgtcagcacaaacacagcagttttcagcatgtacctactgtgggagatattatggctggcagcacatatgaagtcaaatgagtctcaactttttacagctgttagcagacttattaaagcatatctccaccaattttcgtggtcataggatctgtacatcaaaatttatgaatgtttctttagagtgtacagaatctgtcataagtgacaaatattggaaatattgaaagtcactttttgattggaaggctctcatataggataaatcacataagttgtttgagagaccatagtttggtttttaattgatctataatcatggaaagtgaaggggtacaaggatatttgttgagaaatattttggcacttatcttggtactccaagttgaagatcaagaccaaagatgatcaaaattgaggttatcatataacaaattgcataatcttctttcttacatatggtaatccaaatgcttaaattggttgtaagtatttcttggcacatttcaatttgattactctattattgccatgatctagacataaaagagaaaaccctcgtgttcgtgaatgaataaggtgctaagtaagaaattcaaattcttaaagcacttatcaaaaggggatttctctatatgactagagttgtgaaactaacttttttttacctaagtgatctatgtagtttcatagcatgagaatgagtttctcaaatggactatgcaattaaatgtataaagaagaacaatccaaaactatgtgatgtattctctcttgtacatttggatttatttcttctacattaaatactcaccatgatatgatttaaaattagcctttgaacttaatcaatttatcatgcatgtttaatttgttaaaattaagcattgaagattaagagaaatttagttcatataataagatttccttgttttagtaactgccaactttatatattcaaagtgctataaaagggaaattggtgcttgtatta

SEQ ID NO: 6078 - DNA, 1040 bp, Zea mays
  Zm_smallRNAprecursor_1567
tggtgattgatgccaaaacaattaaggtcaaaaagatatacatttgcaatagaaaatttcttttgaatgattgtatgtagatggctccccctaaacgtgtgcacgattgtgaatccaatgttttgacataatatgtcatgtgagcaacacatttagagatagtgacaaaaaaccatactaaatacaaccatccgaggggtgcaagagtgtcataacaggagttgtgatgcacatgactatctctaaatacacatcatttttacttcatagcaaagtaatcattacaaactgataggacaagagatgatggccagaagaccatcatatcactttgaataataacccagcagttttatttcatacaatgataagaggatacaagccacaacaatggccaaaacaaaaataatccaaaagaaaaccgaaagaaccacaaactagaggttggattttctccccctttttggcaacaagtaccaaaaacgaagagagagacatggatacatgaatcaatatcctccaggaggaggataggacggaggatatgatggagggtatgaagtgtagtcagggaagagggtcctcatcacgtcctcctcgaatgtggagtccctaggtggctcatcagccgcagaaaaaacagatgtcgaagatgtacgatgatcatgaggaggtggagggtggtgatggtaaccagagccggatggcctagggtcaccaggaatgggtcccggacccgggtagggaggcggagggtgagaggatgattgacccgaatccccatggtagggaggcggggcaaactgctcgcgatcatcaacgtaggcttcttcttcttcttcgtctgctgacataaatggcaccccgtaggcctgctggtgccactcattgatctccgggggaggaggatggagaggcacatcaggcgagcgaggggcaaatggcatacccatggtggaagcttgacgacgaagattgtcgtcagtctcccgctgacgccgtgccacctcatgtacattagcagaaatgttgcggcacat

SEQ ID NO: 6079 - DNA, 1135 bp, Zea mays
  Zm_smallRNAprecursor_1568
agacattctcgtgccgttagttttaaaaaaaagatagaacttttttcctttacctttaacttcgcatcgggtaagcttaattaagcatgcatggcgacctgattttgatgctagcacgtagttgagggttgacattatcttggatatgttctctacaaaaggcgacaacgatgaaagattctgtatgcatggatatagacgatgcatgcatggttcgttcgatgcattcgttcgacgggttctattttgcaacctgtggtactagcagcttcctagctagctataaatagcactggatgagagcactgctgccaggcaaccaaacaaagaaaagcttctactagctacatatatatatatataccagccgatgaaccatgcatgcagtcacatgcggcatagaattagcagctagcgacggtgaggaggatcgaaaggaagaagacgtacgagatgaaaagagagcgaggcttacatggcgatgagagtggtagctctggtagccaaggatgacttgcctgtgtgctggccacgctcccctcatgcaaggaccatctcgtgtcgaccgacgagcgagcgagcgatcgatcgatgagaggatgacgaagcttggggtgtacgttggtctctcacgggcagtctccttggctagccctgactcactcttaccgcccatgctagcctctgcatctctcgtgttgctgtacagattactggtcagtgacctagctagtatgcaagacaatgcgcttcgtcagcatgtcacgagcgatgcacgacatgcatgcatggacgacgcatgtatatggttcagtatatatgttctatttcttctacgtgcatctatcttgttttcaaatttcaagtgatgcgactatattaactcaattgattggctattaatatttgaacgcagaatatatttgatgagggcgtggctattttttcttccccatgacggtgaatccaagccgaacgaggacacgagagaaggtcggcgagcgagaagaactgtcctggattgagagaagaactttcctgaagacagtatatatatccagttattatgtactgtacaattcaggttccagctaccagcttctttaatttattagcaagagcacagccagctcca

SEQ ID NO: 6080 - DNA, 1073 bp, Zea mays
  Zm_smallRNAprecursor_1569
cagaggtgcctaaaagctttgcaccctccaatgtctttatatttgtatatgtagggttcaaccctttacatgatggcatataatggaatatataactaggactccgaagttaatatagattgttataaaattaatctatgactcaacgtactagaaaacatgttgtaaaacaaaaaatggcctagacacatattttaacactcactatatatattgttgtcactatcgttgacatctacttgttcctccagcaaggccatcaaagtttcccatatactaagaaagctagaatatatgctgctatccaattagagaataagatgtcctggaacaacagcaaaaacaagaaaaaaaaaggatacacggtcctctcgacgaggcacgtatgtataaatagatgttcgatggaaggagcacaacaagccagtcacagaaggtaccaagctagtaggtgacaagcagaggagaagccttacatgtcaataagggcctacctctgatagccaaggatgacttgcctatgtcctttgtttacaaaggacctgaatgtgtggaccattgagaggttcataggcagtctccttggctagcctgagtggcccctattgctcatgctaggcttaatcgagactctttgacttggtgcacgcaattagacacaggagtctcctcgacttgtgcatgggcgtgcatgcaattagacacgaccttgtcatatgtagctgtgtttcagtgtccatgcatgctccattcctagcattttcttgaaaggccaatatagcttggcagtttctctggaaagaatcagcatcaaacaatgttcttgaccagatgttttgatattgcttacgccgcacaatataatacggatcgatagtatgaccagcattctgaaagagcatccagcagggttcgagcctgagtgggtgcgtggccacagcctccttgacagtaaacctctctggactctcagctttgctatttcagtcacatgaactttcttatctttcagcttcagcagattgatctctaaacctggaaacttctgcaagaacatatacctcatgattggt

SEQ ID NO: 6081 - DNA, 1111 bp, Zea mays
  Zm_smallRNAprecursor_1570
cgagggtgcgcccgttgcttgaggaggccctcgggcgaggcgtgaattcgcctgggactactgttcccgcccgaggctgggctcgggcgaggcgagatcgcgtcccttgagtagacgaagccttgacccgaattgcgcccatcagtctctgcagcttgtgctgatggtggttaccagccgtgtttaggagtgttgggggtacccctaattacggtacctgacaagtgttaaattggtctagattaattagtaattgatcatattgtagtatatatatgcatattgttttttgactcacaagctaaacgagctaactaaagctcgcaatcgagccgagtcgagctaactttatcttaacgtgatagctcgacactagtacaaagaagctttatagaggcggttctaaatatatctttactgacgtgtttagaaccgccagtgctacagcccaatagaaataaaaatttatatagccagttgtttatgtttcctaaaaaagattagtactaacgattttcttacctcaatcgtcagtggaaattgattttcactagaagttgtgttaattaagaaccgctagtagaaatcgatttccactcgcgattgaggtaagaaaatcgttagtactaatctttttccggaaacgtaaacaaggttttaaaaatagaaaaataacattttaattaggggaggcctcacccgcctaattcgcggcatttttcgcgcaaaactctttgcacgctatgcatgccggtcaaaatcgaacccccaaccttaccctcatgtatagcttgctctacaactcaagcaatcgcttacttcatgtctacatactatttttgttgcccacatattatagcacaatgagtgtaaattgattgcatgaggccgtaaacaaattcaaacaaaaaagttgtcaactacaaagttgaataacttttaaagttctacaacttttattttgctactttttgagtccaaggtcatttgcaaaatttgcattgtaaatttgtcgaattaagatgcaaattttgagagctgaaataatttcaaataaaaagttatcaactacaaagtttcgtaacttttaaaggtctacaacttttttggg

SEQ ID NO: 6082 - DNA, 1141 bp, Zea mays
  Zm_smallRNAprecursor_1571
ggaaggtacataaagtacgtctctcaacaacagtacaaaaccattaactaatttaatatgtatatctccaatggcctcgactgctgcttcaactccatttgccactctaattgttctttggccctttgggagcctttggcttgtacggagtccctgtagagagtttgcaacatgaacagttgcacctgagtcaatccaccaagaataactgggatattctaagtataaagactcatttacaaaagtaacttggtccttaccactctctagtagatactgcaggaattcagggcactttctcttgtaatgacctgtcttcttgcaatagaggcaggtatcagggggaactgagaaactgcctccttgtcttggctgattattattgctcgaggaagcctggttattctgtttaccttgcttcttgaactttttctttgagttcttgttctgtctggggatattgcctttgatgaggttgacagagtctccagtctgctttaacctctcttcctcctggacacactgtgccaagagttggtctatattccacttatcagtgacactagtgttgtattgtatgtgaaaagtctcaaactccttgggcagagacttcattatcataaatactacaaattcctcgtgtaaaggagacccgaggtacttgtttatcttagctacgatggatatcattttctgaatgaatggtctgacaccatttccatcgtattttgcattgacaaattctgtcattagagagcaagcataagccttagaagacccttggtgatgagaggctaccctctcaaggtattctttggcagtctcgcactctggtatggaactcttaagaggctccttgatgctcctcttaagaataatcatacatttgtcatttgatctctcccacttgaccttgtcgatgctgtattgcatccacctgtggtcatagttgggagtgcccactgtgggctcaactggtttatcaaacctcagtgcgtaatctatctcacccactgtggttatcatgtctatatcctcccgccaagaatggtaattactaccatctagcggtttcatctgagcaatctggctaatcagcatggcggtatgagcacctttgcaaaattaaaacagaaaatat

SEQ ID NO: 6083 - DNA, 1160 bp, Zea mays
  Zm_smallRNAprecursor_1572
acttggtccttaccactctctagtagatactgcaggaattcagggcactttctcttgtaatgacctgtcttcttgcaatagaggcaggtatcagggggaactgagaaactgcctccttgtcttggctgattattattgctcgaggaagcctggttattctgtttaccttgcttcttgaactttttctttgagttcttgttctgtctggggatattgcctttgatgaggttgacagagtctccagtctgctttaacctctcttcctcctggacacactgtgccaagagttggtctatattccacttatcagtgacactagtgttgtattgtatgtgaaaagtctcaaactccttgggcagagacttcattatcataaatactacaaattcctcgtgtaaaggagacccgaggtacttgtttatcttagctacgatggatatcattttctgaatgaatggtctgacaccatttccatcgtattttgcattgacaaattctgtcattagagagcaagcataagccttagaagacccttggtgatgagaggctaccctctcaaggtattctttggcagtctcgcactctggtatggaactcttaagaggctccttgatgctcctcttaagaataatcatacatttgtcatttgatctctcccacttgaccttgtcgatgctgtattgcatccacctgtggtcatagttgggagtgcccactgtgggctcaactggtttatcaaacctcagtgcgtaatctatctcacccactgtggttatcatgtctatatcctcccgccaagaatggtaattactaccatctagcggtttcatctgagcaatctggctaatcagcatggcggtatgagcacctttgcaaaattaaaacagaaaatatttaggacatctgaaataaatactgaatactgaatcatagaacatgcatgaattaaatattcaacgttggtcaaataataaccatgccatatctatgaaaatttctgatcacaaatttctaaatcatcgttggatgatctagaaaaacataaacttgtattaaattgtggtaacaatatccaacgttggttaaaatattcaatcaccacaaaattttctgaattctatgcaatttaagcaataatcaatccacgttggtttcataat

SEQ ID NO: 6084 - DNA, 1048 bp, Zea mays
  Zm_smallRNAprecursor_1573
agcaactagcacaacaagcaccaacagctatgtattcagcctcgacagtggaaagtgcaacacagttttgcttcttagagctccaagacaccagggatcgcccaaggaattggcaagtccccgaggtgctttttcgatctactttacaaccggcatagtctgaatcagagtagccaaataaatcgaaaaaggagcccttgggataccagagacctagattttgggtgtgaactagatatctcaaaattctcttaacggccactaagtgacactcttttgggtttgcttgaaaatgagcacacatacacacactaagcatgatatctggcctagatgcacataaatatagtagagatcctatcattgatctataaagcttttgatctacagttttatcttcttcatttaagtcgagatgaccacttgaagccattggtgtcttggcgtgctttgccttttccatgccaaactttttgagcatgtcttgtgtgtacttggtttggcacagaaaggttccttccttgagttgtttaacttgaaaacccaggaagtacttgagctcacccatcatggacatctcaaaccaagctctaggggcttgtttaagcccgtagagtgccttgtgaagtaggtaaacatggtttggcttctttggaacttcaaagcccggtggttgctccacatagaccctctcttgtagtggtccatttagaaatgcgctcttgacatccatttgatataacttgaaatcatggttagtagcataggcaattaatattctaattgactctaaccttgctaccggcgcatatgtttcccgaaaatcaagtccttccacttgagtgtagccttgggcaaccaaccgtgctttgtttcttgtaactacgccatgttcatcttgtttgttcctaaagacccattttgtcccaatcacattttgtttgggtctttggactaaggaccaaacttcattccgggtgaagttgttcaactcctcttgcatgacaattatccaatccggatcacccaatgcttcttcaaccttaag

SEQ ID NO: 6085 - DNA, 1054 bp, Zea mays
  Zm_smallRNAprecursor_1574
ttggttgtgtagtcatcaatcaccaaaaagggggagattgtaaggaaaatggaccccgggccatttgactaattgagttttggtgtttgatgatcaacacaatccgtgaactaataagttttctagtgtttatgtttgtagttcacaggatgcaaaatttacttggactaaggaattgggaaaagcaacacctcaaaagaagacattgaaaagatctaagaaaagtccaagtgtgctgccttcggactatctgtgtgtggagcaccggactgtccggtgcaccagggaacagcagcccaacggctagttccaggtggcacccggagagaacaccactggactgtccggtgtggagaccagactgtttggtgtgaaaagcctgcggcgccaacggtcaccagctctgacagggcaacgactaggcgcaccggacaggctatagtgcgctgtccggtgcaccaccggacttatagatggccaaacgggccgcccggcccggcacggcactaagcactattaggcacggcactattaggcacggcactattaggcactattagtaatcgtgtcgtgccgtgccggcactagtgcctaaccagcggcccaggcactacactatagtgcctaatcgtgccgtgccggcactatacggcactaatatctaatagtgcccgtgccagcccaggcactatttcattttaaaagataaaaaaatatagaagatctttaagattatatatataattttaaaactcgaatatttatatcattataaagtgaattcattatgtgtaaatcataacaaataacaatgtacaaccacatacacatatcacaatcacatttataaaccacatgttggtctaagtcgtgcctaaccgtgccggccagttaatcgtgtcgtgcccgtgccaacccatcgtgccggggtggcggcccaagcacggcactagactcgtgtcgtgccggcactggcactatatgaatcgtgcccgtgtcgtgccgaagcactatgggccgtgccgtgcttagtgccggcccatttagcacggcc

SEQ ID NO: 6086 - DNA, 1100 bp, Zea mays
  Zm_smallRNAprecursor_1575
gtcggaggacgtcggcgcctccgagggtggaaaaaggagaggcttggaggggagcggagggggtagtatcgagagagagagagagagagagagagagaaggagggagtccggtgagagcagagaaggcgagaactgaagtagtagtaggctagtagcagaggaggggcgagaaagggaggcgaatagaatcttcgtctcctacaacatcttcccgacgtcgcattttaccacgacaccatcttgtttttacccacgcgatccatggaaggaggcgaacagatttttttttccttgttttttttctgttattataaataaattgtgtactcatccggcgcgaattagtatttgcattagctcttaggctagccgcagtgaatgactagaaccggaacgctatgcggatagagttaacgtgagtgctgcagccgtgtactgggaccggtacgctaaggcaagcaagcaaaccggaaaccttaaatgtagagttgcagcaacgtctactgcatacgtctgctccgtgcaccaggagagaggcggggccggaggcagcaaaggttgtgggacccgaggcggggcaccaggagagagaaataatagaatatatggtatagagtaaacatgagtgcggaggattgtgatatagagtaaagaattttgctgaccaggacagaatattctttttagggtagaaatttagagtagtatgagtgcggatagccttagagcctatagttaggaactctttggaagggtttcactttaaaaagtttaggtatactttagttttttctatctaaataggtctaaagttctagcttttaaaaaataaactagagaccatcttcaaaaaaattacgaagctcctcaaaggaagtttcaaaaacactatattcagaggcgaatttagagggttgtcggatcagccgaccccgaatctttactactaattaagtatgtactgtaggcgtccactggtgcacattctgccggctcccgcctcgcccgcggatccccaccctcctccccaacgcccgtgaatccctcaccctcctccccaccgccgccgctcgaccacggtttcgtcgcactccttcct

SEQ ID NO: 6087 - DNA, 1071 bp, Zea mays
  Zm_smallRNAprecursor_1576
gaaggttccccaagacccatcgcagaacactgtccatacttcggcatctttatttgtttcttcatcctgagcccctggcgtccaatcggcgataaaatctgccaacgcttgggactggatcgaagatctatgcacataatcaatgcaaaattcattgagctctgcagcccattttccaatccgcccagtagcttctctatttctcataatatccttcaacggctgcgaagaaggaacaataacattgtatgcttgaaagtaatgtcgaagcttcctggatgccatcaaaacagcatataacaccttctctaattctgtatagttcttctttgatatactaagaacttcagatacaaaatacactgggacctgcttcttgacttggccgtcaagcttctcctggacaagtgctgcacttaccgctgagtgcgaagctgccacatataataacaacggagcccctggcgttggtggagttaatgttgtcaaatctatcaaatattgcttcaggtcctcgaaggctttttgttggcttggtccccattgaaagacttcgacagatttcagtacttcgaagaatggtagatttctttctgctgatctggatataaatctattaagagatgccagcctccctgtcaatctttgggccccctttttggtagttggtggctccattcgaagtatagcttcaattttacttggattagcttcaattccctttgttgaaaccaagcatccaagaaatttccccttcttgactccgaagacacatttttctggattcaactttaggccagcttgcctaaaactggcgaaggtctcttgcaaatcagcaatgtgattttcctgcttcgtgctttttacaatgatatcatcaacataagttagcacatttctgcctatctgagattggagaaccttcgcagtcattctgctgaaacttcctccagcgttcttgagcccctcaggcatccgaagataacaatatgttccactaggggttatgaaactggtctttggctcatcctccttcttcatccaaatttgatgatagcctgaataacaatc

SEQ ID NO: 6088 - DNA, 1132 bp, Zea mays
  Zm_smallRNAprecursor_1577
ggttcacactctccaaactacccgcatcaacaccagctatgcccctcagccccggcagatcccggtctacgcagtggtagtcgaggaagtttcggtggatctccctcccatccgagtggagaatgtagtcatcctggaggacagctcggaggaacagctgccgacccccaccctgttagtagagtccctggccttcgcagctaggtcatcgacgtcagcaccgtatgtaccagccttccaagcacctgcacccagaggcgacgaccccgacaactccgaagacgacgatgacgaggatgacgacgacgaagaaggtggagacgaacacatcaacgaggaagctgactacgcctagcaggacaacttcatggggtttggttctgttgtcgaacattatacatcaatgttcgagacggcgcacttccccaacctgctgcaagaagtgctgcacgcgctaggcacctacgtccgccccctgtacgaaacaaggcgagtgagcgagcctccccgggcttgctactacatcacccgcatccacgtcagggtgatggatgcaggggacaggggattcaggactctgtctactcacgagtccctgacaccactgtccacctacgctgcctcggtcagcgatgctgcccgtcggaccctgtggtcgctcagccacacctaccggcagcagctgcagaacacaaggttcaggcaccttcctcagcgtctgcgtggaggaagtcagaccagcatcgttccaggagaagccggtgaggatcgcctcaacaccctagctggtgtagtggccggtctcaacaccgacctggacagtgccaccctggatctctacagcgtgcacctggagctggagaatgcccatgccaggattgcagccctggaagccctactgcaaggactggatccgcccgaagttcaggatccccgccatggcattgtcttctccccacaagaggctgcgctatggagagcccggatccgtcactaggctgctttaggagttttgggtcatgatgtaataagttatacttcgcgttagacgatgatactctctttaagttatcatattaataaataacaaccatgtgatggtgattggttgaaatgtttgatttggatcttt

SEQ ID NO: 6089 - DNA, 1038 bp, Zea mays
  Zm_smallRNAprecursor_1578
atggtatcccaaaggctcccttttcgatttacttggctattctgactcagattatgccggttgcaaagtagatctaaaaagcactactgggacttgccaattccttgggcgatccttagtatcatggagttccaagaaacaaaattgtgttgcactttccactgcagaagctgagtacatagcagctggggcatgttgtgcacagttgttatggatgaagcaaacccttagagattttggttgtgagtttaacaaaattccacttttgtgtgacaatgagagtgccataaaacttgcaaacaaccctgtgcaacactctagaactaaacatattgacatcagacaccatttcttgagagaccacgaagccaagggagacatcgaattgtttcatgtgagcaccgaaaatcaactagccgatatcttcacaaaacccctcgatgagactaggttttgctttcttaggagtgaattaaatatcttggattctcgtaacttaacttgaaaacggtcacaaaaattgtttgattcactatttttgattgatagttttaaagctttgtgatgatctttcaaaaacttggtgaaaatgttaaaattcgaatgaatttcagttctaagatttttgttttggggctcaactggcttgaccagctgaactttcaagttcagctggaggaggccagctgaacttcggagctgaacttcagctcagctgtttttaaccagtttttaccaggaccatcctggttaaaaccggttgaaccggcatagtggaccggttgaaccggtctctgaccggcctgtccgcgcaggtctgtcagctgcaccttttttctgtccagtcgcttccagcagctgcgcgcacagttttttttagccccacactactgctgtgtgcgcagccttttgctcttgtgacccgccatattttttttgtccggtcgcttctccaccgccttgtcagcgcgccagagttttttatttgagggctgtccggtcgcatcctgttgcgcgcacagaatcttttttttgtgg

SEQ ID NO: 6090 - DNA, 1058 bp, Zea mays
  Zm_smallRNAprecursor_1579
acacccttcagcgcctgaggttcaccaaccctactctcactcctcgtcatcctggtgtccaggaccctcggttctggaatcttttccaggctgacttctacaattctgtcattctttccaagaaacaccgagtcatctgacatagatttattgactgggagggttgtgagaatatgggagatgctgacatgtcgtcagctctcgtaaacttagagagaaaggggttacgaaacattatgaccatggaatacccctggaacgatgaggtggtagctcagttctatgccatcctctggataaagaaagtagatgaggaagccgatgggtatgattacctagtcatgtatttcttcatccagggtaactggcacaaagtcagttatcgtcgttttgcccatattctgggcttctctgatgcagatattcagggcagcaacatgcgtgtgcatgacattcggctgcccatgcgggaagagacggaattcattcatgtctctactgagcgggagttctggacaaccgctaacatgcataggtactacaggtaccttaattctttgtcccggatgaccgttctcccgaagagcggaaatcaaatgaacgtccttggggagagtcgagtcttcctcctcctccttgctccaaacagtctcgcccgcatcaatgtgtttgacatgatctgggaagagatcgtccgtgcttcctggtctcctctcagagggtgtcttcatgcaccctttatcatgaagatgatcgaagtggtcacccagacccacttcgaaaaacccgtcaaacactcccgctacgtgccctactgggttgattcctccaacccagctgctcgtacgaagcgggctccctcacggtctggaggccctgcctcctccactgagccacctcgccagcctccccatcatccatcctcctctccccccgctgctgcctcgcgtccctctcctggccgcggatctcccatgccacgtgctcgtggtcgtggtcgaggtcgtggccgcgggatgggtgctcgcttggtccatgggtttgcggcatttttctcc

SEQ ID NO: 6091 - DNA, 1141 bp, Zea mays
  Zm_smallRNAprecursor_1580
acacccttcagcgcctgaggttcaccaaccctactctcactcctcgtcatcctggtgtccaggaccctcggttctggaatcttttccaggctgacttctacaattctgtcattctttccaagaaacaccgagtcatctgacatagatttattgactgggagggttgtgagaatatgggagatgctgacatgtcgtcagctctcgtaaacttagagagaaaggggttacgaaacattatgaccatggaatacccctggaacgatgaggtggtagctcagttctatgccatcctctggataaagaaagtagatgaggaagccgatgggtatgattacctagtcatgtatttcttcatccagggtaactggcacaaagtcagttatcgtcgttttgcccatattctgggcttctctgatgcagatattcagggcagcaacatgcgtgtgcatgacattcggctgcccatgcgggaagagacggaattcattcatgtctctactgagcgggagttctggacaaccgctaacatgcataggtactacaggtaccttaattctttgtcccggatgaccgttctcccgaagagcggaaatcaaatgaacgtccttggggagagtcgagtcttcctcctcctccttgctccaaacagtctcgcccgcatcaatgtgtttgacatgatctgggaagagatcgtccgtgcttcctggtctcctctcagagggtgtcttcatgcaccctttatcatgaagatgatcgaagtggtcacccagacccacttcgaaaaacccgtcaaacactcccgctacgtgccctactgggttgattcctccaacccagctgctcgtacgaagcgggctccctcacggtctggaggccctgcctcctccactgagccacctcgccagcctccccatcatccatcctcctctccccccgctgctgcctcgcgtccctctcctggccgcggatctcccatgccacgtgctcgtggtcgtggtcgaggtcgtggccgcgggatgggtgctcgcttggtccatgggtttgcggcatttttctccatgtgccgcaacatttctgctgatgtccatgaggtggcatggcgtcagcgggagactgacgacaatctacgtcgtcaagcttc

SEQ ID NO: 6092 - DNA, 1057 bp, Zea mays
  Zm_smallRNAprecursor_1581
cacccttcagcgcctgaggttcaccaaccctactctcactcctcgtcatcctggtgtccaggaccctcggttctggaatcttttccaggctgacttctacaattctgtcattctttccaagaaacaccgagtcatctgacatagatttattgactgggagggttgtgagaatatgggagatgctgacatgtcgtcagctctcgtaaacttagagagaaaggggttacgaaacattatgaccatggaatacccctggaacgatgaggtggtagctcagttctatgccatcctctggataaagaaagtagatgaggaagccgatgggtatgattacctagtcatgtatttcttcatccagggtaactggcacaaagtcagttatcgtcgttttgcccatattctgggcttctctgatgcagatattcagggcagcaacatgcgtgtgcatgacattcggctgcccatgcgggaagagacggaattcattcatgtctctactgagcgggagttctggacaaccgctaacatgcataggtactacaggtaccttaattctttgtcccggatgaccgttctcccgaagagcggaaatcaaatgaacgtccttggggagagtcgagtcttcctcctcctccttgctccaaacagtctcgcccgcatcaatgtgtttgacatgatctgggaagagatcgtccgtgcttcctggtctcctctcagagggtgtcttcatgcaccctttatcatgaagatgatcgaagtggtcacccagacccacttcgaaaaacccgtcaaacactcccgctacgtgccctactgggttgattcctccaacccagctgctcgtacgaagcgggctccctcacggtctggaggccctgcctcctccactgagccacctcgccagcctccccatcatccatcctcctctccccccgctgctgcctcgcgtccctctcctggccgcggatctcccatgccacgtgctcgtggtcgtggtcgaggtcgtggccgcgggatgggtgctcgcttggtccatgggtttgcggcatttttctcc

SEQ ID NO: 6093 - DNA, 1058 bp, Zea mays
  Zm_smallRNAprecursor_1582
cacccttcagcgcctgaggttcaccaaccctactctcactcctcgtcatcctggtgtccaggaccctcggttctggaatcttttccaggctgacttctacaattctgtcattctttccaagaaacaccgagtcatctgacatagatttattgactgggagggttgtgagaatatgggagatgctgacatgtcgtcagctctcgtaaacttagagagaaaggggttacgaaacattatgaccatggaatacccctggaacgatgaggtggtagctcagttctatgccatcctctggataaagaaagtagatgaggaagccgatgggtatgattacctagtcatgtatttcttcatccagggtaactggcacaaagtcagttatcgtcgttttgcccatattctgggcttctctgatgcagatattcagggcagcaacatgcgtgtgcatgacattcggctgcccatgcgggaagagacggaattcattcatgtctctactgagcgggagttctggacaaccgctaacatgcataggtactacaggtaccttaattctttgtcccggatgaccgttctcccgaagagcggaaatcaaatgaacgtccttggggagagtcgagtcttcctcctcctccttgctccaaacagtctcgcccgcatcaatgtgtttgacatgatctgggaagagatcgtccgtgcttcctggtctcctctcagagggtgtcttcatgcaccctttatcatgaagatgatcgaagtggtcacccagacccacttcgaaaaacccgtcaaacactcccgctacgtgccctactgggttgattcctccaacccagctgctcgtacgaagcgggctccctcacggtctggaggccctgcctcctccactgagccacctcgccagcctccccatcatccatcctcctctccccccgctgctgcctcgcgtccctctcctggccgcggatctcccatgccacgtgctcgtggtcgtggtcgaggtcgtggccgcgggatgggtgctcgcttggtccatgggtttgcggcatttttctcca

SEQ ID NO: 6094 - DNA, 1106 bp, Zea mays
  Zm_smallRNAprecursor_1583
ttaattttccttgtctttgagaactgctgtatacgttcaatccatggctcattaccgtctgccacccaatttctacctctgctgcatgttgatgttgctgcatggtgatgttgatacgtgctttggtttcatcaagaattgcttgcattcacttgtgcatattgaggaatgtttgcttcatctccacagaatattcgcgctgcatggcaggaggcaggcctccgggagagcttcggtgtgctgtgttgccacctcagatggcctatgaggtcgacgacacctccggtccggacacagtcggcatcagcctctctccggcggcgctcaccgtcactcccccaccatgcgaataccgtggactagcgggatttatttatgcaaaacaatcgtgttgtgattaatgatcgctatccatttacttatttcgtatgaatgatacgtatttttgatagactttttggatctaccaataaccctaaccactagatcaaatgcataaagccttgttcgtttctgtcggattggtgggtcggaacgattcctaaccggattgtttctctaatttatataaactttggttagctggaacaattccgggtgtaatccgatagaaacgaacaaggcctaaaacagatcgtacctttgtttagatctgattatgtcgcgttcttcactagggcagggcagcggcggtggtaggggaagcgagatcgatgtcgctggtggactttctgttagcctccccttgagatcggtctagggttgaggtgggaaattgagacagtagaacctcttactaggccatcaactcccacctctctatttatagactgcacaatagaagctcaccaatctcgtcttatgctagacactcccgattaggatgcgaggtcaagagtaagccattgggctaactgatggagatcaattctaatattctctcccttgatcttatcttgtactttcaattttataccttttaattcttttcgtattccatcatagattagtgcatagaacatacttcgtcgtcacggtcaatcgctgatagacttatcagctacaatacacgtctctgttatgaaatagatcgtttaactttaggc

SEQ ID NO: 6095 - DNA, 1075 bp, Zea mays
  Zm_smallRNAprecursor_1584
gctctaggccgtactcgacgttggcctcgaggagccccccatggacgaacaccgagtcgcccactataagcacggtagggaggttagccaggaaccggcgcgaaatgggcccgtcgggtcggagggcggcgaggcgggaccgtatcccatcctagaactccggcttgacgccggggaaggacttgggcacgccgagaaaggggttcctcggttgcgggtcgaggtgctcaccgcagcggcgcttgatggcgagcaccgcggtaccaccctgcccaggcgcgcgatggggcggcggggcgggtgcgaggtagcggcggcgggcatgtagcggcgggctggcagcgaggcaggtagcgacgggcgcgcacgtggtagacagggaaaagaagacagacgcgcggggtgagactgtgagagaggttttaggtttttagttaagttcgacggtgtccatgtggcccacgaatttaagttaagaacgtgggtacctacgttcctaatacgataagttcgacggttttacgacgggctcacgaatttaatataagaacgtgggtacccacgttcttaagttaacccacgaacataactcaattaagaacgtcggtacccacgttcttaaattaacccacgaacatttattagtttcttgtagtgaaacatttgggaaaaatataacatgtcaatacacaccatcattttacattaccaagatgtaatgatacagactcaagtgtacaacatgactacattacttattttacataggtatagttcctacactatactagtctagtcttcgtcgtccttggtttcttcatttcctgccgtgggagaccgatcgacagccaggttcatgaaaggaggaggcctaaaaaggtctagctccccatcagttccttcacttgttgttcctgatggtctggctcccattgcaacagggtcggcaggcacgtccgggtgcagtcgtgaatacaatacatgcacttcctcatgtagagtattgcagtatacctgcaagttgtcaagggccgcactaagctcggtcacacgagcacgagctttggcttcccga

SEQ ID NO: 6096 - DNA, 1088 bp, Zea mays
  Zm_smallRNAprecursor_1585
taaggttgattctgtaattatacatgcatcatgctaagaactatactaatcaaattttcccccttataaaatgccaccgcgcacaaggagaacaacacgcaaacatactggatcgattggtgtgccgtgtcaccagctggccccaagacatgataatagtagtagaggaagcaatgatcctataggggatctcgaagctgaagtgagtcggctccaagtggaactccgccgcaggacggctatatgggtcgtagatggcgaccgcataaatgagttgagaagagacgtccgccatctgcgatatcagctcacggaccgggatttggcactcgactgggttgttcaatcccgttcgcttgcatgggacaaggagcaaaaagctcaagttcgagtagtcgagctcaacttggccgttgaagacctgcagacatattgcaataccttacatgaagaagttcatgtattatattcgcaactgcatcccagtgagcctacgaatcctgttgagtcggaagccggaccctcgcatgttgcgggacacgcgcttggtggtgagttagacctttttcagccccctccttctatgaggctggtcgacgaatggtctcccacacccgatgacgaggccgccaaaagcaacgggaagcaggaataatggtgtagtagttgaaatagaagtagtgtatttgtataataggtaatgtatcctgttgtaaaaatctgagtctgtaacattacttttggtaatgtataatggaaggtttttctttggcatatcatattgtttccaaatgttgttgccacagatgtcgtccaagacccgatcacaggatgcagctggaacttctagtgggagggagtctactccaaatccacatcatgttcctcccacactggtcgaggcgattaccgccttggtaaatgcaaccgtggataatacccgttttctgagagagatggcgggtcaacagtttcaacagcaaggcgggcggggttatcaacagggtccccgtgaaacctcttacttggacttctcagagacgcgaccaccgctatttgtcaaagccgaagacccgttagaggcagac

SEQ ID NO: 6097 - DNA, 1037 bp, Zea mays
  Zm_smallRNAprecursor_1586
gaagagctcacggggaactaccaccaagccatctaggaggcggcaacctccaagagtaacaagccaacgacctcacttgatgatctccctagtgcctcaaagatcaacaacttgatgcaatgcactagatggctctcaatctcactagaatgcaatcccaaccaatatgagtgagagagagggatcggaaaggctccaatatgctcacaagtgttccaaatggcctcctgcacactttcaactcgagcaacacaagtatatatagccccctctccaaaactagccgttatgggccaattgccccttttctgcgcacatgcggacggtctgcaatacaagcccgaaccgtccgcacaagaatcccaacggctataaacggttacaataatgtcagagcattcaaaaatgacttgcggacggtctgcccctcaaggtcggacagtccgcgatacataaaactgagccaaaacgatgttttgcagactctgcacatttgctgaaatttgtactgcggacggtccgcacctggaccccggacggtccgtaatacaaaatatttgtattgtggacggtccgcactcaggccccggacggtccacagttcaaaaaagaaaactaaaacagaactacttgagttctgtccaaacaccagtccttcaactacagaaggtccaccacctgggaccagacagtccgtagtacaaaaactttgcgaaacacagaaactccgcgattctgcccatcacctcaagttagacctgtggacggtccgccatgctggcccggacggtccgtggtacctcaattcagcccacattcaagaaatcgcttttgaataagtttttctttcacgaaccaaagcgttgttagccctcattcaaatgcaacaactatatgagcaatgaggcactaaagacatgtcaagtaagataattgacccctcttgatagtacggctatctagcctactaacccagtcaattatcaacctctaagcaccttttgaccggtaaaacaaaaacctattgttataccttt

SEQ ID NO: 6098 - DNA, 1048 bp, Zea mays
  Zm_smallRNAprecursor_1587
gcaactgagcacaacaagcaccagcagctatgtattcggcctcggcagtggaaagtgcaacacagttttgcttcttagagctccaagacaccagggaccgcccaaggaattggcaattccccgaggttgtttttcgatctactttacaaccggcatagtttgaatcagagtagccaaataaatcgaaaaaggagcccttaggataccagagacctagattttgggtgtgaactagatatctcaaaattctcttaatgaccactaagtgacactcttttgggttagcttgaaaacgggcacacatgcacacactaagcatgatgtctggcctagatgcacacaaatatagtagagatcctatcattgatctataaagcttttgatctacagatttaccttcttcatttaagtcgagatgaccacttgaagccattggtgtcttggcgtgctttgccttttccatgccaaactttttgagcatgtcttgtgtgtacttggtttggcacagaaaggttccttccttgagttgtttaacttgaaaacccaggaagtacttgagctcacccatcatggacatctcaaacctatttgtcataaccctactaaattcctcacaaaaagtttcatcagtactgccaaatataatgtcgtcgacatatatttgacaaacaaataattgattgtcaactttgcgagtgaataaagtagagtctacttttcctatttcaaaaccatttttaagtaagaaatccttaaggaaatcataccaagctctaggggcttgtttaagcctgtagagtgccttgtgaagtaggtaaacatgatttggcttctttggatcttcaaagcccggtggttgctccacatagaccctctcttgtagtggtccatttagaaatgcgctcttgacatccatttgatatagcttgaaatcatggttagtagcataggcaattaatattctaattgactctaaccttgctaccggcgcataggtttcaccaaaatcaagtccttccacttgagtgtagccttgggcaaccaaccg

SEQ ID NO: 6099 - DNA, 1140 bp, Zea mays
  Zm_smallRNAprecursor_1588
ctactttctatcttcactctctcatttcttccaaccgccgacgccctcatttctctctccctctctcacatcctacactcaaatccctccaaaaactatcaaaacttcgtggagattgttggagatttgatcccctcgggctcctccaccatctctccactcttctttggaattttcgtggtcggtttcacagattgaggtattatttcatcttccctatttttgactcgatccatacagttcttgattatcttaagtgtctcttcaaggagattgtgtagtttaggtgtatggcacacttaaactgttatcattgtctcgaacattgtttttgagttaagtaggttgatattgttcattgtagctaaaccgctcatatgaacggttgaagtgcatgaccaatattatacttgtctttcctcacatgtgttcgttaaactccttgaacataaaatatctctctcaccatatgtatttttggtttgatcttaaggatggttcgtcgtagaaatccatcggttattgaatccgattcaagtgaggatgccccagaaattcatgaagacactcctcctcggtccaaatccaagcgtgggcgcggatctggcaatgtcatgccaggtggtgaggcctctgggtctcatggacctcgcggacgaacggctaggaacccctccggtcggtctcgtcctgcgacgaatccacaggcctgggaggctactagtgatgacgaaggaggaaaggatgatgatgttaatctccctcctgctaatgcccccattatccaaggattagtgcttcacaaagcgtaggctcgtcgttccgccaacgaacatgttattgatttcagtgccagcggagggtctgcccttcttcaagatatgcgattccagaatcctaccttccgtgttcgtgatgtcagtattgatggtaatcgcttctggactctccttcatgtcgatttctataattcagttatccttccaaagaagcaccagcccatcctccatcagcgttttatcaactggaggatgcgaagctattggggaacctgagatgacacaggtattgagggcctgtgagcaaaagaggatgaagactatcatgacattccaatatgattggaatgatgaaatcatt

SEQ ID NO: 6100 - DNA, 1144 bp, Zea mays
  Zm_smallRNAprecursor_1589
gacgcctagatctcatcaaactcgtcttagtagtcctcctctggtggtacctgctcttgacctagtgtgattatagcaagggtgacctctcatgtggtcatcgcttagcaagtgtttgaaaaagtgtgtttgagctcacttatggtgggggatcaagtgtaaggcctaccaaggaaaagggttagagctgagcattgcttttaattaagttgatcaaaattttattaacacttactaagtataagtgtataccacccaattaaataatagatcatagataataatactaactccacaatgcaatgcatgataggttaagtttagttctatcatttaatcatgcgagagtcctgagccatggttgtataacgtgtgttgcaccagaaccgtcagatctgtgatccaaggcttggataaaacatgaactggtatgcactattgatcttcatatcttaatccaggcaacgactgctatgcaagcagtccttctatgcaagcgtgcaagcaaaccatctgatccattagatcgtgatccaaccgtaagccacatttaacacttaacccttccaccactagcttaataatctttataaaaaactcctaacaaatcatggttatatctgtggttggattgtaatctaatgatcaaatggtttgcttgcacacttacacagaagcactgcttgcatagcagttgttgcccttaatccaacggtgttggtttaaaataaacgagatccccaaggatcctcctgatggagatcaacggccagaaacgacagagcgaaatggtacgtggtactcttaatctcagtcgcgtatctcaagactaatggctagactagcggtcgggtgcggccagcggcggtcctcacattttagaggcccgggacaaaatttaaaatggaggcccttattatataaatattatcaataaatacatcttaaaatgtatatatatcaaataacaagtaaataaaaagatatatattatgatgttaccttaaaaaattcttttgacatgtttagatgcaaagtcattgatgatggtgtcaatatcaatctcatccaataatattttctcaatacataagatagccaaaccatttaatctttcctgagacattttagacctcaaataatt

SEQ ID NO: 6101 - DNA, 1136 bp, Zea mays
  Zm_smallRNAprecursor_1590
tgcactcgaatagtaaaatatgttccgtaaaaactaacaaacacaatatgttacgtacataataattttttccgttgcaattgttatctataaatatatctatactaatctattaaaaacctaatgtaggtatctgatgttaccacggtggcttcaccctcccacgcctagtgtccgcgcagcgtgcacaaaaaatagtgcagatcaagaactcgaacccatgtttctgttctagaaatttgaggctaaccaccagaccacatataccttattgtttagaaataaataataattatattttcagtctagatgccgctccacccgttctccgcctcatggcaacacacgggcatatatctagttaaccaattaagtactaggttagttatatgggtaatcatatatttccttttctctcttttatggacgacttttgtggtgttgtctatgggaacgtatcctatgctcatggagctcttgtgctcatatgatcactttaaatctggtgccttcatttctcatccaaatgtgaatagacattttctagtttcttctgtgtgccacccttgaccacccttgttgcgccgcgccgcctgtctcttctatgtgccactgctgccctcaccccctggatgagaaatgaaggcaccagatttaaagtgctcatatgagcacaagagctccatgatcacaggatacgttcccgttgtctatttatttgacatcgtctgatgatactatcttgctcctcggtctttgtaggtagggctaaaaaaactcgaggctcgtgagtcggctcgggctcgctcggtccaaagaggctcgcgagtctgaataagctcgagttgagtctacttttgtggctcgctcaagcaacgagctgagcctgaatgagtccaggctggctcacgagtagagatggcaacgggtacaaacccgccgggttttgctatcccaaacccatacccgtgaaaaatatttacacccattaaaaaacccgtacccatgacgggtttgaaattttgcccaaacccgtacccatcgggtttgcgggtacccacgggttacccgcgggtttttatctccaatatgcttattctttttataatcataagcatcgtaatgattaatgagat

SEQ ID NO: 6102 - DNA, 1040 bp, Zea mays
  Zm_smallRNAprecursor_1591
ggtcaaaaagataaacatttgcaatagaaaatttcttttgaatgattgtatgtagatggctccccctaaatgtgtgcacgattgtaaatctaatgttttgacataatatgtcatgtgagcaacacatttagagatagtgacaaaaaccatactgaatacaaccatccgaggggtgcaagagtgtcataacaggagttgcgatgcatatgactatctctaaatacacatcatttttacttcatagcaaagcaatcattacaaactgatgggacaaaagatgatggccagaagaccatcatatcactttgaataataacccagcagttttatttcatacaatgataagaggatacaagccacaacagtggccaaaacaaaaataatccaaaagaaatacataaccgaaagaaccacaaacagaatgactagaaattttggattttctccccctttttggcaacaagtaccaaaaacgaagagagagagagagagagaaaaggatacatgaatcaatatcctccaggaggaggataggacggaggatatgatggagggtatgatgtgtagtcagggaagaaggtcctcatcacgtcttcctcgagtgaggagtccctagggggctcatcacccgcagaaaaactagatgccgaagatgtacgatgatgaggaggaggtggagggtggtgatggtaaccagagccggatggccgcgggtcaccaggaatgggtcccggacccgggttgggaggagaaggatagtgaccagagccggatggcctagggtcaccgggagtgggtccctgacccgagtagggaggaggaggatgaggagggtccaaggtgaagaatgggtcatcatagtcctcgacctcatcctccggggtaatgaatggcacaccaaactcctgttggtgccactcattaaggtctgcggggatggtaggggctggaggtggaggggacccaggagggagaggatgtccagtcgcggctgcataacgacgaagatcctcatgcagccggtcggtcctgcgacggcg

SEQ ID NO: 6103 - DNA, 1072 bp, Zea mays
  Zm_smallRNAprecursor_1592
cagccacagccaaggatgatatcagcaactttccgggacctttatttgttaagttcgatattgctaaccgtacacataaagctgggccatgctaggccggcgggtttgctcgacttttttatcgcgttgctcacaaaagtccacgtcatttttactgttttttgtatccttcctcactccccaatctgactcctaaatgcaatgatttctctcatgatgacagcgctcgctgcccctctactctcctcctctctctctctcaccctcctttatagacgccaacagaccgtcgtcgtccccactagctctggcctctggcgtcccccccccccccccccccccccccctgaaacaagccgagtcttgcgaggggagaacaggagaaagaaaaggccggatcctgattcctgagaacaggaggaattgaagaagaaggccggatccggagtcgcatgcaacagatcacgaggaagaaaaggaggaagctttcttactttgaggggaatgttgtctggctcgaggtgcagaaacacgcagatctcatcgaggtcgtcttggttgttgttgatctcggaccaggcttcattcccctcaagtagagctcccggctccatcgatctctctcgttcttgcctctcgcgcgcatgcatggtgagttttcttgggcatcatcgatgcggcgactcgatctttctgtcctcctggctcgtttgactatggctcgggcctagattatgccccccgcgcgcagacagaatcatgcatgattaggatatgattatctcggcgagtgtttcctgtgttgtgtacttgggtttcgcgcggtcaacacatgcagcagattggtgcaatcataaggattcttgacccaacaacactgtcaacaaatgcatgctttcttcctttaaactatcgcatggcaatatggcatcgtctcccttgttgcggtctttcttttctccgccggcctgtccccacttctttttctgatctctagctgatctgacaggagaaagatgaggagaaaaggttgtgtatcatcgctatcccttttcgcatgcatgaaggatct

SEQ ID NO: 6104 - DNA, 1071 bp, Zea mays
  Zm_smallRNAprecursor_1593
agccacagccaaggatgatatcagcaactttccgggacctttatttgttaagttcgatattgctaaccgtacacataaagctgggccatgctaggccggcgggtttgctcgacttttttatcgcgttgctcacaaaagtccacgtcatttttactgttttttgtatccttcctcactccccaatctgactcctaaatgcaatgatttctctcatgatgacagcgctcgctgcccctctactctcctcctctctctctctcaccctcctttatagacgccaacagaccgtcgtcgtccccactagctctggcctctggcgtcccccccccccccccccccccccccctgaaacaagccgagtcttgcgaggggagaacaggagaaagaaaaggccggatcctgattcctgagaacaggaggaattgaagaagaaggccggatccggagtcgcatgcaacagatcacgaggaagaaaaggaggaagctttcttactttgaggggaatgttgtctggctcgaggtgcagaaacacgcagatctcatcgaggtcgtcttggttgttgttgatctcggaccaggcttcattcccctcaagtagagctcccggctccatcgatctctctcgttcttgcctctcgcgcgcatgcatggtgagttttcttgggcatcatcgatgcggcgactcgatctttctgtcctcctggctcgtttgactatggctcgggcctagattatgccccccgcgcgcagacagaatcatgcatgattaggatatgattatctcggcgagtgtttcctgtgttgtgtacttgggtttcgcgcggtcaacacatgcagcagattggtgcaatcataaggattcttgacccaacaacactgtcaacaaatgcatgctttcttcctttaaactatcgcatggcaatatggcatcgtctcccttgttgcggtctttcttttctccgccggcctgtccccacttctttttctgatctctagctgatctgacaggagaaagatgaggagaaaaggttgtgtatcatcgctatcccttttcgcatgcatgaaggatct

SEQ ID NO: 6105 - DNA, 1071 bp, Zea mays; identical to SEQ ID NO: 6104
  Zm_smallRNAprecursor_1594

SEQ ID NO: 6106 - DNA, 1071 bp, Zea mays; identical to SEQ ID NO: 6104
  Zm_smallRNAprecursor_1595

SEQ ID NO: 6107 - DNA, 1071 bp, Zea mays; identical to SEQ ID NO: 6104
  Zm_smallRNAprecursor_1596

SEQ ID NO: 6108 - DNA, 1068 bp, Zea mays
  Zm_smallRNAprecursor_1597
gccacagccaaggatgatatcagcaactttccgggacctttatttgttaagttcgatattgctaaccgtacacataaagctgggccatgctaggccggcgggtttgctcgacttttttatcgcgttgctcacaaaagtccacgtcatttttactgttttttgtatccttcctcactccccaatctgactcctaaatgcaatgatttctctcatgatgacagcgctcgctgcccctctactctcctcctctctctctctcaccctcctttatagacgccaacagaccgtcgtcgtccccactagctctggcctctggcgtcccccccccccccccccccccccccctgaaacaagccgagtcttgcgaggggagaacaggagaaagaaaaggccggatcctgattcctgagaacaggaggaattgaagaagaaggccggatccggagtcgcatgcaacagatcacgaggaagaaaaggaggaagctttcttactttgaggggaatgttgtctggctcgaggtgcagaaacacgcagatctcatcgaggtcgtcttggttgttgttgatctcggaccaggcttcattcccctcaagtagagctcccggctccatcgatctctctcgttcttgcctctcgcgcgcatgcatggtgagttttcttgggcatcatcgatgcggcgactcgatctttctgtcctcctggctcgtttgactatggctcgggcctagattatgccccccgcgcgcagacagaatcatgcatgattaggatatgattatctcggcgagtgtttcctgtgttgtgtacttgggtttcgcgcggtcaacacatgcagcagattggtgcaatcataaggattcttgacccaacaacactgtcaacaaatgcatgctttcttcctttaaactatcgcatggcaatatggcatcgtctcccttgttgcggtctttcttttctccgccggcctgtccccacttctttttctgatctctagctgatctgacaggagaaagatgaggagaaaaggttgtgtatcatcgctatcccttttcgcatgcatgaaggat

SEQ ID NO: 6109 - DNA, 1068 bp, Zea mays; identical to SEQ ID NO: 6108
  Zm_smallRNAprecursor_1598

SEQ ID NO: 6110 - DNA, 1069 bp, Zea mays
  Zm_smallRNAprecursor_1599
gccacagccaaggatgatatcagcaactttccgggacctttatttgttaagttcgatattgctaaccgtacacataaagctgggccatgctaggccggcgggtttgctcgacttttttatcgcgttgctcacaaaagtccacgtcatttttactgttttttgtatccttcctcactccccaatctgactcctaaatgcaatgatttctctcatgatgacagcgctcgctgcccctctactctcctcctctctctctctcaccctcctttatagacgccaacagaccgtcgtcgtccccactagctctggcctctggcgtcccccccccccccccccccccccccctgaaacaagccgagtcttgcgaggggagaacaggagaaagaaaaggccggatcctgattcctgagaacaggaggaattgaagaagaaggccggatccggagtcgcatgcaacagatcacgaggaagaaaaggaggaagctttcttactttgaggggaatgttgtctggctcgaggtgcagaaacacgcagatctcatcgaggtcgtcttggttgttgttgatctcggaccaggcttcattcccctcaagtagagctcccggctccatcgatctctctcgttcttgcctctcgcgcgcatgcatggtgagttttcttgggcatcatcgatgcggcgactcgatctttctgtcctcctggctcgtttgactatggctcgggcctagattatgccccccgcgcgcagacagaatcatgcatgattaggatatgattatctcggcgagtgtttcctgtgttgtgtacttgggtttcgcgcggtcaacacatgcagcagattggtgcaatcataaggattcttgacccaacaacactgtcaacaaatgcatgctttcttcctttaaactatcgcatggcaatatggcatcgtctcccttgttgcggtctttcttttctccgccggcctgtccccacttctttttctgatctctagctgatctgacaggagaaagatgaggagaaaaggttgtgtatcatcgctatcccttttcgcatgcatgaaggatc

SEQ ID NO: 6111 - DNA, 1069 bp, Zea mays; identical to SEQ ID NO: 6110
  Zm_smallRNAprecursor_1600

SEQ ID NO: 6112 - DNA, 1070 bp, Zea mays
  Zm_smallRNAprecursor_1601
gccacagccaaggatgatatcagcaactttccgggacctttatttgttaagttcgatattgctaaccgtacacataaagctgggccatgctaggccggcgggtttgctcgacttttttatcgcgttgctcacaaaagtccacgtcatttttactgttttttgtatccttcctcactccccaatctgactcctaaatgcaatgatttctctcatgatgacagcgctcgctgcccctctactctcctcctctctctctctcaccctcctttatagacgccaacagaccgtcgtcgtccccactagctctggcctctggcgtcccccccccccccccccccccccccctgaaacaagccgagtcttgcgaggggagaacaggagaaagaaaaggccggatcctgattcctgagaacaggaggaattgaagaagaaggccggatccggagtcgcatgcaacagatcacgaggaagaaaaggaggaagctttcttactttgaggggaatgttgtctggctcgaggtgcagaaacacgcagatctcatcgaggtcgtcttggttgttgttgatctcggaccaggcttcattcccctcaagtagagctcccggctccatcgatctctctcgttcttgcctctcgcgcgcatgcatggtgagttttcttgggcatcatcgatgcggcgactcgatctttctgtcctcctggctcgtttgactatggctcgggcctagattatgccccccgcgcgcagacagaatcatgcatgattaggatatgattatctcggcgagtgtttcctgtgttgtgtacttgggtttcgcgcggtcaacacatgcagcagattggtgcaatcataaggattcttgacccaacaacactgtcaacaaatgcatgctttcttcctttaaactatcgcatggcaatatggcatcgtctcccttgttgcggtctttcttttctccgccggcctgtccccacttctttttctgatctctagctgatctgacaggagaaagatgaggagaaaaggttgtgtatcatcgctatcccttttcgcatgcatgaaggatct

SEQ ID NO: 6113 - DNA, 1070 bp, Zea mays; identical to SEQ ID NO: 6112
  Zm_smallRNAprecursor_1602

SEQ ID NO: 6114 - DNA, 1067 bp, Zea mays
  Zm_smallRNAprecursor_1603
ccacagccaaggatgatatcagcaactttccgggacctttatttgttaagttcgatattgctaaccgtacacataaagctgggccatgctaggccggcgggtttgctcgacttttttatcgcgttgctcacaaaagtccacgtcatttttactgttttttgtatccttcctcactccccaatctgactcctaaatgcaatgatttctctcatgatgacagcgctcgctgcccctctactctcctcctctctctctctcaccctcctttatagacgccaacagaccgtcgtcgtccccactagctctggcctctggcgtcccccccccccccccccccccccccctgaaacaagccgagtcttgcgaggggagaacaggagaaagaaaaggccggatcctgattcctgagaacaggaggaattgaagaagaaggccggatccggagtcgcatgcaacagatcacgaggaagaaaaggaggaagctttcttactttgaggggaatgttgtctggctcgaggtgcagaaacacgcagatctcatcgaggtcgtcttggttgttgttgatctcggaccaggcttcattcccctcaagtagagctcccggctccatcgatctctctcgttcttgcctctcgcgcgcatgcatggtgagttttcttgggcatcatcgatgcggcgactcgatctttctgtcctcctggctcgtttgactatggctcgggcctagattatgccccccgcgcgcagacagaatcatgcatgattaggatatgattatctcggcgagtgtttcctgtgttgtgtacttgggtttcgcgcggtcaacacatgcagcagattggtgcaatcataaggattcttgacccaacaacactgtcaacaaatgcatgctttcttcctttaaactatcgcatggcaatatggcatcgtctcccttgttgcggtctttcttttctccgccggcctgtccccacttctttttctgatctctagctgatctgacaggagaaagatgaggagaaaaggttgtgtatcatcgctatcccttttcgcatgcatgaaggat

SEQ ID NO: 6115 - DNA, 1068 bp, Zea mays
  Zm_smallRNAprecursor_1604
ccacagccaaggatgatatcagcaactttccgggacctttatttgttaagttcgatattgctaaccgtacacataaagctgggccatgctaggccggcgggtttgctcgacttttttatcgcgttgctcacaaaagtccacgtcatttttactgttttttgtatccttcctcactccccaatctgactcctaaatgcaatgatttctctcatgatgacagcgctcgctgcccctctactctcctcctctctctctctcaccctcctttatagacgccaacagaccgtcgtcgtccccactagctctggcctctggcgtcccccccccccccccccccccccccctgaaacaagccgagtcttgcgaggggagaacaggagaaagaaaaggccggatcctgattcctgagaacaggaggaattgaagaagaaggccggatccggagtcgcatgcaacagatcacgaggaagaaaaggaggaagctttcttactttgaggggaatgttgtctggctcgaggtgcagaaacacgcagatctcatcgaggtcgtcttggttgttgttgatctcggaccaggcttcattcccctcaagtagagctcccggctccatcgatctctctcgttcttgcctctcgcgcgcatgcatggtgagttttcttgggcatcatcgatgcggcgactcgatctttctgtcctcctggctcgtttgactatggctcgggcctagattatgccccccgcgcgcagacagaatcatgcatgattaggatatgattatctcggcgagtgtttcctgtgttgtgtacttgggtttcgcgcggtcaacacatgcagcagattggtgcaatcataaggattcttgacccaacaacactgtcaacaaatgcatgctttcttcctttaaactatcgcatggcaatatggcatcgtctcccttgttgcggtctttcttttctccgccggcctgtccccacttctttttctgatctctagctgatctgacaggagaaagatgaggagaaaaggttgtgtatcatcgctatcccttttcgcatgcatgaaggatc

SEQ ID NO: 6116 - DNA, 1068 bp, Zea mays; identical to SEQ ID NO: 6115
  Zm_smallRNAprecursor_1605

SEQ ID NO: 6117 - DNA, 1064 bp, Zea mays
  Zm_smallRNAprecursor_1606
cacagccaaggatgatatcagcaactttccgggacctttatttgttaagttcgatattgctaaccgtacacataaagctgggccatgctaggccggcgggtttgctcgacttttttatcgcgttgctcacaaaagtccacgtcatttttactgttttttgtatccttcctcactccccaatctgactcctaaatgcaatgatttctctcatgatgacagcgctcgctgcccctctactctcctcctctctctctctcaccctcctttatagacgccaacagaccgtcgtcgtccccactagctctggcctctggcgtcccccccccccccccccccccccccctgaaacaagccgagtcttgcgaggggagaacaggagaaagaaaaggccggatcctgattcctgagaacaggaggaattgaagaagaaggccggatccggagtcgcatgcaacagatcacgaggaagaaaaggaggaagctttcttactttgaggggaatgttgtctggctcgaggtgcagaaacacgcagatctcatcgaggtcgtcttggttgttgttgatctcggaccaggcttcattcccctcaagtagagctcccggctccatcgatctctctcgttcttgcctctcgcgcgcatgcatggtgagttttcttgggcatcatcgatgcggcgactcgatctttctgtcctcctggctcgtttgactatggctcgggcctagattatgccccccgcgcgcagacagaatcatgcatgattaggatatgattatctcggcgagtgtttcctgtgttgtgtacttgggtttcgcgcggtcaacacatgcagcagattggtgcaatcataaggattcttgacccaacaacactgtcaacaaatgcatgctttcttcctttaaactatcgcatggcaatatggcatcgtctcccttgttgcggtctttcttttctccgccggcctgtccccacttctttttctgatctctagctgatctgacaggagaaagatgaggagaaaaggttgtgtatcatcgctatcccttttcgcatgcatgaagg

SEQ ID NO: 6118 - DNA, 1067 bp, Zea mays
  Zm_smallRNAprecursor_1607
cacagccaaggatgatatcagcaactttccgggacctttatttgttaagttcgatattgctaaccgtacacataaagctgggccatgctaggccggcgggtttgctcgacttttttatcgcgttgctcacaaaagtccacgtcatttttactgttttttgtatccttcctcactccccaatctgactcctaaatgcaatgatttctctcatgatgacagcgctcgctgcccctctactctcctcctctctctctctcaccctcctttatagacgccaacagaccgtcgtcgtccccactagctctggcctctggcgtcccccccccccccccccccccccccctgaaacaagccgagtcttgcgaggggagaacaggagaaagaaaaggccggatcctgattcctgagaacaggaggaattgaagaagaaggccggatccggagtcgcatgcaacagatcacgaggaagaaaaggaggaagctttcttactttgaggggaatgttgtctggctcgaggtgcagaaacacgcagatctcatcgaggtcgtcttggttgttgttgatctcggaccaggcttcattcccctcaagtagagctcccggctccatcgatctctctcgttcttgcctctcgcgcgcatgcatggtgagttttcttgggcatcatcgatgcggcgactcgatctttctgtcctcctggctcgtttgactatggctcgggcctagattatgccccccgcgcgcagacagaatcatgcatgattaggatatgattatctcggcgagtgtttcctgtgttgtgtacttgggtttcgcgcggtcaacacatgcagcagattggtgcaatcataaggattcttgacccaacaacactgtcaacaaatgcatgctttcttcctttaaactatcgcatggcaatatggcatcgtctcccttgttgcggtctttcttttctccgccggcctgtccccacttctttttctgatctctagctgatctgacaggagaaagatgaggagaaaaggttgtgtatcatcgctatcccttttcgcatgcatgaaggatc

SEQ ID NO: 6119 - DNA, 1084 bp, Zea mays
  Zm_smallRNAprecursor_1608
gattcatactttcgtgatgactcaatcgatcctgtgtttacattgactttaaatagtttttatcaaaacgattctcataaaaatacactaaaaagctgtatgtttagcagttcgcagcagcttctgtggccagaacctgaaaataaatcgaaacaggcctatatcgtatcgtatctaatgctgttactctcttagctaggccaaacccaccaggcccccaacccaaagcaacctcgtggaaaacggcccagggtcagcccacgcagccgccacggcggcttcatccacacctcctgctcaaaccctaattcacctccttataaacgccgcttctactgtaatccccgcatcgccgccgagctttaggttcagagcacctcgcctcattccatcccacgtcaagctagatctgccggctctaggcttagaacacatccggataatggtggatgcatcgttctttctgttcgtcgtaagcagttctttgtatcaagtgagatggcagtgacgactcggtaaaattcaagctcaacagaccaaatcacaggtctctctctacatgagatcgatctgtatgccgattttcccgctgaactgagccatctaatttttctctgcttatttgctattcggaatattttctctctacatgaaatccccgtttgctttttttccccatcggagggtggaacatattgttgcgatgaggataccaagctccctcttctgaaagcagtgaggacacttgccggcagaatcgaaccaataaccttattgccaccactgagtaacagcagatctccaatcttgttttgtttgtttttcttggtccgtattttggctttggatggtgaagatctactgatgcataatccaacacttgatccgatgccggcttctgccgagcgtgtgatgcacggacatctctgcatctgaatccttgacatcttttgctgtaatggttttcattgttttggtctctctcggtgcttttgacgttgtgtcgttgaactgtcctttttttaccctttgtatcaaatgatgaaacatcagaacaatcttaggacaccttctgacacaatgc

SEQ ID NO: 6120 - DNA, 1048 bp, Zea mays
  Zm_smallRNAprecursor_1609
agcaactgagcacaacaagcaccagcagctatgtattcggcctcggcagtggaaagtgcaacacagttttgcttcttagagctctaagacaccagggaccgcccaaggaattggcaagtccccgaggtgctttttcgatctactttacaaccgccatagtctgaatcagagtagccaaataaatcgaaaaaggagcccttaggataccagagacctagattttgggtgtgaactagatatctcaaaattctctcaacggccactaagtgacactcttttgggttagcttgaaaacgggcacacatgcacacactaagcatgatatctggcctagatgcacacaaatatagtagagatcctatcattgatctataaagcttttgatctacagttttaccttcttcatttaagtcgagatgaccacttgaagccattggtgtcttggcgtgctttgcttttccatgccaaactttttgagcatgtcttgtgtgtacttggtttggcacagaaaggttccttccttgagttgtttaacttgaaaacccaggaagtacttgagctcacccatcatggacacctcaaacctatttgtcataaccctactaaattcctcacaaaaagtttcatcagtactgccaaaaataatgtcgtcgacatatatttgacaaacaaataattgattgtcaactttgcgagtgaataaagtagagtctacttttcctatttcaaaaccatttttaagcaagaaatctttaaggcaatcataccaagctctaagggcttgtttaagcccgtagagtgccttgtgaagtaggtaaacatgatttggcttctttggatcttcaaagcccggtggttgctccacatagaccctctcttgtagtggtccatttagaaatgcgctcttgacatccatttgatatagcttgaaatcatggttagtagcataggcaattaatattctaattgactctaaccttgctaccggcgcatatgtttcaccaaaatcaagtccttccacttgagtgtagccttgggcaaccaaccg

SEQ ID NO: 6121 - DNA, 1040 bp, Zea mays
  Zm_smallRNAprecursor_1610
gattgatgccaaaacaattaaggtcaaaacgatatacatttgcattagaaaatttcttttgaatgattgtatgtagatggctccccctaaatgtgtgcacgattgtgaatccaatgttttgacgtaatatgtcatgtgagcaacacatttagagatagtgacaaaaaccatactaaatacaatcatccgaggggtgcaagagtgtcataacaggagttgtgatgcacatgactatctctaaatacacatcatttttacttcatagcaaagtaatcattacaaactgataggacaaaagatgatggccagaagaccatcatattactttgaataacaacccaatagttttttttcatacaatggtaaaaggatacaagccacaacagtggccaaaacaaaaataatccaaaagaaaaccgaaagaaccacaaactagaagtaggattttctccttctttttggcaacaagtacaaaaacggagagagagagagagacaaggatacatgaatcaatatcctccaggaggagaatatgacggaggatatgatggagggtatgaagtgtagtcagggaagagggtcctcatcacgtcctcctcaaatgtggagtcccgaggtggcacatcagccgcagaaaaaacagatgccgaagatgtatgatgatcaggaggaggtggaggatggtgatggtaaccagagccggatggcctagggtcaccaggaatgggtcccggacccgggtagggaggcagagggtgagaggatgattgacccggatccccatggtagggaggcggggcaaactcctcgcgatcatcaacataggcttcttcttcttcatcgtctgcagacataaatggcaccccgtaggcctgctggtgccactcattgatctccggggaaggaggatggagaggcacgtcaggcgagcgagggacaaatggcatacccatggtagaagcttgacgacgaagattgtcgtcagtctcccgctgacgcccgtgccacctcatggacatcagcaaaaatgttgcggcaca

SEQ ID NO: 6122 - DNA, 1088 bp, Zea mays
  Zm_smallRNAprecursor_1611
aggttgattctgtaattacacatgcatcatgctaagaattatactaataaaaattttcccccttagaaagatgccgccgtgcacaaggaaaacggcgcgcaagtcaactggcccaatcggtgtgccccggcatcaactagcccctcgacatgaggatagtagcagcgggagcaatgatccaataggggatcttgaagcacgagtaaatcaacttcaagcggaattgcaacacaggaccaacatatgggttgcagatggagatagaataaatgaattaagaagtgacatccgccacctgcgggatcagcttgctgatcgggacttggcgctcgactgggcagttcagtcccgtttgctggcttgtgctaagcaggcaagggctcaagcccgagtcaaggaacttagctcagctatcgacaacctgcaggtctattgcaatactttacatgaggaagtccatgtactgtattcgcaattacaccctagtgcacctgcgcaccctgttgagtcggaagccggaccctcccatgttgcgggacacgcgcttggtggtgatttagacctttttcagccccctccttctatgaggctggtcgacgaatggtctcccacacccgacgacgaggcccgccaaaagcaatgggaagcaggactagtggtgtagtagaagtagaagtagtgtagtgtattgtaggttgtactagtgtataataggtagtgctattgtatactaggtagtgtatcctattgtaagagtctgagtctgtaacattacttttggtaatgtaaaatggatggctttttctttggcatatcatgttgttttcaaatgttgttgccacagatgccttccaagactcgagctcaggacggagctggtacctcccggggaagggaatctacaccaaatccacctcctgtccctcccacactggctgaggcgattgccgccttagtgaacacaactgctaataatacccgctttctgagagaaatggcgggccaacagttccagcagcaaggtgggcggggctatcaacagggcccccgcgaaacttcttatctggacttctcggagacatgtctgc

SEQ ID NO: 6123 - DNA, 1194 bp, Zea mays
  Zm_smallRNAprecursor_1612
aaaacaccgacaagctgtgtagtaggtctctgtgctgcttcggaactaaaaaggcgtgaaagatggagtacaaacttatacacacatataaaatggagtttcatttgtaaatataaacgacacttcttctatccatgtaccatatataagacaaattaaattgataaaaaatataatagtcacgaaaaaataccgagcaatgtccaaatggttcttgtccttggcgtatcttgcccttgtcagctcttgttaatgcttgaataatattcctatcaaaatatttgatgcgtggtgttccacgtttattctgaggtgcagctgagtcatgaagatgatccagataatacagctacaaaagcataacatgaatcgttgtgagacataacaaagcataatctaaatgtagatggattttgcatacaaaaatctgggtacataaaacagacaaaaaagtgatatgcttacaagaatgacgatggaacatccgtaaatggttgtagaaacatttgtaacgctcctagtatgccacttcttggcagcttggcagaaatcattgaatattatctggcaccagtcaatctcgtggaaacgatccatttcctcagttaaaagaacctcatggttagttattccccatcttgcagtagggaacaacaacctattgaacagtatcaggaagaagtatctgatgcttagatcatcgtcaaaccctttccccaaacgatcttgaagagctgcaacaccaaattcttctttggataaaccaagttcagcccttaaattgtttgcagcaacagcttcatcaatgcctaatgcctttcctccaccagcatttggtaaccccaaaataaggtgcaccgtctcctttgtaattttgagctccttccctgggccggctcgaattgtcatatcattatggtcaagcttttccatcagccaagctaaatgagatctactgccaagcgcgtcaactctcatatcaagtatactggagaaccccctccgtgcaatagcttgacgttgtctgtcatttaaaatctgaatgcttactataacattttggggattgcatctcacattaagcctctgctgaaataatgtatacaacgaataacgtaaacatttacatctgcataatcgcaactcaatgtttaaatcaaatctcaatacaacataatttcacgcagaaaatga

SEQ ID NO: 6124 - DNA, 1070 bp, Zea mays
  Zm_smallRNAprecursor_1613
gacgaggtggacccatggtcgcaccacggacacgagcaccgtcctacgatcgtgtcatcatgtgaatctgcctgagagacgttggcatgtacggtggttggccagtggctgtgatcttgcgcaggtatgtacagccgaccggcgtgacgaattatcgagcgacgccgcgcgtgatacggggctccgtcggccggcgtgggtcacgacaaccggacggtacgggtttattgccgttgtttcgagggaaatagagtcatagagatatgtatgctatctaggccgcgtttgcttcctttatcaggtgactaaaataatcactgaggtaccctgcttagttttagtgactaaatttatgtacatagcattaattactggatataaatgtataatgactgtattatctctgttcaatgctttgatgttgttgcatggttaccggtctttacagttgagtgcgcgtacagtaaatggccaattccctgtatgccactggaaaatatactcattccttgtatgccactggccccacatgtcatagacaccaaaaaatatacctatatgccactcagtggcacacaagggatgagtataaaatctgatggcataccaggaattttctctacagtaaaagggaggcagtaaagtgagagagggcaagttgggtacaaatctcacgctaaagttattttcggtggctcggaactgtcaaaaataaaatttatgtcgtcgaaaatatgctgttgttgccttgttgggtaaaaagagagacagtgaagtgggagagggcaagttggatgcaaatctcacgctacatggctattgttgtgtcactagttatttttattcaccctcttggtgactaataaagtttaatcaccctattatagtcacattgtttgtttctttaggaagtaaaaatgactagagtgtcctttagttctaaccggaaatagactggttgatggggatgctcattagtgcgccggccggccgacgttactggagggaaaaaatgttaacaaccagttggatgggttcggttggtctgtccatttctttgtgtccagccg

SEQ ID NO: 6125 - DNA, 1066 bp, Zea mays
  Zm_smallRNAprecursor_1614
ccatcaaaacatggatgatcataaacaggtaccttgggcattggaggcttgattcaataatattcatttaatcatcatctattgaattaagtgttgaagactaataaaattctatcccaatgccaagtcaataataagtgaagtccaaattctaccaaatacaagtgctttattcaagttggttaaattatgaatggattgcaaataagttaagttcaaacttgctattggatgatcatgaggtatataaagtataatatttgttgatcaaattcatttgaatgcatatgagttgattgaattggatatatatgcatatgttgcttgctataagatgattgaatggacaatttgctaaataatcaagtttggattgatttatgttgaataaattcaagagacttcatttagtaagtggtttgaatggatatttgtcttttgaaagtagttcatttcagatttgattcaacttgaagaagagtaactcaatttactgaaatctggccaacattgaaaatctgacaaggctgtgctcataaccatgtttgagtgatcaaatctatttagattggcttgaaattcagtttacttgctctatacatatgatagcaaagtctgtgcaaatttcataatcattggataagtgaaacttcttgattaagtcaatcttgtcagcacaaacacagcagttttcagcatgtacctactgtgggagatattatggctggcagcacatatgaagtcaaatgagtctcaactttttacagctgttagcagacttattaaagcacatctccaccaattttcgtggtcataggatctgtacatcaaaatttatgaatgtttctttagagtgtacagaatctgtcataagtgacaaatattggaaatattgaaagtcactttgattggaaggctctcatataggataaatcacataagttgtttgagagaccatagtttggtttttaattgatttataatcatgggaagtgaaggggtacaaggatatttgttgagaaatattttggcacttatcttggtactccaagttgaagatcaagac

SEQ ID NO: 6126 - DNA, 1171 bp, Zea mays
  Zm_smallRNAprecursor_1615
ttactgaaatctggccaacattgaaaatctgacaaggctgtgctcataaccatgtttgagtgatcaaatctatttagattggcttgaaattcagtttacttgctctatacatatgatagcaaagtctgtgcaaatttcataatcattggataagtgaaacttcttgattaagtcaatcttgtcagcacaaacacagcagttttcagcatgtacctactgtgggagatattatggctggcagcacatatgaagtcaaatgagtctcaactttttacagctgttagcagacttattaaagcacatctccaccaattttcgtggtcataggatctgtacatcaaaatttatgaatgtttctttagagtgtacagaatctgtcataagtgacaaatattggaaatattgaaagtcactttgattggaaggctctcatataggataaatcacataagttgtttgagagaccatagtttggtttttaattgatttataatcatgggaagtgaaggggtacaaggatatttgttgagaaatattttggcacttatcttggtactccaagttgaagatcaagaccaaagatgatcaaaattgaggttatcatataacagattgcataatcttttttcttacatatggcaatccaaatgcttaaattggttgtaagtatttcttggcacatttcaatttgattactctgttattgccatgatctagacatgaaagagaaaaactccgtgttcgtgaatgaataaggtgctaagtaagaaattcaaattcttaaagcacttatcaaaaggggaattatctatatgactagagttgtgaaactaatgtttttacctaggtgatctatgtagtttcacagcatgagaatgagtttctcaaatggactatgcaattaaacgtataaagaagaacaatccaaaactatgtgatgtattctctcttgtacatttggatttatttcttctacattaaatactcaccatgatatgatttaaaattagcctttgaacttaatcaatttatcatgcatgtttaatttgttaaaattaagcattgaagattaagagaaatttagttcatataataagatttccttgttttagtaactgccaactttatatattcaaagtgctataaaagggaaattggtgcttgtattact

SEQ ID NO: 6127 - DNA, 1041 bp, Zea mays
  Zm_smallRNAprecursor_1616
ctggaaattccatggtacaggattgtataatttggtcgtggtagcttcgggtagcgtaaagactatctgcaatctaaatttttctttatataatgcactatacagccacgtcgcaaaaaaatttactcatacttttctcttttccgtagttccctatattttccctatatatctctaactataataaattattaattttcaaacctatctatcatatattatcatatttttcctactaataaataatggcacacacaaacatcgatgtaagggggtcagtgtccgctagatctggcgtgcgctcgggcttaaccaatacgtaggggagagtgtaacaattgtcgttgcactgcgcccgaattttttgtattttagcccttaaatagaagtaaaatcacgtttagacctaaaaaaattttaaatgcagttttggaccctttgctcggcgccatagcctatggcgccgagctaacacagctcggcgccataggctatggcgccgaggtcgtgttgcgttggcacaacccagacgcgtggcgtcgacgtggaaccgagctcggcgccacagatcttggcgccgagctcggttgtgttattaaaatatttgttgcagacatgagcacaaagcccatctagcccacttggtagagcataaggcttctaaccatgtggtcgtgggttcaaaccccatagtttgcatttttttttgttttttttttgtttatgtcgttggtgtgtccgcttaaatttatttctcgcctagattttttttatgtcgttgtgcctagtgttgccttccatcttgcactgcatgcgcgcgcatttcaatctacagtttccgaatttaaaatgcgcgtaaataatcgactagctcaaatcatgcatgtgcaatacaaaagcaatgtagtaattttataaaatgtcatccgtgcattattcaaaattttactacttttttaaaaagaccgaatgcatggcatgcatgttttcatcttgcaaattaaaatccgcagagcttagtgcatctccaataatttaaaa

SEQ ID NO: 6128 - DNA, 1041 bp, Zea mays; identical to SEQ ID NO: 6127
  Zm_smallRNAprecursor_1617

SEQ ID NO: 6129 - DNA, 1042 bp, Zea mays
  Zm_smallRNAprecursor_1618
ctggaaattccatggtacaggattgtataatttggtcgtggtagcttcgggtagcgtaaagactatctgcaatctaaatttttctttatataatgcactatacagccacgtcgcaaaaaaatttactcatacttttctcttttccgtagttccctatattttccctatatatctctaactataataaattattaattttcaaacctatctatcatatattatcatatttttcctactaataaataatggcacacacaaacatcgatgtaagggggtcagtgtccgctagatctggcgtgcgctcgggcttaaccaatacgtaggggagagtgtaacaattgtcgttgcactgcgcccgaattttttgtattttagcccttaaatagaagtaaaatcacgtttagacctaaaaaaattttaaatgcagttttggaccctttgctcggcgccatagcctatggcgccgagctaacacagctcggcgccataggctatggcgccgaggtcgtgttgcgttggcacaacccagacgcgtggcgtcgacgtggaaccgagctcggcgccacagatcttggcgccgagctcggttgtgttattaaaatatttgttgcagacatgagcacaaagcccatctagcccacttggtagagcataaggcttctaaccatgtggtcgtgggttcaaaccccatagtttgcatttttttttgttttttttttgtttatgtcgttggtgtgtccgcttaaatttatttctcgcctagattttttttatgtcgttgtgcctagtgttgccttccatcttgcactgcatgcgcgcgcatttcaatctacagtttccgaatttaaaatgcgcgtaaataatcgactagctcaaatcatgcatgtgcaatacaaaagcaatgtagtaattttataaaatgtcatccgtgcattattcaaaattttactacttttttaaaaagaccgaatgcatggcatgcatgttttcatcttgcaaattaaaatccgcagagcttagtgcatctccaataatttaaaaa

SEQ ID NO: 6130 - DNA, 1042 bp, Zea mays; identical to SEQ ID NO: 6129
  Zm_smallRNAprecursor_1619

SEQ ID NO: 6131 - DNA, 1043 bp, Zea mays
  Zm_smallRNAprecursor_1620
ctggaaattccatggtacaggattgtataatttggtcgtggtagcttcgggtagcgtaaagactatctgcaatctaaatttttctttatataatgcactatacagccacgtcgcaaaaaaatttactcatacttttctcttttccgtagttccctatattttccctatatatctctaactataataaattattaattttcaaacctatctatcatatattatcatatttttcctactaataaataatggcacacacaaacatcgatgtaagggggtcagtgtccgctagatctggcgtgcgctcgggcttaaccaatacgtaggggagagtgtaacaattgtcgttgcactgcgcccgaattttttgtattttagcccttaaatagaagtaaaatcacgtttagacctaaaaaaattttaaatgcagttttggaccctttgctcggcgccatagcctatggcgccgagctaacacagctcggcgccataggctatggcgccgaggtcgtgttgcgttggcacaacccagacgcgtggcgtcgacgtggaaccgagctcggcgccacagatcttggcgccgagctcggttgtgttattaaaatatttgttgcagacatgagcacaaagcccatctagcccacttggtagagcataaggcttctaaccatgtggtcgtgggttcaaaccccatagtttgcatttttttttgttttttttttgtttatgtcgttggtgtgtccgcttaaatttatttctcgcctagattttttttatgtcgttgtgcctagtgttgccttccatcttgcactgcatgcgcgcgcatttcaatctacagtttccgaatttaaaatgcgcgtaaataatcgactagctcaaatcatgcatgtgcaatacaaaagcaatgtagtaattttataaaatgtcatccgtgcattattcaaaattttactacttttttaaaaagaccgaatgcatggcatgcatgttttcatcttgcaaattaaaatccgcagagcttagtgcatctccaataatttaaaaaa

SEQ ID NO: 6132 - DNA, 1043 bp, Zea mays; identical to SEQ ID NO: 6131
  Zm_smallRNAprecursor_1621

SEQ ID NO: 6133 - DNA, 1041 bp, Zea mays
  Zm_smallRNAprecursor_1622
aaaacatttagtaatttagtgagcttttcatgtagctaaaaaaggttaagaacaaatttcttgaacaaaatctaacttagtaaaaatatagaaaacaattttgcattacgaatcattaactatttctaaatcactataactatttttatacatttttttcttccttatatacatttgctttgataaacagcatgccctacttattattattctccacaacctttcacatacagagatattggccgatcagtacatgagcatatattttgggtcgatttttttcaattgtgaaaaaaaatctaggcgagaaataaatttaagcggacacaccaacgacataaacaaaaaaaacaaaaaaaatgcaaactatggggcttgaacccacgaccacatggttagaagccttgtgctctaccaagtgggctagatgggctttgtgctcatgtctgcaacaaatattttaataacacaaccgagctcggcgccaagatctgtggcgccgagctcggttccacgtcgacgccacgcgtctgggttgtgccaacgcaacacgacctcggcgccatagcctatggcgccgagctgtgttagctcggcgccataggctatggcgccgagcaaagggtccaaaactgcatttaaaatttttttaggtctaaacgtgattttacttctgtttaagggctaaaatacaaaaaattcgggcactgcgcatgtgccgctaaacgcgtacaatgttacgggaggagacgtcgggcgacaaccgatgcaggtactctaagaccgtgcagccaatcaagagacgcgatctcgttaggtcataacttagactatttgcaacgttatctctaaatttccccctataacgcactatgtagccatgttacccgaaacagttccccctaagttttctctctataccccactacaaccataaacctgaacaactcaaggagaggcgtagaggtaagcgttcacaacaacaatccaggatattcccgtcggccgggtaccgacgatttactctaaaaccgacgggat

SEQ ID NO: 6134 - DNA, 1040 bp, Zea mays
  Zm_smallRNAprecursor_1623
aaacatttagtaatttagtgagcttttcatgtagctaaaaaaggttaagaacaaatttcttgaacaaaatctaacttagtaaaaatatagaaaacaattttgcattacgaatcattaactatttctaaatcactataactatttttatacatttttttcttccttatatacatttgctttgataaacagcatgccctacttattattattctccacaacctttcacatacagagatattggccgatcagtacatgagcatatattttgggtcgatttttttcaattgtgaaaaaaaatctaggcgagaaataaatttaagcggacacaccaacgacataaacaaaaaaaacaaaaaaaatgcaaactatggggcttgaacccacgaccacatggttagaagccttgtgctctaccaagtgggctagatgggctttgtgctcatgtctgcaacaaatattttaataacacaaccgagctcggcgccaagatctgtggcgccgagctcggttccacgtcgacgccacgcgtctgggttgtgccaacgcaacacgacctcggcgccatagcctatggcgccgagctgtgttagctcggcgccataggctatggcgccgagcaaagggtccaaaactgcatttaaaatttttttaggtctaaacgtgattttacttctgtttaagggctaaaatacaaaaaattcgggcactgcgcatgtgccgctaaacgcgtacaatgttacgggaggagacgtcgggcgacaaccgatgcaggtactctaagaccgtgcagccaatcaagagacgcgatctcgttaggtcataacttagactatttgcaacgttatctctaaatttccccctataacgcactatgtagccatgttacccgaaacagttccccctaagttttctctctataccccactacaaccataaacctgaacaactcaaggagaggcgtagaggtaagcgttcacaacaacaatccaggatattcccgtcggccgggtaccgacgatttactctaaaaccgacgggat

SEQ ID NO: 6135 - DNA, 1102 bp, Zea mays
  Zm_smallRNAprecursor_1624
catccccttgttcttgtagagagagttggtgtaggtcgaaaggcagatagatcatatatagagggagagatgcatatatggtgtagggttcttcaatttgtttctatgatcgattcattcgccctgcagccccccctgcgcatctagttatgtctccatccctcctcccttgttcctgatacatatatatatatgtaggtagtggctctgtatatacccatgccatctctctcaatctcatctatatcatatatacccatgctttgcatctagctgtttcatttcttttcactcgtgctttgaaagatctggtacagtccggcctgtattagtaagaacgagttagaaaaatacacacgtacgcgcgagaaccatgcatcatcagctagctcctctctttcctctttttttttgttaatgcatacattcatatatatattcccatgaatgaatgctttaagcatgaggcaagcaaacatcgacagtgggtgcttgcaggtgcagcaccaccaagattcacatccaactctcacgcatcttcagtgatgcatgcatgctctgtgatgtctcgcagcagctatatgcatatgtgatgagatgagaatcttgatgatgctgcatcagcagacactcactcatcacaccaacgtaccccaacaagggtgagagacgacgaatcggctgctggtatatacatacaactgagaagtcggattacctttgctgattattaacttgtttccattgctgtgaaatgaaactttcaatgcaagggggctggcctaccagctggtactagcaggaatgaagagcatatatatatgaacatgatgatgcatatatgcagagcagcaacagcagcatcgtcgtaccatctcatatatatcattgcaaacatgagcagtagtggtagttcatgaatcatgatgaaagcaaggaagaggaagctagcagtgctggacgcggatcagatgcagatcgatggaggccggggccgggggtgtacctacgtagtacattgctattattgtgtccatggaagggggaccaaagtatgtaatgcgttgcacaccacacaccagagctggctcagcagctagca

SEQ ID NO: 6136 - DNA, 1080 bp, Zea mays
  Zm_smallRNAprecursor_1625
ccgtttaggcccgctgcgggccggctcgaacaggaaaatgagcccgcatacttagatggttcggtccgattttttaaagtgcctgacgggctgagctaaaacgggccgagccgcccggcccatttggctatctctaattggggttaacctctcttcccttccactggaacgtcaccaaccgtccaaccccaatgccggcgactcggtcccttcctcccccggcctctctctctagtctctaggctgcaggcgtcgctttggcctccctcgtccatataaacaaccacccttcgtctcttgttctcttcccaaacacctcacccatgacccatctctctcttatcttcaagacatgtccacccatctctcttctcggaaatccatcctccccgcccctccccacgccacccccgaccgatctattcgtagacggggacgggttgaataattccatgtgtacgctggtgatgagccgacgagacatggccctccttgccgtcttccacagctttcttgaactgcatgccgccggctggtggatgctgcgcgcttgaattccggtcgatcccaagaggcgcagttcaataaagctgtgggaaactgcagagagaggccaccagccgatccgatcgatcggatcggatcgcggcaccagatctcgaccaccgccggaactgggcgggggcgaagcagatgatgcggcgattaattaaccggcgtagcagcggctggggatctacctgcatcacgtcgatccacccgcggtagatcgatgggaccgtcacaacaaggacaaggtacggattaggtttcttgtactggtaggaatggatggtggttatgaatgcatgtgttgaattccgtacacgtgtgtgtgagagagagagagtgatggtgcgtagggctggttaatttcgtcgtctcagcttctttcccgtgcaatttaatctcaacctatgtatatactacaagaaaagggttgttgttaattaccagtgtctgaaattgtggtttttctgaactccaagtggcagtatacacatacctttgtttcttaatccttgccgcacttgactagcg

SEQ ID NO: 6137 - DNA, 1080 bp, Zea mays; identical to SEQ ID NO: 6136
  Zm_smallRNAprecursor_1626

SEQ ID NO: 6138 - DNA, 1080 bp, Zea mays; identical to SEQ ID NO: 6136
  Zm_smallRNAprecursor_1627

SEQ ID NO: 6139 - DNA, 1081 bp, Zea mays
  Zm_smallRNAprecursor_1628
ccgtttaggcccgctgcgggccggctcgaacaggaaaatgagcccgcatacttagatggttcggtccgattttttaaagtgcctgacgggctgagctaaaacgggccgagccgcccggcccatttggctatctctaattggggttaacctctcttcccttccactggaacgtcaccaaccgtccaaccccaatgccggcgactcggtcccttcctcccccggcctctctctctagtctctaggctgcaggcgtcgctttggcctccctcgtccatataaacaaccacccttcgtctcttgttctcttcccaaacacctcacccatgacccatctctctcttatcttcaagacatgtccacccatctctcttctcggaaatccatcctccccgcccctccccacgccacccccgaccgatctattcgtagacggggacgggttgaataattccatgtgtacgctggtgatgagccgacgagacatggccctccttgccgtcttccacagctttcttgaactgcatgccgccggctggtggatgctgcgcgcttgaattccggtcgatcccaagaggcgcagttcaataaagctgtgggaaactgcagagagaggccaccagccgatccgatcgatcggatcggatcgcggcaccagatctcgaccaccgccggaactgggcgggggcgaagcagatgatgcggcgattaattaaccggcgtagcagcggctggggatctacctgcatcacgtcgatccacccgcggtagatcgatgggaccgtcacaacaaggacaaggtacggattaggtttcttgtactggtaggaatggatggtggttatgaatgcatgtgttgaattccgtacacgtgtgtgtgagagagagagagtgatggtgcgtagggctggttaatttcgtcgtctcagcttctttcccgtgcaatttaatctcaacctatgtatatactacaagaaaagggttgttgttaattaccagtgtctgaaattgtggtttttctgaactccaagtggcagtatacacatacctttgtttcttaatccttgccgcacttgactagcgg

SEQ ID NO: 6140 - DNA, 1081 bp, Zea mays; identical to SEQ ID NO: 6139
  Zm_smallRNAprecursor_1629

SEQ ID NO: 6141 - DNA, 1081 bp, Zea mays; identical to SEQ ID NO: 6139
  Zm_smallRNAprecursor_1630

SEQ ID NO: 6142 - DNA, 1082 bp, Zea mays
  Zm_smallRNAprecursor_1631
ccgtttaggcccgctgcgggccggctcgaacaggaaaatgagcccgcatacttagatggttcggtccgattttttaaagtgcctgacgggctgagctaaaacgggccgagccgcccggcccatttggctatctctaattggggttaacctctcttcccttccactggaacgtcaccaaccgtccaaccccaatgccggcgactcggtcccttcctcccccggcctctctctctagtctctaggctgcaggcgtcgctttggcctccctcgtccatataaacaaccacccttcgtctcttgttctcttcccaaacacctcacccatgacccatctctctcttatcttcaagacatgtccacccatctctcttctcggaaatccatcctccccgcccctccccacgccacccccgaccgatctattcgtagacggggacgggttgaataattccatgtgtacgctggtgatgagccgacgagacatggccctccttgccgtcttccacagctttcttgaactgcatgccgccggctggtggatgctgcgcgcttgaattccggtcgatcccaagaggcgcagttcaataaagctgtgggaaactgcagagagaggccaccagccgatccgatcgatcggatcggatcgcggcaccagatctcgaccaccgccggaactgggcgggggcgaagcagatgatgcggcgattaattaaccggcgtagcagcggctggggatctacctgcatcacgtcgatccacccgcggtagatcgatgggaccgtcacaacaaggacaaggtacggattaggtttcttgtactggtaggaatggatggtggttatgaatgcatgtgttgaattccgtacacgtgtgtgtgagagagagagagtgatggtgcgtagggctggttaatttcgtcgtctcagcttctttcccgtgcaatttaatctcaacctatgtatatactacaagaaaagggttgttgttaattaccagtgtctgaaattgtggtttttctgaactccaagtggcagtatacacatacctttgtttcttaatccttgccgcacttgactagcggt

SEQ ID NO: 6143 - DNA, 1082 bp, Zea mays; identical to SEQ ID NO: 6142
  Zm_smallRNAprecursor_1632

SEQ ID NO: 6144 - DNA, 1082 bp, Zea mays; identical to SEQ ID NO: 6142
  Zm_smallRNAprecursor_1633

SEQ ID NO: 6145 - DNA, 1048 bp, Zea mays
  Zm_smallRNAprecursor_1634
gcaactgagcacaacaagcaccagcagctatgtattcagcctcggcagtggaaagtgcaacacagttttgcttcttagagctccaagacaccagggaccgcccaaggaattggcaagtccccgaggtgctttttcgatctactttacaaccggcatagtctgaatcagagtagccaaataaatcgaaaaaggagcccttgggataccagagacctagattttgggtgtgaactagatatctcaaaattctcttaacggccactaagtgacactcttttgggtttgcttgaaaacgagcacacatgcacacactaagcatgatatctagcctagatgcacataaatatagtagagatcctatcattgatctataaagcttttgatctacagttttaccttcttcatttaagtcaagatgaccacttgaaaccattggtgtcttgccgtgctttgccttttccatgccaaactttttgagcatgtcttgtgtgtacttggtttggcacagaaaggttccttccttgagttgtttaacttgaaaacccaggaagtacttgagctcacccatcatggacatctcaaacctatttgtcataaccctactaaattcctcacaaaaagtttcatcagtactgccaaattgaaagttccctttgacccgggaacaggatctggatgtcgcctagaggggggggtgaataggcgaataaaactttttactttaaaacttaaattcttactctactcgaagacttagtacacagtggagtgagaagactcttcgagtaggttgcagcggaatagaagatcctgtctcaaaatgtcctgcacttcaaataaagcttataccacagataagtattgaagtgcagatataaagacgagtaagacagagagtcaggatacaatacagaaaagagcacacagacgcaaggatttatcccgaggttcggccaagcctgaaatgcttgcctagtcctcgttggagttagccacacctgggcttggagtctatttcaaccccttcctccgtttgcttagatctgtc

SEQ ID NO: 6146 - DNA, 1094 bp, Zea mays
  Zm_smallRNAprecursor_1635
ttccctccacaatattcaagcatgtcagacattccgaacagccttttacctgacgagtgaaggtggaggagtgggtgcacttcacgaggcattcctgtgggaattcaaatcaccactggtgtcactggctcgcccacgtactgacgcctcgaccgggcaacgtaatgggcgttagggcacccccctggccctgtgccaaatgggggcatgtctccataaattgccattagtgctcctccagtcctcctcactccccctcctctccgtcctccgcctctctctccctctcccgtcttcaaaaaccctcatcccttcttcttcttcctccacacccaccacaattaagcagctcctagctcctcctttcttccaccaccatcctgaagcaagcagtgcagcttgctctcacgaacctagctagtttcttctctgtctatatatatgctcctcagatccacttcgcatcatcacttcagctccttcgtcatgggggtttgtggggaatgttggctggctcgaggcagcatccgcgtcctagcctgctgttgccggtcgttttgcctgctaccggtcggccggacagatcgaggcgtcggaccaggcttcattcctcgcaaaccggtgcatccatggtgtcttacctatctcggctcatggttcttctagagttctagtagctagcaaccagctatagttctcttacaaacatatatcaggtagctagggatagccagccagataatttcatgcatacgtactgcctcatcatgctcggattgggttagggggattgttgtctggctcggtgtctccggtcgagacggccttgccggcgccggagctgtcgtcgaccggagatctcggaccaggcttcaatccctttaaccatgcggcattaggtcatctggatctcggcggtgtccgacaaagtacaccgcatcggccggtaagctaacctatcttgagactcgagcacataaattctcagctagcctcactttctctacatggtcattcatcagcaactcccgcgcgcgagtggctcgttttctttcccagctccagatctgctcccgctttatttgctgtgagta

SEQ ID NO: 6147 - DNA, 1089 bp, Zea mays
  Zm_smallRNAprecursor_1636
ccctccacaatattcaagcatgtcagacattccgaacagccttttacctgacgagtgaaggtggaggagtgggtgcacttcacgaggcattcctgtgggaattcaaatcaccactggtgtcactggctcgcccacgtactgacgcctcgaccgggcaacgtaatgggcgttagggcacccccctggccctgtgccaaatgggggcatgtctccataaattgccattagtgctcctccagtcctcctcactccccctcctctccgtcctccgcctctctctccctctcccgtcttcaaaaaccctcatcccttcttcttcttcctccacacccaccacaattaagcagctcctagctcctcctttcttccaccaccatcctgaagcaagcagtgcagcttgctctcacgaacctagctagtttcttctctgtctatatatatgctcctcagatccacttcgcatcatcacttcagctccttcgtcatgggggtttgtggggaatgttggctggctcgaggcagcatccgcgtcctagcctgctgttgccggtcgttttgcctgctaccggtcggccggacagatcgaggcgtcggaccaggcttcattcctcgcaaaccggtgcatccatggtgtcttacctatctcggctcatggttcttctagagttctagtagctagcaaccagctatagttctcttacaaacatatatcaggtagctagggatagccagccagataatttcatgcatacgtactgcctcatcatgctcggattgggttagggggattgttgtctggctcggtgtctccggtcgagacggccttgccggcgccggagctgtcgtcgaccggagatctcggaccaggcttcaatccctttaaccatgcggcattaggtcatctggatctcggcggtgtccgacaaagtacaccgcatcggccggtaagctaacctatcttgagactcgagcacataaattctcagctagcctcactttctctacatggtcattcatcagcaactcccgcgcgcgagtggctcgttttctttcccagctccagatctgctcccgctttatttgctgtga

SEQ ID NO: 6148 - DNA, 1091 bp, Zea mays
  Zm_smallRNAprecursor_1637
ccctccacaatattcaagcatgtcagacattccgaacagccttttacctgacgagtgaaggtggaggagtgggtgcacttcacgaggcattcctgtgggaattcaaatcaccactggtgtcactggctcgcccacgtactgacgcctcgaccgggcaacgtaatgggcgttagggcacccccctggccctgtgccaaatgggggcatgtctccataaattgccattagtgctcctccagtcctcctcactccccctcctctccgtcctccgcctctctctccctctcccgtcttcaaaaaccctcatcccttcttcttcttcctccacacccaccacaattaagcagctcctagctcctcctttcttccaccaccatcctgaagcaagcagtgcagcttgctctcacgaacctagctagtttcttctctgtctatatatatgctcctcagatccacttcgcatcatcacttcagctccttcgtcatgggggtttgtggggaatgttggctggctcgaggcagcatccgcgtcctagcctgctgttgccggtcgttttgcctgctaccggtcggccggacagatcgaggcgtcggaccaggcttcattcctcgcaaaccggtgcatccatggtgtcttacctatctcggctcatggttcttctagagttctagtagctagcaaccagctatagttctcttacaaacatatatcaggtagctagggatagccagccagataatttcatgcatacgtactgcctcatcatgctcggattgggttagggggattgttgtctggctcggtgtctccggtcgagacggccttgccggcgccggagctgtcgtcgaccggagatctcggaccaggcttcaatccctttaaccatgcggcattaggtcatctggatctcggcggtgtccgacaaagtacaccgcatcggccggtaagctaacctatcttgagactcgagcacataaattctcagctagcctcactttctctacatggtcattcatcagcaactcccgcgcgcgagtggctcgttttctttcccagctccagatctgctcccgctttatttgctgtgagt

SEQ ID NO: 6149 - DNA, 1195 bp, Zea mays
  Zm_smallRNAprecursor_1638
cctgtgggaattcaaatcaccactggtgtcactggctcgcccacgtactgacgcctcgaccgggcaacgtaatgggcgttagggcacccccctggccctgtgccaaatgggggcatgtctccataaattgccattagtgctcctccagtcctcctcactccccctcctctccgtcctccgcctctctctccctctcccgtcttcaaaaaccctcatcccttcttcttcttcctccacacccaccacaattaagcagctcctagctcctcctttcttccaccaccatcctgaagcaagcagtgcagcttgctctcacgaacctagctagtttcttctctgtctatatatatgctcctcagatccacttcgcatcatcacttcagctccttcgtcatgggggtttgtggggaatgttggctggctcgaggcagcatccgcgtcctagcctgctgttgccggtcgttttgcctgctaccggtcggccggacagatcgaggcgtcggaccaggcttcattcctcgcaaaccggtgcatccatggtgtcttacctatctcggctcatggttcttctagagttctagtagctagcaaccagctatagttctcttacaaacatatatcaggtagctagggatagccagccagataatttcatgcatacgtactgcctcatcatgctcggattgggttagggggattgttgtctggctcggtgtctccggtcgagacggccttgccggcgccggagctgtcgtcgaccggagatctcggaccaggcttcaatccctttaaccatgcggcattaggtcatctggatctcggcggtgtccgacaaagtacaccgcatcggccggtaagctaacctatcttgagactcgagcacataaattctcagctagcctcactttctctacatggtcattcatcagcaactcccgcgcgcgagtggctcgttttctttcccagctccagatctgctcccgctttatttgctgtgagtagctagcatgcgacgatgagatgtcgatccagctggacctggagaggtcgttgctgcaacgctgaagtcgttttgctgactactaggctactaatgacgactggttaattagcggcgtttacgtacatgcatgttgctgcatgatcatgcaatcatttgagagctagtagctagctagcggctatagctcggtag

SEQ ID NO: 6150 - DNA, 1075 bp, Zea mays
  Zm_smallRNAprecursor_1639
tcccgtcttcaaaaaccctcatcccttcttcttcttcctccacacccaccacaattaagcagctcctagctcctcctttcttccaccaccatcctgaagcaagcagtgcagcttgctctcacgaacctagctagtttcttctctgtctatatatatgctcctcagatccacttcgcatcatcacttcagctccttcgtcatgggggtttgtggggaatgttggctggctcgaggcagcatccgcgtcctagcctgctgttgccggtcgttttgcctgctaccggtcggccggacagatcgaggcgtcggaccaggcttcattcctcgcaaaccggtgcatccatggtgtcttacctatctcggctcatggttcttctagagttctagtagctagcaaccagctatagttctcttacaaacatatatcaggtagctagggatagccagccagataatttcatgcatacgtactgcctcatcatgctcggattgggttagggggattgttgtctggctcggtgtctccggtcgagacggccttgccggcgccggagctgtcgtcgaccggagatctcggaccaggcttcaatccctttaaccatgcggcattaggtcatctggatctcggcggtgtccgacaaagtacaccgcatcggccggtaagctaacctatcttgagactcgagcacataaattctcagctagcctcactttctctacatggtcattcatcagcaactcccgcgcgcgagtggctcgttttctttcccagctccagatctgctcccgctttatttgctgtgagtagctagcatgcgacgatgagatgtcgatccagctggacctggagaggtcgttgctgcaacgctgaagtcgttttgctgactactaggctactaatgacgactggttaattagcggcgtttacgtacatgcatgttgctgcatgatcatgcaatcatttgagagctagtagctagctagcggctatagctcggtagggggcgtggtgtgccgggcctgcctgcgggcgcgcataattgagagcgcgcgcggtccggccgtctggcgcccc

SEQ ID NO: 6151 - DNA, 1148 bp, Zea mays
  Zm_smallRNAprecursor_1640
atacccatcggcttcctcatctactttctttatccagagggtggcatagaactgagctaccacctcgtcgttccaggggtattccatggtcataatgtttcgtaacccctttctctctaagttttcaagagcttacgtcatgtcagcatctcccatattctcacaaccctcccagtcaataaacctatgtctgacgactgggtgtttcttggaaagaatgacagaattgtagaagtcagcctggaaaagattccagaaccgagggtcctggacaccaggatgacgaggagtgagagtagggttggtgaacctcaggcgctgaagggtgtctattcccttcagagtgaagtcgacgggaggttcatgcggaccgcggctgacgttcgccggatgcatgtgcagtccggtgacgtagagagcatcaggcgccggaaggtcgacgaagtcgtcgaaagccccatcctcctcctggcagggagcgtacccagaggaagacgtgctacgacgaggacgagaggcgccaaccttgtggcgtctcccgcgagtcggctgcgagggcatggaagagccctcaccatccatccgaccagagccacgtcctctcttagagagagagcgacgaggcggaggagaggggacgggagattcctcctgaatctcgtcggagtcgctgctaaacccaatcactgaagggttgcgacgacgcaccatgattgaaaaagtggtgaaacggcgaactggttgaggtgtgtgaaagagaggctctaaatgttgtgaagcgactaaggcgagagtggatgaagtgggagaagagaaggggagtgtcaaatatatataggcagttgagctggtcctcaggaccggttcaaccgcccccatgggccagttcaactggttctgaccagagtggtcagagagccagaaacagcagagggaagacgccaaaaaaaattaaaaccaagtgtctgcgcagatgagaccggacggcaaaagaaaaagaactgcgcaaaagaaaagttctgcgcgcccatatccctcacactgctgcacggaagtgacaaaaaaaaaagtttccttgctgcgcgggtgacacagcgaccggtcacaagaacaaaaggctgcgcacacggcagtagagtgtggctgtg

SEQ ID NO: 6152 - DNA, 1056 bp, Zea mays
  Zm_smallRNAprecursor_1641
aaagacatttccagaaagaattaattctaatcggaataaattttgaattctatatgcaaatctgaattaaaaatgagatttgcttgaaggaaactccaactcagattcatagtctgaatgtttgataaaatagacaaaattcctctagaccagctttcccattgattgtaggaatgaaacctcaattagaaaaatgagactgaactttgattggagggaacacagcaaacacacgataacaagcgtgcgatgcactgcagccctatacgatataccaatatgtgtttcttaacaaaagaaaactctacctacactaccggaattcggctctttgccgagtgccggcggctttgccgagtgctttttatcgggcactcggcaaagtcgactttgccgagggccgctctcggcagagtcctgcgctcggtaaagatcttgtttaccgagtgcagggcactcggcacagccaagcactcggcaaagactgttttgccgagcgtcaagcactcggcaaacatggctctcggcaaagggccgttagcggccgtctacaactgacggccgtcagcctttgccgagtgtcaaatatctggcactcggcaaagagagtctttgccgagtgtcctatgtagacactcggcaaagcatatttttattttttttattttggtcaccaaactttttgtggtatgttcctacactatgtagacctacatgtaccattgtgggacgattataacagtgttttctatagctagtacatttagtttgtttatttgaatttcttcggaaaattcagatttgaactgcaagtccctcgagaaatggaaaacagtgaatgcaaaaatgatattcatgttatttagcacaagttacggcctatttcaggaacagactggaaattttgaacaccatgctcacgaaacatgatcgcgaacttgtgatcccgttgttttaaaattgtataaaatacaaacaaagtcagaaaatcatgaaaattgtcgacatgtcatgatatcatatgtagaggctatgataaaaatttgacactgtttc

SEQ ID NO: 6153 - DNA, 1038 bp, Zea mays
  Zm_smallRNAprecursor_1642
atggtatcccaaaggctcccttttcgatttacttggctattctgactcagattatgtcggttgcaaagtagatcgaaaaagcactactgggacttgccaattccttgggcgatccttagtatcatggagttccaagaaacaaaattgtgttgcactttccactgcagaagctgagtacatagcagctggggcatgttgtgcacagttgttatggatgaagcaaacccttagagattttggttgtgagtttaacaaaattccacttttgtgtgacaatgagagtgccataaaacttgcaaacaaccctgtgcaacactctagaactaaacatattgacatcagacaccatttcttgagagaccatgaagccaaaggagatatcgaattgtttcatgtgagcaccgaaaatcaactagccgatatcttcacaaaacccctcgatgagactaggttttgctttcttaggagtgaattaaatatcttggattctcgtaacttaacttgaaaacggtcacaaaaattgtttgattcactatttttgattgatagttttaaagctatgtgatgatctttcaaaaacttggtgaaaatgttaaaattcgaatgcattttagtgctaagattttttttcgggctcaactggcttgaccagctgaactttctagttcagctggaggaggccagctgaacttcagctcagctgtttttaaccagtttttaccaggaccatcctggttaaaaccggttgaaccggcatggtggaccggttgaaccggtctctgccccgtctgaccgcgcaggcctgttcacgcaggtctgtcagctgcagcagtgtcagacgcgcagttttttttaaccggtcacatcctgctggggcgcgcagcatttttgtgtccggtcgcttcacctctgccttgccagcgcgccagttttttttattttgttctgaccggtcatttcctctgctgggcgcgccattttttttgtttttttgtttgcgtgtcaggcgcgccacttttcccctgtccggtcacttcc

SEQ ID NO: 6154 - DNA, 1141 bp, Zea mays
  Zm_smallRNAprecursor_1643
acacccttcagcgtctgaggtttaccaaccctactctcactcctcgtcatcctggtgtccaggaccctcggttctggaatcttttccaggctgacttctacaattctgtcattctttccaagaaacacccagtcgtccgacatagatttattgactgggagggttgtgagaatatgggagatgctgacatgtcgtcggctctcgtaaacttagagagaaaggggttacgaaacattatgaccatggaatacccctggaacgatgaggtggtagctcagttctatgccaccctctggataaagaaagtagatgaggaagccgatgggtatgattacccagtcatgtatttcttcatccagggtaactggcacaaagtcagttatcgtcgttttgcccatattctgggcttctctgatgcagatattcagggcagcaacatgcgagtgcatggcattcggctgcccatgcgggaagagacggaattcattcatgtctctactgagcgggagttctggacaaccgctaacatgcataggtactacaggtaccttaattctttgtctcggatgaccgttctcccgaagggcggaaatcaaatgaacgtccttggggagagtcgagtcttcctcctcctccttgctccaaacagtctcgcccgcatcaatgtgtttgacatgatctgtgaagagatcgtccgtgcttcctggtctcctcacagagggtgtcttcatgcaccctttatcatgaagatgatcgaagtggtcacccagacccacttcgaaaaacccgtcaaacactcccgctacgtaccctactgggttgattcctccaacccagctgctcgtacgaagcgggctccctcacagtctggaggccctgcctcctccactgagccacctcgccagcctccccttcatccatcttcctctccccccgctgctgcctcgcgtccctctcctggccgcggatctcccatgccgcgtgctcgtggtcgtggtcgaggtcgtggccgcgggatgggtgctcgcttggtccatgggttggcggcatttttctccatgtgccgcaacatttatgctgatgtccatgaggtggcatggcgtcagcgggagactgacgccaatcttcgtcgtcaagcttc

SEQ ID NO: 6155 - DNA, 1112 bp, Zea mays
  Zm_smallRNAprecursor_1644
tgagaatatgggagatgctgacatgtcgtcggctctcgtaaacttagagagaaaggggttacgaaacattatgaccatggaatacccctggaacgatgaggtggtagctcagttctatgccaccctctggataaagaaagtagatgaggaagccgatgggtatgattacccagtcatgtatttcttcatccagggtaactggcacaaagtcagttatcgtcgttttgcccatattctgggcttctctgatgcagatattcagggcagcaacatgcgagtgcatggcattcggctgcccatgcgggaagagacggaattcattcatgtctctactgagcgggagttctggacaaccgctaacatgcataggtactacaggtaccttaattctttgtctcggatgaccgttctcccgaagggcggaaatcaaatgaacgtccttggggagagtcgagtcttcctcctcctccttgctccaaacagtctcgcccgcatcaatgtgtttgacatgatctgtgaagagatcgtccgtgcttcctggtctcctcacagagggtgtcttcatgcaccctttatcatgaagatgatcgaagtggtcacccagacccacttcgaaaaacccgtcaaacactcccgctacgtaccctactgggttgattcctccaacccagctgctcgtacgaagcgggctccctcacagtctggaggccctgcctcctccactgagccacctcgccagcctccccttcatccatcttcctctccccccgctgctgcctcgcgtccctctcctggccgcggatctcccatgccgcgtgctcgtggtcgtggtcgaggtcgtggccgcgggatgggtgctcgcttggtccatgggttggcggcatttttctccatgtgccgcaacatttatgctgatgtccatgaggtggcatggcgtcagcgggagactgacgccaatcttcgtcgtcaagcttcctccatgggcatgccttttgtccctcgttcgcctgatgtgcctctccatcctcctcccccggagatcaatgagtggcaccagcaggcctacgaggtgccttttatgtctgcagacgatgatgatgaagacgtctatg

SEQ ID NO: 6156 - DNA, 1189 bp, Zea mays
  Zm_smallRNAprecursor_1645
aagatacaatgtgtagtcttaggagttcatgttatcattttccatttcacaagagaacaaactcaaaagacaatgaaattcatctctatagagagataaaaaccaagcaatgccagcaataataacaaaaacaaagtcgtttagtctccagaagggcaggccagagttagaacccaccaagagccaccaatgaggataattaagtaaaatgaaaaaggccttaatgacgcaatcccatcgttgttcctcggccactcttgggttacgactcggatgtgcgccaccctcaggcctgggtgggcctttgcagagtggtagcttgacccggcccgttagtgataggaggacagggttcgggggtttctcgctcaggaccattgccacggccgtctattaatataatactgcgagggtggtcttaccctctccggccgaatcttaataacgctagtaacaataactgtactagttgtaaaaagagaggcaacgactgctatgcaagcagtccttctgtgcaagcgtgcaagcaaaccatctgatccattagatcgtgatccaaccgtaggtcacatttaacgcttaaacccttccaccaccagttcaataatctttataaaaaaaactaacaaaccatggttgtatctgtgattggatcgtaatctaatgggtcagatggtttgcttacacgcttgcacagaaggactgcttgcatagcagtcgttgccaaaaagagatggtagcatatgtcgtctttcgagtgtgtgcagtgcagtacaaagctaattcaaaaaccaaacttgtaccatgatttatttgcattacgataagagaactatctttctcaaataaactgcatgagaaagattctaaaatcaagagaactgtcaggaagtagaacaatataaatcatacagtaacatcgatgcactacacaagaggatttgtaatccctatatacgtgaacctccaacctaacaacacagtaagcactgtgcggaacagaacaagacggctgtacttagatccccttgccaattgtactcacagggattgcaatttacaagttagggctttacttagtcaagagaaaacagacagcaacaccctaggctaccaaatttgcaagcgcgcaggaaagtaaataaggaagaaaggatactctggatgctagcggctgagttgttgagcc

SEQ ID NO: 6157 - DNA, 1187 bp, Zea mays
  Zm_smallRNAprecursor_1646
agatacaatgtgtagtcttaggagttcatgttatcattttccatttcacaagagaacaaactcaaaagacaatgaaattcatctctatagagagataaaaaccaagcaatgccagcaataataacaaaaacaaagtcgtttagtctccagaagggcaggccagagttagaacccaccaagagccaccaatgaggataattaagtaaaatgaaaaaggccttaatgacgcaatcccatcgttgttcctcggccactcttgggttacgactcggatgtgcgccaccctcaggcctgggtgggcctttgcagagtggtagcttgacccggcccgttagtgataggaggacagggttcgggggtttctcgctcaggaccattgccacggccgtctattaatataatactgcgagggtggtcttaccctctccggccgaatcttaataacgctagtaacaataactgtactagttgtaaaaagagaggcaacgactgctatgcaagcagtccttctgtgcaagcgtgcaagcaaaccatctgatccattagatcgtgatccaaccgtaggtcacatttaacgcttaaacccttccaccaccagttcaataatctttataaaaaaaactaacaaaccatggttgtatctgtgattggatcgtaatctaatgggtcagatggtttgcttacacgcttgcacagaaggactgcttgcatagcagtcgttgccaaaaagagatggtagcatatgtcgtctttcgagtgtgtgcagtgcagtacaaagctaattcaaaaaccaaacttgtaccatgatttatttgcattacgataagagaactatctttctcaaataaactgcatgagaaagattctaaaatcaagagaactgtcaggaagtagaacaatataaatcatacagtaacatcgatgcactacacaagaggatttgtaatccctatatacgtgaacctccaacctaacaacacagtaagcactgtgcggaacagaacaagacggctgtacttagatccccttgccaattgtactcacagggattgcaatttacaagttagggctttacttagtcaagagaaaacagacagcaacaccctaggctaccaaatttgcaagcgcgcaggaaagtaaataaggaagaaaggatactctggatgctagcggctgagttgttgagc

SEQ ID NO: 6158 - DNA, 1188 bp, Zea mays
  Zm_smallRNAprecursor_1647
agatacaatgtgtagtcttaggagttcatgttatcattttccatttcacaagagaacaaactcaaaagacaatgaaattcatctctatagagagataaaaaccaagcaatgccagcaataataacaaaaacaaagtcgtttagtctccagaagggcaggccagagttagaacccaccaagagccaccaatgaggataattaagtaaaatgaaaaaggccttaatgacgcaatcccatcgttgttcctcggccactcttgggttacgactcggatgtgcgccaccctcaggcctgggtgggcctttgcagagtggtagcttgacccggcccgttagtgataggaggacagggttcgggggtttctcgctcaggaccattgccacggccgtctattaatataatactgcgagggtggtcttaccctctccggccgaatcttaataacgctagtaacaataactgtactagttgtaaaaagagaggcaacgactgctatgcaagcagtccttctgtgcaagcgtgcaagcaaaccatctgatccattagatcgtgatccaaccgtaggtcacatttaacgcttaaacccttccaccaccagttcaataatctttataaaaaaaactaacaaaccatggttgtatctgtgattggatcgtaatctaatgggtcagatggtttgcttacacgcttgcacagaaggactgcttgcatagcagtcgttgccaaaaagagatggtagcatatgtcgtctttcgagtgtgtgcagtgcagtacaaagctaattcaaaaaccaaacttgtaccatgatttatttgcattacgataagagaactatctttctcaaataaactgcatgagaaagattctaaaatcaagagaactgtcaggaagtagaacaatataaatcatacagtaacatcgatgcactacacaagaggatttgtaatccctatatacgtgaacctccaacctaacaacacagtaagcactgtgcggaacagaacaagacggctgtacttagatccccttgccaattgtactcacagggattgcaatttacaagttagggctttacttagtcaagagaaaacagacagcaacaccctaggctaccaaatttgcaagcgcgcaggaaagtaaataaggaagaaaggatactctggatgctagcggctgagttgttgagcc

SEQ ID NO: 6159 - DNA, 1185 bp, Zea mays
  Zm_smallRNAprecursor_1648
gatacaatgtgtagtcttaggagttcatgttatcattttccatttcacaagagaacaaactcaaaagacaatgaaattcatctctatagagagataaaaaccaagcaatgccagcaataataacaaaaacaaagtcgtttagtctccagaagggcaggccagagttagaacccaccaagagccaccaatgaggataattaagtaaaatgaaaaaggccttaatgacgcaatcccatcgttgttcctcggccactcttgggttacgactcggatgtgcgccaccctcaggcctgggtgggcctttgcagagtggtagcttgacccggcccgttagtgataggaggacagggttcgggggtttctcgctcaggaccattgccacggccgtctattaatataatactgcgagggtggtcttaccctctccggccgaatcttaataacgctagtaacaataactgtactagttgtaaaaagagaggcaacgactgctatgcaagcagtccttctgtgcaagcgtgcaagcaaaccatctgatccattagatcgtgatccaaccgtaggtcacatttaacgcttaaacccttccaccaccagttcaataatctttataaaaaaaactaacaaaccatggttgtatctgtgattggatcgtaatctaatgggtcagatggtttgcttacacgcttgcacagaaggactgcttgcatagcagtcgttgccaaaaagagatggtagcatatgtcgtctttcgagtgtgtgcagtgcagtacaaagctaattcaaaaaccaaacttgtaccatgatttatttgcattacgataagagaactatctttctcaaataaactgcatgagaaagattctaaaatcaagagaactgtcaggaagtagaacaatataaatcatacagtaacatcgatgcactacacaagaggatttgtaatccctatatacgtgaacctccaacctaacaacacagtaagcactgtgcggaacagaacaagacggctgtacttagatccccttgccaattgtactcacagggattgcaatttacaagttagggctttacttagtcaagagaaaacagacagcaacaccctaggctaccaaatttgcaagcgcgcaggaaagtaaataaggaagaaaggatactctggatgctagcggctgagttgttgag

SEQ ID NO: 6160 - DNA, 1186 bp, Zea mays
  Zm_smallRNAprecursor_1649
gatacaatgtgtagtcttaggagttcatgttatcattttccatttcacaagagaacaaactcaaaagacaatgaaattcatctctatagagagataaaaaccaagcaatgccagcaataataacaaaaacaaagtcgtttagtctccagaagggcaggccagagttagaacccaccaagagccaccaatgaggataattaagtaaaatgaaaaaggccttaatgacgcaatcccatcgttgttcctcggccactcttgggttacgactcggatgtgcgccaccctcaggcctgggtgggcctttgcagagtggtagcttgacccggcccgttagtgataggaggacagggttcgggggtttctcgctcaggaccattgccacggccgtctattaatataatactgcgagggtggtcttaccctctccggccgaatcttaataacgctagtaacaataactgtactagttgtaaaaagagaggcaacgactgctatgcaagcagtccttctgtgcaagcgtgcaagcaaaccatctgatccattagatcgtgatccaaccgtaggtcacatttaacgcttaaacccttccaccaccagttcaataatctttataaaaaaaactaacaaaccatggttgtatctgtgattggatcgtaatctaatgggtcagatggtttgcttacacgcttgcacagaaggactgcttgcatagcagtcgttgccaaaaagagatggtagcatatgtcgtctttcgagtgtgtgcagtgcagtacaaagctaattcaaaaaccaaacttgtaccatgatttatttgcattacgataagagaactatctttctcaaataaactgcatgagaaagattctaaaatcaagagaactgtcaggaagtagaacaatataaatcatacagtaacatcgatgcactacacaagaggatttgtaatccctatatacgtgaacctccaacctaacaacacagtaagcactgtgcggaacagaacaagacggctgtacttagatccccttgccaattgtactcacagggattgcaatttacaagttagggctttacttagtcaagagaaaacagacagcaacaccctaggctaccaaatttgcaagcgcgcaggaaagtaaataaggaagaaaggatactctggatgctagcggctgagttgttgagc

SEQ ID NO: 6161 - DNA, 1195 bp, Zea mays
  Zm_smallRNAprecursor_1650
agggagcagaggtgaacataaggatagttggtggtggaccgaggacgttcaaaaggcaataaaggagaaaaaagaatattacaggagcttgttcgatgacacgagtgcggtcaatatagagaagtataaggtggcaaagaagactgcagagcgagctgtaagtgaggcaaagggtcgagcctatgatgatctttatcgaagactaagtacaaaggaagacgaggaacctcaaccaagttaaatgcattaaggatgagatgagtcaactcttggtgaaaggacaagacatcaaacagaggtgacagaggtatttttacaatgttttcaatggtgagaatgagactatggacacccaattggatgactccttcgatgatttaaaaagatgctttgtatgcaggatccaagaatcagaggtcagagaagatttaaagaggatgaaagggggcaatgtgatgggcccagatggtatcccaatagaggtgtggaaatgtcttgggatattgctatcgtttggctaaccaagttgttcaaccatatttttcaatcaaacaagatgctcgatgagtggagtagtacattagtaccaatcttcaagaacaagggagatattcaaagttgtaccaactatcgagggattaagctcatgagccacactatgaagctatgggagagagttattgagcatcgcttgagaggaatgacgcatatcaccatgaaccaatttggattcatgtctggaaggtcaaccatggaagcaattttcttaataagacaagtcatggagcggtataagaagcagaacgacttgcatatggtttttatcgatttggaaaaggtctatgataaaatacctagaatcttatgtggtgggcattgaataagcataaagtcccaacaaagtatgtttcgctcatcaaggacatgtatgacaaggttgtgactagcgtccgaacaattgatggtgataaaaatgttttcccgattaacataggactacatcaaggttcagctttgagcccttatatatttgccttagtgatagatgaggtcacaagggatatacaaggagatatcccttggtgtatgtttttcgctggcgatgtagttctagaagatgaaagccgggaaggagtaaatagaaagctagagttatggcgtcagaccctagagtcaaggatttagaattagcagg

SEQ ID NO: 6162 - DNA, 1132 bp, Zea mays
  Zm_smallRNAprecursor_1651
tcttgtagatggttcgtactctccaaactacccgcatcaacaccagctacgcccctcagccccggcagatcccggtctacccagtggtagtcgaggaagttccggcggatctccctcccatccgagtggagaatgtagtcaacctgcaggacagctcggaggaacagctgccgaccccaccccgttggcagagtccctggcctttgcagctgggtcatcgacgtcagcaccagccttccaagcacctgcacccggaggcgacgaccccgacgactccagagacgacgatgacgaggattacgacgacgaagaaggagaagacgaacaagtccacggggaagctgactatgcccagcaggactacttcatggggtttggtcctgttgtcgaacattacacatcaatgttcgagacggggcacttccccaacctgctacaagaagtgctgcacgcgctaggcacctacgtccgccctttgtacgaaacaaggcgagtgagtgagcctccccgggcttgctactacatcactcgcatccacgttagggtgatggatgcaggtgacaggggattcaggactctgtctgctcacgagtccctgacaccactgtccacctacgctgcctcggtcagcgatgctgcccgtcggaccctgtggtcgctcagccacacctaccggcagcagttgtagaacacgagattcaggcatcttcctcaacgtctgagtggaggaagccagaccatcattgtcccacatgaagctggtgaggatcgcctcaacaccctagctggtgtagtggccggtctctacaccgacctggacagtgccaccctggatctctctagggtgcacttggaactggagaatgcccacgccaggattgcagccatggaagcccaactgcaaggactggatccacccgaacctcaggtccccgccatcgcattgtctcctcctcgcaagaggctgcgctatggagagcctggatccgtcactaggctgctttaggtgttttgagatatgatgtaataagttatgcttcgcgttagacgatgatactctttttaagtcatcatattaataaataccaaccatgtgatggtgattgattgaaatgtttgatttggatctttg

SEQ ID NO: 6163 - DNA, 1094 bp, Zea mays
  Zm_smallRNAprecursor_1652
cccactacatatgaagctgctatgagaagtgcaaattcatccaaatggttatcagccatggaagatgaattagaatccatgagaatgaacaaagtttgggacttagaagtcattccccatggagccaaaacagtaggctgtaaatgggtctacaagacaaagcgtgactccagagggaacatagaaagatacaaggctagacttgtggccaaagggttcacacagagagaaggcattgactaccatgaaaccttctcacctgtctcaacaaaagattcattcaggattataatggcactagttgctcattttgatctagagctccatcagatggatgtaaagacagcattcctaaatggagagttagaagaaaacgtgttcatggcacaaccaaagggttttgttgtgagcggtaaagaacacatgggatgtcacttgaggaggtccatttatggattaaaacaggcctccagacagtggtacatcaagtttgatcagactataagaaagtttggtttcgaggaaaacaaggaagacaattgcatttatgcaaaatttagaaaaggaaagtatatcttccttgttctgtatgtcgatgacatactcttagctagtagtgataaggatctactagcggaaacaaaagggtttctttcctcgaattttgatatgaaagacatgggagaagcctcttatgttcttggaatagaaattcacagagacagacaaaagggagtattaggactctcacagaagtcatatatagaaaatgtactaaagaggtataatatgcacaagtgtaatgcctcgcctggtccaatagttaagggtgataagtttggggaatatcagtgtcccaagaatcagtatgagaaaaacaagatgaagtcagcaccatatgcttcagctatcggaagcattatgtatgctcaagtatgtactcgccctgacttagcttttaccaccgggatgcttggacgctatcagaagaatccaggcatagaacactggaaagcagtcaagaaggctctaaggtaccttcaaggtactaaaggtctcatgcttacgtacagaagatctaattccctacaaat

SEQ ID NO: 6164 - DNA, 1065 bp, Zea mays
  Zm_smallRNAprecursor_1653
tgctcaataatgtataggaatgtgttgctgcagggtggatgggaggacgacgagagcatcgacgaagctgccagcagggaggccttcgaggaagcaggcgtcaagggcattatcagcgtgggtgccttcacctaactactccatcttgacgtggcaatgtttatcatgattataattatgattatgattattattattattactattattattattattattattactactactactacatacctcctagtatataaggtgtaattattttttattttaatgtcttaatataaagcatgctttctctagacatacatatagcgatatagtagtgtagagaaaattaaatatattttttattctttgaactagatgttgttacctcttatatactggatggactgatggagtgagcatattattacgacaccatatcttatgagcaaggagccctgctgctcccatgagcaaaatcaatccagaccacaccctccatatccaacggtgctgcgtcaggggggtttttgtaaaatgtacagagttacaaagaacattttacaaaaccccctgacacagcaccgttggatgtggagggtgtggtctggattgattttgctcatgggagcaccaacgctccttgcgcacaagatacgttctctattattacaagcagcggctggccggtggtggtggattggagtataatatgtattttatctatgcttgcatcacacatgatagggagtccgttggctctagtgccgtggcatgtttgggtttttatttgctgttgcctttttagagtatgagatttttttataagaaaaaattcattgcatcaagataatcataagtcacaactttttttaatagagcatgagataatgagacagtagggtaggatgtttcctagtcattttcatgcgcatcattttggtatgtgatggacgcgatagaacggtcagttttaagtggctagcacctaaaaaagaacctctcaagtgctcttctagctcatagctcacggtgcattaatagattggatgtttctcgttcgattctttg

SEQ ID NO: 6165 - DNA, 1056 bp, Zea mays
  Zm_smallRNAprecursor_1654
gccccaacgaacgccgtgaaggcgaggtcgtggttgccgcagaggaagacatggcgctgcgctgggtagcgcgtcgggagcgcgaggaggaagttgaggaccctgcgggtgtgcgggccgcggtcgttgtagtcgccgaggaagatgaccagcgcggtggccaaggcgtcggcggggagtgcggcctagaggttggaccagaggctctccagcttcgtgatgtagctgtggacgtcgcccacacagatcaccgcgaggggtggcggcggggcacgcgcggcgggcgcgctggaggcgggcaggtagcggcgggcgcgcggctagcagctagctgcgggcgctcgcggtatacagagggaaagaagagagacgcgcagcggcgagagatttaggtctttgggttaagttccactgtgcccatgtggcccacgaatttaatttaaaaacgtgggtaccgacgtttctaatacgataagttcgacggttttaccacaggcccacgaatttaatttaagaacgtgggtacccacgttcttaaattaactcacgaacataacctaattaagaacgtcggtacccacgttcttaaattaacccacgaacgtttattagtttcttgtagtgaaactttatttatcctccatgcacctccgggcaaacaagaaccttctttttgcaagcatgcatgactgcttttcaagtagcttacatgtagcctaatcatatctcgcgcaggtgtttgataaataagtagctagacgtgtaaaacactttcttattattactcagccgcaaaagcactagttttcgtcctggtcctggctaccggtggcagcatgcagcacaattgtctcgactgtaagtccgggtccgacccccgacatgactccaaactggcagtccttttccttggtgtcttcctcacggcggcggcgatggcgtatctcgtcgagaacaaatatgatcgtggagcccatcatgttgccgtactcactcaggacgtgccggctggccgcaagcttcccgggctgcagaccgagcgtagcctcgtagctg

SEQ ID NO: 6166 - DNA, 1056 bp, Zea mays
  Zm_smallRNAprecursor_1655
tttagtagcgtacgttctcattcctcaatcccatagattcggggacctggttccttagaccctcctatgtatctctcttacagctggattacctatattgattagagataatctttttcttatatacaatatttagtcaatttcagttttagtctatagaattaaacatgttttttaagatgatgactaaagaaaccaaagatgacgtgtgcccctcgttattccaacacaggattaatcaaccatgtgtttcctagaataaatgcctgcactcctagcatgccgtaggtgtagcatgcaggccagactatcactaccggaattcggctctttgccgagtgccggcggctttgccgagtactttttatcgggcactcggcaaagtcgactttgccgagggccgctctcggcagagtcctgcgctcggtaaagatcttgtttaccgagtgcagggcactcggcacagccaagcactcggcaaagactgttttgccgagcgtcaagcactcggcaaacatggctctcggcaaagggccgttagcggccgtctacaactgacggccgtcagcctttgccgagtgtcaaatatctggcactcggcaaagagagtctttgccgagtgtcctatgtagacactcggcaaagcatatttttatttttttattttggtcaccaaactttttgtggtatgttcctacactatgtagacctacatgtaccattgtgggacgattataacagtgttttctatagctagtacatttagtttgtttatttgaatttcttcggaaaaattcagatttgaactgcaggtcactcgaaaacttggaaaaaccgtgcatgcaaaaatgatatccatactacttagcacaagttacgaccgatttcaggagcggaccagaaacttcgagcaacatgctcactcaacatgaccgtaaactttccatctaggtgtttaaaaaattgtataaaacagaaacaaagtcagaaaatcatgaaacctgtccacgtgtcatgatatcatatgtagaggctgtgataaaaatttgaaaaagt

SEQ ID NO: 6167 - DNA, 1062 bp, Zea mays
  Zm_smallRNAprecursor_1656
tgcagactctgctctagcactctgcaggctctgaaactctgcgtctcatggccaagattagttcaccgtatcgatcactgctgacctttcgaccttgaatgcagacgctagctgtcgtgcaagtaagtaggttgacttgccagaggttcaggttctggctctccagtcgagcctaacctttctgtttacttgattctgtagtgtgtgcgtgtatctccaataaatcctaaacttcgcgtgaacttcgactccgccctgatggaatattaggtactcagcagctatcgcgttctctatctcatttttatttgaaactttataaatctactactttatatatgacctgctacgaacagttttacaatcatcggcggaccaaattcaaccgaggtagtcacatctctcatgagtcatcctccaaccattcctccaactccttatgtatattttctaatctattttactatatctaataagggctagtttggaagtcacaaaacggaggagatgggagtggctaaaatcccttctttatataattttgaataaagaagggattttagctccttcaatcccctccggtatttggactcccaaactagctctcaaaaatttttctctaaatataggacgtcctcaactatttctcccaaaaagtattcatacgcactacactataactcagttaattagtatttatttattgttttttcttaaaattttcaaaaatatacaatatttgtgttatcatactacacattattataatgttgtggggcttaaaataaaacttatatagtaaagaaatgacatatttaaagtatacgaggagcatggtactcccctgtatatatgtatatatatacaggagattcgtccaccgtacatatagggactctttgtatgtttggtccgagaagctttgccatagatagatggaatcaggccagcaggggactgtcttcggtagagcgtgtatatgatcgttcaaaacattattttacactgtagactatactgtttgcagagcgaagtttgaaacagaggcagtttagtcgagat

SEQ ID NO: 6168 - DNA, 1149 bp, Zea mays
  Zm_smallRNAprecursor_1657
cttacagcgaaaagtcaacgctgattccgccgaaattaaaaggcgaagaagctccaaagtcgttcctaagggaatgcagagcttacagcgaaaagtcaacgctgatttcgccaaaagtaaaaggcgaagaagctccaaagtcgttcctaagggaatgcagagttgatgtgtgattgtttctaaggaaataatggctgtgagtatggcttcggatatgtgtttggacattcatttgcacatcacattacatcatagcatttgcattcataaacattcatctaggcatatgtaggataatcatcatcatggcataagtggttgcttcggcaaaaagaaaaaaagaagagcttcttcgtgtacaaaaaggagagcttcggaagaaagggaaatgttgttttctatgcttcgctgtgtacgaaaagaagggaaggtgttttttttcgtcttcggctcaaaaagataatttcatccacatcaaagcacctctcatacattaatggaaggataagagcatattacaaggtatgaacaaaattcattaaagacaagtttagttacatttacaaaagttatctcaaaagtttcttgagtctgtctacattctactcctatttaatcttcaagggacttcagcttcggcgtcattcttaaccatcggcttcggcttcgtcatcctacatgaattaagttgttgtaagtaaaaaatcgagcttgaaggaagaggtaagcacaaggtatgacttcttactagttcaagatgactccgagcttcgtctccagctttttctcgcccgccttttgtccatatcatctttacaaatctattggaaatacttcgggcgagatcaggaatgtcatctaggattgatggtgataaagtgaaattgggcctattgacaatctttccatgatcgcagccagcttttaggaaagctgcagcagtgccccgagaagctacccaggcacagaagtcaccgtgcccggctataacttcgtcaagctcatcaatttcaccctcaatatgttcgaaggtctttggtaaatcttcagctgacggggtgaatttatcactgctggttccaactgagtggaaaatttttcttagccgttgaatacatttgttgctaaattccaaacatttttcttgaa

SEQ ID NO: 6169 - DNA, 1126 bp, Zea mays
  Zm_smallRNAprecursor_1658
gacttccattttcgaatcagtacccatagggttaaacaagccaaaattgcgaggacgaagtggtggaaacacaaaggggatacatccaaagtttttagggaaagagtttttgtgaagggcgcttggtccgaagaagaagatacaaacaacatgtgggtaaagatggcaacttgtattaggaaggtggcgttagaggtgtttggagtgaccaaagggagcagcggtgaatctaaggatacttggtggtggaccgaggatgttcaaaaggcaataaaggagaagaaagaatgttacaggatcttgttccatgacagaaacacgatcaacatagagaggtataaggtggcaaagaagactacaaagcgagctgtttgtgaggcaaagggtcgagcctatgatgatctttaccgaagactaagtacaaaggggagaaagatgtctataagatagctaggattcaagaaaggaagacgagtgacctcaaccaagttaaatgcattaaggatgagatggatcaactcttggtgaaaggacaagacatcaaatagaggtggtagaggtattttgacaatcttttcaatggtgagaatgagactatggacatccaattggatgactcctttgatgatttaaatagatgctttgtacgcaggatccatgaatcagaggtcaaagaagctttgaagaggatggaagggggcaaggcgatgggcccagatggtatcccgacagaggtgtggaaatgccttggggatatcgctatcgtttggctaaccaagttgttcaaccatatttttcaatcaaacaagatgtccgatgagtggaggaggagtacattagtaccaatcttcaagaacaagggagatattcaaagttgtaccaactatcaagggattaagctcatgagccccactatgaagctatgggagagagttattgagcatcgcctgagaggaatgacacaaatcaccattgtgacggaggccaaggtgtagcctgcagctcagcggacagaggagaagcatcatcaaaaacaaaattcccatgatggaaattgtcataccagtcatcttcattgggaaaaccctcctgatgaaggtcttggtgctgaggccttcggtgttgt

SEQ ID NO: 6170 - DNA, 1061 bp, Zea mays
  Zm_smallRNAprecursor_1659
ttctaattttttctatcttcttctttatgcaagagcaatcattctaaaaattggtagctttttgcttaagggaaaggtggtaggaatttcttgaactaaatggcctttttcatgaagtattggcaatgggtattaacctaataaaaaatttatttgctcactgttgcacactttttggcttgcttatgatttaattgaaatatggcttaatatcaagttctatttatttaccctactaaaaatgatggactggggtgtttatcattttttgtagtggtattttagtggttacaagtccactggatttttcttaacaattttaaaattgttttcataattctaataattgtttttctagtttgatttgcttaataaaacatttcaccaagaatttgttctggactagggttccctttatttttcctaggttctctattaccgtcggccgctttctagccgacggggataaccttatccccgacaagggacgcctgtcagcctgaaaccgacgggaataagccttaaaacgacgggaattacttattcccgtcggtttagggcttattcccgtcggtttcaggccgacgggaattaagtgaattcctgtagtgactttagtagactaggaaaaataattgcattcactgttcattattttccagtgccttttttattttcctaagttttgggcaaatatgtcttttaataagtaaccttgtctaaatctttaatactggggtgcttactatttttaaacagtgcctaagtggggtttacacttctacaatttttcttaggttcaacacagaagcataactaatttttcttattttaataaggtttggtcagtttctttaatcaatttcaagctctaaaatttaaaacagaaagcatagggttcaataattttatgtgatagttcataatattttgaatcaagcaaaattggtttggctaaatttggtggaatatttctcaagatatgaaatttttaagtcttctgctgaatttaaaaagattaattagaaatggataaagaaaaaggggttttgcactggggt

SEQ ID NO: 6171 - DNA, 1040 bp, Zea mays
  Zm_smallRNAprecursor_1660
catgctgctgaagaagacaacagcgccaggggctgccctacagccactggagacaaatcaggagacactctccctgcgagaagctaggagccagaaaagaaatgctacaagcccaacacctcaggaggagttggatcagaagatccgggacttagaggccattcatcaacaagtacaaaggaagaaagaaaagatgctttggctagccgaccttcagaagaagatcaacgaagcagtcaaggaaatgtgtcacctcactcaggatgaccaatatcgaaggccccaacacagggagctccgtcaagagagcccaatcaatgatgatgaatgatacaacgattttcatcatggtaactttgctttcaatgatgctcctcctttattttaggaattttgggaacatttcaacaaaggagatctttcacagatcaaacgagacctaagacttaatctaaaagaaattattagattgaatctatttgcattaaaaaaaccgatcaaaaaaggacgagcgaagtaagtaatcgaaaaactttcttctttgttcgtcctatctataagaggagagcatatgaaaaatgtaacacattcttttgtttttttagctcactggccattcgctgggagtttcgggcttaataccgatattttagcaacaaatctattccccctacatatttgatttcttctcctatacaaaaactagcaagacctactccattggtaattccatcaatgacacctttatcaaaaaatgtgttagttcggctaatcttcttatacctaggataaaaaccctagtatagaaaaaatctatataaccacgattatatgaccagttgtatatcttttttttacttcatccaaaaagctcttttttggattcttttttacaagggagttttgaaaattcaaattctaaaaaaaagaataagcagatccataaaatatatagaatagaagaatctcgatttgtcaagtctcatgatcgtatcaagatctatttcaattcggctcagtctttttttagaaaagattga

SEQ ID NO: 6172 - DNA, 1035 bp, Zea mays
  Zm_smallRNAprecursor_1661
tgctgctgaagaagacaacagcgccaggggctgccctacagccactggagacaaatcaggagacactctccctgcgagaagctaggagccagaaaagaaatgctacaagcccaacacctcaggaggagttggatcagaagatccgggacttagaggccattcatcaacaagtacaaaggaagaaagaaaagatgctttggctagccgaccttcagaagaagatcaacgaagcagtcaaggaaatgtgtcacctcactcaggatgaccaatatcgaaggccccaacacagggagctccgtcaagagagcccaatcaatgatgatgaatgatacaacgattttcatcatggtaactttgctttcaatgatgctcctcctttattttaggaattttgggaacatttcaacaaaggagatctttcacagatcaaacgagacctaagacttaatctaaaagaaattattagattgaatctatttgcattaaaaaaaccgatcaaaaaaggacgagcgaagtaagtaatcgaaaaactttcttctttgttcgtcctatctataagaggagagcatatgaaaaatgtaacacattcttttgtttttttagctcactggccattcgctgggagtttcgggcttaataccgatattttagcaacaaatctattccccctacatatttgatttcttctcctatacaaaaactagcaagacctactccattggtaattccatcaatgacacctttatcaaaaaatgtgttagttcggctaatcttcttatacctaggataaaaaccctagtatagaaaaaatctatataaccacgattatatgaccagttgtatatcttttttttacttcatccaaaaagctcttttttggattcttttttacaagggagttttgaaaattcaaattctaaaaaaaagaataagcagatccataaaatatatagaatagaagaatctcgatttgtcaagtctcatgatcgtatcaagatctatttcaattcggctcagtctttttttagaaaagat

SEQ ID NO: 6173 - DNA, 1177 bp, Zea mays
  Zm_smallRNAprecursor_1662
attgctactgcaaatgcaaacatttttatatgtcagcatactacacacaatatatgtaatgcatatagttagttttgtttgtagggaaaaattttaaatttggtgtatacatgtcgtgtatgtgtccaattatttgactcttggatgtgtgatgagctaagtggggttatatttagggtctttggcacagtaggtcacttactatagaatactactacgagagcctcgttgacgatatgaacccacgtgctcatccacccaatatccacgttccatctggggtgaaagcatgcaaaatactgtatcaaacacgcatgtatgtagaggccatgcataaaagaacacaatttatttatatcttatccattgatgaatgatggaatcaggtaaatttttagaaacgtgaacttactgtttcatggtatgatgtgtgtcccagccgacaaacaccatcccgacatacatggagcccaccgcgaagacgaaatggaaaaagccatacccatatggtacgtcgtcttctgactctacaatgttccacaactgcatgaaatgtttgaggcattttcagttaataaaacacacacgtacgttcctcagttttgttgatagttatgactaatctcttcgtgtgaataattaacatacctgcatgcatttgtagtcgctgcctgtggaaaaagtagaataaacggtgccgagcagtccaaaaacaaaacactgccaatgtttttttaaatatcagtgacggtactagataagaaccattgatcctagatcaaaatatatacttacggaaattgttatctaaatagcatgtggacctgctttgtgtttctggtagcagctcgactcgggctcactgctagggtgaaatatatgtcacaacaaagagggaaattaaaccaacaaaataaagttatatatataaggagagagagaagtattttaccttgtaatcgctaacaggcacaggaacaaaatatacccaccaattagcccaggctccataaataatttattcgcctaatcatttaaaattcatcagtattttgctcgaacatggcttaatttatctaatagctctaagtgtgtatatatatattctaggagtatttacttaattatcttagacattaatgagagcacacacataatgtacagtagcagcagcgtg

SEQ ID NO: 6174 - DNA, 1057 bp, Zea mays
  Zm_smallRNAprecursor_1663
cttataccaatcccttcaatgccatcagattttatagcttcccttcaatgccatcaaatttaaattttaatcccttaaatgccattgccgttagtttcaagttaacgccgttagttatatttaaagcaaatccctccaatgccatcaaaatctatactgatcccttcaatgccactagaaattggttcgatctatttgagttttaaaattttcagaatagaaaattttttgaacccaaaaattttgaaacgcaaatataccacattgattttaaaatttatctccatctgttatcattagtgtttgttgttaatttgaaaaaaatattaggaatcaaatagaccgaacagatatagcggagtaatttttggtgtttacaaaaaaatattactaaagtttttaaaaagtgtggaattggtccatatttttttattttagaatttttaaaatctaaatagatcaaaccaatttctagtggcattgaagggattgatatagattttgatggcattgaagagatttgctttaaatagaactaacggcgttaacttgaaactaacggcaatggcatttaagggattagaatttaaatttgatggtattgaaggaaagctataaaatttgatggcattgaagagattagtataagtttggatggcattgaagagattttctctttattcttacctgtctacagaacactggtaaacttcttccagtcttaacagaaaaaaagaagggatcgcaatttgtgatccaatctaagagcgagcaagagggaaggggtggcaagcacatgcgcaccagatgaaggacgtgtcttcgccaaattacgtcacgcatggacagtggccaacgctccatgaaattttaggtaggacaaccctataaagataaattattagataaaaaatagtttcatgataataatatggatgttaagtgataatgccaggaatgttccaaaatgatatagatatcggaaatacatttttgatgcacctaattgccaataaaaatccaatgtacaattggaaaaattgtgtattagataaac

SEQ ID NO: 6175 - DNA, 1065 bp, Zea mays
  Zm_smallRNAprecursor_1664
aatttaaattttaatcccttaaatgccattgccgttagtttcaagttaacgccgttagttatatttaaagcaaatccctccaatgccatcaaaatctatactgatcccttcaatgccactagaaattggttcgatctatttgagttttaaaattttcagaatagaaaattttttgaacccaaaaattttgaaacgcaaatataccacattgattttaaaatttatctccatctgttatcattagtgtttgttgttaatttgaaaaaaatattaggaatcaaatagaccgaacagatatagcggagtaatttttggtgtttacaaaaaaatattactaaagtttttaaaaagtgtggaattggtccatatttttttattttagaatttttaaaatctaaatagatcaaaccaatttctagtggcattgaagggattgatatagattttgatggcattgaagagatttgctttaaatagaactaacggcgttaacttgaaactaacggcaatggcatttaagggattagaatttaaatttgatggtattgaaggaaagctataaaatttgatggcattgaagagattagtataagtttggatggcattgaagagattttctctttattcttacctgtctacagaacactggtaaacttcttccagtcttaacagaaaaaaagaagggatcgcaatttgtgatccaatctaagagcgagcaagagggaaggggtggcaagcacatgcgcaccagatgaaggacgtgtcttcgccaaattacgtcacgcatggacagtggccaacgctccatgaaattttaggtaggacaaccctataaagataaattattagataaaaaatagtttcatgataataatatggatgttaagtgataatgccaggaatgttccaaaatgatatagatatcggaaatacatttttgatgcacctaattgccaataaaaatccaatgtacaattggaaaaattgtgtattagataaacaccaatacaaggaaagtatattgctaaaaattatgtagccaataaatcgctaagttgccaatct

SEQ ID NO: 6176 - DNA, 1126 bp, Zea mays
  Zm_smallRNAprecursor_1665
ggaggccatacatcgaggcagatgtgggcgatctaagagtggagttgagtgactctccactcatgtgaaagaattgacgacggtgtagtgtgaactcaccgatgctcccaagatgtttgagctggggtctcaaggacaaccatcatcgatgatggctcaatggggatcaccagtgttcattctgatcgctgagaatgatgaatctagcacgaaaacaaatgaccgaggtgctggttttagggtagtccataccctaacaccacctccagtcaatggtaacaagctcccttagcaatttagcttctctactgtaacaccctgaatttgggggtataaaatttattctctaatatccaccaaattcaagtattacgtctcttctcctctctccccatttcttttttttctctttccgataataggaaggggagaaaaatgtctataggatagctaggattcaggaaagtaagacgagggacctcaaccaagttaaatgcattaaggatgagatggatcaactcttagtgaaaggacaagacataaaacagaggtggcagaggtattttgataatcttttcaatggtgagaatgagactatggacatccaattggatgactccttcgatgatttaaatagatgctttgttcgcaggatccaagaatcagatgtcaaacccgagtatatgagatgtgactttggtactataattagtgaggatggagatgtaagtttgggacaccaggtagtaccaaaggacaccttccgttatttgggatcgatgctacagagagatggtgatattgatgaagatgttagccatataatcaaagtggggtagatgaaatggcgtcaagcattgggagtcaagttctacaggatagtgaaagtcgcctagaggggggtggataggcggaatctgaaatttacaaacttaaacacacactacaagccgaggttagcgttagaattaaatccgagtccgaaagagagggaaaacaaatcaaccaagaaataaaacggatgaacacggtgatttgttttaccgaggttcgattccaaagaacctagtccccgttgaggtggtcacaaagaccgggtctctttcaaccctttccctctctcaaa

SEQ ID NO: 6177 - DNA, 1127 bp, Zea mays
  Zm_smallRNAprecursor_1666
cgtccaacacgaggaggaggaggaggaggctaccaccgccccacagacgacagagagcatgggcatgaagcggcaccggttccacttccaccaccaccacgacgaggacgaggagaagaatatggcggcgaggaagcggctccgccacgctgatgagcacgacgaggacagcgacgacgaggaggatgagcaaatggaagagatggtccggcggttcaggaaggcgatcatgaggaggagattcggccacggccacggccatggacgccgttcccgcttcttccaccacatcgtccaccgccacgccgaggaggccaagaagcaggcagatgttgaagaagaggagagcggtgtcctggcctggatcaagggcctcatgaaccggttctagagctgcctcattcgagcgatccgtccactcacagtcacagccatggctgcttgcctttttactatgagaacgtatcttgtgcgcaaggagcgttggtgctcccatgagcaaaatcaatccagaccacatcctccacatccaacggtgttgtgtcaggggggttttgtaaaatgttctttgcaactctgtacattttacaaaaaccccctgacgcaacaccgttggatgtggagggtgtggtctggattgattttgctcatgggagcagcagagctccttgctcataagatacggtgtcttttactatttgccatcggccatcccgcgtgcatactgcagtgtcttggcacggctgaatttacttggtgttattagtgtgtttctatccacggtgtgtcgtcttatatacgcacttgtattgctaagggctagtttgagagtcataaaaccgaaggggattgtaggagcacaaatacttttcttattaattttaaataagaaggggattttcttcactccaatttcctccggtattttagctcccaaactgctagccctaagagttccaaaaccatctcctctcaactctgatgctagatgtttgttttgcctgccactaccactgtgttatctggttggttcagcaccatatgtggcacctaaaaaggtcatacggtctgcaccatggacggtccgcgtgctatcccggtgcacggtccgcgtgctaccctggact

SEQ ID NO: 6178 - DNA, 1117 bp, Zea mays
  Zm_smallRNAprecursor_1667
aacacgaggaggaggaggaggaggctaccaccgccccacagacgacagagagcatgggcatgaagcggcaccggttccacttccaccaccaccacgacgaggacgaggagaagaatatggcggcgaggaagcggctccgccacgctgatgagcacgacgaggacagcgacgacgaggaggatgagcaaatggaagagatggtccggcggttcaggaaggcgatcatgaggaggagattcggccacggccacggccatggacgccgttcccgcttcttccaccacatcgtccaccgccacgccgaggaggccaagaagcaggcagatgttgaagaagaggagagcggtgtcctggcctggatcaagggcctcatgaaccggttctagagctgcctcattcgagcgatccgtccactcacagtcacagccatggctgcttgcctttttactatgagaacgtatcttgtgcgcaaggagcgttggtgctcccatgagcaaaatcaatccagaccacatcctccacatccaacggtgttgtgtcaggggggttttgtaaaatgttctttgcaactctgtacattttacaaaaaccccctgacgcaacaccgttggatgtggagggtgtggtctggattgattttgctcatgggagcagcagagctccttgctcataagatacggtgtcttttactatttgccatcggccatcccgcgtgcatactgcagtgtcttggcacggctgaatttacttggtgttattagtgtgtttctatccacggtgtgtcgtcttatatacgcacttgtattgctaagggctagtttgagagtcataaaaccgaaggggattgtaggagcacaaatacttttcttattaattttaaataagaaggggattttcttcactccaatttcctccggtattttagctcccaaactgctagccctaagagttccaaaaccatctcctctcaactctgatgctagatgtttgttttgcctgccactaccactgtgttatctggttggttcagcaccatatgtggcacctaaaaaggtcatacggtctgcaccatggacggtccgcgtgctatcccggtgcacggtccgcgtgctaccct

SEQ ID NO: 6179 - DNA, 1069 bp, Zea mays
  Zm_smallRNAprecursor_1668
ctaccaccgccccacagacgacagagagcatgggcatgaagcggcaccggttccacttccaccaccaccacgacgaggacgaggagaagaatatggcggcgaggaagcggctccgccacgctgatgagcacgacgaggacagcgacgacgaggaggatgagcaaatggaagagatggtccggcggttcaggaaggcgatcatgaggaggagattcggccacggccacggccatggacgccgttcccgcttcttccaccacatcgtccaccgccacgccgaggaggccaagaagcaggcagatgttgaagaagaggagagcggtgtcctggcctggatcaagggcctcatgaaccggttctagagctgcctcattcgagcgatccgtccactcacagtcacagccatggctgcttgcctttttactatgagaacgtatcttgtgcgcaaggagcgttggtgctcccatgagcaaaatcaatccagaccacatcctccacatccaacggtgttgtgtcaggggggttttgtaaaatgttctttgcaactctgtacattttacaaaaaccccctgacgcaacaccgttggatgtggagggtgtggtctggattgattttgctcatgggagcagcagagctccttgctcataagatacggtgtcttttactatttgccatcggccatcccgcgtgcatactgcagtgtcttggcacggctgaatttacttggtgttattagtgtgtttctatccacggtgtgtcgtcttatatacgcacttgtattgctaagggctagtttgagagtcataaaaccgaaggggattgtaggagcacaaatacttttcttattaattttaaataagaaggggattttcttcactccaatttcctccggtattttagctcccaaactgctagccctaagagttccaaaaccatctcctctcaactctgatgctagatgtttgttttgcctgccactaccactgtgttatctggttggttcagcaccatatgtggcacctaaaaaggtcatacggtctgcaccatggacggtccgcgtgctatccc

SEQ ID NO: 6180 - DNA, 1059 bp, Zea mays
  Zm_smallRNAprecursor_1669
tcttgcgcgcatgctataaaaggcggagatctcggtgccggtggaaaaaaaaaaccctaaaacattctactcctgtatcccagccgccacaaacagccagccggccgccaggatttctccttgcgttcctgcatggctgcatggccactaacagactgccggccgccaggagctatccatgcatttctgcatgggcctcatggccgagctatgctcaagtgccgcctctggtttccctttttttttttttaattttcttctccccagccgctgctccactcggccgccagggagcatcacgcttgtttctttctctgattctttgtctgagcagccgctagagcacagagctactggccgaacgtgcccgagtacggccgttcctgcgcgttgcatgctcctatctctctcttttttttttctttctttcactgtttactgattttggagattactaacgcacggttggcttcaatgcaccggagatggccggcctgagccgcctcgcatccccatcccgccgacgtgcgcgtcccttcgggtgggcgcgccgtcgtcggatgggtgctgcgcggtggtcgaggcccagtccgacgagttaagaactgcggcactgttagccgtcgcctgcgaacctctctctccccaggatctatcctcaactcgatccctcaagtgattttgtaacgggatcgagttttggaggtaaagaatcatagatctgggtcccgcgatatttctgttattttctgtgatgattttagtgcatctgtacacttttgattcacgtggtttttgaaaaaaattagggttctaaccctagcttcgttctgtacgacttttttctgatctgttcttgaccgtttattaaaaaaaatcacgagtacctgtttacaggtgtaccgattagggttaggtcataaatcctaaccctagacagttatgtgacctctctctggtttgaggctgagacacactgtgtctcttacagtggtcaaacctaaatctctagggttagggaaaaccctaacctgagagcatcgacttctttctgttcta

SEQ ID NO: 6181 - DNA, 1079 bp, Zea mays
  Zm_smallRNAprecursor_1670
gacaatttaagcaatggtgtcgagaaggccatataggctctaaacagtcgcagcgatatactctttcttcagaacccgaccttgacttcgttcctctccttttggatagctcactagtgtcctgatccgtttgcagaccatacttttgctccaaaactataaaagcattggtgtttggaagctccataagtggctcactctttgaaaacttggacactggaggatcagtgatggggaaactagcctggcgataaatagacttttgccagtgcaagatagagtctttcagatccttctcccttggatcaatgtcccttagccagtcaacaagacacttcatttcttcatcagattcataaataacaagtgatgccgaattccaacctctatcgaatgttgactgagaatggcttgtaaccatgctaatgtctctgtccttgggtatcatcatgcttccatctgcaacaagacgaggacgcttacaaggtcttcctgtaacccagtacaatcgaccaacagaatccctacccaggcactctcctctcaaggatgccatactaagctgtgactctactgtgctaattgaaccatgcaactgtgaaatcctctccaataaattatttgattcgttcatatcagcatcatggtcaaccagtttagatgtcgatgtttcaatattatcttgggacaatgtcatagcattttcatcaggtaaatctccatttggtgcattgataactgtagcagcatgagtctctcccacattcggatcacaagtaccacttttgccaactaatgatttctcgcaactattggatccttcggcaatagagtcccgatcagtctggtcagtaattatctttgatggttgttctgaaagccccaaagatttatttccttcaataacagatgtgctggatatgccattgtcagtactgcaaggtttacccacatccaatagtgcagcaggaaccccttcagcagggttgttcaggttaactccaacattaacctgttcagcctcttcaagatgctctgaggctgtgggcatagcacgctgctgattctccacgagtcct

SEQ ID NO: 6182 - DNA, 1098 bp, Zea mays
  Zm_smallRNAprecursor_1671
atgtataaaagagtcttaatagtacagtaaaaatatagtgcagagcacatccatggactgatgaaagcatccctaattattgattggcaaaagacttggaaaatatctacaaaagaaaaaaaatgttccgctagaggatgagttctgatatgtttatgccctgaagcttgagtgccaatatgatctcacaaatgcaaaatcttcaacaacttaaaataactttaagaggatatatttgcatgttcacccacttcctttatctgggatgaaggaatacaaaaacttctaagtaaatgatagacaaaatacatgaaaacccttcaaagagtgacgaactgataacttcacttcaattcaaagacagagatgagagcagacctctgctacggttagctcccagtactctttctcatccatcgcaacagctaacttgttgagtttctcaataaaaacatgagcttcctccccaaggcacttcttttgttcttgcactgcaacatgagtttgggcagtacatgatggacaataccagtttccaagcggtatgcgtgccagtggtgggttcaggcaataagtgtggtattcagagtcacaattatcacatagaagaacgctctcgtcatcacggtcgattccacagactttgcagacaccatcctcccatggtgctttcggcagtttattgtttgctgccgtgagagcatcttgtagctcctggtggatttctgagctatcattttcattgcttagatatctgtcaaatttctcaacaaggtcttgtacctgcaccagtcaagtaaacgatgtacaagaagattcagtaagaaactcatgatcatactacttaataaacagaaatttcacactaagaccaatgcataaagctggtatctaaacaataccactgagaaatatagattgatattttagagtgcgagtgctaaaatagaacaaaaggaactctatggagtttgttaacaatttgcaatcacttcaaagaactaagagaaggttcttatgaatatagtaagctaaaatgtaaaatcacacatccctgaacataaaatgcaagatcctacagggacagacagaaataac

SEQ ID NO: 6183 - DNA, 1134 bp, Zea mays
  Zm_smallRNAprecursor_1672
cctccacttggtgctgcgccttaggggaggcatgcagatctttgtcaagaccttgactggcaagacaatcacccttgaggtggagtcctcagacaccattgacaatgtcaaggcaaagatccaggacaaggagggcatcccacctgaccagcaacgtctcatctttgccggcaagcagttggaggatgggaggacccttgctgactacaacatccagaaggagagcaccctccacttggtgctgcgtcttaggggtggtatgcagatctttgtgaaaacccttactggcaagaccatcactcttgaggtggagtcttcagataccattgacaatgtcaaggccaagatccaggacaaggagggcatcccgccggaccagcagcgtcttatctttgccggcaagcagctggaggatggacgcacccttgcggattacaacattcagaaggagagcaccctccacctggtgctgcgcctcaggggaggaatgcagatcttcgtgaagacattgactggcaagaccatcaccttggaggttgagagctccgacaccattgataatgtgaaggccaagatccaggacaaggagggtatccccccggaccagcagcggctgatcttcgccggcaagcagctggaggatggtcgcaccttggctgactacaacatccagaaggagagcaccctccatctggtgctccgcctgaggggcggtatgcagatctttgtgaagaccttgactggcaagaccataaccctggaggttgagagctctgacaccatcgacaacgtgaaggctaagatccaggacaaggaggggattcccccagaccagcagcgtctgatcttcgccggcaagcagctggaggatggtcgcacccttgcagactacaatatccagaaggagagcaccctccacctggtgctccgtcttcgcggtggttattaagccatcagtcgttgaagctgctgctgtatctgggttatctagtgtctctgccattgcccatggatggtgctgtctttcaaagtatttgtatggtttgtgtcgtgagtcgtgactgagctggtttcatggaccagttgtgttctcgttacccaaaactatcgtgcgaccgcatatggcttaatcat

SEQ ID NO: 6184 - DNA, 1096 bp, Zea mays
  Zm_smallRNAprecursor_1673
ggcatccctccggaccagcagcggctcatttttgccggcaagcagctcgaggacgggcgcacgcttgccgactacaacattcagaaggagagcaccctccacttggtgctgcgtctcaggggtggcatgcagatcttcgtgaagacacttactggcaagacgatcacccttgaggtggagtcctcggacaccatcgacaatgtcaaggccaagatccaggacaaggagggcattccaccggaccagcagcggctcatctttgctggcaagcagctggaggatggccgtacccttgcagattacaacatccagaaggagagcaccctccacttggtgctgcgtctcaggggtggcatgcagatcttcgtgaagactcttactggcaagacgatcacccttgaggtggagtcctcagacaccattgacaacgtcaaggccaagatccaggacaaggagggcattccaccggaccagcagcggctgatcttcgccggcaagcagctggaggatggtcgcaccttggctgactacaacatccagaaggagagcaccctccacttggtgctccgcctcaggggtggcatgcagatctttgtgaagacattgactggcaagaccatcaccttggaggtggagtcgtctgacacaatcgataatgtcaaagccaagatccaggacaaggagggcattccaccggaccagcagcgcctgatctttgctggcaagcagctggaggatggccgtaccctcgccgactacaacatccagaaggagagcaccctccacctggtgctccgcttgcgaggtggtatgcagatctttgtgaagaccttgactggcaagaccataaccctggaggttgagagctccgacaccatcgacaacgtgaaggcgaagatccaggacaaagagggcatccccccagaccagcagcgtctgatcttcgccggcaagcagctggaggatggccgcaccctagcagactacaacatccagaaggagagcactctccacctggtgctccgcctccgcggtggtcagtaagccatggttcatttaagctgctgctgtacctgggtatctgcgtcgtctggtg

SEQ ID NO: 6185 - DNA, 1102 bp, Zea mays
  Zm_smallRNAprecursor_1674
tcccatcttaatgaaaagcacataattacctaactagtttgagaaataaagattatataattcatgccacgacaagaagtagagatggcaatttaacccgtaaactcgaaattcgacggctacccaacccgacggttgcgggtatgagtgaagattttgatccacgggtgcaaccctcacgtgacccaaagtttcgcgggtttctatttcaacccgcgggtgacccgcacccgacccaaaatttagtttattcattattttttgtgcaatcatgattaaaatataatagtaattattttcaataagtgacttagccaatgattcatgaagtgttttgttgtttctcaacgtgataagacttaaaatccatagatataactaaattattgcttgtatttaattgcttgtagttgaattgttgtttaaaaatgtataataaataaaacccgcgggtgactcgaaatccgacgagtttgggtgggtttacatagacttagggcttgtttgggagcaagtggaatgaagggtattgataggactataatcccttgctatctaaaattgaatagtggaggattatatgccctccaatccactccattacctttactcccaaacaagcccttagggtgtgatcgcagacgagtttttgctctatccaatccgaacttgacccattgacatccctaacaagaagtaaactagaaacattgatacatccaggagcatgattgtcctcgttaagatcattagtgattattgatgatttctcaagatttacatagattttttttgaatgacaagaataattccttcaacaatttcgaggtatttgcaaagagagccaaaaacgagtttgatactaaaataaaaaatgacatcagaagtgtaagagttggtgaatattgtaatggacatgaaatcaagtgtaaattctcgggcaagtatccatcagataaaatggtttggttgataagaaataagacttccattgatatagtaggattcatatctttgcaatataataatttttttggtctaaacttaaagtaaaagtatccacgatgaatatgatattctagattttttgtggatttaaatt

SEQ ID NO: 6186 - DNA, 1064 bp, Zea mays
  Zm_smallRNAprecursor_1675
gcgacgtcgtcacgggtgagtgagtactgtagtactacagacgactacagagtctgaagaaggtgcctcgttgtcgttgtcgttcttgcgcgtggcgtgatggtcgtcaacgctgccgcctgtaaagttgccgctttgtggacgtctctgtgtgtgtgtttgtctctcaggcggcttcgagaagtttcgcgcggggtgacgatgatccgcccgctcacgggcgagcagtacgcggggaaagtggcggagaactgcgtggcgtactggaaggcggccggcctgtacacggacgccgagggcgtcgccgtggagaagttcaagcaggtgttcaagccccatacgttcccgccgggagcctccatccacttcacgcactcgcccgccggagtcctcaccgtgagttcagttcatttccgtgcgacgaaatgagaacgtatcttgtgcgcaaggagcgttggtgctcccatgagcaaaatcaatccagaccacaccctccacatccaacggtgctgtgtcagggggttttgtaaaatgttctttgcaactctgtacattttacaaaaaccccctgacgcagcaccgttggatgtggagggtgtggtctggattgattctgctcatgggagcagtagggctccttgctcataagatacggtgtccgacgaaataggatggtgacacgtacgtactcagtactcacgctgctgttctgctccgatccgctccatccaggtcgccttctccagggactcgtcggtgccggttgccggcggcgtggcgatcgacaacaagcttctctgcgaggccgtgctggagtccatcatcggggagcacggcgtgtcgccggccgcgaagctgagcctcgcggcgagggtgtcggagctcctgaccaaagggaccgccgcagccgcagccgcgctgcgggcggagcccgtctcggttaccgcctgagcggtccagcgaaccgcgaggagaaagagaaccgatcaagcaatcacgtctgccgcccttgcgtgctcctgctccgaacagatgccacgacggacggtgacgctgtcgcgtct

SEQ ID NO: 6187 - DNA, 1070 bp, Zea mays
  Zm_smallRNAprecursor_1676
aatacatgaacataacacatcagatgtgaaaggcattttcctatatttaatcatgtatttttctaattattatttgcaacagaaaataatgaattaagatacataagacatgttttattctatttattatttacaacataaaataaatagaataaataacatgcaacatgtattcaaatttaaacttgtgtaaattcagcagcaatttcttcatacgtgggaaaaacaacataaaaagggtttcttatttttatttctcagccactaatgtggccttgtgcgtcccactcgagcagcccctttttctcggctacaggctaggcctacagcctgtgtggtcatgcaactgagcaagcgctcgcctagagggcagaggctagagtagccccatttcatggtcaggaacgcgtcagcgctggcccctttaatctcactcgctttgaccgatgtgaatgagggcaaaaaaaattgagaaaatttctggtatgccatcagattttatactcatcccttgtgtgccactgagtggcatataggtatattttttggtgtctatgacatgtggggtcagtggcatacaaggaatgagtatattttccagtggcatacagggaattggcccaaaaaaattcaactgctccacgtatacaccggtcctttctttcactcgccaactgctttgaccaggaacggaacccatagaccacgcacgtccttcacggctccgccaaacgcgggcttggcagcatcatcgtgggcgagcgcgaggactaccgttgccgtggttgggtgcgcacaaggcgagccgccgcgggagatggccacacaaggtcgaatgacacacacgcgggacgaggctgttggctgcgaccgcgcgagggagcgtgtcaggcatcctcgttggtgcgatgcgtgctttgaaggtgcaagaggccgccgaccgcgtggatcagcggccttcgtgggtggtgctctttggggttggcgctagccacaacaggggcaggggcagcgagcggacgtcatggttggcaccaccgcagcaggaggcgtacttcaccgcgaataaa

SEQ ID NO: 6188 - DNA, 1032 bp, Zea mays
  Zm_smallRNAprecursor_1677
ctcctctaggggacgagacctagataccagcgagaaggaagacgaccatgcgccaccgcggatcgtccggtgtgacacaagaaatgcgtcgcttctgcctacatctttagtgattggcgctacccaaatgagcgccaacaattagataatcacgattgtgaaaagtggtgttgaacaaaaaaacaaataaataagaaagaatcaaagtttaaaagagcatattcgatattgaaaagaaaaatgaaaatgtgtcaacaaaagaaaaggaatattgaaaaggaaaatgaaagtgttgttggtaaaaaaacaaagaaataaggaaataatcaaatttactaaaaagaaagaaatatgaaaaaatgtgaagttttaaaaacaaatatgaaaagaagcaaagtttagaaaactaatttataaatatttaaaaggaaaatgaaagtgctgttggtaaaaaaagaaatataagtatataaaaaactaacgcgccaggtaggggtcgaacctacggccttctgcttaggaaacagacgctctatccactgagctacaggcgcttagttgttatttatattggtgtttctttattgtaatgtatgtccgtggtccctgtcagctcaagctcatcgacctgtctgctatcgtcgccgccgacgagttggcggcgcgtgaatacaaggaccaggagaaccagttcgtccggatgaggcggaagagctacacgaagttcatcgccagttggagcctctctccgtcgacgcatctgctgctgttcacttcgccagccgagcacacgtcaacctcctctccggcaaccaccgacgggcccttacgacgccgagcagaccatccgcctctctccctccctccagcatcaaggattcaaggtaaccgctcgttcttgtgtacgttttggatccggcgaaggagcctgctggcacgtgtcgtgagatgttcttgtagttaggcgtactaccgagcagtgaaggcgtcgcttgagacttgagagacgcagcatccttctaccgaaaggcg

SEQ ID NO: 6189 - DNA, 1066 bp, Zea mays
  Zm_smallRNAprecursor_1678
actgaaactgtttataagcgtggagtatttttactactgaatggttttgcatcccaacgagatataaattcccgtttgagaaaatggataatcctagatgtttaaaactgattcatctattgttttcagaagtcatttttttaaacgaaagatgctgtgcatgcgattttgagcgcttggttcatgcagtggaacagattttgtgaacgcttagttcacgcagtggcatggaaccaagagcttttactgacccttcgcttgaagaaatccataacgaagagctgaggcatatgaggtaggtacatacctaatcaatcgattgatcggttgttgaaacgagttctgtccgtgttcttgtgaactctccagcatatagatcctgatgcaggcaacagatcagacagttcttgcttgtgcgaataatcatcagcttctccatgaaatagggacgacatcgatcagtgaggcaagcaagctagctaggtacgggacaggcaacgggagatattgacgcggctcaatccaagaacatggctgccgcgccaatctatcagccacgccttcggattgaggcgcgccaatacctccgcccttgtcctagcaccaacgagctagccgaagcatgccgtcgtcgtccccttcgtcatttccttcccttccatgccaaaagcaaaagcaaatcacaagaaagcatctctgaaggatcactcgaaagtgagctctagcaaaatacagccggtagaaaaagcaaacaagaaagtacctagaaaagagagagatgtgtgttggggtggggggcgagagggagttgaaggcagatgcattgctgtgtggatggatacctaaccctggtacctttctcccagagaaaacgatatttggggattatataaccagaagtgtggccgggtgggtgtcttctactgtaggaggagctacctcttctggcttctgcttccctcgctcatgatgcaactttttctgaatctctgggctcctaaaaggcagcagaaattgagtgacaggacgatacaatcgagagaaatgttaagaggacgcgacgcca

SEQ ID NO: 6190 - DNA, 1063 bp, Zea mays
  Zm_smallRNAprecursor_1679
acttcagcgccgtagcgcctggtatgagcctcgtggagaagcaatggctagtccacggggctcatacttcagcgctgcagcgcttggtactcggacctcggctcgaggcattttctctaccccttcttaccctgaaaaagcagggtcaccttgtgtccttaaacctataaccatctttcggctaacctagcctcctccgtccctccgtaccaacaaggggtagtacaggaatattgacctgttgtccatcgactacgcctttcggcctgatcttaggccctgactcaccctccgtggacgaaccttgcggaggaaaccttgggttttcggggcattggattctcaccaatgttttcgttactcaagccgacattctcgcttccgcttcgtcgacccccgctttcgcgtttgcttccctctaaggcggaacgctcccctaccgatgcattttgacatcccacagcttcggcagatcgcttagccccgttcatcttcagcgcaagggcgctcgatcagtgagctattacgcactctttaaagggtggctgcttctaggcaaacctcctggctgtctttgcacccccacctcctttatcactgagcggtcatttaggggccttagctggtgatccgggctgtttccctctcgacgatgaagcttatcccccatcgtctcactggccgaccttgacccctgttatttttgggtcatatctagtattcagagtttgcctcgatttggtaccgctcgcgcagcccgcaccgaaacagtgctttacccctagatgtccagtcaactgctgcgcctcaacgcatttcggggagaaccagctagctctgggttcgagtggcatttcacccctaaccacaactcatccgctgattcttcaacatcagtcggttcggacctctgcttagtttcatccaagcttcatcctggtcatggatagatcacccaggttcgggtccataagcagtgacaatcgccctatgaagactcgctttcgctacggctccggtgggttccattcccttaaccaagccactgcctatgagtcgccgg

SEQ ID NO: 6191 - DNA, 1081 bp, Zea mays
  Zm_smallRNAprecursor_1680
gctttgtgaatgccatgttcttggaaacaatctgagcaccgtaccagcaaagccatatgctgcaaacaaagagagacaacggagaggaggaaaaaaaatgaacacgaagaagaagaagccgagagagagaaagcgaagattctcccaatcaagaggtaatgatgggaactttcatcacctgctgcatgcctgccagatgcacagagatgcacagagaaaggaggggtcaaaaggcaggccatcattacaccaatcttgcgctgctcctcgatttcgcagcaagcaagcaagcaaacaaacaaacaaaaaagcacagtggagtagtagtaaagatccaggagcggaagtacggtgctccacaccatgcatactactaagaacggccaggaatctcacgaacactcaaacaaatatttcaaaaaaaaaactagaacaaatttatacactagctagtagctctcctaactctccgcgatatcatttttgaagctatttctgaggggaatgaagcctggtccgagatcttgcagatccaaggaatacttagaagctctacacagatggatcacaaagcaaaagaccttgaaccagacaacattccactcagaagcaaatagcttcacatctttctccatctccctcgggcccttggctctcccggccccggccccctctagctcatctctatttctttgcaagaaggtgcgtgagggagcatgggtatgtatagacgggaagcgcacaggcgtggcgtggtccatgggctgagcgcatggtcatgatatgtgaaatgattaccgctgctaaattttgaagtcaccaaaaaataacaataaaaaaagatggtagctcgcacattccatacgtttaccaaaccagcactgtatccagccactgactggtggtggagccgaccgaggctggagcccgcatgtcaattacacaggacacacgtaaaagctatatgtatatatatatgcattgaaaggaccagaggcaggcagaaccacatggcaaagaaataaacaggcataaatgcatgaatgaatggtgacaaagaacactgcggcagagggccgga

SEQ ID NO: 6192 - DNA, 1081 bp, Zea mays; identical to SEQ ID NO: 6191
  Zm_smallRNAprecursor_1681

SEQ ID NO: 6193 - DNA, 1080 bp, Zea mays
  Zm_smallRNAprecursor_1682
ctttgtgaatgccatgttcttggaaacaatctgagcaccgtaccagcaaagccatatgctgcaaacaaagagagacaacggagaggaggaaaaaaaatgaacacgaagaagaagaagccgagagagagaaagcgaagattctcccaatcaagaggtaatgatgggaactttcatcacctgctgcatgcctgccagatgcacagagatgcacagagaaaggaggggtcaaaaggcaggccatcattacaccaatcttgcgctgctcctcgatttcgcagcaagcaagcaagcaaacaaacaaacaaaaaagcacagtggagtagtagtaaagatccaggagcggaagtacggtgctccacaccatgcatactactaagaacggccaggaatctcacgaacactcaaacaaatatttcaaaaaaaaaactagaacaaatttatacactagctagtagctctcctaactctccgcgatatcatttttgaagctatttctgaggggaatgaagcctggtccgagatcttgcagatccaaggaatacttagaagctctacacagatggatcacaaagcaaaagaccttgaaccagacaacattccactcagaagcaaatagcttcacatctttctccatctccctcgggcccttggctctcccggccccggccccctctagctcatctctatttctttgcaagaaggtgcgtgagggagcatgggtatgtatagacgggaagcgcacaggcgtggcgtggtccatgggctgagcgcatggtcatgatatgtgaaatgattaccgctgctaaattttgaagtcaccaaaaaataacaataaaaaaagatggtagctcgcacattccatacgtttaccaaaccagcactgtatccagccactgactggtggtggagccgaccgaggctggagcccgcatgtcaattacacaggacacacgtaaaagctatatgtatatatatatgcattgaaaggaccagaggcaggcagaaccacatggcaaagaaataaacaggcataaatgcatgaatgaatggtgacaaagaacactgcggcagagggccgga

SEQ ID NO: 6194 - DNA, 1080 bp, Zea mays; identical to SEQ ID NO: 6193
  Zm_smallRNAprecursor_1683

SEQ ID NO: 6195 - DNA, 1097 bp, Zea mays
  Zm_smallRNAprecursor_1684
gcgcagaaatatattttttttcttctctgactgctgccactctgcgtccagtcacttccctggcgcgcggcgcgccattttttttgtttttcgtcgttttctgcagggctcagcagcgtcctgtctcttcccctgcagcgcgcgcagggctcctttttttttgcatgaagacgcgctcctgaccggtcacttcctccctgtggcgcgcagtgtactttttttgagaccttttcccctgtgcagtcacttcccccgtgccgcgcgcgcagaatttttgtccttttggctttgcatgaagacatgcgagtggagaatcttttatttggtcaacagcaggggtgcgcatgcagattttcttggacatttctgctctgcccgcgcactagccgtgcatgcgtgtcaggggcgcccatttttttctgtccggtcacttccagcagctgcgcgcaaatttgaatttttctttcttccctctgttgtttctggttctctgaccacactggtcagaaccagctgaactggcccatgggggcggttgaactggtcctgaggaccagctcaactgcctatatatacttgactctccccttctcttctcccacttcattcactctcgccttggtcgcttcacaacctttagagcctctccttcacacacttcaaaccgcttcacagtttcaccaccttttcaatcatggtgcgtcgtcgcaacccctctgtggttgagtttagcagcgactccgacgagattcaggaggaatctcccgtcccctctcctccgcctcgtcgctccctctctaagagaggacgtggctctggtcggatgcctggcgagggctcttccatgccctcgcagccgactcgcgggagacgccaaaaggttggcgcttctcgtcctcgtcgtagcacgtcttcctcagggtatgctccctgccaagaggaggatggggctttcgacgacttcgtcgaccttccagcgcctgatgctctctacatcaccggactgcacatgcatccggcgaacgtcagtcgcggtccgcatgaatctcccgtcgacttcactcagaagggaatagaaacccttcagcgtctgaggt

SEQ ID NO: 6196 - DNA, 1063 bp, Zea mays
  Zm_smallRNAprecursor_1685
aaaagacttgcgcactgccgattccagtggccgcaaatggtcgtagagacaaaaaccaaaacaaacaaaaggtggacaaccactagcttagctcagatcggtgatcaaatggactacatctagcagacaacgggtggtttcctatggatacgacggaaaccaaacaaatcaacacagattcagcggcaagaggcggctaggctctcatgtaagcaaaagaaaagtagatgtgtttttaggataaaaaatgggcgaactgtaaactctctctcaatttcgtgatgtcgattgatggagctttgaaagaggattggaactcacctgccttctccaaaccagtcctaaattctaaccctgcagaagcaattcgaacccaagacaagcatacagatgcatgtaacagcatgaaataagtgcatcatcatctcgggaaaaaaaacacgatacagatatattcaacagatcagaggatagagaggaagtgatcatggcctgttatgcatgcttggctccttgcacgccacccacagcatccaatcacgccacgggttggctacatgtgtggcatacagggagccaggcacacacgacacgagccgatcgatcgaccaaacctgctagcttaatattgctatcatggcgtcccacggtggacgaggacgaataatccatagaagagccagctcggtgatggagtagatcgatcagctagcgtcagaacggccgggctgccagcagagacgacgcatatgcatgcttgaagtggaaagaggcatgagcaaatcttggccatgatatgagcacgcaccaagagaaggaagaggagccggcctggaagagctgctaaagtcttgtgagcggctaaggtaggggagaacagtggaagagtgaggtagaagaaagggggagaagatggattttatagagggggaaggggacggcgtgcctgctctctccttttgttgtcactaccagttactcctcctacgactcaacggttatctatgtacctgagtattttgtttacttatttattgtagatcataaagacacatgcaagaaa

SEQ ID NO: 6197 - DNA, 1043 bp, Zea mays
  Zm_smallRNAprecursor_1686
gagagataaaaatggcaacacacgtccatcctccacgaacacgatatatatttcttaccggccggacgagcttcgcgcatttgcgttttcactctgcgctgtgcggggaagacagagcgagcgttgaggcggcgaagaaattgctcagcttcggctaggcgctgcccgcacaggtaaaaaaattactgccatgaagcaagagggaaaaaaagcaggagtaatttatataataatcctgcattccaaatagtatacttaatgagttaattaaaaaaatgagttattcaaaagataaaaaaaatctaggcgagaaataaatttaagcggacacaccaacgacataaacaaaaaaaaaacaaaaaaatgcaaactatggggcttgaacccacgaccacatagttagaagccttgtgctctaccaagtgggctagatgggctttgtgctcatgtctgcaacaaatattttaataacacaacttagctcggcgccaagatctgtggcgccgagctcggttccacgtcgacgccacgcgtctgggttgtgccaacgcaacacgacctcggcgccatagcctatggcgccgagctgtgttagctcggcgccatagcctatggcgccgagcaaagggtccaaaactgcatttaaaatttttttaggtctaaacgtgattttacttctgtttaagggctaaaatacaaaaaattcggtctactggcctcattctggctaggcgtgccgccggaccaggctagccgacggggcgctagccgatggcgcttctgctgggctggccgcctggatgcttgggcgctggacgtggccgcctatggccagtgccacattgctcgaatgcgggaggcggtgagtgtgaggcgtaggtgaagggtgtagggggtggctggttgggacgggatgtgatgcgatctgacgtatagattttctcggtttatttgctagactgggcacacattttttgtatggcgcaggccacagtaggccaaaacacgggcaggccatagtgggccctctaccaccgacgaga

SEQ ID NO: 6198 - DNA, 1044 bp, Zea mays
  Zm_smallRNAprecursor_1687
gagagataaaaatggcaacacacgtccatcctccacgaacacgatatatatttcttaccggccggacgagcttcgcgcatttgcgttttcactctgcgctgtgcggggaagacagagcgagcgttgaggcggcgaagaaattgctcagcttcggctaggcgctgcccgcacaggtaaaaaaattactgccatgaagcaagagggaaaaaaagcaggagtaatttatataataatcctgcattccaaatagtatacttaatgagttaattaaaaaaatgagttattcaaaagataaaaaaaatctaggcgagaaataaatttaagcggacacaccaacgacataaacaaaaaaaaaacaaaaaaatgcaaactatggggcttgaacccacgaccacatagttagaagccttgtgctctaccaagtgggctagatgggctttgtgctcatgtctgcaacaaatattttaataacacaacttagctcggcgccaagatctgtggcgccgagctcggttccacgtcgacgccacgcgtctgggttgtgccaacgcaacacgacctcggcgccatagcctatggcgccgagctgtgttagctcggcgccatagcctatggcgccgagcaaagggtccaaaactgcatttaaaatttttttaggtctaaacgtgattttacttctgtttaagggctaaaatacaaaaaattcggtctactggcctcattctggctaggcgtgccgccggaccaggctagccgacggggcgctagccgatggcgcttctgctgggctggccgcctggatgcttgggcgctggacgtggccgcctatggccagtgccacattgctcgaatgcgggaggcggtgagtgtgaggcgtaggtgaagggtgtagggggtggctggttgggacgggatgtgatgcgatctgacgtatagattttctcggtttatttgctagactgggcacacattttttgtatggcgcaggccacagtaggccaaaacacgggcaggccatagtgggccctctaccaccgacgagag

SEQ ID NO: 6199 - DNA, 1041 bp, Zea mays
  Zm_smallRNAprecursor_1688
gagataaaaatggcaacacacgtccatcctccacgaacacgatatatatttcttaccggccggacgagcttcgcgcatttgcgttttcactctgcgctgtgcggggaagacagagcgagcgttgaggcggcgaagaaattgctcagcttcggctaggcgctgcccgcacaggtaaaaaaattactgccatgaagcaagagggaaaaaaagcaggagtaatttatataataatcctgcattccaaatagtatacttaatgagttaattaaaaaaatgagttattcaaaagataaaaaaaatctaggcgagaaataaatttaagcggacacaccaacgacataaacaaaaaaaaaacaaaaaaatgcaaactatggggcttgaacccacgaccacatagttagaagccttgtgctctaccaagtgggctagatgggctttgtgctcatgtctgcaacaaatattttaataacacaacttagctcggcgccaagatctgtggcgccgagctcggttccacgtcgacgccacgcgtctgggttgtgccaacgcaacacgacctcggcgccatagcctatggcgccgagctgtgttagctcggcgccatagcctatggcgccgagcaaagggtccaaaactgcatttaaaatttttttaggtctaaacgtgattttacttctgtttaagggctaaaatacaaaaaattcggtctactggcctcattctggctaggcgtgccgccggaccaggctagccgacggggcgctagccgatggcgcttctgctgggctggccgcctggatgcttgggcgctggacgtggccgcctatggccagtgccacattgctcgaatgcgggaggcggtgagtgtgaggcgtaggtgaagggtgtagggggtggctggttgggacgggatgtgatgcgatctgacgtatagattttctcggtttatttgctagactgggcacacattttttgtatggcgcaggccacagtaggccaaaacacgggcaggccatagtgggccctctaccaccgacgaga

SEQ ID NO: 6200 - DNA, 1042 bp, Zea mays
  Zm_smallRNAprecursor_1689
gagataaaaatggcaacacacgtccatcctccacgaacacgatatatatttcttaccggccggacgagcttcgcgcatttgcgttttcactctgcgctgtgcggggaagacagagcgagcgttgaggcggcgaagaaattgctcagcttcggctaggcgctgcccgcacaggtaaaaaaattactgccatgaagcaagagggaaaaaaagcaggagtaatttatataataatcctgcattccaaatagtatacttaatgagttaattaaaaaaatgagttattcaaaagataaaaaaaatctaggcgagaaataaatttaagcggacacaccaacgacataaacaaaaaaaaaacaaaaaaatgcaaactatggggcttgaacccacgaccacatagttagaagccttgtgctctaccaagtgggctagatgggctttgtgctcatgtctgcaacaaatattttaataacacaacttagctcggcgccaagatctgtggcgccgagctcggttccacgtcgacgccacgcgtctgggttgtgccaacgcaacacgacctcggcgccatagcctatggcgccgagctgtgttagctcggcgccatagcctatggcgccgagcaaagggtccaaaactgcatttaaaatttttttaggtctaaacgtgattttacttctgtttaagggctaaaatacaaaaaattcggtctactggcctcattctggctaggcgtgccgccggaccaggctagccgacggggcgctagccgatggcgcttctgctgggctggccgcctggatgcttgggcgctggacgtggccgcctatggccagtgccacattgctcgaatgcgggaggcggtgagtgtgaggcgtaggtgaagggtgtagggggtggctggttgggacgggatgtgatgcgatctgacgtatagattttctcggtttatttgctagactgggcacacattttttgtatggcgcaggccacagtaggccaaaacacgggcaggccatagtgggccctctaccaccgacgagag

SEQ ID NO: 6201 - DNA, 1101 bp, Zea mays
  Zm_smallRNAprecursor_1690
agataaaaatggcaacacacgtccatcctccacgaacacgatatatatttcttaccggccggacgagcttcgcgcatttgcgttttcactctgcgctgtgcggggaagacagagcgagcgttgaggcggcgaagaaattgctcagcttcggctaggcgctgcccgcacaggtaaaaaaattactgccatgaagcaagagggaaaaaaagcaggagtaatttatataataatcctgcattccaaatagtatacttaatgagttaattaaaaaaatgagttattcaaaagataaaaaaaatctaggcgagaaataaatttaagcggacacaccaacgacataaacaaaaaaaaaacaaaaaaatgcaaactatggggcttgaacccacgaccacatagttagaagccttgtgctctaccaagtgggctagatgggctttgtgctcatgtctgcaacaaatattttaataacacaacttagctcggcgccaagatctgtggcgccgagctcggttccacgtcgacgccacgcgtctgggttgtgccaacgcaacacgacctcggcgccatagcctatggcgccgagctgtgttagctcggcgccatagcctatggcgccgagcaaagggtccaaaactgcatttaaaatttttttaggtctaaacgtgattttacttctgtttaagggctaaaatacaaaaaattcggtctactggcctcattctggctaggcgtgccgccggaccaggctagccgacggggcgctagccgatggcgcttctgctgggctggccgcctggatgcttgggcgctggacgtggccgcctatggccagtgccacattgctcgaatgcgggaggcggtgagtgtgaggcgtaggtgaagggtgtagggggtggctggttgggacgggatgtgatgcgatctgacgtatagattttctcggtttatttgctagactgggcacacattttttgtatggcgcaggccacagtaggccaaaacacgggcaggccatagtgggccctctaccaccgacgagaggacagagataggaaaaaaaatgaaacgatggtcgaggcaccgttaccttaaaaatatttt

SEQ ID NO: 6202 - DNA, 1091 bp, Zea mays
  Zm_smallRNAprecursor_1691
cctgacaagtccctctgcaaatgatgcacatgtttaggggagatgagctacaacttgactcctttgagactaacctgtttgttttagtacacttgaagtagtctctaaagaacattgaaagggaaagtgaacttggacaaggaaagagcttccactgcattctggtaaaatgtatcttgtcctaagttcctttttttgttctcattgtcttttcgcttcaatttgacattttggtgaagcaatggggttaaagggccaacagtgatcttgttttggtgattaatgccaaaggtggagaaaattaaggccaaagcaaatggatcagccaaccacttgtgaatttcggaaatagccgagttagaatttgcatttcgtcaaaaatgctctgaatgcaaaatttggtctcttatggggtagaattttgattatggtaaaagggggagtttttggcacttgataaattttaggggtttttaaattggtgctcttagttttggtggtgtgctcacctatacccttagtcgtgttttattctcagttgtgcccttctgttctatagcactggaatggcacaactgagcaaaaaacacgactaagagtataggtgagcacaccaccaaaactgagggcacgaatttaaaaaccttaaattttactcttggaatatctctctatttgcccaaacaaatgtgttggacttagagataggaaaaagaatttgatttgcaaaaacaaacaaagtgtcggcgtttcgaccccgggggggtccctggaccgatgagtaaattgtcgccgcgtgccccagcccagatgggtcggcgcgagacggagcgcgaaggggggaagaccagagggagacaggcgtaaaggggaaacccgcggccttcgtgtttgtcccgcgcccaggtcgggtgcacttgcaattgggggttacaagcgtccgcgtgggagagagcaagaggcttatgctcgccgtcccgttcccccgcgcggccaaccttctcgtacgagtgccctgggccttccttttataggcgtaaggagagggcccaggtgtataataggagatgtagcagtgtgctaacgtgtct

SEQ ID NO: 6203 - DNA, 1134 bp, Zea mays
  Zm_smallRNAprecursor_1692
aagtgctatggcctatgtggattttgaaatgtgtgacaatgatgagaattatatatcgattcagagcaacaatttgtttgaagaagatggtgatgaagaacaaggcatgaacgctttccgtgacaacattgcaaatgcgttattcatcatgagaggggtgacaagttggagatactatttgtgtttataaagtagttcattttgtatcgctacgagacaagtttctatacatttttataaacaactatacattttcagaatggctgttttatgtttgaaaaaatgaggttgagatgggcagctgaaatgaacgactgtacaactgaaattgaatattgattagataaaaaatggctgaaatatattgagcggatgtacacatgaattaacggctgcttcagctaacctgaaatactagattgaccttttagctataatccaaacagtaccaaactaggcaacaactgttgtgcaagcaatccttctgtgcaagcgtgcaagcaaaccatctgatccgttagatcgtgatccaaccacagatacaactatagtttgttaggggtttttataaagattattgagctagtggtgaaagggtttaagtgttaaatgtgacctacggttggatcacgatctaacggatcagatggtttacttgcacgcttgtacagaaagactgcttgcacagcagtcgttgccaccaaactaatagttagcagttaatagttatccaactatttttgttagcaacttattagctagctaatcattagctctagcgcattcaaacaccccctacatcctactgctacctgttcaaattagcctttctttttttctaccagcgttttggcagaaactggacgattgatttgaggctatccacactcatagaaccctaaatttatattataaaagaaatatttcattctgatcagcgagattctctaccatattctataatattctgtggtcatattcattctaagtatctaccctacaccaactatcatatattatattatttattttcagctctttcctcttcacacttatagatggccaataaacacgaggcccgtgagcccggcacgaggcccgctgtttgggtctggttcgagcccgcacggcctg

SEQ ID NO: 6204 - DNA, 1044 bp, Zea mays
  Zm_smallRNAprecursor_1693
aacatcccccaagagcatctctaaaagtgtgacccataaaaatgctctataatttaaaaatgagtatattttatagaatttagggcaccaacaaaaacttctgctccaacaataaagcatcaaatctagattataggacagcccactacgattagtatatttgatgcatttgagacgattccctataattttttgaccaaattttataaaatgagacattcttcctgcgcaaagtatcgaatgcacatagccaagaaatgcacatgtgcacacataacatcgagatcgtacatattgaatcgaacggtactccaacaggttttgcgggaggttctttttgcaacaaccgttggcagctgttgcgggaggttctttttgcaaaagtcaggtgccgttggattctagatggagggtctggattttatgtgtgcatatgtgcataagtagtctatgtgcatcggatactttgccttcttcctgaccaaatttgtaaccctcattagcagactcattttcagtggtttccctgatcaaactagaggttaccaaggaaccatgcatagcactgaatagggaaccgccgaatacaccagctacacctaacatgtgaaatggatgcataaggatgttgtgctctgcctggaatacaatcataaagttgaaagtaccagatattcagtttttactgtgtagagcggccctatatttcaatttaagatatcagtttgaggtattgatggagatgctctagagcagaaacagcgacactgatgatgttgtatcatgtcggttaggcagtatggaaacaactggatcactactagagtagttagtttcatttgcttcactaatcaccgaaatatttgcttgtatataataatggccaaaatgccagatgcacttacagccaatgatatctcaactcttgtcctcgtgtactccacgtcttcaaacgcgtcaagaagctggagctcttcatcagtaacacccatgataacctgcagaaccagttatttaaggtagtggtaaaataaatgcaaacag

SEQ ID NO: 6205 - DNA, 1044 bp, Zea mays; identical to SEQ ID NO: 6204
  Zm_smallRNAprecursor_1694

SEQ ID NO: 6206 - DNA, 1062 bp, Zea mays
  Zm_smallRNAprecursor_1695
aacatcccccaagagcatctctaaaagtgtgacccataaaaatgctctataatttaaaaatgagtatattttatagaatttagggcaccaacaaaaacttctgctccaacaataaagcatcaaatctagattataggacagcccactacgattagtatatttgatgcatttgagacgattccctataattttttgaccaaattttataaaatgagacattcttcctgcgcaaagtatcgaatgcacatagccaagaaatgcacatgtgcacacataacatcgagatcgtacatattgaatcgaacggtactccaacaggttttgcgggaggttctttttgcaacaaccgttggcagctgttgcgggaggttctttttgcaaaagtcaggtgccgttggattctagatggagggtctggattttatgtgtgcatatgtgcataagtagtctatgtgcatcggatactttgccttcttcctgaccaaatttgtaaccctcattagcagactcattttcagtggtttccctgatcaaactagaggttaccaaggaaccatgcatagcactgaatagggaaccgccgaatacaccagctacacctaacatgtgaaatggatgcataaggatgttgtgctctgcctggaatacaatcataaagttgaaagtaccagatattcagtttttactgtgtagagcggccctatatttcaatttaagatatcagtttgaggtattgatggagatgctctagagcagaaacagcgacactgatgatgttgtatcatgtcggttaggcagtatggaaacaactggatcactactagagtagttagtttcatttgcttcactaatcaccgaaatatttgcttgtatataataatggccaaaatgccagatgcacttacagccaatgatatctcaactcttgtcctcgtgtactccacgtcttcaaacgcgtcaagaagctggagctcttcatcagtaacacccatgataacctgcagaaccagttatttaaggtagtggtaaaataaatgcaaacagagaagcaaatcaggattg

SEQ ID NO: 6207 - DNA, 1062 bp, Zea mays; identical to SEQ ID NO: 6206
  Zm_smallRNAprecursor_1696

SEQ ID NO: 6208 - DNA, 1120 bp, Zea mays
  Zm_smallRNAprecursor_1697
aacatcccccaagagcatctctaaaagtgtgacccataaaaatgctctataatttaaaaatgagtatattttatagaatttagggcaccaacaaaaacttctgctccaacaataaagcatcaaatctagattataggacagcccactacgattagtatatttgatgcatttgagacgattccctataattttttgaccaaattttataaaatgagacattcttcctgcgcaaagtatcgaatgcacatagccaagaaatgcacatgtgcacacataacatcgagatcgtacatattgaatcgaacggtactccaacaggttttgcgggaggttctttttgcaacaaccgttggcagctgttgcgggaggttctttttgcaaaagtcaggtgccgttggattctagatggagggtctggattttatgtgtgcatatgtgcataagtagtctatgtgcatcggatactttgccttcttcctgaccaaatttgtaaccctcattagcagactcattttcagtggtttccctgatcaaactagaggttaccaaggaaccatgcatagcactgaatagggaaccgccgaatacaccagctacacctaacatgtgaaatggatgcataaggatgttgtgctctgcctggaatacaatcataaagttgaaagtaccagatattcagtttttactgtgtagagcggccctatatttcaatttaagatatcagtttgaggtattgatggagatgctctagagcagaaacagcgacactgatgatgttgtatcatgtcggttaggcagtatggaaacaactggatcactactagagtagttagtttcatttgcttcactaatcaccgaaatatttgcttgtatataataatggccaaaatgccagatgcacttacagccaatgatatctcaactcttgtcctcgtgtactccacgtcttcaaacgcgtcaagaagctggagctcttcatcagtaacacccatgataacctgcagaaccagttatttaaggtagtggtaaaataaatgcaaacagagaagcaaatcaggattggactcgaacactcgtagcatgtgacagtaagagtaatcaacaacagaccctcccagca

SEQ ID NO: 6209 - DNA, 1042 bp, Zea mays
  Zm_smallRNAprecursor_1698
catcccccaagagcatctctaaaagtgtgacccataaaaatgctctataatttaaaaatgagtatattttatagaatttagggcaccaacaaaaacttctgctccaacaataaagcatcaaatctagattataggacagcccactacgattagtatatttgatgcatttgagacgattccctataattttttgaccaaattttataaaatgagacattcttcctgcgcaaagtatcgaatgcacatagccaagaaatgcacatgtgcacacataacatcgagatcgtacatattgaatcgaacggtactccaacaggttttgcgggaggttctttttgcaacaaccgttggcagctgttgcgggaggttctttttgcaaaagtcaggtgccgttggattctagatggagggtctggattttatgtgtgcatatgtgcataagtagtctatgtgcatcggatactttgccttcttcctgaccaaatttgtaaccctcattagcagactcattttcagtggtttccctgatcaaactagaggttaccaaggaaccatgcatagcactgaatagggaaccgccgaatacaccagctacacctaacatgtgaaatggatgcataaggatgttgtgctctgcctggaatacaatcataaagttgaaagtaccagatattcagtttttactgtgtagagcggccctatatttcaatttaagatatcagtttgaggtattgatggagatgctctagagcagaaacagcgacactgatgatgttgtatcatgtcggttaggcagtatggaaacaactggatcactactagagtagttagtttcatttgcttcactaatcaccgaaatatttgcttgtatataataatggccaaaatgccagatgcacttacagccaatgatatctcaactcttgtcctcgtgtactccacgtcttcaaacgcgtcaagaagctggagctcttcatcagtaacacccatgataacctgcagaaccagttatttaaggtagtggtaaaataaatgcaaacag

SEQ ID NO: 6210 - DNA, 1119 bp, Zea mays
  Zm_smallRNAprecursor_1699
tctaaaagtgtgacccataaaaatgctctataatttaaaaatgagtatattttatagaatttagggcaccaacaaaaacttctgctccaacaataaagcatcaaatctagattataggacagcccactacgattagtatatttgatgcatttgagacgattccctataattttttgaccaaattttataaaatgagacattcttcctgcgcaaagtatcgaatgcacatagccaagaaatgcacatgtgcacacataacatcgagatcgtacatattgaatcgaacggtactccaacaggttttgcgggaggttctttttgcaacaaccgttggcagctgttgcgggaggttctttttgcaaaagtcaggtgccgttggattctagatggagggtctggattttatgtgtgcatatgtgcataagtagtctatgtgcatcggatactttgccttcttcctgaccaaatttgtaaccctcattagcagactcattttcagtggtttccctgatcaaactagaggttaccaaggaaccatgcatagcactgaatagggaaccgccgaatacaccagctacacctaacatgtgaaatggatgcataaggatgttgtgctctgcctggaatacaatcataaagttgaaagtaccagatattcagtttttactgtgtagagcggccctatatttcaatttaagatatcagtttgaggtattgatggagatgctctagagcagaaacagcgacactgatgatgttgtatcatgtcggttaggcagtatggaaacaactggatcactactagagtagttagtttcatttgcttcactaatcaccgaaatatttgcttgtatataataatggccaaaatgccagatgcacttacagccaatgatatctcaactcttgtcctcgtgtactccacgtcttcaaacgcgtcaagaagctggagctcttcatcagtaacacccatgataacctgcagaaccagttatttaaggtagtggtaaaataaatgcaaacagagaagcaaatcaggattggactcgaacactcgtagcatgtgacagtaagagtaatcaacaacagaccctcccagcaactctcttgctctcaacg

SEQ ID NO: 6211 - DNA, 1166 bp, Zea mays
  Zm_smallRNAprecursor_1700
caaaaaaaaagcaatggtatctagaataatgccaaggttttggaaaaatagttttcatgaatgcaaacatcttatggcataaaatactataatgttactaaaattcatgggattatctagaaactgtataaaaaatacttcaccctcaaataggtccgtaaatgtgttcatgtcttctctaaatcgtatggagaagctcaagtcctgccaaagagctagcaatgatgctatgccaaatttaataagtcttgggctcaagggtccctaccaacaggtaagtataaaggcagcgacagtattgagatcgagaatcaatgaaacaacccaactttcttgtttcttctccacgctaatgtagtttgtcgtatacacacgcacacacctgcttgagattaatctgcacatgtgaataatactatgtcagttccgcagaacatgtcgttctggtcttgtggaggtgtttggtttgaaaaaactaattttagttcctccattttaatttattttagtccctaaattattaaatatgatgtcgtgtgcgcacacacctgcttgagattaatctacacatgtgaataatactatgtcagtcccgcagaacatgtcggtctggtcttgtggaggtgtttggtttgaagaaactaattttagtccctccattttaatttattttagtccctaaattattaaatatgaaaactaaaactctattttaatttccgtatttgactttgtagtgaataaatgaaataaaatataagaactaaaaattagtccctacaacccaaacaccccctaacacaaatgccaatattaaccctggctaagcttacacgaaagtaatacaaatgccaacactattatagcaaacctctgtacaggcggtttggttcgcctctacacaggcggttccaggaaccgcttgtggtgcaccgcctgtgatgtaaaacaacatcacaggcgatcaatcaaaaaccgcctgtgatagacacacattacaggcggtccagttcaaaggaaccgcctgtgatagacacacattacaggcggtttcttatcctagccgcttgtgttagccacacatcacaggcggtttttaatataagtccgactgcatacaatataaatcatagtggagtaggtgaaagcatctaggcccctggttg

SEQ ID NO: 6212 - DNA, 1193 bp, Zea mays
  Zm_smallRNAprecursor_1701
tcatgtactcggttttcgtcctgctaattctaaatccttttgactctagggtttgacgccataactctagctttctatttactcattcccgacttttatctattagaactgcatcgacaacaaaaaacatacaccaaaggatacctctttgtatatcctgacctcatctatcactaaggcaaatagataagggctcaaagttgaaccttgatgtagtcctatgttaatcgggaaaacatttgtatcaccatcagttgttcggacgctagtcacaaccttgtcatacatgtccttgatgagcgtaacatactttgttggggctttatgcttatccaatgcccaccatatgaggttcctaggtattttatcataggccttttccaagtcgataaaaaccatgtgcaagtccttcggctccttataccgctccatgacctgtcttattaagaaaattgcttccatggttgaccttccagacatgaatccaaattggttcatggtgatatgcgtcattcctcttaggcgatgctcaataactctctcccatagcttcatagtgtggctcatgagcttaatccctcgatagttggtacacctttgaatatctcccttgttcttgaagattggtactaatgtactcctctactcattgggcatcttgtttgatcgaaaaatatggttgaacaacttggttagccaaacgatagcaatatccccaaggcatttccacacctctattgggataccatccggtcctatcgcgttgccccctttcatcctgtttaaagcttctttgacctctgactcttggatcctgcgtacaaatcatctatttaaatcatcaaaggagtcaaccaattgagtgttcacagtctcattctcaccattgaaaagattgtcaaaatacccctgccacctctgcttgatgtcttgtcctttcaccaagagttgatccatctcatccttaatgcatttaacttggttgaggtccctcgttttcctttcccgaaccctagccatcttatagacatccttctccccttcctttgtacttaggatcgaccctttgcctcactcacagctcgtttgcagttttctttgccaccttatacctctctatgttgaccacgttcctgtcatggaacaagctcctgtaacattctttcttctcctttattgccttttgaacgtcc

SEQ ID NO: 6213 - DNA, 1175 bp, Zea mays
  Zm_smallRNAprecursor_1702
acgtccgatcactttttacgcaagcgaactgatttagcgtaaacagaaacccattttagcgtaaacagagtaacatccgcgagccctcgttctagaaatagcggtttaggcccactttccacgtggtcaaccatatcttccttagtcaacacatgtttacgctattccattcttccgtttatacataatagtgatttagcataactacttcagccgacccacgttccaaaaataaaggaattggcccactaccccacttcccacgcggtcaaacatttctataccctaacccccgcgcggtcaaccttcctggccgactcgtcgcgtttcttcaggggtcaccagggcgattcttcttcatccgccgccgctagcgcgtttcgccgtcctccaccgccgcacgccctcaacattaatcgccgccgccgttgacagcatcgtcgagccgctgtcgttgtcaatcttgcgcgccccgcgtcacattggctcacgtccgcggtcgctatgtcgtccggattccaaggtgctcgagttgattttttaaatttatgctttagaatgcaacttcctaatctccttccccccttccggcagtgtgaatcgccttcatttgtctccgcacgaactcaaccctaatcggcgccgccgttgacagtgtcgtcgagccggccgctgctgtcaatcctccgccaccgcgtctcataggtattttacatgcccaccaacggtcttcattgatcttactgttcttgtgcaattatggttcagttgtttatcatagagccttttgctttgataaaggttcacgaacctgttgttttagactcattgtatgctcaaattgtgtgggggaagatatatgcaatgatgtgaattatacatacctttatgaagtaggggttgatattttgatgtggaaacaagtgtgctgctcatgacttcgtgctactatatattattcaaataaattgtaatgcatttcactttttatatacttactggatcatatttttcacataaatatggtcatcaatcatgtccaaattaatcactcaacaatcataaaccactacttcataacattagtaaactaataggcactgcctacatttatcttttgtgctgcagctatatgaacatatatgttcaacttccaaaatggaactaaatcgacc

SEQ ID NO: 6214 - DNA, 1094 bp, Zea mays
  Zm_smallRNAprecursor_1703
tcagcatctgcatagccaactatttgtagggaattagatcttctgtacgtaagcatgagacctttagtaccttgaaggtaccttagagccttcttgactgctttccagtgttctatgcctagattcttctgatagcgtccaagcatcccggtggtaaaagctaagtcagggcgagtacatacttgagcatacataatgcttccgatagctgaagcatatggtactgacttcatcttgtttttctcatactgattcttgggacactgatattccccaaacttatcacccttgactattggaccaagcgaggcattacacttgtgtatattatacctctttagtacattttctatatatgacttctgtgagagtcctagtactcccttttgtctgtctctgtgaatttctattccaagaacataagaggcttctcccatgtctttcatatcaaaattcgaggaaagaaacccttttgtttccgctagtagatccttatcactactagctaagagtatgtcatcgacatacagaacaaggaagatatactttcctttcttaaattttgcataaatgcaattgtcttccttgttttcctcgaaaccaaactttcttatagtctgatcaaacttgatgtaccactgtatggaggcctgttttaatccataaatggacctcctcaagtgacatcccatgtgttctttaccgctcacaacaaaaccctttggttgtgccatgaacacgttttcttctaactctccatttaggaatgttgtctttacatccatctgatggagctctagatcaaaatgagcaactagtgccatgatgatcctgaatgaatcttttgttgagataggtgagaaggtttcatggtagtcaatgccttctctctgtgtgaaccctttggccacaagtctagccttgtatctttctatgttccctctggagtcacgctttgtcttgtagacccatttacagcctactgttttggctccatggggaatgacttctaagtcccaaactttgttcattctcatggattctaattcatcttccatggctgataaccatttggatgaatttgcacttctcat

SEQ ID NO: 6215 - DNA, 1140 bp, Zea mays
  Zm_smallRNAprecursor_1704
ggtgtttgatcctactcggtagatacttctgaatataagactttatagttcaagtgttcaaccatagagagctggagggcttatgggtcatagtctccgggtgccctacaagaaagaaaacttagttcaattaagattccacatatacaattttactaggacttctatagtaaccgacccaaacagaaaacacatcataattcagtgtaaggcaacatgtctacctagacacaaggtattacactattctgcttaaactaaggccctgttttggaaacaactcagtttttaagaaaacaaattttattttttagataggagagaccagcttcttgatttttaataaactgaaaatctaattttataaactgagtcataaaccggtatgtttggaaccacctcaatttctataaatcagcttttaaaaattgggtgcttacaaacagaacctaatatatatggcaacgactgttatgaagcagtcattctgtgcaagcgtgcaaacaaaccatctaatccattagattacaatccaaccacagatacaaccatgatttgttagggttttttttataaagagtattgagctggagtggaagggtttaagtgttaaatgtgacctacggttatatcacgatttaatggatcagatagtttgcttgcacgcttgcacaaaagaacggcttgcatagtagtcgttgccaatatatagatcattatcttttcattcacagagtttggcctatgccaaagcccaccaatttcccacgtttgttgtgcccctccgatcgctcctcctgcactccgacgggatactagtggaatttcttcttcacgtcagccaccaccactcctccggcatcttacttaaaatgatggggcccattagtcgatttctttctcataactcaggcaccttgttaaatcctgttcaggctcagctgccactatttgtttcgtttcacatctttggaactgttcacaatcttgcagtagaatcaatctgaggaagctcgctgaaggccaaaaacaataacaatgtggtcagtagataagtctgttgattttttttgtctacttaaattaaatgcctagtgcttgaaattaagcggaacatatattagtatactagttcacaac

SEQ ID NO: 6216 - DNA, 1165 bp, Zea mays
  Zm_smallRNAprecursor_1705
attttactataatgattgtagcaaatacgtacatgtcgaatcctactgagagtagcagcatgtcgttaatttcttcgctatggattttatggattgaattaaccatgaaaatacctaaaatctccacggtctaaaaaattgatgtttggcaattttctgcaagttattttgttcttacattaggaacgactgttatgcaagcagtccttagggcatgtacaataggtgtcttaagttgtgtcttagagtgtgtctaggagggtgaatgtaaaaaaactcaaggcatgtatcttgatgaagacacaatgtcttagctctatgttcgagacaggagactagctgattggtcactttaatttattgaatgctctgattggtacaatgaatatggtaagacacatattttagacatgaccactgtattatgttgtgttttagttgtgtcttatacttggagtaccgtgcagcagtgtctaggttgtacatgcatatgcaagcgtgcaagcaaaccatctgatccattagattacgatccaaccacagatacaaccatgatttgttagggtttttttataaagattattgagctggtggtgaagggtttaagtgttaaatgtgatctacggttggatcacgatctaatggattagatggtttgcttgcacgcttgcacagaaggactgcttgcatagcagtggttgcccttgcattaatggggtgtttgaatgtactataactaatagttagtgactaaaattagttgatacatccagacactcctagctaatagttcaggtattagctattttggtaaattaggctaactccaacaatgggtagccatattgcccagccatttctatccctacatttttgagagcacctagaggggggatgaataggtgatcctgtgaaacttaaacttatagccacaaaaacttgttaagtgttagcccgataatcgccaagtggctagagaggagtctcaacaaaacacaataccacaagagatcaaacacagagatgacacagtggtttatcccgtggttcggccaagaccaacgcttgcctactccacgttgtggcgtcccaacggacgagggttgcaatcaactcctctcaagcggtccaaagaccaacttgaataccacagtgttttgctttt

SEQ ID NO: 6217 - DNA, 1032 bp, Zea mays
  Zm_smallRNAprecursor_1706
aactaataattatctattttaaaattagctaaagattcaaaccgcactgaacagccacatcctttgcatttgcaagcgctgcgagcctgcgacgcgcacacatgacatggtatgacacacccgacctgaccctccggcgcttggtgaggtgacaccgtgataggagttggcccaattaaggataagaggtgctgctgaggctatctggctatcttgggcgtagcgtgtatatagatatactgtagagttcactgttcatacagtgaagtttaaaatattaagtgagataagagttagcttgacaataaaaagattgcttcaaatctgttttaaaataaagtaaacaaaatagaaaaaaatgactgaatagtaagaaagatcgcaccaaatctgtttgagaataaaattaacaaaataatacaaatggttggataaaaaaagttgctccaaatctgtctaaatttgaaattaaaaatgaaaacgcgccaggtaggggtcgaacctacggccttctgcttaggaaacagacgctctatccactgagctacaggcgccttttgttgtttgtttagttacacttattctgatatctgacgaatctctaactaagccgttgtccagccaaacatgcttctgatgttgtttggtactgtagtcagtaaaaaaaaggaaggacgaaatcgacgaaactgaagctctgacaagatcaaacgataaggattcctatgatggattggaattcaccgtgcgcaatgtctgctagaggaagtataataataagctctaagcctatttgtatagcatttttgcttttgtgaaagagagatttaaaaaagtagagaaaatagactctcatacaagagtcaggtactgtacgggctccaagacaaaaggataaaaacgaaggagacaatggattcatctaactgatagttttatcatgtgagtgtgtttgttgctggctttagaaaacattgcaagaaattagagcaaacaatatgctctattattaagcttggctcttagtgttac

SEQ ID NO: 6218 - DNA, 1047 bp, Zea mays
  Zm_smallRNAprecursor_1707
cttgagagaaaaaaaggagtcccctctaccaagcaatctacctacacaagtagaccaatcaacggtcgtcctacagttgggcgagccaaatctaagacaaaacctacaaccaatgtgagcccgtggtaggctagcggtaaaagaagccgaaccaataatccacctaggcatggtttccccgtgatccatccgagtggcatcatgaccggcaaattttgcaccccgcaccacaaaaacggagatgtctcaccagaggttagaaatttggacccgcgccagatccagatccggactgcttactctaacctagagcagagatccccacggcgcctaataacaattcccacgggcggcgacacggagtcacagcaatcagcacgatccttatcagaaagaaaaaaacaaacaaacaaaccgagggcggcatccgcagtcgagagcagcgcgcgcaggcaagcaggcggcggtcggccggccgctgtatcgctccgccggctccgattcacttggtgcaaggcgggatccgtcccgtcggccgggcggcgggtcccgatctgcaccaagcgagcccgaggcggcgcggcttcgcttcttctccctccttccctccgcgcgaacctgtccgcttgcgtgggtggtgggaggagagggcgggcttttatagttgggcaggcggggattcgcggcgaagggagagactgggtccaggtggggcccggtgcgcaggcagagcatattggggtggaagtgggccctggtctctaggagggagagaatattggggtgccgctcctcctcgccggcctttcatttctttttttaggccggtagttttgcttcccagctttttttgattccccgttctttttatggtggggaatgattcctccattctcttggattagtttgagagtggagagacaaaatcaggcatagaaaacctgtcataaatattttattcaaatgataccttttaaaattaccatctatggaaatgataggaatcccggagcctggagaggtacataaaaggggtgtttggtttta

SEQ ID NO: 6219 - DNA, 1047 bp, Zea mays; identical to SEQ ID NO: 6218
  Zm_smallRNAprecursor_1708

SEQ ID NO: 6220 - DNA, 1047 bp, Zea mays; identical to SEQ ID NO: 6218
  Zm_smallRNAprecursor_1709

SEQ ID NO: 6221 - DNA, 1047 bp, Zea mays; identical to SEQ ID NO: 6218
  Zm_smallRNAprecursor_1710

SEQ ID NO: 6222 - DNA, 1048 bp, Zea mays
  Zm_smallRNAprecursor_1711
cttgagagaaaaaaaggagtcccctctaccaagcaatctacctacacaagtagaccaatcaacggtcgtcctacagttgggcgagccaaatctaagacaaaacctacaaccaatgtgagcccgtggtaggctagcggtaaaagaagccgaaccaataatccacctaggcatggtttccccgtgatccatccgagtggcatcatgaccggcaaattttgcaccccgcaccacaaaaacggagatgtctcaccagaggttagaaatttggacccgcgccagatccagatccggactgcttactctaacctagagcagagatccccacggcgcctaataacaattcccacgggcggcgacacggagtcacagcaatcagcacgatccttatcagaaagaaaaaaacaaacaaacaaaccgagggcggcatccgcagtcgagagcagcgcgcgcaggcaagcaggcggcggtcggccggccgctgtatcgctccgccggctccgattcacttggtgcaaggcgggatccgtcccgtcggccgggcggcgggtcccgatctgcaccaagcgagcccgaggcggcgcggcttcgcttcttctccctccttccctccgcgcgaacctgtccgcttgcgtgggtggtgggaggagagggcgggcttttatagttgggcaggcggggattcgcggcgaagggagagactgggtccaggtggggcccggtgcgcaggcagagcatattggggtggaagtgggccctggtctctaggagggagagaatattggggtgccgctcctcctcgccggcctttcatttctttttttaggccggtagttttgcttcccagctttttttgattccccgttctttttatggtggggaatgattcctccattctcttggattagtttgagagtggagagacaaaatcaggcatagaaaacctgtcataaatattttattcaaatgataccttttaaaattaccatctatggaaatgataggaatcccggagcctggagaggtacataaaaggggtgtttggttttag

SEQ ID NO: 6223 - DNA, 1048 bp, Zea mays; identical to SEQ ID NO: 6222
  Zm_smallRNAprecursor_1712

SEQ ID NO: 6224 - DNA, 1049 bp, Zea mays
  Zm_smallRNAprecursor_1713
cttgagagaaaaaaaggagtcccctctaccaagcaatctacctacacaagtagaccaatcaacggtcgtcctacagttgggcgagccaaatctaagacaaaacctacaaccaatgtgagcccgtggtaggctagcggtaaaagaagccgaaccaataatccacctaggcatggtttccccgtgatccatccgagtggcatcatgaccggcaaattttgcaccccgcaccacaaaaacggagatgtctcaccagaggttagaaatttggacccgcgccagatccagatccggactgcttactctaacctagagcagagatccccacggcgcctaataacaattcccacgggcggcgacacggagtcacagcaatcagcacgatccttatcagaaagaaaaaaacaaacaaacaaaccgagggcggcatccgcagtcgagagcagcgcgcgcaggcaagcaggcggcggtcggccggccgctgtatcgctccgccggctccgattcacttggtgcaaggcgggatccgtcccgtcggccgggcggcgggtcccgatctgcaccaagcgagcccgaggcggcgcggcttcgcttcttctccctccttccctccgcgcgaacctgtccgcttgcgtgggtggtgggaggagagggcgggcttttatagttgggcaggcggggattcgcggcgaagggagagactgggtccaggtggggcccggtgcgcaggcagagcatattggggtggaagtgggccctggtctctaggagggagagaatattggggtgccgctcctcctcgccggcctttcatttctttttttaggccggtagttttgcttcccagctttttttgattccccgttctttttatggtggggaatgattcctccattctcttggattagtttgagagtggagagacaaaatcaggcatagaaaacctgtcataaatattttattcaaatgataccttttaaaattaccatctatggaaatgataggaatcccggagcctggagaggtacataaaaggggtgtttggttttaga

SEQ ID NO: 6225 - DNA, 1046 bp, Zea mays
  Zm_smallRNAprecursor_1714
ttgagagaaaaaaaggagtcccctctaccaagcaatctacctacacaagtagaccaatcaacggtcgtcctacagttgggcgagccaaatctaagacaaaacctacaaccaatgtgagcccgtggtaggctagcggtaaaagaagccgaaccaataatccacctaggcatggtttccccgtgatccatccgagtggcatcatgaccggcaaattttgcaccccgcaccacaaaaacggagatgtctcaccagaggttagaaatttggacccgcgccagatccagatccggactgcttactctaacctagagcagagatccccacggcgcctaataacaattcccacgggcggcgacacggagtcacagcaatcagcacgatccttatcagaaagaaaaaaacaaacaaacaaaccgagggcggcatccgcagtcgagagcagcgcgcgcaggcaagcaggcggcggtcggccggccgctgtatcgctccgccggctccgattcacttggtgcaaggcgggatccgtcccgtcggccgggcggcgggtcccgatctgcaccaagcgagcccgaggcggcgcggcttcgcttcttctccctccttccctccgcgcgaacctgtccgcttgcgtgggtggtgggaggagagggcgggcttttatagttgggcaggcggggattcgcggcgaagggagagactgggtccaggtggggcccggtgcgcaggcagagcatattggggtggaagtgggccctggtctctaggagggagagaatattggggtgccgctcctcctcgccggcctttcatttctttttttaggccggtagttttgcttcccagctttttttgattccccgttctttttatggtggggaatgattcctccattctcttggattagtttgagagtggagagacaaaatcaggcatagaaaacctgtcataaatattttattcaaatgataccttttaaaattaccatctatggaaatgataggaatcccggagcctggagaggtacataaaaggggtgtttggtttta

SEQ ID NO: 6226 - DNA, 1046 bp, Zea mays; identical to SEQ ID NO: 6225
  Zm_smallRNAprecursor_1715

SEQ ID NO: 6227 - DNA, 1069 bp, Zea mays
  Zm_smallRNAprecursor_1716
gagcttatgagtcttctcaattgttattcaggctatcatcaaatttggatgaagaaggaggatgagccaaagaccagtttcataacccctagtggaacatattgttatcttcggatgcctgaggggctcaagaacgctggaggaagtttcagcagaatgactgtgaaggttcttcaatctcagataggcagaaatgtgctaacttatgttgatgatatcattgtaaaaagcacgaagcaggaaaatcacattgctaatttgcaagagaccttcgccagttttaggcaagctggcctaaagttgaatccagaaaaatgtgtcttcggagtcaagaaggggaaatttcttggatgcttggtttcaacaaagggaattgaagctaatccaagtaaaattgaagctatacttcaaatggagccaccaactacaaaaaagggggcccaaagattaacagggaggctggcatctcttaatagatttatatccagatcagcagaaagaaatctaccattcttcgaagtactgaaatcagtcgaagtctttcaatggggaccaagccaacaaaaagccttcgaggacctgaagcaatatttgatagatttaacaacattaactccaccaacgccaggggctccgttgttattatatgtggcagcttcgcactcagcggtaagtgcagcacttgtccaggagaagcttgacggccaagtcaagaagcaggtcccagtgcattttgtatctgaagttcttagtatatcaaagaaaaactatacaaaattagagaaggtgttatatgctgttttgatggcatccaggaagcttcggcattactttcaagcatacaatgttattgttccttcttcgcagtcgttgaaggatattatgagaaatagagaagctactgggcggattggaaaatgggctgcagagctcaatgaattttgcattgattatgtgcatagatcttcgatccagtcccaagcgttggcagattttatcgccgattggatgccaggggctcaggatgaagaaacaaataaagatgccgaagtatggacagtgttttgcg

SEQ ID NO: 6228 - DNA, 1075 bp, Zea mays
  Zm_smallRNAprecursor_1717
gatgcggagcgtgatgaagtcttgaacgcgtccagccataccttcatttagaagaccatatataagtttcattttgaaatatatgtggggaatttttttatccacatatttgaaaaataatagcatatcgaagctattttatgtgatcatattggaactcgaagatgaggggaaaagtaggtcccactgggcgtgccagaatctgatgtcaggaaaacggacggcaaaaagcgccatctccacgtcaacagagacaagttttaatttagatataatagagtaaataatacaggtattgcaggtccatacttccataattcttatatttacataaaaattatgttaattacatctccgtagagaaaacccctgattaagagttccaacataaaaataaaaaagtacaacatatggattcctattacatgactatatatacactacaagaaactaataaatgttcatgagttaatttaagaacgtgggtaccgacgttcttaattgagttatgttcgtgggttaagttaagaacatgggtacccacgttcttaaattaaattcgtgggctcgtggtaaaaccgtcgaacttatcgtattaggaacgtgggtacctacattcttaacttaaattcgtgggctacgtagataccgtcgaacttaacccaaaaacctaaatctctcaccccgcgcgtctctcttctttccctctgtctaccgcacgcgcccgtggctagctgccagccgcgcgcccgccgccaccccgcgcccaccccactgcgcgccggctggcgcgccgccacccagcgcggcccgccctcgccaccctgtggccccgccaccgccccgctgccccaccgttaaggcaggtgatgcggccgacaagggggcggcgtccaggaacccacaaaatcacgtcgtggtggggaggcacgggattcggatccggccgtggccacacccggaccccatcgaggtgatgcgggcgcaacggatcatggagcgtgtgcaggaggaacagcgccgctggtacggcgtcaaggagccggggcaggtgctcgccgtcaccccgacctac

SEQ ID NO: 6229 - DNA, 1066 bp, Zea mays
  Zm_smallRNAprecursor_1718
taccactgcaagatgaaaaatttggggataggggaaaaaactagtagcgccaatcatttactccggtactacaaggccaatagctagcttctcatgaccagcagcagcatcggtagcagtcccagccagcatgactgaaaagaccacagaacaaaatagggaaaaaaaaccatgggtgtgaagatctaggagataaggaggcggcagtgtgtaaagcaggaaaaaaagccacggccatggaggcatgccgcatgcatgctctgtctcttgtgataagaaaaaaaaaggtactacaaccccatcaaattaaaccggttcagttgaatcgaaatcaaacctggacatcaaatcaggctaattgaatcgaaaccaactaggacaccaaagcagcctttaattgaattgaaatcaaacacggattttgcccggccccccaccagactaagagactaagactaacaacggatctagacgggagataagccatcgagagaaagaggctgacagaaagagaagtgagcacgcggcgaggacggcatacatgctatgtcgttcgtcgcgccgtgtgctcactctcttctgtcaatctctcgagagcctctccgcatctacagaaacgccgccgtcgtcgtcgtcgtcgtcgtctaaccagcgacaacacaaaatcagggttcagaagttgcggaaccaccaaagcgaagagggacaaaccaaccctccaagcacgaatgaagacagaagaacaagaaagagagagatagagggggcttcgttgttcttggatccggtgagcgctcgtcgccgtacagggaacgaaaggaggaggtgctgctgagactgtcctttctttctttctttctctccctccctccttccctgcctgtgcgtgtgtgtgcgccctcttggtgattggtttttggagcagaggagatggatgggatagataggcggtcgtaccttgcccctctcagtagtgctgtaacctcacaagtcacaaggttaaaaagtactactggtggtgatagtagtagtactctgcacctgccgagtagtagttccaatcagc

SEQ ID NO: 6230 - DNA, 1141 bp, Zea mays
  Zm_smallRNAprecursor_1719
gacatgttaacatcataagagcaataatgttaataatgtagacaacaggagctagaaaaaatttagtatggacttaattaaaagacaactacgtataatcttattaaatcactcataatatagatatatatatatatatataatagtaaatacagaataagattatactatatacgtttttaggtttaggtggggctttagtgaagctctataaacttgggtgtggtaggagacttgagctagatctgtgcctaatagccgtgctagttgtaacgatttttacggcatacatcttaccacatatatatagtagttagtctttcactattaatgtatggcctactctctcataaaacttcttagtttttgtgtctaagccaggtgtaagtttacaaaccatatctcttctttctatcttaatatttagtctgcttgcataggagtcgttgtcttgctctaaggcaacgactgttatgcaagcagtcattctttgcaagcgtgcaagcaaaccatctgatccattagattacgatccaaccacagatacaactatggtttgttagggtttttttataaaaaatattaagctggtggtggaaggatttaagtgttaaatgtgacatacggttcgatcacgatctaatggatcagatagtttgcttgcacgtttgcatagaaggaccgcttgcataggagtcgttgccttgctctaaggcaacgactgttatgcaagcaatcattatttgcaagcgtgcaaacaaaccatctgatccattagattacgatccaaccatagatacaatcatggtttgttaggggtttttataaaaaatattaagctggtggtggaaggatttaagtgttaaatgtgacatacggttcgatcacgatctaatggatcagatagtttgcttgcacgtttgcatagaaggaccgcttgcataagagttttagagcaacgactgttatgcaagcagtcattctttgcaagcgtgcaagcaaaccatctgatccattagattacgatccaaccacagatacaaccattgtttgttagggtttttttataaaaaaatattaagctggtggtggaaggatttaagtgttaaatgtgacatgcggttcgatcacgatctaatag

SEQ ID NO: 6231 - DNA, 1142 bp, Zea mays
  Zm_smallRNAprecursor_1720
gacatgttaacatcataagagcaataatgttaataatgtagacaacaggagctagaaaaaatttagtatggacttaattaaaagacaactacgtataatcttattaaatcactcataatatagatatatatatatatatataatagtaaatacagaataagattatactatatacgtttttaggtttaggtggggctttagtgaagctctataaacttgggtgtggtaggagacttgagctagatctgtgcctaatagccgtgctagttgtaacgatttttacggcatacatcttaccacatatatatagtagttagtctttcactattaatgtatggcctactctctcataaaacttcttagtttttgtgtctaagccaggtgtaagtttacaaaccatatctcttctttctatcttaatatttagtctgcttgcataggagtcgttgtcttgctctaaggcaacgactgttatgcaagcagtcattctttgcaagcgtgcaagcaaaccatctgatccattagattacgatccaaccacagatacaactatggtttgttagggtttttttataaaaaatattaagctggtggtggaaggatttaagtgttaaatgtgacatacggttcgatcacgatctaatggatcagatagtttgcttgcacgtttgcatagaaggaccgcttgcataggagtcgttgccttgctctaaggcaacgactgttatgcaagcaatcattatttgcaagcgtgcaaacaaaccatctgatccattagattacgatccaaccatagatacaatcatggtttgttaggggtttttataaaaaatattaagctggtggtggaaggatttaagtgttaaatgtgacatacggttcgatcacgatctaatggatcagatagtttgcttgcacgtttgcatagaaggaccgcttgcataagagttttagagcaacgactgttatgcaagcagtcattctttgcaagcgtgcaagcaaaccatctgatccattagattacgatccaaccacagatacaaccattgtttgttagggtttttttataaaaaaatattaagctggtggtggaaggatttaagtgttaaatgtgacatgcggttcgatcacgatctaataga

SEQ ID NO: 6232 - DNA, 1140 bp, Zea mays
  Zm_smallRNAprecursor_1721
acatgttaacatcataagagcaataatgttaataatgtagacaacaggagctagaaaaaatttagtatggacttaattaaaagacaactacgtataatcttattaaatcactcataatatagatatatatatatatatataatagtaaatacagaataagattatactatatacgtttttaggtttaggtggggctttagtgaagctctataaacttgggtgtggtaggagacttgagctagatctgtgcctaatagccgtgctagttgtaacgatttttacggcatacatcttaccacatatatatagtagttagtctttcactattaatgtatggcctactctctcataaaacttcttagtttttgtgtctaagccaggtgtaagtttacaaaccatatctcttctttctatcttaatatttagtctgcttgcataggagtcgttgtcttgctctaaggcaacgactgttatgcaagcagtcattctttgcaagcgtgcaagcaaaccatctgatccattagattacgatccaaccacagatacaactatggtttgttagggtttttttataaaaaatattaagctggtggtggaaggatttaagtgttaaatgtgacatacggttcgatcacgatctaatggatcagatagtttgcttgcacgtttgcatagaaggaccgcttgcataggagtcgttgccttgctctaaggcaacgactgttatgcaagcaatcattatttgcaagcgtgcaaacaaaccatctgatccattagattacgatccaaccatagatacaatcatggtttgttaggggtttttataaaaaatattaagctggtggtggaaggatttaagtgttaaatgtgacatacggttcgatcacgatctaatggatcagatagtttgcttgcacgtttgcatagaaggaccgcttgcataagagttttagagcaacgactgttatgcaagcagtcattctttgcaagcgtgcaagcaaaccatctgatccattagattacgatccaaccacagatacaaccattgtttgttagggtttttttataaaaaaatattaagctggtggtggaaggatttaagtgttaaatgtgacatgcggttcgatcacgatctaatag

SEQ ID NO: 6233 - DNA, 1103 bp, Zea mays
  Zm_smallRNAprecursor_1722
caaaccatatctcttctttctatcttaatatttagtctgcttgcataggagtcgttgtcttgctctaaggcaacgactgttatgcaagcagtcattctttgcaagcgtgcaagcaaaccatctgatccattagattacgatccaaccacagatacaactatggtttgttagggtttttttataaaaaatattaagctggtggtggaaggatttaagtgttaaatgtgacatacggttcgatcacgatctaatggatcagatagtttgcttgcacgtttgcatagaaggaccgcttgcataggagtcgttgccttgctctaaggcaacgactgttatgcaagcaatcattatttgcaagcgtgcaaacaaaccatctgatccattagattacgatccaaccatagatacaatcatggtttgttaggggtttttataaaaaatattaagctggtggtggaaggatttaagtgttaaatgtgacatacggttcgatcacgatctaatggatcagatagtttgcttgcacgtttgcatagaaggaccgcttgcataagagttttagagcaacgactgttatgcaagcagtcattctttgcaagcgtgcaagcaaaccatctgatccattagattacgatccaaccacagatacaaccattgtttgttagggtttttttataaaaaaatattaagctggtggtggaaggatttaagtgttaaatgtgacatgcggttcgatcacgatctaatagatcagatagtttgcttgcacgtttgaatagaagaaccgcttcgttgcctttttttattagtcttgctatggactatattattagtcttgctcttgatgtcggtaggtatctacggttctaggaggtagtagcagtagtcgttgttgtcgttgcctgcaagtcaatgaagtaggttagattaaatcagcgcctatagttagcagggtgtaataagaataagagttctgatgaaatcgtgcctcgaaatttctgcacagcgccgcaccgatctgtctcctgatatgcgcataggtacgtacggttttagtgaaatgtgcttttattaatttgatttcatagattggtcactcccag

SEQ ID NO: 6234 - DNA, 1104 bp, Zea mays
  Zm_smallRNAprecursor_1723
caaaccatatctcttctttctatcttaatatttagtctgcttgcataggagtcgttgtcttgctctaaggcaacgactgttatgcaagcagtcattctttgcaagcgtgcaagcaaaccatctgatccattagattacgatccaaccacagatacaactatggtttgttagggtttttttataaaaaatattaagctggtggtggaaggatttaagtgttaaatgtgacatacggttcgatcacgatctaatggatcagatagtttgcttgcacgtttgcatagaaggaccgcttgcataggagtcgttgccttgctctaaggcaacgactgttatgcaagcaatcattatttgcaagcgtgcaaacaaaccatctgatccattagattacgatccaaccatagatacaatcatggtttgttaggggtttttataaaaaatattaagctggtggtggaaggatttaagtgttaaatgtgacatacggttcgatcacgatctaatggatcagatagtttgcttgcacgtttgcatagaaggaccgcttgcataagagttttagagcaacgactgttatgcaagcagtcattctttgcaagcgtgcaagcaaaccatctgatccattagattacgatccaaccacagatacaaccattgtttgttagggtttttttataaaaaaatattaagctggtggtggaaggatttaagtgttaaatgtgacatgcggttcgatcacgatctaatagatcagatagtttgcttgcacgtttgaatagaagaaccgcttcgttgcctttttttattagtcttgctatggactatattattagtcttgctcttgatgtcggtaggtatctacggttctaggaggtagtagcagtagtcgttgttgtcgttgcctgcaagtcaatgaagtaggttagattaaatcagcgcctatagttagcagggtgtaataagaataagagttctgatgaaatcgtgcctcgaaatttctgcacagcgccgcaccgatctgtctcctgatatgcgcataggtacgtacggttttagtgaaatgtgcttttattaatttgatttcatagattggtcactcccagc

SEQ ID NO: 6235 - DNA, 1102 bp, Zea mays
  Zm_smallRNAprecursor_1724
aaaccatatctcttctttctatcttaatatttagtctgcttgcataggagtcgttgtcttgctctaaggcaacgactgttatgcaagcagtcattctttgcaagcgtgcaagcaaaccatctgatccattagattacgatccaaccacagatacaactatggtttgttagggtttttttataaaaaatattaagctggtggtggaaggatttaagtgttaaatgtgacatacggttcgatcacgatctaatggatcagatagtttgcttgcacgtttgcatagaaggaccgcttgcataggagtcgttgccttgctctaaggcaacgactgttatgcaagcaatcattatttgcaagcgtgcaaacaaaccatctgatccattagattacgatccaaccatagatacaatcatggtttgttaggggtttttataaaaaatattaagctggtggtggaaggatttaagtgttaaatgtgacatacggttcgatcacgatctaatggatcagatagtttgcttgcacgtttgcatagaaggaccgcttgcataagagttttagagcaacgactgttatgcaagcagtcattctttgcaagcgtgcaagcaaaccatctgatccattagattacgatccaaccacagatacaaccattgtttgttagggtttttttataaaaaaatattaagctggtggtggaaggatttaagtgttaaatgtgacatgcggttcgatcacgatctaatagatcagatagtttgcttgcacgtttgaatagaagaaccgcttcgttgcctttttttattagtcttgctatggactatattattagtcttgctcttgatgtcggtaggtatctacggttctaggaggtagtagcagtagtcgttgttgtcgttgcctgcaagtcaatgaagtaggttagattaaatcagcgcctatagttagcagggtgtaataagaataagagttctgatgaaatcgtgcctcgaaatttctgcacagcgccgcaccgatctgtctcctgatatgcgcataggtacgtacggttttagtgaaatgtgcttttattaatttgatttcatagattggtcactcccag

SEQ ID NO: 6236 - DNA, 1043 bp, Zea mays
  Zm_smallRNAprecursor_1725
gcgcgagatcaggaattgattgtattcatcttgataatgggatctatgatggttcatggacttggatccagggaggatgccttgtccatgagacaggaaaaggaattaaggattaatgtgtggatacctgagtcaagtgtttgaacgtactaaacacatgtcgggaaatatggtaaccggtaaacctagtacctgagtgaagccgggcgcagacttttctcctcacgcgacctaagactgggtctcccatgctagctatggtgggtacaagtgcggtcactgcacggcggcatccggggtcagtggagcattgtatgccaaggcggtgagccctggccgcaaatgggggatcgatggggccgaattttttgcattttggcactttctcagaaaaaaatcacgtttagaccctagaaaattttaatgtcatttttggaccctttgctcagcgtcatagcctatggcgccgaagtaacacagctcggcgccataggctatggcgccgaggtacgtgctgcgctggcataaccggatgttgtggcaccgacgtggcaccgagctcggcgccaagatctatggcgccgagctcggttgtgtaatcacaaagcctgtctagctcaatcagtacagcgtaaggcacttaaccttgtggttgtgggttcgagccccacggtgggtgtttaatactttttttgtctttgtcactgatttgtttttttttgtccatatttttcgtttatgtcgctgatttgtccgtccagatttatttctcatccagatttttttgtaaaggatcatataacttttcatcccaaataaaataaacattctaaatatcgctgcttctgtcaactgtacttaaaaacaattgtttttagtgtttttattcacttgatttgtttctttgctggcggtaacgttggctaatatattttcactgaaattgataatatatgctccaaatattgatgctgaagttacccttattcttatctggaggcatgtaagtaggggttgtactaattttgatttgcttgtgctcc

SEQ ID NO: 6237 - DNA, 1126 bp, Zea mays
  Zm_smallRNAprecursor_1726
gactgtgagctgtggaaaaagctgctgtaggctgtaagctgttaaaaagctaaaaaccgtttggtggaaaccactaaaagtcgttaaaaattcttcgatatatgttttcatagttccatctgaaaagccactaaaagcaggtcctggggtgctttcaaatttgcactacgagaaagtcggcttttagaaaaagctgcttcctggatccagccctttggttggcttttggcttttagggggcaaaagccaaagccaaaagtcaaaccaaacacacccttaatccctcgatagttggtacaactttgaatatcctccactagtccactcatcgggcatcttgtttgatcgaaaattatggttcaacaacttggttagccaaacaatagtaatatccccaaggcatttccacacctttattgggataccatccaggcccatcgccttgccccctttcatcctctttaaagcttctttgacctctgattcttggatcctgcgtacaaagcatctatttaaatcatcaaaggagtcatctaattgggtgccatagtctcattctcaccattgaaaagattgtcaaaatacctctgccacctctgtttgatgtcttgtccttttaccaagagttgatccatctcatccttaatgcatttaacttggttgaggtccctcgtcttcctttcctgaatcctagccatcttatagacatccttctccccttcctttgtacttagtcttcggtaaagaccatcataagctcgaccctttgccccacttacagttccctttgcagtcttctttgccaccttatacctctctatgttgatcgcgctcctgtcatggaacgagctcctgtaacattctttcttctcctttattgacttttgaacgtcctcggtccaccaccaagtatccttaggttcacctctgcttcctttggtcactccaaacacctctgatgccaccttcctaatacaagttgccatcttcacccacatgttgtttgcatctttttcttcagaccaagcgccctccacaaaaactctttccctaaaaacttcggatgtctcccctttgagtttccaccacttcgtcctcgtaattttggcttgttgatccctatggg

SEQ ID NO: 6238 - DNA, 1195 bp, Zea mays
  Zm_smallRNAprecursor_1727
catcgacacctacttgtccatcgagaccccctttgcctccctgatcacctcactagagttcctgtgccaccggtaagccataatttctcgtcccttcctcgtgcacttttccgacgaccgttcggactgctggttgagtgagataaaaacttagagagctaaatgcaaggttagtgacatgtatgaatagttttctaggggcatggtcaaatagcttagttcaggataagtctagggaccccagattggttgaaattgaaaccatttaggttgaatgccatagtactaatacctaaagcagtgaaccagatccctactacaggccaagcagccaataagaagtgtaaagaacgagaattgttgaaactagcatattggaagattaatcgaccaaaataaccgtgagcagccacaatattataagtatcttcttcctgaccaaatttgtaaccctcattagtaaactcattttcagtggtttccctgaacaaactagaggttaccaaggaaccatgcatagcactgaatagggaaccgccgaatacaccagctacacctaacatgtgaaatggatgcataaggatgttgtgtctacctagaatacaatcataaagttgaaagtacgagatattcctaaaggcatgccatcagagaaacttccttgaccaatagggtaaatcaagaaaacaacagtagcagctgcaacaggagctgaatatgcaacagcaatccaagggcgcatacccagacagaaactaagttcccactcatgacccatataacaagctacaccaagtaagaagtgtagaataattagctcataaggaccaccattgtataaccattcatcaacagatgcagcttcccaaattgggtaaaaatgcaatccgatcgccgcaaaagtaggaataatagcaccagagataatattgtttccatgaagtaaagaaccagaaacaggctcacgaataccatcaatatctactggaggagcagcgatgaaggcgataataaatacggaagttgcggtcaataaggtagggatcatcaaaacactaaaccatccaatgtaaagacggttttcggtgctagttatccagttgcagaagcgatcccataggcttgtactttcgcgtctctctaaaattgcagtcatggtaagatcttggtttattcaaattgcaaggactcccaa

SEQ ID NO: 6239 - DNA, 1150 bp, Zea mays
  Zm_smallRNAprecursor_1728
cacctcactagagttcctgtgccaccggtaagccataatttctcgtcccttcctcgtgcacttttccgacgaccgttcggactgctggttgagtgagataaaaacttagagagctaaatgcaaggttagtgacatgtatgaatagttttctaggggcatggtcaaatagcttagttcaggataagtctagggaccccagattggttgaaattgaaaccatttaggttgaatgccatagtactaatacctaaagcagtgaaccagatccctactacaggccaagcagccaataagaagtgtaaagaacgagaattgttgaaactagcatattggaagattaatcgaccaaaataaccgtgagcagccacaatattataagtatcttcttcctgaccaaatttgtaaccctcattagtaaactcattttcagtggtttccctgaacaaactagaggttaccaaggaaccatgcatagcactgaatagggaaccgccgaatacaccagctacacctaacatgtgaaatggatgcataaggatgttgtgtctacctagaatacaatcataaagttgaaagtacgagatattcctaaaggcatgccatcagagaaacttccttgaccaatagggtaaatcaagaaaacaacagtagcagctgcaacaggagctgaatatgcaacagcaatccaagggcgcatacccagacagaaactaagttcccactcatgacccatataacaagctacaccaagtaagaagtgtagaataattagctcataaggaccaccattgtataaccattcatcaacagatgcagcttcccaaattgggtaaaaatgcaatccgatcgccgcaaaagtaggaataatagcaccagagataatattgtttccatgaagtaaagaaccagaaacaggctcacgaataccatcaatatctactggaggagcagcgatgaaggcgataataaatacggaagttgcggtcaataaggtagggatcatcaaaacactaaaccatccaatgtaaagacggttttcggtgctagttatccagttgcagaagcgatcccataggcttgtactttcgcgtctctctaaaattgcagtcatggtaagatcttggtttattcaaattgcaaggactcccaa

SEQ ID NO: 6240 - DNA, 1165 bp, Zea mays
  Zm_smallRNAprecursor_1729
aacgagaattgttgaaactagcatattggaagattaatcgaccaaaataaccgtgagcagccacaatattataagtatcttcttcctgaccaaatttgtaaccctcattagtaaactcattttcagtggtttccctgaacaaactagaggttaccaaggaaccatgcatagcactgaatagggaaccgccgaatacaccagctacacctaacatgtgaaatggatgcataaggatgttgtgtctacctagaatacaatcataaagttgaaagtacgagatattcctaaaggcatgccatcagagaaacttccttgaccaatagggtaaatcaagaaaacaacagtagcagctgcaacaggagctgaatatgcaacagcaatccaagggcgcatacccagacagaaactaagttcccactcatgacccatataacaagctacaccaagtaagaagtgtagaataattagctcataaggaccaccattgtataaccattcatcaacagatgcagcttcccaaattgggtaaaaatgcaatccgatcgccgcaaaagtaggaataatagcaccagagataatattgtttccatgaagtaaagaaccagaaacaggctcacgaataccatcaatatctactggaggagcagcgatgaaggcgataataaatacggaagttgcggtcaataaggtagggatcatcaaaacactaaaccatccaatgtaaagacggttttcggtgctagttatccagttgcagaagcgatcccataggcttgtactttcgcgtctctctaaaattgcagtcatggtaagatcttggtttattcaaattgcaaggactcccaagcacacgtattaactagaaagaaaatatataatagaaggcttgttatttaacagtataacatagtctatataccaatgtcaaccaagccagccccaacgattggattttcgtataacttcatttaccaaatccaaaaatttgggaaatgaagttagtaaaaatgaaaaactcggattgctcttttctattttccatatgggttacccgagactcaaacccgaaactagtcggttggagtagataattcttccttgttacaatagaaaaaacccctccccaaatcgtgcttgcatttttcattgcacacgactttcccta

SEQ ID NO: 6241 - DNA, 1165 bp, Zea mays; identical to SEQ ID NO: 6240
  Zm_smallRNAprecursor_1730

SEQ ID NO: 6242 - DNA, 1227 bp, Zea mays
  Zm_smallRNAprecursor_1731
aacgagaattgttgaaactagcatattggaagattaatcgaccaaaataaccgtgagcagccacaatattataagtatcttcttcctgaccaaatttgtaaccctcattagtaaactcattttcagtggtttccctgaacaaactagaggttaccaaggaaccatgcatagcactgaatagggaaccgccgaatacaccagctacacctaacatgtgaaatggatgcataaggatgttgtgtctacctagaatacaatcataaagttgaaagtacgagatattcctaaaggcatgccatcagagaaacttccttgaccaatagggtaaatcaagaaaacaacagtagcagctgcaacaggagctgaatatgcaacagcaatccaagggcgcatacccagacagaaactaagttcccactcatgacccatataacaagctacaccaagtaagaagtgtagaataattagctcataaggaccaccattgtataaccattcatcaacagatgcagcttcccaaattgggtaaaaatgcaatccgatcgccgcaaaagtaggaataatagcaccagagataatattgtttccatgaagtaaagaaccagaaacaggctcacgaataccatcaatatctactggaggagcagcgatgaaggcgataataaatacggaagttgcggtcaataaggtagggatcatcaaaacactaaaccatccaatgtaaagacggttttcggtgctagttatccagttgcagaagcgatcccataggcttgtactttcgcgtctctctaaaattgcagtcatggtaagatcttggtttattcaaattgcaaggactcccaagcacacgtattaactagaaagaaaatatataatagaaggcttgttatttaacagtataacatagtctatataccaatgtcaaccaagccagccccaacgattggattttcgtataacttcatttaccaaatccaaaaatttgggaaatgaagttagtaaaaatgaaaaactcggattgctcttttctattttccatatgggttacccgagactcaaacccgaaactagtcggttggagtagataattcttccttgttacaatagaaaaaacccctccccaaatcgtgcttgcatttttcattgcacacgactttccctatgtggaaatagccaatttctattccgaagaggaagtccactaattttgagaatttttaatta

SEQ ID NO: 6243 - DNA, 1231 bp, Zea mays
  Zm_smallRNAprecursor_1732
aacgagaattgttgaaactagcatattggaagattaatcgaccaaaataaccgtgagcagccacaatattataagtatcttcttcctgaccaaatttgtaaccctcattagtaaactcattttcagtggtttccctgaacaaactagaggttaccaaggaaccatgcatagcactgaatagggaaccgccgaatacaccagctacacctaacatgtgaaatggatgcataaggatgttgtgtctacctagaatacaatcataaagttgaaagtacgagatattcctaaaggcatgccatcagagaaacttccttgaccaatagggtaaatcaagaaaacaacagtagcagctgcaacaggagctgaatatgcaacagcaatccaagggcgcatacccagacagaaactaagttcccactcatgacccatataacaagctacaccaagtaagaagtgtagaataattagctcataaggaccaccattgtataaccattcatcaacagatgcagcttcccaaattgggtaaaaatgcaatccgatcgccgcaaaagtaggaataatagcaccagagataatattgtttccatgaagtaaagaaccagaaacaggctcacgaataccatcaatatctactggaggagcagcgatgaaggcgataataaatacggaagttgcggtcaataaggtagggatcatcaaaacactaaaccatccaatgtaaagacggttttcggtgctagttatccagttgcagaagcgatcccataggcttgtactttcgcgtctctctaaaattgcagtcatggtaagatcttggtttattcaaattgcaaggactcccaagcacacgtattaactagaaagaaaatatataatagaaggcttgttatttaacagtataacatagtctatataccaatgtcaaccaagccagccccaacgattggattttcgtataacttcatttaccaaatccaaaaatttgggaaatgaagttagtaaaaatgaaaaactcggattgctcttttctattttccatatgggttacccgagactcaaacccgaaactagtcggttggagtagataattcttccttgttacaatagaaaaaacccctccccaaatcgtgcttgcatttttcattgcacacgactttccctatgtggaaatagccaatttctattccgaagaggaagtccactaattttgagaatttttaattagtta

SEQ ID NO: 6244 - DNA, 1159 bp, Zea mays
  Zm_smallRNAprecursor_1733
gagaattgttgaaactagcatattggaagattaatcgaccaaaataaccgtgagcagccacaatattataagtatcttcttcctgaccaaatttgtaaccctcattagtaaactcattttcagtggtttccctgaacaaactagaggttaccaaggaaccatgcatagcactgaatagggaaccgccgaatacaccagctacacctaacatgtgaaatggatgcataaggatgttgtgtctacctagaatacaatcataaagttgaaagtacgagatattcctaaaggcatgccatcagagaaacttccttgaccaatagggtaaatcaagaaaacaacagtagcagctgcaacaggagctgaatatgcaacagcaatccaagggcgcatacccagacagaaactaagttcccactcatgacccatataacaagctacaccaagtaagaagtgtagaataattagctcataaggaccaccattgtataaccattcatcaacagatgcagcttcccaaattgggtaaaaatgcaatccgatcgccgcaaaagtaggaataatagcaccagagataatattgtttccatgaagtaaagaaccagaaacaggctcacgaataccatcaatatctactggaggagcagcgatgaaggcgataataaatacggaagttgcggtcaataaggtagggatcatcaaaacactaaaccatccaatgtaaagacggttttcggtgctagttatccagttgcagaagcgatcccataggcttgtactttcgcgtctctctaaaattgcagtcatggtaagatcttggtttattcaaattgcaaggactcccaagcacacgtattaactagaaagaaaatatataatagaaggcttgttatttaacagtataacatagtctatataccaatgtcaaccaagccagccccaacgattggattttcgtataacttcatttaccaaatccaaaaatttgggaaatgaagttagtaaaaatgaaaaactcggattgctcttttctattttccatatgggttacccgagactcaaacccgaaactagtcggttggagtagataattcttccttgttacaatagaaaaaacccctccccaaatcgtgcttgcatttttcattgcacacgactttcc

SEQ ID NO: 6245 - DNA, 1197 bp, Zea mays
  Zm_smallRNAprecursor_1734
ggaagattaatcgaccaaaataaccgtgagcagccacaatattataagtatcttcttcctgaccaaatttgtaaccctcattagtaaactcattttcagtggtttccctgaacaaactagaggttaccaaggaaccatgcatagcactgaatagggaaccgccgaatacaccagctacacctaacatgtgaaatggatgcataaggatgttgtgtctacctagaatacaatcataaagttgaaagtacgagatattcctaaaggcatgccatcagagaaacttccttgaccaatagggtaaatcaagaaaacaacagtagcagctgcaacaggagctgaatatgcaacagcaatccaagggcgcatacccagacagaaactaagttcccactcatgacccatataacaagctacaccaagtaagaagtgtagaataattagctcataaggaccaccattgtataaccattcatcaacagatgcagcttcccaaattgggtaaaaatgcaatccgatcgccgcaaaagtaggaataatagcaccagagataatattgtttccatgaagtaaagaaccagaaacaggctcacgaataccatcaatatctactggaggagcagcgatgaaggcgataataaatacggaagttgcggtcaataaggtagggatcatcaaaacactaaaccatccaatgtaaagacggttttcggtgctagttatccagttgcagaagcgatcccataggcttgtactttcgcgtctctctaaaattgcagtcatggtaagatcttggtttattcaaattgcaaggactcccaagcacacgtattaactagaaagaaaatatataatagaaggcttgttatttaacagtataacatagtctatataccaatgtcaaccaagccagccccaacgattggattttcgtataacttcatttaccaaatccaaaaatttgggaaatgaagttagtaaaaatgaaaaactcggattgctcttttctattttccatatgggttacccgagactcaaacccgaaactagtcggttggagtagataattcttccttgttacaatagaaaaaacccctccccaaatcgtgcttgcatttttcattgcacacgactttccctatgtggaaatagccaatttctattccgaagaggaagtccactaattttgagaatttttaa

SEQ ID NO: 6246 - DNA, 1200 bp, Zea mays
  Zm_smallRNAprecursor_1735
ggaagattaatcgaccaaaataaccgtgagcagccacaatattataagtatcttcttcctgaccaaatttgtaaccctcattagtaaactcattttcagtggtttccctgaacaaactagaggttaccaaggaaccatgcatagcactgaatagggaaccgccgaatacaccagctacacctaacatgtgaaatggatgcataaggatgttgtgtctacctagaatacaatcataaagttgaaagtacgagatattcctaaaggcatgccatcagagaaacttccttgaccaatagggtaaatcaagaaaacaacagtagcagctgcaacaggagctgaatatgcaacagcaatccaagggcgcatacccagacagaaactaagttcccactcatgacccatataacaagctacaccaagtaagaagtgtagaataattagctcataaggaccaccattgtataaccattcatcaacagatgcagcttcccaaattgggtaaaaatgcaatccgatcgccgcaaaagtaggaataatagcaccagagataatattgtttccatgaagtaaagaaccagaaacaggctcacgaataccatcaatatctactggaggagcagcgatgaaggcgataataaatacggaagttgcggtcaataaggtagggatcatcaaaacactaaaccatccaatgtaaagacggttttcggtgctagttatccagttgcagaagcgatcccataggcttgtactttcgcgtctctctaaaattgcagtcatggtaagatcttggtttattcaaattgcaaggactcccaagcacacgtattaactagaaagaaaatatataatagaaggcttgttatttaacagtataacatagtctatataccaatgtcaaccaagccagccccaacgattggattttcgtataacttcatttaccaaatccaaaaatttgggaaatgaagttagtaaaaatgaaaaactcggattgctcttttctattttccatatgggttacccgagactcaaacccgaaactagtcggttggagtagataattcttccttgttacaatagaaaaaacccctccccaaatcgtgcttgcatttttcattgcacacgactttccctatgtggaaatagccaatttctattccgaagaggaagtccactaattttgagaatttttaatta

SEQ ID NO: 6247 - DNA, 1113 bp, Zea mays
  Zm_smallRNAprecursor_1736
aagattaatcgaccaaaataaccgtgagcagccacaatattataagtatcttcttcctgaccaaatttgtaaccctcattagtaaactcattttcagtggtttccctgaacaaactagaggttaccaaggaaccatgcatagcactgaatagggaaccgccgaatacaccagctacacctaacatgtgaaatggatgcataaggatgttgtgtctacctagaatacaatcataaagttgaaagtacgagatattcctaaaggcatgccatcagagaaacttccttgaccaatagggtaaatcaagaaaacaacagtagcagctgcaacaggagctgaatatgcaacagcaatccaagggcgcatacccagacagaaactaagttcccactcatgacccatataacaagctacaccaagtaagaagtgtagaataattagctcataaggaccaccattgtataaccattcatcaacagatgcagcttcccaaattgggtaaaaatgcaatccgatcgccgcaaaagtaggaataatagcaccagagataatattgtttccatgaagtaaagaaccagaaacaggctcacgaataccatcaatatctactggaggagcagcgatgaaggcgataataaatacggaagttgcggtcaataaggtagggatcatcaaaacactaaaccatccaatgtaaagacggttttcggtgctagttatccagttgcagaagcgatcccataggcttgtactttcgcgtctctctaaaattgcagtcatggtaagatcttggtttattcaaattgcaaggactcccaagcacacgtattaactagaaagaaaatatataatagaaggcttgttatttaacagtataacatagtctatataccaatgtcaaccaagccagccccaacgattggattttcgtataacttcatttaccaaatccaaaaatttgggaaatgaagttagtaaaaatgaaaaactcggattgctcttttctattttccatatgggttacccgagactcaaacccgaaactagtcggttggagtagataattcttccttgttacaatagaaaaaacccctccccaaatcgtgcttgcattt

SEQ ID NO: 6248 - DNA, 1058 bp, Zea mays
  Zm_smallRNAprecursor_1737
aatattataagtatcttcttcctgaccaaatttgtaaccctcattagtaaactcattttcagtggtttccctgaacaaactagaggttaccaaggaaccatgcatagcactgaatagggaaccgccgaatacaccagctacacctaacatgtgaaatggatgcataaggatgttgtgtctacctagaatacaatcataaagttgaaagtacgagatattcctaaaggcatgccatcagagaaacttccttgaccaatagggtaaatcaagaaaacaacagtagcagctgcaacaggagctgaatatgcaacagcaatccaagggcgcatacccagacagaaactaagttcccactcatgacccatataacaagctacaccaagtaagaagtgtagaataattagctcataaggaccaccattgtataaccattcatcaacagatgcagcttcccaaattgggtaaaaatgcaatccgatcgccgcaaaagtaggaataatagcaccagagataatattgtttccatgaagtaaagaaccagaaacaggctcacgaataccatcaatatctactggaggagcagcgatgaaggcgataataaatacggaagttgcggtcaataaggtagggatcatcaaaacactaaaccatccaatgtaaagacggttttcggtgctagttatccagttgcagaagcgatcccataggcttgtactttcgcgtctctctaaaattgcagtcatggtaagatcttggtttattcaaattgcaaggactcccaagcacacgtattaactagaaagaaaatatataatagaaggcttgttatttaacagtataacatagtctatataccaatgtcaaccaagccagccccaacgattggattttcgtataacttcatttaccaaatccaaaaatttgggaaatgaagttagtaaaaatgaaaaactcggattgctcttttctattttccatatgggttacccgagactcaaacccgaaactagtcggttggagtagataattcttccttgttacaatagaaaaaacccctc

SEQ ID NO: 6249 - DNA, 1097 bp, Zea mays
  Zm_smallRNAprecursor_1738
ctgaacaaactagaggttaccaaggaaccatgcatagcactgaatagggaaccgccgaatacaccagctacacctaacatgtgaaatggatgcataaggatgttgtgtctacctagaatacaatcataaagttgaaagtacgagatattcctaaaggcatgccatcagagaaacttccttgaccaatagggtaaatcaagaaaacaacagtagcagctgcaacaggagctgaatatgcaacagcaatccaagggcgcatacccagacagaaactaagttcccactcatgacccatataacaagctacaccaagtaagaagtgtagaataattagctcataaggaccaccattgtataaccattcatcaacagatgcagcttcccaaattgggtaaaaatgcaatccgatcgccgcaaaagtaggaataatagcaccagagataatattgtttccatgaagtaaagaaccagaaacaggctcacgaataccatcaatatctactggaggagcagcgatgaaggcgataataaatacggaagttgcggtcaataaggtagggatcatcaaaacactaaaccatccaatgtaaagacggttttcggtgctagttatccagttgcagaagcgatcccataggcttgtactttcgcgtctctctaaaattgcagtcatggtaagatcttggtttattcaaattgcaaggactcccaagcacacgtattaactagaaagaaaatatataatagaaggcttgttatttaacagtataacatagtctatataccaatgtcaaccaagccagccccaacgattggattttcgtataacttcatttaccaaatccaaaaatttgggaaatgaagttagtaaaaatgaaaaactcggattgctcttttctattttccatatgggttacccgagactcaaacccgaaactagtcggttggagtagataattcttccttgttacaatagaaaaaacccctccccaaatcgtgcttgcatttttcattgcacacgactttccctatgtggaaatagccaatttctattccgaagaggaagtccactaattttgagaatttttaattagtta

SEQ ID NO: 6250 - DNA, 1058 bp, Zea mays
  Zm_smallRNAprecursor_1739
taatctaataaaccacactaatacaaggaaaataatttaacgggaccctaaatcatataaaataaccttatttccgagggcatactaattaccctcggaaattaataatttaaattatatagacacctctacataacattatcacgggtgacaaatcatataaaatgactttatttccgagggtataataattaccctcggaaattaaaaattaaaattatctaagcaccactaattaaatttaggccctcggatataataagataaacattatttaacatactaactattaaataacaacattggaaactacaaaacaatattaatatatacaaaatattaataatacattaaatacattaatattaaataccttacaccggcggccgacggcgggcgggcgtcgacggcggcgagcgggcagagacagagagaagagagaagcgagcgcgcgcgcgtgaaaatgaaccgcgcaccgggccgggaccgtgttaaaaaagcttatctccgacggctagttacgaggccgtcggatataaccttatgtccgacggtctcgtaactagccgtcggagataagtctatatttccgagagcccatgttggccgtcggacataagataatatccgacggcctcgtaggaagtcgtcggagatagagtgaccgtcggatattcatcagtttactgtagtgctcctccatccacaactcttggaatctctccatattgactagaattccgcacaaatggcgatgatccttgttcaggcctttcgccgagcacttgggggcatcgacctggagcttgcttctacacactgttttgggattcttttgccggcatgaacacaaggcacggacggcaacgcatgaacgtggtgacgacgcatctgggggcatgcggaggtttgacatccgtcgcgaacagtgacgatgagatagagcgttgggcgtccatgactagggcgagactggaggcgagggcgctgggagctcgcagcggtgctccacgacggcggacaccacctcaaggtggagcgcactaagccgatgccag

SEQ ID NO: 6251 - DNA, 1075 bp, Zea mays
  Zm_smallRNAprecursor_1740
gtaggcaggttctcgagttgattttgctacgatggcggtcagacgagggatttctacattgctcttcctagaaactgtagtgggttttcagaagctagtggaactttgtaaaggcctcgtagtggatccctagccttcacctcagaagtgtctaaggtccttgcaaaccctggcgacatgggatacacgacttgtgggtacagggcacaacctctgcagagtgtaaaactggtatacttgtcgtgctcgcggtcataagcagctcaaggctctcgcatgattaaattatggaactaaattcaatttgtcatatgcattgcatcgtgggtgttgttatcaattttgatctattattactctggttgatatctacttatacttagtaattgctaataaaattttgaccaactttaaaagcaatgctcagcttcaaccattcactataagaaactaataaatgttcgtgggttaatttaagaacgtgggtatcgacgttcttaattgagttatgttcgtgggttaagttaagaacgtgggtacccacgttcttaaattaaattcgtgggcccgtggtaaaaccgtcgaacttatcgtattagaaaacgtgggtacccacgttcttaacttaaattcgtgggccacatagacaccgtcgaacttaacccaaaaacctaaatctctcaccccgcacgtctctcttctttccctttgtctatcgcgcacgcccgcagctagctgccagctgcgcacccgccgccaccccgcgcccgccccaccgcgcgtcggctcgcgcgccgccacccagtgcggccccgccgccccaccgttaaggcaggttatgcggccgacaagggggcggcgtccgggaacccatagagtcacgtcgtgctggggaggcataggattcggatccggccgtggccgcacccggacctcgtcgaggtgatgcgggcgcaccggatcatggagtgcgtgcaggaggaacagcgccgctggtacggtgtcaaggagccgaggcaggtgctcgctgtcaccccgacctactcacgcgcgttccaggcgctccacctcatcg

SEQ ID NO: 6252 - DNA, 1070 bp, Zea mays
  Zm_smallRNAprecursor_1741
catcttctcagagccgggcacctcgatcttcagtcgacagcgaccagcggtcgtgcatgtgcagcctccagccttgccacgacttacctacctggccaaggcgagttgcgagctactcttgtgaggggcacaccggcccacgcgtcgcacacggtacatatccatggaaccacgtacgcccagatcgatcgtttcgagacaatcttctctttgtccatggcaagacgttggacactgcaacagcaatggtacttgatcgtcagagcactcatcggtggtcagggaaacagttcgagccaatccgccctttcaaagacccggcctgtcgatcctctcgagatcgagtcgttggtccttccgttccacgcgagatcctgttaggtggtcacggaaacagttcgagcctgccttgcaaagaacagctcgctctgagcattggcacacacacaccacaccagtcgctgatattagagaaaattcctggtatgccatcatattttatactcatcccttgtgtgccactgagtggcatataggtatattttttggtgtctatgacatgtggggctagtggcatacaaggaatgagtatattttccagtggcatacagggaattggcccctgatattattccgatcccccacgtgcaacacggcatctaccccaccggactcactatatctacggcccatcagcatacgcacagaccgcgcgctcggtcgactactggctagcttgtttcagtcgtccgatctgatctacagaaaaagcaggggcagggcagctagccatgattcagatgaacatgaagcagcctctcgtgctgcccgcgcaccggggcaatgtcatcggctcgcgcctggcgtcgtcgccctctccggtggcggcggcggcggcggcggccagcaggcggaggggcgtcgtgtcctccccccgctcccggctccagcgccacatgcggctgccgaggatcagctgcagcgccaccgaggaggccagcggcgccgtgtcggccgtcaccgtggagaagatgctgacggtgacggcctcggtgcaggcggcgccggcc

SEQ ID NO: 6253 - DNA, 1091 bp, Zea mays
  Zm_smallRNAprecursor_1742
cgtagtgatggccccgcttgacacaattatatttttttattttacaaaaaacgtatataaatgtgtacaatttatattcaatattaaaaacacctgatcataatgttctactggttagacggcttcacctagtgtctcccgcccttcttccattagggcatgggttcgaagcccaccctctgcaccgcttttttaacattatacgctgatttaaccaaaagacccaatgggctaaagggccgacccgacacagtcagtaggccaacatgtcatgcctggtctagagttggggcccgcgtgcccgtgtcgggccgccatttggtcatctatatgtggaggtgtgttttggaacgtggaggttggttgcacggagcggacggttgtgcagcgagttaatttgaaatagatgattggacgtggaggttggttgcgtggagcggacggtcatgcaacgggttaatttgaagggttttttaaattggtgtccttagttttggtggtgtgctcacctatacccttagtcgtgttttttgctcaactgtgcccttccagtgctatagaacagaagggcacaacttagcaagaaacacgactaagggtataggtgagcacaccaccaaaactaaggacaccaatttaaaaaacccttcaaattaacccgttgcatgaccgtccgctccacgcaaccaacctccacgtccaatcatctatttcaaattaactcgctgcacaaccgtccgctccgtgcaaccaacctccacgttccaaaacacacctccacatatagatgaccaaatggcggcccgacacgggcacgcaggccccaactctagacaaggcacggcatgttggcctgctgactgtgccgggccggccctttagcccattgggtcttttggttaaatcagcgtataatgttaaaaagcggtgcagatggtgggcttcgaacccatgccctaatggaagaagggcgggagacactaggtgaagccgtctaaccagtagaacattatgatcaggtgtttttaatattgaatataaattgtacacatttatatacgttttttgtaaaataaaaaatataatcgtgt

SEQ ID NO: 6254 - DNA, 1098 bp, Zea mays
  Zm_smallRNAprecursor_1743
aaccaaattggcacaggtggaataagtcagttgcaatagaaaatactaaaattattgctactttgtgtacaacataaattacaaaatacatgtgaatgtgtgaactaagctatcataaaaaacaaaaaagtaaatcaaattgcaacttgtaacatatgacagttgtaacaataaacataaaacaattacaacttgtgtaattggaagagtaagttgcaagggcaaaaattgaatgtgtgtgttgagcttacagctacgaagatcccgcatccactgatgggtgcgttgatgcctttctccgcaaaatcctttttataaagacaagtagctatgttgagcctgtcaactaccgctttgcaccagttcttgttggccatattctggatgtcctgagtatactttacatcatcaatcctgatgcgagtgtcagtgttggagaatagcatacactaaaatgcagccatgaaaaaggctctcaggcccagctccctagtgagaatcctcttctgcagtcgatcagtgataatagatagattgataccagatctgcgtctataagagttgccacaaatttgctctcccagctcgtcccgcaaggcacgagcatctgcatcagactggggggcgggtcatgaccaacatttggtaactgcaaaacacaccaaacactatgctcagtgattggaatctcttttccaccaccaatctctaatttcatcgtctccgggttaagcttccacatcagccagctgagcaattttctagacaataagtgcggcttgaatctcaacaggctgccaaaccccttggcaactacttcacctttcaattcatcggagagagcattcacaagctttatgaacttctcaggtgagcatcatatagctcgcgtcttagttttacccttattctcatcgccaccaataataacaacattgtcgtcgccagaaccatcgccggcaggagcaaactctgggtcttgttcatcatcactttcttcatcttgaataggagacaaggggactttcaaccttaacctcttcctcctttccttcaattcatttttatctaattcctttctcttgttttgtacacgag

SEQ ID NO: 6255 - DNA, 1088 bp, Zea mays
  Zm_smallRNAprecursor_1744
cggatcttcagctttcacaaacaagggcggacgtgtcttcgagaagtccagataagaagtttcgcgggggccctgttgatagccccgcccaccctgctgctggaactgttgacccgccatttctctcagaaagcgggtattgtcagcagttgcgttcattaaggcggcaatcgcctcagccagtgtgggaggaacaggaggtggatttggtgtagattccctccccgggaggtaccagctccgtcctgagctcgagtcttggaaggcatctgtggcaacaacatttgaaaacaatatgatatgccaaagaaaaagccatccattttacattaccaaaagtaatgttacagactcagactcttacaacaggatacattacctagtatacaatagcactacctattatacactagtacaacctacaatacactacattacttctattacaccactagtcctgcttcccgttgcttttggcggcctcgtcgtcgggtgtgggagaccattcgtcgaccagcctcatggaaggagggggctgaaaaaggtctaactcaccaccaagcgcgtgtcccgtaacatgggagggtccggcttccgactcaacagggtacgcaggtgcactagggtgtaattgcgaatatagtacatggacttcctcatgtaaagaattgcaatagacctgcaggttgtcaacagctgagctaagttccttgattcgggattgagccctctcctccttagcacaagccagcaaacgggactgaactgcccagtcgagcgccaagtcccgatcagcaagctgatctcgcaggtggcggatgtctcttcttaattcatttattctatccccatccacaacccatatgttggtcctgtgttgcaattctgcttgaagttgatttactcgtgcttcaagatcccctattggatcattgctcccgctgctactatccccatgtcgaggggctagttgatgccgaggcacaccgattggtccagttgacttgcgcgccgttttccttgtgcgcggcggcatctttctaagggggaaaatttaattagtataattcttagcatgatgcatgtgt

SEQ ID NO: 6256 - DNA, 1061 bp, Zea mays
  Zm_smallRNAprecursor_1745
cttcttttaggaaagagagcatataggctctagctcctcaattgctgaacaaccatatatatctttccagaataacatgttggtgctatcatcaccaacctctgcaacaactgcttgggggaagagattgaatgcggccatttatatgaattgagaacttcaatcgtggcttgtttgggtcaattttttgcagccacagcttgtaatgctcatccaagacatttgtcagaaatatcaagcccgcaagctccctgagcgagtgagtggctcaccttgggcgaatctcttaggcagtgacctccattggctaacttcatccctcaccaaaggaaacttctaattttatcaatagccttaataacccaaggaggaagatcgattgccattgataagtaaacaacctgagtggtcataacatactgaagcttaacagtgtaaccaacttatcatgactcatgaggtctgccctccaccctgagggcttgttcggttattttcaatccatatggatcggaggggattgatatggattggaggggattttgacttactagggattgaaaccccctcaatccatatggattggggtagaaccgaacaagccctgagggttgatcagtgtcaagcgcctcagcacctaacagcgccgggccacgactacgcagattgtagtcgcgctccaggccttcaccgagagggagagcccctgccggtggcttgagagagttgagggagagagcaggtttggtgataactgattgcttgattccattcctccacgtctgattacattatataggccattgcccccactaatggctcctatattttaggcatagaagggaaactattgatttgggtaaaaagggaaactaatagaaaggaaactattgatttggggaaaaaggaaactaatctgttgtttgaattttgaaatctcagccactaatggtggcgccatcctgtgtagcgtgagcagcgcgctcagctgcgcgtctgatgtcacgacggcgcctatacttgcgcccgtacatgacatctccccccccctcgacgtccag

SEQ ID NO: 6257 - DNA, 1048 bp, Zea mays
  Zm_smallRNAprecursor_1746
ttggttacaagaaacaaggcatggctggttgctcagggtttcaatcaagtggaaggacttgattttggtgaaacctatgcaccagtagcaaggttagagtccataagaatattaattgcctatgctactaaccatgatttcaaattgtatcaaatggatgtcaaaagtgctttcctaaatggaccactgcaagaattggtctatgtggagcaaccaccgggctttgaagatcctaagaagccaaaccatgtctaccttcttcacaaagcgctctatgggcttaaacaagctcctagagcatggtatgaatgtcttaaagatttcttgcttaaaaatggttttgaaataggaaaagtagactctactttattcactcgcaaagttgacaatcaattatttgtttgtgaaatatatgtcgacgacattatatttggcagtacagatgaaactttttgtgaggaatttagtagggttatgacaaataggtttgagatgtccatgatgggtgagctcaagtacttcctgggttttcaagttaaacaactcaaggaaggaacctttctgtgccaaaccaagtacacacaagacatgctcaaaaagtttggcatggaaaaggcaaagcatgccaagacaccaatggcttcaagtggtcatctcgacttaaatgaagaaggtaaaactgtagatcaaaagctttatagatcaatgataggatctctactatatttatgtgcatctaggccagatatcatgcttagtgtgtgtatgtgtgcccgttttcaagctaacccaaaagagtgtcacttagtggccgttaagagaattttgagatatctagttcacacccaaaatctaggtctctagtatcctaagggctcctttttcgatttatttggctactctgattcagactatgctggttgtaaagtagatcgaaaaagcacctcggggacttgccaattccttgagcggtccctagtgtcttggagctctaagaagcaaaactgtgttgcactttccactgccgaggtcgaatacatagctgctg

SEQ ID NO: 6258 - DNA, 1132 bp, Zea mays
  Zm_smallRNAprecursor_1747
ccataagaccattgcactcaaacaaagatccaactcaagcatgtcaaccaatcaccatcacatggttgttatttattaatatgataacttaaaagagtatcatcgtctaacgtgaggcataacttattacatcatgtctcaaaacagctaaagcagcctagtgaaagattcgggctccccatagcgcagcctcttgcggggaggagacaacgccatggcggggacctgagctttgggcggatccagtccttgcagttgggcttccagggctgcaatcctggcatgggcattctccagctccaagtgcaccctagagagatctagggtggcactgtccaagtcggtgttgagaccggccactacaccagctagggtgttgaggcgatcctcaccagcttctcctgggacgttgctggtctgacttcctccacgcagacgctgaggaagatgtctgaacctcatgttctgcatctgctgccggtaggtgtggctgagcgaccacagggtccgacgggcagcatcactgaccgaggcagcgtaggtggacagtggtgtcagggactcgtgagcagacagagtcctgaatcccctgtcccctgcatccatcaccctgacgtggatgcgagtgatgtagtagcaagcccggggaggctcgcttactcgccttgtttcgtacagggggcgggcgtaggtgcctagcgcgtgcagcacttcttgcagcaggttggggaagtgccccgtctcgaacattgatgtataatgttcgacaacaggaccaaaccccatgaagtagtcctgctgggcgtagtcagcttcctcgtggacgtgttcgtctccaccttctttgtcgtcgtcatcctcgtcatcgtcatccctaagtcgtcggggtcgtcgcctctgggtgcaggtgcttggaaggctggtgcaggcggtgctgacgtcgatgacctagctgcgaatgccagggactctgccaatggggtgggtgtcggcagctgctcctccgagctatcctccaggttgactacattctccactcggatgggagggagatccgccggaacttccttgactaccactaggtagaccaggatctgccagggttgaggggcgtagctggtgttgatgcggg

SEQ ID NO: 6259 - DNA, 1114 bp, Zea mays
  Zm_smallRNAprecursor_1748
cgcaatgtgtccaagatgtaaaggcgaggcgaagatttacggcgacggccagtcccaatcacatcccctgtgagtcgatcctgtacaaaacaagatgagtcatcaaatccaacaaagcaattgtgatcggtaatttgaccaactgataaaagatccatggataattcaggtacaaagaaaatatttgggacagtaaagtttgaattggaaagagaacccttgtgggtgacatgacataatgtaccatcagcagtctgaacagaagtaccctcggtgacaggtgcagtagaagccaggcgtgactgatcagatgtcacatgaaatgaagctccagagtccagaacccaagtagatgacaaagcaccagcagatgaagtagcagcaacagcaactgagcctctaggagatggtcctgtaccacgaccacgagtagcacgacggacacgaaaatcagccagcttctctggatacttagtaaagcagttctcagaccgatgagtggtcttcttacaatgctcacaaggcggaaaggaggtgctcctggacttctgagcagtagccaatacactgtgcgaactgacaccagtaatagaagacatggacttaaggcgagtctcttcagcaagtaattcagacaacgcctgagccatggtgagagtatcagaagtgtgtagtaaccttgcacgaagagaatcaaattctggtcgaacgcccataacaaatctgtaggtaaagaacttctcaatgaacttatgggctgggcaaggcacagctgtacaagcaggcaccatggaggtcaaagcactcataagacgatcaaaagctgaatagtaatcatcaatggacatatcttgttgctcaatgacatgagtttgctgcataagagtatgtaaaagagccccactgtcctgaacaaaccgatccttcagatgagaccagatagccctagcagtggtgaatttggacagactcataatcatagttggtttagtactattgaccattgcagccattactttgccatcattgatttgccaagtcttgattgcagctgcgttgcttctatcagctgctaaaactggagaatcttcagttaaatgaaatagtaaatcat

SEQ ID NO: 6260 - DNA, 1070 bp, Zea mays
  Zm_smallRNAprecursor_1749
ctagactaagcaataaagtacctcttattttaccttctacttctggctgtctcgtaataccttctgcagcttgtcctgtagcagtaccttgaccaacttcaggcccaatagaagcaagccctatggccaatctagcagcaataacgaaagcaacaacaattagtggattcatgatgagttcctcgtgtaaaaaagaaatggttaaggatacaatcaaccaagaaattattacttccaacttctaagctctattgggtagaagtaactaataagtacaaataaatgataatcgaaatcgttcgaattacttcaagatctcgtttttagtttctaatcattagaggtttgtgtaaatccatatcattctcattattctatttctctttcttttcaaccaatcactcttttattccatccttttttactcttcgatatctctgagttcccattttccccgttccactaacataataaaagacgaaataatggaagaacctctatcatgcttgcatatccatcatttgagtctccaacaattattccaataattacatatccgatttgccctatggacgaatatgcaagcatacgtttcatgcttgtttgagtaatagcaaggagattccccaatatcatgctaagaatagctaggatttctagaagaagatgcatttgtttgatgagaaataaaaaagaaatatcgagaattcacgtggctaaagctgaagcagctactttcgaagtaacagaaagaaaagcaacgactggactggggagtcggagtcaaaaagaggattcctcgcttctttctctcatgcaaaaccgtgcatgtgaatttcatctcgcgcagctcctaagttataaaagaaagaagaactctgcttctttcttttttgattaccttcctcacgtatgtataagatcgattccattctttttcaaaatggatttcgaaaaagaactactaatccttaacttttcgaggaatccttcattagtggttgtgaatgtctgactttttcaatcctttcgacctgggttccgtaggagcaagtcagaatatttcggaa

SEQ ID NO: 6261 - DNA, 1098 bp, Zea mays
  Zm_smallRNAprecursor_1750
ctagccaagtactgagatagacaacctaagtggttggtgagtaggagattacttcatttatatacgcagcttaagaactgtaggttactgttatacccgatgggtatcagtaacccgtccgatacctaatagttacaagcacgagtataaatttttacccgtggatataatcacggatgagtataattaatccccgcgggtatagtcacggacggatatttactttactcgatctaaatctgacccgttgccatccctactcacacaaggagcgtataattggcccttgtaaatcgagaacaagaagaaaaaaaacttgttccattaatcgccaaaacgattaagatatatgtaacttctatattgagagcaatgttgagcaagaaaaccgcagtggacagcaacattttgataagttccagcacaaaaaagggtgtcatgaaaaagaaccgttttccaaatcgcaaaaaaagatatgtaattgcagcaaaaaaaaaaagaacctgtcagacaacccatgagccaccccagccaggttagactaggaacgatcctctacagcaccggaacaggcatcagagccaaatcctggccgttaatcacgctctggcccacaggtcatggttcatcaaccaggtttaagtgcttgcctccttatcaaatcaaggatgcaacggtacgatcctatagaacagatcctgttcaagtaaggtcgtgctgccaaactccagagctaaccttttaaatttgcgttcgctcgtatgagcaagcgaggtggtgctaatcgggtgcgggactagccagcaatcccagcagatcgcgtactgggccgctccattcctggtatattgttgctctcctgtgtgtgggcttcaggtcgagagcctgcaccagctttatcttgttgatgcctcgcctaattgtagttcattcattatttcattcttcacacagctcaatcattcggaccttgtctttaggccaaacaatgacgtgcagcaatgacaatgacgtgcagtgattttgcagttagccacagattggtaatgtcgtattgaatcacaaaataattgagatacagacatttcagtagtagac

SEQ ID NO: 6262 - DNA, 1098 bp, Zea mays; identical to SEQ ID NO: 6261
  Zm_smallRNAprecursor_1751

SEQ ID NO: 6263 - DNA, 1097 bp, Zea mays
  Zm_smallRNAprecursor_1752
tagccaagtactgagatagacaacctaagtggttggtgagtaggagattacttcatttatatacgcagcttaagaactgtaggttactgttatacccgatgggtatcagtaacccgtccgatacctaatagttacaagcacgagtataaatttttacccgtggatataatcacggatgagtataattaatccccgcgggtatagtcacggacggatatttactttactcgatctaaatctgacccgttgccatccctactcacacaaggagcgtataattggcccttgtaaatcgagaacaagaagaaaaaaaacttgttccattaatcgccaaaacgattaagatatatgtaacttctatattgagagcaatgttgagcaagaaaaccgcagtggacagcaacattttgataagttccagcacaaaaaagggtgtcatgaaaaagaaccgttttccaaatcgcaaaaaaagatatgtaattgcagcaaaaaaaaaaagaacctgtcagacaacccatgagccaccccagccaggttagactaggaacgatcctctacagcaccggaacaggcatcagagccaaatcctggccgttaatcacgctctggcccacaggtcatggttcatcaaccaggtttaagtgcttgcctccttatcaaatcaaggatgcaacggtacgatcctatagaacagatcctgttcaagtaaggtcgtgctgccaaactccagagctaaccttttaaatttgcgttcgctcgtatgagcaagcgaggtggtgctaatcgggtgcgggactagccagcaatcccagcagatcgcgtactgggccgctccattcctggtatattgttgctctcctgtgtgtgggcttcaggtcgagagcctgcaccagctttatcttgttgatgcctcgcctaattgtagttcattcattatttcattcttcacacagctcaatcattcggaccttgtctttaggccaaacaatgacgtgcagcaatgacaatgacgtgcagtgattttgcagttagccacagattggtaatgtcgtattgaatcacaaaataattgagatacagacatttcagtagtagac

SEQ ID NO: 6264 - DNA, 1097 bp, Zea mays; identical to SEQ ID NO: 6263
  Zm_smallRNAprecursor_1753

SEQ ID NO: 6265 - DNA, 1103 bp, Zea mays
  Zm_smallRNAprecursor_1754
tttactttgcccgatctgaatttgacctgttgacatccatactcacacaaggagcgtataattggccccttgtaaattgagaacaagaagaaaaaaacttgctccattaatcgccaaaacgattaagatatatgtaacttctatattgagagcaatgttgagcaagaaaactgcagtggacagcaacattttgataagttccagcataaaaaagaaggaacaattggatttataccattaaaagatccaaactttagatatataccatggaccccacatgtcattgactcatgtggacccacatgtaagtgagatagtaatggtatggatccaaagtggtgatcttttaatggtatggatccaaatttccaaaaaagaacctgtcatgaaaaagaacttccaaatcgcaaaaacaagatatctgtaacttctacgttgagagcaatgttagcaacaaaataataaactggtttttgataagttggagcatacaaaaaaagaacctgtcagacaacccatgagccaccctagctaggttagaactggcgaggaacgatcatctacagcactggaatagggcatcagagccattcctggccgttaatcacgctctggcccacaggtcatggttcatcaaccaggtttaagtgcttgcctccttatcaatcaaggatgcaacggtacgatcctatagaacagatcctgttcaagtaaggtcgtggtgccaagctccagagctaagcttttaaattagcgttcgttcgtctgtgccaccgaggtggtgctaatcggctgcgggactggccactggccagcaatcccagcagatcgtgtactgggccgctccattctggtatatcgttgctctccagtgtgtgggcttcaggtcgagagcctgcaccagctttatcttattgatgcctcgcctaattgtagttcattcattcttcacacagctcaatcattcgtcctccttgtctttaggccgaacaagcctaaagtcttactgccaacaatcacaatcagtgcaaaataacagtaggaaggatgaaaagcgtgcgtcgtcttctatcatttaaaactgacaacctcgtttttccggg

SEQ ID NO: 6266 - DNA, 1103 bp, Zea mays; identical to SEQ ID NO: 6265
  Zm_smallRNAprecursor_1755

SEQ ID NO: 6267 - DNA, 1102 bp, Zea mays
  Zm_smallRNAprecursor_1756
ttactttgcccgatctgaatttgacctgttgacatccatactcacacaaggagcgtataattggccccttgtaaattgagaacaagaagaaaaaaacttgctccattaatcgccaaaacgattaagatatatgtaacttctatattgagagcaatgttgagcaagaaaactgcagtggacagcaacattttgataagttccagcataaaaaagaaggaacaattggatttataccattaaaagatccaaactttagatatataccatggaccccacatgtcattgactcatgtggacccacatgtaagtgagatagtaatggtatggatccaaagtggtgatcttttaatggtatggatccaaatttccaaaaaagaacctgtcatgaaaaagaacttccaaatcgcaaaaacaagatatctgtaacttctacgttgagagcaatgttagcaacaaaataataaactggtttttgataagttggagcatacaaaaaaagaacctgtcagacaacccatgagccaccctagctaggttagaactggcgaggaacgatcatctacagcactggaatagggcatcagagccattcctggccgttaatcacgctctggcccacaggtcatggttcatcaaccaggtttaagtgcttgcctccttatcaatcaaggatgcaacggtacgatcctatagaacagatcctgttcaagtaaggtcgtggtgccaagctccagagctaagcttttaaattagcgttcgttcgtctgtgccaccgaggtggtgctaatcggctgcgggactggccactggccagcaatcccagcagatcgtgtactgggccgctccattctggtatatcgttgctctccagtgtgtgggcttcaggtcgagagcctgcaccagctttatcttattgatgcctcgcctaattgtagttcattcattcttcacacagctcaatcattcgtcctccttgtctttaggccgaacaagcctaaagtcttactgccaacaatcacaatcagtgcaaaataacagtaggaaggatgaaaagcgtgcgtcgtcttctatcatttaaaactgacaacctcgtttttccggg

SEQ ID NO: 6268 - DNA, 1102 bp, Zea mays; identical to SEQ ID NO: 6267
  Zm_smallRNAprecursor_1757

SEQ ID NO: 6269 - DNA, 1094 bp, Zea mays
  Zm_smallRNAprecursor_1758
gtcggcatctgcatagccaactatttgtagggaattagatcttctgtacgtaagcatgagacctttagtaccttgaaggtaccttagagccttcttgactgctttccagtgttctatgcctggattcttctgatagcgtccaagcatcccggtggtaaaagctaagtcagggcgagtacatacttgagcatacataatgcttccgatagctgaagcatatggtactgacttcatcttgtttttctcatactgattcttgggacactgatattccccaaacttatcaccttgactattggaccaggcgaggcattacacttgtgcatattatgcctctttagtacattttctatatatgacttctgtgagagtcctaatactcccttttgtctgtctctgtgaatttctattccaagaacataggaggcttctcccatgtctttcatatcaaaattcgaggaaagaaacccttttgtttccgctagtagatccttatcactactagctaagagtatgtcatcgacatacagaacaaggaagatatactttccttttctaaattttgcataaatgcaattgtcttccttgttttcctcgaaaccaaactttcttatagtctgatcaaacttgatgtaccactgtctggaggcctgttttaatccataaatggacctcctcaagtgacatcccatgtgttctttaccgctcacaacaaaaccctttggttgtgccatgaacacgttttcttctaactctccatttaggaatgctgtctttacatccatctgatggagctctagatcaaaatgagcaactagtgccattatgatcctgaatgaatcttttgttgagacaggtgagaaggtttcatggtagtcaatgccttctctctgtgtgaaccctttggccacaagtctagccttgtatctttctatgttccctctggagtcacgctttgtcttgtagacccatttacagcctactgttttggctccatggggaatgacttctaagtcccaaactttgttcattctcatggattctaattcatcttccatggcagataaccatttggatgaatttgcacttctcat

SEQ ID NO: 6270 - DNA, 1043 bp, Zea mays
  Zm_smallRNAprecursor_1759
ttctcggctgcacacgagcgcgaggggacaaagattattaatcaactgattataattaagcatgatatgcacggcgtacgtgcatgggcagatcagcgtgtctgtgtgttagtaattaagcacctttcaaagtctggcgcccggcgttctacccgggttttattcagcctgttgatgatctcgttacccgggatttttgctacataattacgtatagcacatgtgtgtgagtgtatagctaggaatattgtcgctcaggcgtgagtattatttgctagctacaggcgcaggataaaaaaaaatctaggcgagaaataaatttaagcggacacaccaacgatataaacaaaaaaaacaaaaaaaatgcaaactatggggcttgaacccacgaccacatggttagaagccttgtgctctaccaagtgggctagatgggctttgtgctcatgtctgcaacaaatattttaataacacaaccgagctcggcgccaagatctatggcgccgagctcggttccacgtcgacgccacgcgtctgggtcgtgccaacgcaacacgacctcggcgccatagcctatggcgccgagctgtgttagctcggcgccacggcctatggcgccgagcaaagggtccaaaactgcatttaaaatttttttaggtctaaacgtgattttacttcagtttaggggctaaaatacaaaaaattcggtccatccgtgcactgcactgtccgtgtctctttcccccatgctcttgtagtgaagttaagcgcgtgacattaatgccatggtccagtgaaggtacacgagggcatgacatatgatgattatcagtaagtagcccagctagagatgtcaatggggaattccccaccggattatagcatctcatactcatccccatcatgtttgatccatccccgtacccacccccatacccatcatgggtgcaaatctcatctcatactcatccccattcgggtttcgggtccccaatgggtcctcatccccaattaagatataactaggtactaacaggtagcac

SEQ ID NO: 6271 - DNA, 1044 bp, Zea mays
  Zm_smallRNAprecursor_1760
ttctcggctgcacacgagcgcgaggggacaaagattattaatcaactgattataattaagcatgatatgcacggcgtacgtgcatgggcagatcagcgtgtctgtgtgttagtaattaagcacctttcaaagtctggcgcccggcgttctacccgggttttattcagcctgttgatgatctcgttacccgggatttttgctacataattacgtatagcacatgtgtgtgagtgtatagctaggaatattgtcgctcaggcgtgagtattatttgctagctacaggcgcaggataaaaaaaaatctaggcgagaaataaatttaagcggacacaccaacgatataaacaaaaaaaacaaaaaaaatgcaaactatggggcttgaacccacgaccacatggttagaagccttgtgctctaccaagtgggctagatgggctttgtgctcatgtctgcaacaaatattttaataacacaaccgagctcggcgccaagatctatggcgccgagctcggttccacgtcgacgccacgcgtctgggtcgtgccaacgcaacacgacctcggcgccatagcctatggcgccgagctgtgttagctcggcgccacggcctatggcgccgagcaaagggtccaaaactgcatttaaaatttttttaggtctaaacgtgattttacttcagtttaggggctaaaatacaaaaaattcggtccatccgtgcactgcactgtccgtgtctctttcccccatgctcttgtagtgaagttaagcgcgtgacattaatgccatggtccagtgaaggtacacgagggcatgacatatgatgattatcagtaagtagcccagctagagatgtcaatggggaattccccaccggattatagcatctcatactcatccccatcatgtttgatccatccccgtacccacccccatacccatcatgggtgcaaatctcatctcatactcatccccattcgggtttcgggtccccaatgggtcctcatccccaattaagatataactaggtactaacaggtagcaca

SEQ ID NO: 6272 - DNA, 1041 bp, Zea mays
  Zm_smallRNAprecursor_1761
ctcggctgcacacgagcgcgaggggacaaagattattaatcaactgattataattaagcatgatatgcacggcgtacgtgcatgggcagatcagcgtgtctgtgtgttagtaattaagcacctttcaaagtctggcgcccggcgttctacccgggttttattcagcctgttgatgatctcgttacccgggatttttgctacataattacgtatagcacatgtgtgtgagtgtatagctaggaatattgtcgctcaggcgtgagtattatttgctagctacaggcgcaggataaaaaaaaatctaggcgagaaataaatttaagcggacacaccaacgatataaacaaaaaaaacaaaaaaaatgcaaactatggggcttgaacccacgaccacatggttagaagccttgtgctctaccaagtgggctagatgggctttgtgctcatgtctgcaacaaatattttaataacacaaccgagctcggcgccaagatctatggcgccgagctcggttccacgtcgacgccacgcgtctgggtcgtgccaacgcaacacgacctcggcgccatagcctatggcgccgagctgtgttagctcggcgccacggcctatggcgccgagcaaagggtccaaaactgcatttaaaatttttttaggtctaaacgtgattttacttcagtttaggggctaaaatacaaaaaattcggtccatccgtgcactgcactgtccgtgtctctttcccccatgctcttgtagtgaagttaagcgcgtgacattaatgccatggtccagtgaaggtacacgagggcatgacatatgatgattatcagtaagtagcccagctagagatgtcaatggggaattccccaccggattatagcatctcatactcatccccatcatgtttgatccatccccgtacccacccccatacccatcatgggtgcaaatctcatctcatactcatccccattcgggtttcgggtccccaatgggtcctcatccccaattaagatataactaggtactaacaggtagcac

SEQ ID NO: 6273 - DNA, 1042 bp, Zea mays
  Zm_smallRNAprecursor_1762
ctcggctgcacacgagcgcgaggggacaaagattattaatcaactgattataattaagcatgatatgcacggcgtacgtgcatgggcagatcagcgtgtctgtgtgttagtaattaagcacctttcaaagtctggcgcccggcgttctacccgggttttattcagcctgttgatgatctcgttacccgggatttttgctacataattacgtatagcacatgtgtgtgagtgtatagctaggaatattgtcgctcaggcgtgagtattatttgctagctacaggcgcaggataaaaaaaaatctaggcgagaaataaatttaagcggacacaccaacgatataaacaaaaaaaacaaaaaaaatgcaaactatggggcttgaacccacgaccacatggttagaagccttgtgctctaccaagtgggctagatgggctttgtgctcatgtctgcaacaaatattttaataacacaaccgagctcggcgccaagatctatggcgccgagctcggttccacgtcgacgccacgcgtctgggtcgtgccaacgcaacacgacctcggcgccatagcctatggcgccgagctgtgttagctcggcgccacggcctatggcgccgagcaaagggtccaaaactgcatttaaaatttttttaggtctaaacgtgattttacttcagtttaggggctaaaatacaaaaaattcggtccatccgtgcactgcactgtccgtgtctctttcccccatgctcttgtagtgaagttaagcgcgtgacattaatgccatggtccagtgaaggtacacgagggcatgacatatgatgattatcagtaagtagcccagctagagatgtcaatggggaattccccaccggattatagcatctcatactcatccccatcatgtttgatccatccccgtacccacccccatacccatcatgggtgcaaatctcatctcatactcatccccattcgggtttcgggtccccaatgggtcctcatccccaattaagatataactaggtactaacaggtagcaca

SEQ ID NO: 6274 - DNA, 1190 bp, Zea mays
  Zm_smallRNAprecursor_1763
agtcatgttttggtgggcgcaatggtgaagaaacagagatggatgatagtccattcaagagggagtcaggttcagataagaatcccgggttcccaattaaatcaattagacattccctgcaccagggaaaaaagtcaataacggaccgtctacatctaccaaaattgacagctgcaacataaacaaaataaaatctggttaaaatatgccaaaattagaatgcacatctaaatttctttactagaatgactgctatattttttgtattcatcttatcctgaaaagttttaaacagttgagagaagagtgtgatatcagcaggaccagcttcatgcttatgtatcactgcaaaatcaactagatctgagagatgcattatgcatatcaattagatctttcattttgaagatttatactggaaaactttcaccaagtgcactaaataagaataccataacattcacttaactattctgttattctcggcaacaactgctatgcaagcagtccttctgtgcaagcgtgcaagcaaatcatctgatccattagatcgtgatccaaccgtaggtcacatttaacacttaaacccttccaccaccagctcaataatctttataaaagaacccctaacaaaccatggttgtatctgcggttggatcgtaatctaatgaatcagatgatttgcttgcacgcttgcacagaaggactgcttgcataacagtcgttgccgttattctcatatttgttatagtccgcaatagtactaagagtaaagctcatttgaaaggatacaacctgtcatgaccaaagcgcaccaagcaagaagtggcagcaccagctttgcagtacttgcatcccttcacaatgcgacagggcagattgatggaatccgccagggtctttttgttttgctcgcaaccaaagcaggcaggatcaatgcaagaaaatggaattgacaagaatagggtgacgataaataaaatagcgaatcatatatgatgcttcaaggtgaagcagcttttctccttataaaatatcaatatgatcgaattgatactagaaaaatattcatgatatgagcgtttgggagcggagagaacgagaaggccacacaagaccagcttagagtcttagcaaagagataattgcaactacatcatagaaaggaagacaagtaatattgtgccata

SEQ ID NO: 6275 - DNA, 1191 bp, Zea mays
  Zm_smallRNAprecursor_1764
agtcatgttttggtgggcgcaatggtgaagaaacagagatggatgatagtccattcaagagggagtcaggttcagataagaatcccgggttcccaattaaatcaattagacattccctgcaccagggaaaaaagtcaataacggaccgtctacatctaccaaaattgacagctgcaacataaacaaaataaaatctggttaaaatatgccaaaattagaatgcacatctaaatttctttactagaatgactgctatattttttgtattcatcttatcctgaaaagttttaaacagttgagagaagagtgtgatatcagcaggaccagcttcatgcttatgtatcactgcaaaatcaactagatctgagagatgcattatgcatatcaattagatctttcattttgaagatttatactggaaaactttcaccaagtgcactaaataagaataccataacattcacttaactattctgttattctcggcaacaactgctatgcaagcagtccttctgtgcaagcgtgcaagcaaatcatctgatccattagatcgtgatccaaccgtaggtcacatttaacacttaaacccttccaccaccagctcaataatctttataaaagaacccctaacaaaccatggttgtatctgcggttggatcgtaatctaatgaatcagatgatttgcttgcacgcttgcacagaaggactgcttgcataacagtcgttgccgttattctcatatttgttatagtccgcaatagtactaagagtaaagctcatttgaaaggatacaacctgtcatgaccaaagcgcaccaagcaagaagtggcagcaccagctttgcagtacttgcatcccttcacaatgcgacagggcagattgatggaatccgccagggtctttttgttttgctcgcaaccaaagcaggcaggatcaatgcaagaaaatggaattgacaagaatagggtgacgataaataaaatagcgaatcatatatgatgcttcaaggtgaagcagcttttctccttataaaatatcaatatgatcgaattgatactagaaaaatattcatgatatgagcgtttgggagcggagagaacgagaaggccacacaagaccagcttagagtcttagcaaagagataattgcaactacatcatagaaaggaagacaagtaatattgtgccataa

SEQ ID NO: 6276 - DNA, 1188 bp, Zea mays
  Zm_smallRNAprecursor_1765
gtcatgttttggtgggcgcaatggtgaagaaacagagatggatgatagtccattcaagagggagtcaggttcagataagaatcccgggttcccaattaaatcaattagacattccctgcaccagggaaaaaagtcaataacggaccgtctacatctaccaaaattgacagctgcaacataaacaaaataaaatctggttaaaatatgccaaaattagaatgcacatctaaatttctttactagaatgactgctatattttttgtattcatcttatcctgaaaagttttaaacagttgagagaagagtgtgatatcagcaggaccagcttcatgcttatgtatcactgcaaaatcaactagatctgagagatgcattatgcatatcaattagatctttcattttgaagatttatactggaaaactttcaccaagtgcactaaataagaataccataacattcacttaactattctgttattctcggcaacaactgctatgcaagcagtccttctgtgcaagcgtgcaagcaaatcatctgatccattagatcgtgatccaaccgtaggtcacatttaacacttaaacccttccaccaccagctcaataatctttataaaagaacccctaacaaaccatggttgtatctgcggttggatcgtaatctaatgaatcagatgatttgcttgcacgcttgcacagaaggactgcttgcataacagtcgttgccgttattctcatatttgttatagtccgcaatagtactaagagtaaagctcatttgaaaggatacaacctgtcatgaccaaagcgcaccaagcaagaagtggcagcaccagctttgcagtacttgcatcccttcacaatgcgacagggcagattgatggaatccgccagggtctttttgttttgctcgcaaccaaagcaggcaggatcaatgcaagaaaatggaattgacaagaatagggtgacgataaataaaatagcgaatcatatatgatgcttcaaggtgaagcagcttttctccttataaaatatcaatatgatcgaattgatactagaaaaatattcatgatatgagcgtttgggagcggagagaacgagaaggccacacaagaccagcttagagtcttagcaaagagataattgcaactacatcatagaaaggaagacaagtaatattgtgccat

SEQ ID NO: 6277 - DNA, 1189 bp, Zea mays
  Zm_smallRNAprecursor_1766
gtcatgttttggtgggcgcaatggtgaagaaacagagatggatgatagtccattcaagagggagtcaggttcagataagaatcccgggttcccaattaaatcaattagacattccctgcaccagggaaaaaagtcaataacggaccgtctacatctaccaaaattgacagctgcaacataaacaaaataaaatctggttaaaatatgccaaaattagaatgcacatctaaatttctttactagaatgactgctatattttttgtattcatcttatcctgaaaagttttaaacagttgagagaagagtgtgatatcagcaggaccagcttcatgcttatgtatcactgcaaaatcaactagatctgagagatgcattatgcatatcaattagatctttcattttgaagatttatactggaaaactttcaccaagtgcactaaataagaataccataacattcacttaactattctgttattctcggcaacaactgctatgcaagcagtccttctgtgcaagcgtgcaagcaaatcatctgatccattagatcgtgatccaaccgtaggtcacatttaacacttaaacccttccaccaccagctcaataatctttataaaagaacccctaacaaaccatggttgtatctgcggttggatcgtaatctaatgaatcagatgatttgcttgcacgcttgcacagaaggactgcttgcataacagtcgttgccgttattctcatatttgttatagtccgcaatagtactaagagtaaagctcatttgaaaggatacaacctgtcatgaccaaagcgcaccaagcaagaagtggcagcaccagctttgcagtacttgcatcccttcacaatgcgacagggcagattgatggaatccgccagggtctttttgttttgctcgcaaccaaagcaggcaggatcaatgcaagaaaatggaattgacaagaatagggtgacgataaataaaatagcgaatcatatatgatgcttcaaggtgaagcagcttttctccttataaaatatcaatatgatcgaattgatactagaaaaatattcatgatatgagcgtttgggagcggagagaacgagaaggccacacaagaccagcttagagtcttagcaaagagataattgcaactacatcatagaaaggaagacaagtaatattgtgccata

SEQ ID NO: 6278 - DNA, 1187 bp, Zea mays
  Zm_smallRNAprecursor_1767
tcatgttttggtgggcgcaatggtgaagaaacagagatggatgatagtccattcaagagggagtcaggttcagataagaatcccgggttcccaattaaatcaattagacattccctgcaccagggaaaaaagtcaataacggaccgtctacatctaccaaaattgacagctgcaacataaacaaaataaaatctggttaaaatatgccaaaattagaatgcacatctaaatttctttactagaatgactgctatattttttgtattcatcttatcctgaaaagttttaaacagttgagagaagagtgtgatatcagcaggaccagcttcatgcttatgtatcactgcaaaatcaactagatctgagagatgcattatgcatatcaattagatctttcattttgaagatttatactggaaaactttcaccaagtgcactaaataagaataccataacattcacttaactattctgttattctcggcaacaactgctatgcaagcagtccttctgtgcaagcgtgcaagcaaatcatctgatccattagatcgtgatccaaccgtaggtcacatttaacacttaaacccttccaccaccagctcaataatctttataaaagaacccctaacaaaccatggttgtatctgcggttggatcgtaatctaatgaatcagatgatttgcttgcacgcttgcacagaaggactgcttgcataacagtcgttgccgttattctcatatttgttatagtccgcaatagtactaagagtaaagctcatttgaaaggatacaacctgtcatgaccaaagcgcaccaagcaagaagtggcagcaccagctttgcagtacttgcatcccttcacaatgcgacagggcagattgatggaatccgccagggtctttttgttttgctcgcaaccaaagcaggcaggatcaatgcaagaaaatggaattgacaagaatagggtgacgataaataaaatagcgaatcatatatgatgcttcaaggtgaagcagcttttctccttataaaatatcaatatgatcgaattgatactagaaaaatattcatgatatgagcgtttgggagcggagagaacgagaaggccacacaagaccagcttagagtcttagcaaagagataattgcaactacatcatagaaaggaagacaagtaatattgtgccat

SEQ ID NO: 6279 - DNA, 1133 bp, Zea mays
  Zm_smallRNAprecursor_1768
tcgagttttctggtgccggtcttgctgctgagctaggaggacttggaatttcctcttgagatgacctttttcttattcctttgccctttccacctgcatggctttgtcggagaggtgcgagaagctgaggaagtcttggctggctaggatggtcttgagttctggtctatgccccttcaaaaagtgggccatctttttgacttcggtgctgacgtcatccggcgcgtagcgggccaactctgtgaacttgtgcacatactcactgacaaatcttccatcttgagttagttcccggaattcatcttccttgagctgaacgatcccttggggcacatggtgctctcggaaagcagtttcaaactctgcccaggtagcatctctgatggcaacattgaaggtatcccaccaggctaaggccattccggaaagttgatgagcagccagttgaacacgctgattttctaggcatccgatggcttccagcttccttttaatcatgcgcagccaatcgtcagcatcgaggggattgctaaatccggcaaacgtgggaggcttgagcctcaggaaatctcccatcctgtcttgtggtcttccaccattcgggcgttgattttccagatttctagtgaggacctcgatgagtcgggtttggttggatagaacttgggctaaatctaaggttagttctagaggtgcggggaggtgggtctcactttcttctctaccggcttctctttcagctcttaggggaaaccctgctccaatcccggaggcggtaggcgtggttttatctgaagccatctgccaggggaagagagtcactattatgcacatgccaattctttttttcaaccaagttattttattcattacaccaatacattacaagcatatagctactaaaagtcgtactacacgcgagcgttctctgaggtactttcgaactctttttctaaagtgtccccaaattccttgagaaggtcatcaaggctagctagggacatatcctcgacgtcggacacattctctatcctggaaggaggtggtgctggaggggctttcttcttccgctcagcctagctcccttggtttttggtcttcttttggatttccttcatgggggcgagcttctt

SEQ ID NO: 6280 - DNA, 1040 bp, Zea mays
  Zm_smallRNAprecursor_1769
tgacttgtgattgcaagtgttctactcatcgtgtcttcattcagttgcattgtagttgtagcaaaggagaagatgcagcctgaacggtttaccactttattttgtgcataacaaaacgtagcatgtggcttggtgggggtggggttccactattttagaaactgcacgatgaatatggaaaaacatgcagtatgagcgatggacactcacacgtatgcatcgtgcatactgtatgtttccctgttcgtcactttggacgtgcctgaactgtcagctgcagctgtgtgctgttccatgttacatgcatcctgagtggttagagtaggtaattaatatgcactctcgtcgttgacgtcgatcaggtacaaagtcttattagcttgtccggcgacagggactattagatttgttgttaaaatatcggtgttaagcccgaaacttccagcggatggccagtgagcttcaaaaaacaaaagaatgggtgctctcctcttatagatatagataggacgaacaaagaagaaagattttggattacttacttcgctcgtccttttttgatcgttttttaatgaaatagatttaatttaataatttgttttagattaagtcttaggtcttgtttgacctgtaaaagatatcctttgttgaaatgttcccaaaatttctaaaataaaaggaaacaaaaaaaaactttctagctgagttgttatagtcgggttggttaggtggtctgagtaacactccccaggtcctacatccgactccctgtgggagcaaatttcagaccgtggttaaaaaaaatccactcatttgtttcgcatcaaagcacaagtctaaagtctggctccggtcacgatcattctcacaagggctacgataccactatgtatggataggcccgaggtttgagggttttcttgacctgtgggtcactatctcgcaggtcgagatttcttttattagcttggccgcccataggaattaattctccttgcagtactgaggactcgaccttccgggtgctagctcttttttat

SEQ ID NO: 6281 - DNA, 1034 bp, Zea mays
  Zm_smallRNAprecursor_1770
acttgtgattgcaagtgttctactcatcgtgtcttcattcagttgcattgtagttgtagcaaaggagaagatgcagcctgaacggtttaccactttattttgtgcataacaaaacgtagcatgtggcttggtgggggtggggttccactattttagaaactgcacgatgaatatggaaaaacatgcagtatgagcgatggacactcacacgtatgcatcgtgcatactgtatgtttccctgttcgtcactttggacgtgcctgaactgtcagctgcagctgtgtgctgttccatgttacatgcatcctgagtggttagagtaggtaattaatatgcactctcgtcgttgacgtcgatcaggtacaaagtcttattagcttgtccggcgacagggactattagatttgttgttaaaatatcggtgttaagcccgaaacttccagcggatggccagtgagcttcaaaaaacaaaagaatgggtgctctcctcttatagatatagataggacgaacaaagaagaaagattttggattacttacttcgctcgtccttttttgatcgttttttaatgaaatagatttaatttaataatttgttttagattaagtcttaggtcttgtttgacctgtaaaagatatcctttgttgaaatgttcccaaaatttctaaaataaaaggaaacaaaaaaaaactttctagctgagttgttatagtcgggttggttaggtggtctgagtaacactccccaggtcctacatccgactccctgtgggagcaaatttcagaccgtggttaaaaaaaatccactcatttgtttcgcatcaaagcacaagtctaaagtctggctccggtcacgatcattctcacaagggctacgataccactatgtatggataggcccgaggtttgagggttttcttgacctgtgggtcactatctcgcaggtcgagatttcttttattagcttggccgcccataggaattaattctccttgcagtactgaggactcgaccttccgggtgctagctctttt

SEQ ID NO: 6282 - DNA, 1141 bp, Zea mays
  Zm_smallRNAprecursor_1771
tcccttcgcggccctatccaagctcctgctgtacagagcgagctccggcctgagagggaacatcgaccgtcgggcttcctctacagcgtgagctcccaccgccgggcttccattagcagcacaaacgctgccattacagaggaggagcaactctccacggcggcaccagatctcctccacgccgggtcttgatagcagcaccaacgcatcgcgtactccgagcatctctccacgccagcgaggcagcagcacctctcctccaggctagactctcaaccgcactccttcaggtaagtagtagaactttctcctcttgtctttgtgtgtgttggctactaatatgtggtggattgtatatgttggataatatgtggtggattgtgtatcgagttgtatcaatcaaatttggtggacgctttgtgttggctactaatatgtggtgcatcatatgttgaattggtatgagttcttaccgcctcattgttttatgaaataggatggatcccattatccccgatgatgaggcaagacacattgaaccaatagaagaagttgttgcacctgatgatgatgagaggcagtatcctgagtttgttgacaagtgggatatgctagaacttgaggactatgatggagatattgtcacaggggctcaatttgaagagactgatgaagaggaggaggaggagaacatagctatgggggtggatgagcaaggagagggtgattatgtaccaagaattgattatgacagagataatccatccttaaaagaaggcagcacatttgcatcgacgaccgagtttaggaatgcacttgctacctattgcatcaaaggtgagtatgattatgtaattgacaagagtgagccaactagaatgactgttcattgtgcatttgagaggtgtcagtggaggatacatgcttcctgtatgcgtaatagtacacttatccaggtcaaagtgaatccatctcctcacacttgtccaagtgaaagaaaagggtcacataaggtagctaaaagtagatggtgtgcagatgcagtattagaatgggtgacagataaaccatgcattggtacaactgaactggtaaagaagattaaagagaagtacaacattttggtgccttacatgagagt

SEQ ID NO: 6283 - DNA, 1087 bp, Zea mays
  Zm_smallRNAprecursor_1772
ggtgaattataaccgtacaccgccgttgatttccgagagcagcactttcatcgaagaccagcctggcacaccggacactgtctggtgcaccagcggacagtccggtgtgccagactgagcaaaagtttggctacacagagccaagtcctttccatttcttttcttcttcttttgtcactgtttctagcacttagacaaacacattagcgttcaaaaaacaatgtactaagtctagaaacatacctggttccttgatttgtacttctcactttatttggcacataagaacttaatcaaacgtgttggacattttgtcaccaaaacattatagaaatggcccaaaggcacatttccctttcacttatggtgtcctcgagtccgagtcaactgaaagttggacatggttcctataaaatttgcgtcaggttatagggtttccacatggattgagtatacacacagacgcttgcaagggtttagaaactgcagtggattatgtgtttcctggagtagagcatagggaatgcatcagacattttgcttcaaacttgggtaaatcattcaagggaaagttgattgatgacaacttatggccaacatcattgacatatagccttagaaagcataactatcatgtgaatcaactgtacacaaactctaggttaaagatatacatggaaagtcatcacaaatatttatgggctagaagcaaatttggtgaagggtgcaaggtagactatgtgaacaataatttggcagagtcattcaatgcatggattagaaaaacaaaggggcttcatgtggtggagttgctagataagattcgacagatgcttatggtaaagtttgagttacgtcaaagaattgcacttgagaggtttggtggccacatgataattccagttgtgatgaagacattgcatgaaaagacccgaggtttgaaaatgtctttcatcaagcgcagaccgcttgaggcagaggtgacaattgtggacaaacaaaagggggaatggagatattcagtggacttatcgaacatgacatgcacttgtaggcagtggcagatcaccgggttgccatgcactca

SEQ ID NO: 6284 - DNA, 1184 bp, Zea mays
  Zm_smallRNAprecursor_1773
ggctacacagagccaagtcctttccatttcttttcttcttcttttgtcactgtttctagcacttagacaaacacattagcgttcaaaaaacaatgtactaagtctagaaacatacctggttccttgatttgtacttctcactttatttggcacataagaacttaatcaaacgtgttggacattttgtcaccaaaacattatagaaatggcccaaaggcacatttccctttcacttatggtgtcctcgagtccgagtcaactgaaagttggacatggttcctataaaatttgcgtcaggttatagggtttccacatggattgagtatacacacagacgcttgcaagggtttagaaactgcagtggattatgtgtttcctggagtagagcatagggaatgcatcagacattttgcttcaaacttgggtaaatcattcaagggaaagttgattgatgacaacttatggccaacatcattgacatatagccttagaaagcataactatcatgtgaatcaactgtacacaaactctaggttaaagatatacatggaaagtcatcacaaatatttatgggctagaagcaaatttggtgaagggtgcaaggtagactatgtgaacaataatttggcagagtcattcaatgcatggattagaaaaacaaaggggcttcatgtggtggagttgctagataagattcgacagatgcttatggtaaagtttgagttacgtcaaagaattgcacttgagaggtttggtggccacatgataattccagttgtgatgaagacattgcatgaaaagacccgaggtttgaaaatgtctttcatcaagcgcagaccgcttgaggcagaggtgacaattgtggacaaacaaaagggggaatggagatattcagtggacttatcgaacatgacatgcacttgtaggcagtggcagatcaccgggttgccatgcactcatgacttgtttttcattacttcccttcgtggtgtagccggcgaaattgatcaatatgtacatgagtactactctattgccaagttcaaagcaacatatgctgataatgtgccttccatagaggcaaagcatcagtgggacgttgtgaatcctagtttcgttctcaacgctccaatccagactagagcaccaggaagaccaagaaaaactagaataagatcaagtgc

SEQ ID NO: 6285 - DNA, 1171 bp, Zea mays
  Zm_smallRNAprecursor_1774
caaaagagatgttgttagtaatacaagcaccaaattctcttttataacactttgaatatataaagtaggcagatacttaaacaaggaaaccttattatatgaactaaaattctcttaatcttcaatgcttaattttaacaaattaaacatgcatgataaattgattaagttcaaaggctaattttaaatcatatcatggtgagtatttaatgtagaagaaataaatccaaatgtacaagagagaatacatcacatagatttggattgttcttctttatatgtttaattgcatagtccatttgagaaactcattctcatgctgtgaaactacatagatcacttaggtaaaaaaagttagtttcacaactctagtcatatagagaattcccctttagataagtgctttaagaatttgaatttcttacttagcaccttattcattcacgaacacgagtttttttttctcttttatgtctagatcatggcaataatagagtaatcaaattgaaatgtgccaagaaatacttacaaccaatttaagcatttggattgccatatgtaagaaagaagattatgcaatcagttatatgataacctcaactttgatcatctttggtcttgatcttcaacttggagtaccaagataagtgccaaaatatttctcaacaaatatccttgtaccccttcactttccatgattatagatcaattaaaaaccaaactatggtctctcagacaacttatgtgatttatcctatatgagagccttccaatcaaagtgactttcaatatttcaaatacttgtcacttatgacagattctgtatactccaaagaaacattcataaattttgatgtacagatcctatgaccacgacaattggtggagatgtgctttaataagtctgctaacagctgtaaaaagttgagactcatttgacttcatatgtgctgccagccataatatctcccacagtaggtacatgctgaaaactgctgtgtttgtgctgacaagattgacttaatcaagaagtttcacttatccaatgattatgaaatttgcacagactttgctatcatatgtatagagcaagtaaactgaatttcaagccaatccaaatagatttgatcactcaaacatggttatgagcacagccttgtcagattttcaa

SEQ ID NO: 6286 - DNA, 1042 bp, Zea mays
  Zm_smallRNAprecursor_1775
tgaacattgctttagaaattgagaaagataaaacaagaaacttggaaaatgaaaactcatttctaaagtattcatgtgaacaacaaaaacatctactttatgttattacttgttcacatgaggaactaaaattgagtcatgaggaacttagtgttgctcatgaaaatttggtacaagatcacgtttttctcactaacaagatttatagtgaagaaattaaaactagtgagaactcatcacatgatttatatgatcaattgcaaaatgttgctaatccatgtgatgaagataagaagaatgtatccacctcttgtgaagatttattagctatgccatgttcttcaactatagattattattattcttccttgtcttgtgggactaaccttttgaaggaaaataataagctcaaaaacaaagtgaagaatttaagcaacatgtttgagaggtggcataaatcaaaagttactcatgatcttataatgaaaaatcaaagaagatatgatgacaagagtggccttggtttcaacaagagcaatatcaaaggcagacaattcaaattaaaaggaaataagctatctcacttcatgtgctataaatgccatgagatgggtcatcttgcaaaggcatgccccaataaaaggaagctcaagttgaagaaggaagaaaggaggctaaagcatgacatgtgcttcaagtgccacacttggggtcacctcacctcaatgtgcccaaccaagaaattagtgaagccacaagtgaagcctcaatcaaagccacgagttgagcaaaagaagaatccccaaaagaaaatcaggattaaccatgaatataatggtgatgtggggaagaaaaagaaaacaagaagagaaagaagaagacattcaatatataatcaagattacatgatgagcacaaatcaaaataagaaggatgatttggctcaaatcaagtgctacatgtgtgatgatatgggtcactttgcctcgaggtgtcccaacaatcttgagaagaaggctcaagcaaatgagaagaggcaaga

SEQ ID NO: 6287 - DNA, 1133 bp, Zea mays
  Zm_smallRNAprecursor_1776
tcgagttctctggtgccgatcttgctgttgagctcggaggacttggaatttcctcttaagatggcctttttcttcttcctttgccctttccacttgcatggctttgttggagaggtgcgagaaactgaggaagtcttggctggccaggatggtcttgagttctggtctgagcccctttaggaagcgggccatcttcttgacttcggtgctgacgtcatccggcacgtagcgggccaactccgtgaacttgtgcacatattcactgacagatcttctgtcttgagtcagttcctggaattcatcttgcttgagctgaacgatcccttggggcacatggtgctcccggaaggctgtttcaaactctgcccaggtagcatctctgatggtgacattgaaggtatcccaccaagctaaggccattccggaaagttgatgagttgccagttgaacacgctgattttttgggcatccgatggcttcctgctttcttgtaatcgtgcgcagccaatcgtcagcatcgaggggattgctagatccggcaaacgtgggaggcttgagcctcaggaaatctcccatcctgtcttgtggtcttccaccattcggacgttgattttccagacttcgagtgaggacctcgatgagtcgggtttggttggctagaacttgggctagatctaagggtagttctggaggtgcggggaggtgggtctcactttcctctctagcggcttccctttcagctctcagtggaaaccctgctccaatcctggaggcggtaggcgtggttttatccgaagccatctgccagggggagataatcactattatgcacatgccaattgttttcaaccaagttattttattcattacaccaatacattacaagcatatggctactacaagtttgtactacacgcgagcgttctcagaggtactcccgaactctttttctaaggtgtccccaaaatccttgagaaggtcatcaaggctagctagggacatatcctcgatgtcggacaaattctctatcctggcgggagttggtgccggaggggccttcgtccttcactcagcttggcctccttggttcttggtcttcttttggattttcttcatggggcaagcttcttcag

SEQ ID NO: 6288 - DNA, 1154 bp, Zea mays
  Zm_smallRNAprecursor_1777
gaccatccggtggacaacatcctgggtagcatcaggagaggggtaacaactcgatctcgtttagctaatttttgtgaattttactcgtttgtttcctctcttgagccacttaaggttgaagaagcattgggtgatctggattggataattgccatgcaagaggagttgaacaacttctcccggaatgaagtttggtccgtagtccaaagacccaaacaaaatatgattgggacaaaatgggtctttaggaacaaacaagatgaacatggcgtggttacaagaaacaaagcacggttggttgcccaaggctacactcaagtggaaggacttgattttggtgaaacatatgcgccggtagcaaggttagagtcaattagaatattaattgcctaagctactaaccatgatttcaagctatatcaaatggatgttaagagcacatttctaaatggaccactacaagagagggtctatgtggagcaaccaccgggttttgaagatccaaagaagccaaaccatgtttacctacttcacaaggcactctacgggcttaaacaagcccctagagcttggtatgattgccttaaggatttcttgcttaacaatggttttgaaataggaaaagtagactctactttattcactcgcaaagttgacaatcaattatttgtttgtcaaatatatgtcgacgacattatatttggcagtactgatgaaactttttgtgaggaatttagtagggttatgacaaataggtttgagatgtccatgatgggtgagctcaagtacttcctgggttttcaagttaaacaactcaaggaaggaacctttctgtgccaaaccaagtacacacaagacatgctcaaaaagtttggcatggaaaaggcaaagcacgccaagacaccaatggcttcaagtggtcatctcgacttaaatgaagaaggtaaaactgtagatcaaaagctttatagatcaatgataggatctctactatatttgtgtgcatctaggccagatatcatgcttagtgtgtgcatgtgtgcccgttttcaagctaaccaaaagagtgtcacttagtggccgttaagagaattttgagatatctagttcacatccaaaatctaggtctctggtatcctaagggctcctttttc

SEQ ID NO: 6289 - DNA, 1048 bp, Zea mays
  Zm_smallRNAprecursor_1778
gtggttacaagaaacaaagcacggttggttgcccaaggctacactcaagtggaaggacttgattttggtgaaacatatgcgccggtagcaaggttagagtcaattagaatattaattgcctaagctactaaccatgatttcaagctatatcaaatggatgttaagagcacatttctaaatggaccactacaagagagggtctatgtggagcaaccaccgggttttgaagatccaaagaagccaaaccatgtttacctacttcacaaggcactctacgggcttaaacaagcccctagagcttggtatgattgccttaaggatttcttgcttaacaatggttttgaaataggaaaagtagactctactttattcactcgcaaagttgacaatcaattatttgtttgtcaaatatatgtcgacgacattatatttggcagtactgatgaaactttttgtgaggaatttagtagggttatgacaaataggtttgagatgtccatgatgggtgagctcaagtacttcctgggttttcaagttaaacaactcaaggaaggaacctttctgtgccaaaccaagtacacacaagacatgctcaaaaagtttggcatggaaaaggcaaagcacgccaagacaccaatggcttcaagtggtcatctcgacttaaatgaagaaggtaaaactgtagatcaaaagctttatagatcaatgataggatctctactatatttgtgtgcatctaggccagatatcatgcttagtgtgtgcatgtgtgcccgttttcaagctaaccaaaagagtgtcacttagtggccgttaagagaattttgagatatctagttcacatccaaaatctaggtctctggtatcctaagggctcctttttcgatttatttggctactctgattcagactatgccggttgtaaagtagatcgaaaaagcacctcggggacttgccaattccttgggcggtccctggtgtcttggagctctaagaagcaaaactgtgttgcactttccactgtcgaggccgaatacatagctgttgg

SEQ ID NO: 6290 - DNA, 1070 bp, Zea mays
  Zm_smallRNAprecursor_1779
catatatttaaactatataaaatttaaatactacaaccacacgaagtacatagcttactaaactaaagacaataaacaacgtaagcaccaaacatgaagtttaaatattacaaccatataaactttataacttactaaattaaagaaattataagcaatatgacctttattaggccatgtcggtccaagcttgacccatacgtgcgggctatgttgggatctgatggactggaatttgaggctcagtcatacacatattattttgtgctggatcgtaatttgaactcctgttttttatggtgctcgtcatgattaaaaaacctcgacccgtattaggagtactagtcgcacatttgggtgattgtgtccaccggcaccgcccaggttatcgctacccgattggttgaaagcggccggccaatccgggtcccggctcgcaaagctaggaaacggccctgtcttttgtccaagagaaaattcctggtatgccatcagattttatactcatcccttgtgtgccactgagtggcatataggtatattttttggtgtctatgacatgtggggccagtggcatacaaggaatgagtatattttccagtggcatacagggaattggccctttgtccaaagactcacggagtcacggggcacggtacggcacggcactacgctatttctatttattccacctgctttcctggcttcctgcccctttcatcctttgtcctgtttgtccggtactgtactccggttgttaaggtttctcgctcagagatagtatgtatgtacgcatgtgtgtcttactgtctttactctctctctctctaagggggtgtttggttaccccaaactaaaatttagcccctgtcatattgaatgtttgaacctccgttccgggtattaaatgtagtcggattataaaactaatttgtcagccgaagattaaaagacgagacgaatctagtccagttggttgggtctatatttcatactcctatttaaaagtcaaacgcttgatgtgacccgggctaaactttagcagggcaaccaaacaccccttaagtcgg

SEQ ID NO: 6291 - DNA, 1121 bp, Zea mays
  Zm_smallRNAprecursor_1780
tcacaggatagcgcgcagccagagctggatatctgtaattttttgttgcgtagcgccgcccagagtcacgccatgcgtgatgcgtcggtcgtcgtagctagcgcaactcgctagtccggtgcttgcaactttacagtcggatatcaggatatgcttcagccgagacgtgtaggtagctgcttggccgcttgccgcgcgctgaactggcgtagaactaggaatcgtaatgcatcataattcaaatacttcttaataaaatgatagagttttaaataaattttagtttaaaaataaatataaataaagttcgatcttaattcttaaaactttgtaatgtgtaaaattgagaaccattgtcaccccctacctaaaccttcgccgggccctcccggcgccgctacggcgagagactgcgttcgttcgactacaaatcaacggaccaagtttgtctgtgaagccagagaaaaaaaaatgacgagaccaagtttatgtaaaaaaaatatgccgaggctcagagttgctcgtagtatcatctgggaagatgacaaggttgtggcgacccatgttgtcactgagcgttttcatcatcgattcggctgaaatttggggtgagagaggctcgaactctcgacctcaggatcactcaacagctatgagacctacgcgctaaccaactgcgccaccaccccattgtgatagctatccacataaactttataacaacaccgtcgaagcaatggtgaacggaagcatcctagacaggaagcggagtggccgatgagcagtttccttttttttggtaaggactcaatcaggggcgcgctttgcacgtacctagactaacattgtttactcgttaaccaagtaatcaaatgtaactcaatcacaacatttataagatatagctaaataaggtgcattagagcatcttcaagagactttttatttttggctctttatttgtctctctataaagattaaattttatatataacatgttattccaatagactctccaatatgcaagttagattagttagcaagagtgactaggtaaatttgtcaagtgagcccagtcaatttaagagagccggatagcttgacaccttgacaaattaaat

SEQ ID NO: 6292 - DNA, 1067 bp, Zea mays
  Zm_smallRNAprecursor_1781
accctaatattcttatgaaagaacatctcactgtgtcgtgcgttgttttggacttgacacgatcatgataccactgcccagtgccatatgatgcccatatgaagacgggtctacctccgtttcatcatcagagaagctgggagaaaaggatatgcaactggtatttattagtagtatcttcctatctggacacattatcctaaaatggattatgtagttgtaatgggggtgattggaataacgcgtattaatcgaactagcacattccaactaatgatatggttcttggaccaaacgagaggctttatggcgcaactacccaattaggacaggaaaacaaatgaggattggaaaatgccaagcagcttaagtatgattgatctgggcatcgcaacctatgcggtttagacgcaaacactaaatttatatctttttacccgtgcgaccacctacccaagagttgcacctcaagaaagatgtatgacatgtttggttcgtggctaactgtgccacactttgcctaagtttaatcgtccgaattgaaaaactaaccttagacagaaaagttaggcaaagtgtgacaagttaggcagcgaaccaaacatgcccgtactaccagaacctatgatcagtgccgtagtgtcattttctgtcttttccgcaagaaaagtggtatttctgtcttccttcaaatgtagggtgcgaacacggaagcaagggtaggcatgtttggtttgaggacatcttctcattccccactttcttatttggtctatgaaatagaataatttgattcaacaccattttatttcttataggctcgtaattaataataatataataaatgagtttattccactatatttatataatagactcatgatgtgctatctcatctagaatgtactaactcttcaaactaaacagagtcgtttgtgagagctccgtcactgattcttttcggtttctttttgtggaattattctattggatttctgagagtgagatgctaattagaattgattttatgttgattctcacgagaatataataagagcaaagatgaa

SEQ ID NO: 6293 - DNA, 1095 bp, Zea mays
  Zm_smallRNAprecursor_1782
tccatattagagtgtgagactgttaaggagtaccttgagagggtagcttctcatcataaagtgtactctacgacaaatgtttgctctctgatgaccgagtttataaatgccaaatacgatggaaatgatgtcagaccatttattcagaaaatgatattcatcgttgctaagataaacaaatacctcgagtttgctttacacgagaaatttgtagtgtttatgataatgaagtctctaccaaggaatttgaaacttttcacatccagtataacatcagtgtcactgataagtgaaacatatatcaactcttgacacaatatgtctagcaggaaaagagattgaagcagactggagactatatcaacttcgtaaaagacaatatccctaaacagaataagaactcaaataagaagttcaaaaaacagggtaagcaacataaccagactttttctagcaacaacaatcgaccaaaacaatcaggcagcttctcagttctcgctgatacatgcctctactacaagaagacaagtcattacaataggaagtgtcatgaattcatgtgtttcttttaaagagtggtaaggaccaagttacttttgtaaatgagtctctatacttagaatattctaattattcttgttgagttgacttaggtgcaactgttcaagttgccaactctctacagggactccgttcaagtcaaaggctcacaaagtgccgaagaacaattagagtggcaaatggagtcgaaacagcagtcgaggccattagagatatacatcttagtttacctaatgattttatattgttctttagagacgtactctatatatctttcttgcgaaagaaccttattttagtttctagattagatgatcagcacattcattgtcatttcgatgatagacaatgtgttattcagtttgataataaagatgttgatttcgccgtacgacgagatatgctttatttactttcgtacattgatgttgttaatgttttgcatacaccaaaaaatgaaccagccagcagtggcaggaaaagaaaacaaagtgatggagaaacctcgtcgaaattatgacactattgtttggg

SEQ ID NO: 6294 - DNA, 1090 bp, Zea mays
  Zm_smallRNAprecursor_1783
caaccctctcaacaattaagagatccattcgaagaacatggggactaattgaagtaagaagtctcccctccgggggacttcttacttcaattaaattatttcatttcttagtcggaaccttaggtggttctcggaagaagatagcgaaaaaaattatccctaaagtcgaaactaaaaggaacgtataaaccaatgcttccatagattcgatcctggtttatttacaattataacttccacacctattcacttatcatttgggatcatttcccatataaaaaaagaaaaagagtcaaagaaaggacaggagatgttcctcatgtcaaatcaaacaaaaaatggaggtgaaagataccatagcaatgtggtatcaggctgcctgtctccttgtagttggatctccaactttttggaatgttccaaattccacttgagcatccaagtctggatcaataccagcaaaaacatctcggaacaaggttcgagcgccatgccaaatgtgtccgaaaaagaagagcaaagcaaaggtagcatgaccaaaagtgaaccaaccccttggactgctgcgaaaaacaccatctgatttcaaagtagctcgatctaattcaaaaatttcccctaattgagcacgccgcgcatatttttttacagtagcaggatcagaataacttactccattaagttcgccaccatagaactccaccgttacgcctacttgttcaacactatatttggattctgctcttctaaaaggaacgtccgctctcacaattccctcttcatctaccaaaacgaccggaaatgtttcaaaaaaagtaggcatacgacgtacaaaaagctcgcgtccttctttatctctaaagacgggatgtcctaaccatccaacagctatgccatccccattgtccattgagcctgctctgaataatcccccctttgccggattattaccaatataatcataaaaggctaatttttcgggaattttagaccaagcttctgataaactaagattttcggctaacccatcgctaactcttcgatatatttcttgctgaaagtatccctgatcccactgataacgagtagg

SEQ ID NO: 6295 - DNA, 1172 bp, Zea mays
  Zm_smallRNAprecursor_1784
gatctaagattgcaattcttccatgtttccgcagtagcatattgttccatggagctagggtccaaaataggaatcaacaagtgtttccacgactctaccgcccggccaatcctgttccactgaatcccctccctttttcatggccacatatctttacggctaaggagtgggaaatctttctcctgttacacaaatgaaatgtttcatttcatccgggaaaagccacctctttctccacaaacaatgtctttgtcatttgatccaggagccttccgttagataggaacagctttgctaaatactgagaactctcggatagagtattagaatgaaaagaccattaattatataaggaagagcccagggttctagcccattcccattcctaaatcaataattcgtagtgcttttgcctttcttgcgtactcctggtgaaccagttgctagccatatgtttaggaggcttttttctccaggtactggtactaagccgctttgccatctcttcatcttcatctgcaaagaattctcgatgtgaaaacacagagacaaaggcctgatctttgaataggaaaaagaatggatccgaaggtcccaaatcaattggcttattcgaaaaaagccttcttctttgaaagatatatctcgtgtctggtactgcattgttccactctgcaagaagtccgaatcagtctcttgcacctccccctttttatgataaatataccagaaataattcgaataaatagcagtctctgacaactcatcctctttaatctgcttggacccgctccaatacccataggaaaatccccagtcatattcagcgtacctgtccctgcaatcaaatagattgtcccaagggccccatattctaggagcccaagttatgctattgaaaattcgttcctctagcagttccggtttgaccattccgttccctttttcaaactccacttcttttcatatagcatccctaatcaaagagagaacaatatccatttcaaaacatttctaacggattccttggttcggaccgacgaagtaatggcactcgattattatcaacccgactgcaatctttttctgtcggtaaggattgcaccagagcaccttctacttctaataggccatgaactatagatagagaagaatcattctgagcgagtcca

SEQ ID NO: 6296 - DNA, 1123 bp, Zea mays
  Zm_smallRNAprecursor_1785
atctagcattctacccgcaatggttggccatacaatcgcgattcataatggaaaagaacatatacctatttacataacaaatcctatggtaggtcgcaaattgggggaattcgtgcctactcggcatttcacgagttatgaaagtacaagaaaggatactaaatctcgtcgttaattgaattcagaatagaaagattcagaataaacaaagaaatacccaatatcctgttggaacaagatattgggtatttccggctttccttccttcaaaaaattcctatatgtttaggagaaaaaccttatccattaaggtaaggaacttcaagagcagctaggtctagagggaagttgtgagcattacgttcgtgcattacctccataccaagattagcacggttgatgatatcagcccaagtattaataacgcgaccttggctatcaactacagattggttgaaaatgaaaccatttaggttgaatgccatagtactaatacctaaagcagtgaaccagatccctactacaggccaagcagccaagaagaagtgtaaagaacgagaattgttgaaactagcatattggaagattaatcgaccaaaataaccgtgagcagccacaatattataagtctcttcttcctgaccaaatttgtaaccctcattagcagactcattttcagtggtttccctgatcaaactagaggttaccaaggaaccatgcatagcactgaatagggaaccgccgaatacaccagctacacctaacatgtgaaatggatgcataaggatgttgtgctctgcctggaatacaatcataaagttgaaagtaccagatattcctaaaggcataccatcagagaaacttccttgaccaatagggtaaatcaagaaaacagcagtagcagctgcaacaggagctgaatatgcaacagcaatccaagggcgcatacccagacggaaactaagttcccactcacgacccatataacaagctacaccaagtaagaagtgtagaacaattagctcataaggaccgccattgtataaccattcatcaacagatgcagcttcccaaattgggtaaaaatgcaatccgatcgccgcagaagtaggaataatagcac

SEQ ID NO: 6297 - DNA, 1037 bp, Zea mays
  Zm_smallRNAprecursor_1786
cctatggtaggtcgcaaattgggggaattcgtgcctactcggcatttcacgagttatgaaagtacaagaaaggatactaaatctcgtcgttaattgaattcagaatagaaagattcagaataaacaaagaaatacccaatatcctgttggaacaagatattgggtatttccggctttccttccttcaaaaaattcctatatgtttaggagaaaaaccttatccattaaggtaaggaacttcaagagcagctaggtctagagggaagttgtgagcattacgttcgtgcattacctccataccaagattagcacggttgatgatatcagcccaagtattaataacgcgaccttggctatcaactacagattggttgaaaatgaaaccatttaggttgaatgccatagtactaatacctaaagcagtgaaccagatccctactacaggccaagcagccaagaagaagtgtaaagaacgagaattgttgaaactagcatattggaagattaatcgaccaaaataaccgtgagcagccacaatattataagtctcttcttcctgaccaaatttgtaaccctcattagcagactcattttcagtggtttccctgatcaaactagaggttaccaaggaaccatgcatagcactgaatagggaaccgccgaatacaccagctacacctaacatgtgaaatggatgcataaggatgttgtgctctgcctggaatacaatcataaagttgaaagtaccagatattcctaaaggcataccatcagagaaacttccttgaccaatagggtaaatcaagaaaacagcagtagcagctgcaacaggagctgaatatgcaacagcaatccaagggcgcatacccagacggaaactaagttcccactcacgacccatataacaagctacaccaagtaagaagtgtagaacaattagctcataaggaccgccattgtataaccattcatcaacagatgcagcttcccaaattgggtaaaaatgcaatccgatcgccgcagaagtaggaataata

SEQ ID NO: 6298 - DNA, 1051 bp, Zea mays
  Zm_smallRNAprecursor_1787
cgtgcctactcggcatttcacgagttatgaaagtacaagaaaggatactaaatctcgtcgttaattgaattcagaatagaaagattcagaataaacaaagaaatacccaatatcctgttggaacaagatattgggtatttccggctttccttccttcaaaaaattcctatatgtttaggagaaaaaccttatccattaaggtaaggaacttcaagagcagctaggtctagagggaagttgtgagcattacgttcgtgcattacctccataccaagattagcacggttgatgatatcagcccaagtattaataacgcgaccttggctatcaactacagattggttgaaaatgaaaccatttaggttgaatgccatagtactaatacctaaagcagtgaaccagatccctactacaggccaagcagccaagaagaagtgtaaagaacgagaattgttgaaactagcatattggaagattaatcgaccaaaataaccgtgagcagccacaatattataagtctcttcttcctgaccaaatttgtaaccctcattagcagactcattttcagtggtttccctgatcaaactagaggttaccaaggaaccatgcatagcactgaatagggaaccgccgaatacaccagctacacctaacatgtgaaatggatgcataaggatgttgtgctctgcctggaatacaatcataaagttgaaagtaccagatattcctaaaggcataccatcagagaaacttccttgaccaatagggtaaatcaagaaaacagcagtagcagctgcaacaggagctgaatatgcaacagcaatccaagggcgcatacccagacggaaactaagttcccactcacgacccatataacaagctacaccaagtaagaagtgtagaacaattagctcataaggaccgccattgtataaccattcatcaacagatgcagcttcccaaattgggtaaaaatgcaatccgatcgccgcagaagtaggaataatagcaccagagataatattgtttccataaagtaaagaaccagaaa

SEQ ID NO: 6299 - DNA, 1053 bp, Zea mays
  Zm_smallRNAprecursor_1788
cgtgcctactcggcatttcacgagttatgaaagtacaagaaaggatactaaatctcgtcgttaattgaattcagaatagaaagattcagaataaacaaagaaatacccaatatcctgttggaacaagatattgggtatttccggctttccttccttcaaaaaattcctatatgtttaggagaaaaaccttatccattaaggtaaggaacttcaagagcagctaggtctagagggaagttgtgagcattacgttcgtgcattacctccataccaagattagcacggttgatgatatcagcccaagtattaataacgcgaccttggctatcaactacagattggttgaaaatgaaaccatttaggttgaatgccatagtactaatacctaaagcagtgaaccagatccctactacaggccaagcagccaagaagaagtgtaaagaacgagaattgttgaaactagcatattggaagattaatcgaccaaaataaccgtgagcagccacaatattataagtctcttcttcctgaccaaatttgtaaccctcattagcagactcattttcagtggtttccctgatcaaactagaggttaccaaggaaccatgcatagcactgaatagggaaccgccgaatacaccagctacacctaacatgtgaaatggatgcataaggatgttgtgctctgcctggaatacaatcataaagttgaaagtaccagatattcctaaaggcataccatcagagaaacttccttgaccaatagggtaaatcaagaaaacagcagtagcagctgcaacaggagctgaatatgcaacagcaatccaagggcgcatacccagacggaaactaagttcccactcacgacccatataacaagctacaccaagtaagaagtgtagaacaattagctcataaggaccgccattgtataaccattcatcaacagatgcagcttcccaaattgggtaaaaatgcaatccgatcgccgcagaagtaggaataatagcaccagagataatattgtttccataaagtaaagaaccagaaaca

SEQ ID NO: 6300 - DNA, 1044 bp, Zea mays
  Zm_smallRNAprecursor_1789
aatctcgtcgttaattgaattcagaatagaaagattcagaataaacaaagaaatacccaatatcctgttggaacaagatattgggtatttccggctttccttccttcaaaaaattcctatatgtttaggagaaaaaccttatccattaaggtaaggaacttcaagagcagctaggtctagagggaagttgtgagcattacgttcgtgcattacctccataccaagattagcacggttgatgatatcagcccaagtattaataacgcgaccttggctatcaactacagattggttgaaaatgaaaccatttaggttgaatgccatagtactaatacctaaagcagtgaaccagatccctactacaggccaagcagccaagaagaagtgtaaagaacgagaattgttgaaactagcatattggaagattaatcgaccaaaataaccgtgagcagccacaatattataagtctcttcttcctgaccaaatttgtaaccctcattagcagactcattttcagtggtttccctgatcaaactagaggttaccaaggaaccatgcatagcactgaatagggaaccgccgaatacaccagctacacctaacatgtgaaatggatgcataaggatgttgtgctctgcctggaatacaatcataaagttgaaagtaccagatattcctaaaggcataccatcagagaaacttccttgaccaatagggtaaatcaagaaaacagcagtagcagctgcaacaggagctgaatatgcaacagcaatccaagggcgcatacccagacggaaactaagttcccactcacgacccatataacaagctacaccaagtaagaagtgtagaacaattagctcataaggaccgccattgtataaccattcatcaacagatgcagcttcccaaattgggtaaaaatgcaatccgatcgccgcagaagtaggaataatagcaccagagataatattgtttccataaagtaaagaaccagaaacaggctcacgaataccatcaatatctactggaggagcagcgat

SEQ ID NO: 6301 - DNA, 1044 bp, Zea mays; identical to SEQ ID NO: 6300
  Zm_smallRNAprecursor_1790

SEQ ID NO: 6302 - DNA, 1062 bp, Zea mays
  Zm_smallRNAprecursor_1791
aatctcgtcgttaattgaattcagaatagaaagattcagaataaacaaagaaatacccaatatcctgttggaacaagatattgggtatttccggctttccttccttcaaaaaattcctatatgtttaggagaaaaaccttatccattaaggtaaggaacttcaagagcagctaggtctagagggaagttgtgagcattacgttcgtgcattacctccataccaagattagcacggttgatgatatcagcccaagtattaataacgcgaccttggctatcaactacagattggttgaaaatgaaaccatttaggttgaatgccatagtactaatacctaaagcagtgaaccagatccctactacaggccaagcagccaagaagaagtgtaaagaacgagaattgttgaaactagcatattggaagattaatcgaccaaaataaccgtgagcagccacaatattataagtctcttcttcctgaccaaatttgtaaccctcattagcagactcattttcagtggtttccctgatcaaactagaggttaccaaggaaccatgcatagcactgaatagggaaccgccgaatacaccagctacacctaacatgtgaaatggatgcataaggatgttgtgctctgcctggaatacaatcataaagttgaaagtaccagatattcctaaaggcataccatcagagaaacttccttgaccaatagggtaaatcaagaaaacagcagtagcagctgcaacaggagctgaatatgcaacagcaatccaagggcgcatacccagacggaaactaagttcccactcacgacccatataacaagctacaccaagtaagaagtgtagaacaattagctcataaggaccgccattgtataaccattcatcaacagatgcagcttcccaaattgggtaaaaatgcaatccgatcgccgcagaagtaggaataatagcaccagagataatattgtttccataaagtaaagaaccagaaacaggctcacgaataccatcaatatctactggaggagcagcgatgaaggcgataataaatac

SEQ ID NO: 6303 - DNA, 1062 bp, Zea mays; identical to SEQ ID NO: 6302
  Zm_smallRNAprecursor_1792

SEQ ID NO: 6304 - DNA, 1042 bp, Zea mays
  Zm_smallRNAprecursor_1793
tctcgtcgttaattgaattcagaatagaaagattcagaataaacaaagaaatacccaatatcctgttggaacaagatattgggtatttccggctttccttccttcaaaaaattcctatatgtttaggagaaaaaccttatccattaaggtaaggaacttcaagagcagctaggtctagagggaagttgtgagcattacgttcgtgcattacctccataccaagattagcacggttgatgatatcagcccaagtattaataacgcgaccttggctatcaactacagattggttgaaaatgaaaccatttaggttgaatgccatagtactaatacctaaagcagtgaaccagatccctactacaggccaagcagccaagaagaagtgtaaagaacgagaattgttgaaactagcatattggaagattaatcgaccaaaataaccgtgagcagccacaatattataagtctcttcttcctgaccaaatttgtaaccctcattagcagactcattttcagtggtttccctgatcaaactagaggttaccaaggaaccatgcatagcactgaatagggaaccgccgaatacaccagctacacctaacatgtgaaatggatgcataaggatgttgtgctctgcctggaatacaatcataaagttgaaagtaccagatattcctaaaggcataccatcagagaaacttccttgaccaatagggtaaatcaagaaaacagcagtagcagctgcaacaggagctgaatatgcaacagcaatccaagggcgcatacccagacggaaactaagttcccactcacgacccatataacaagctacaccaagtaagaagtgtagaacaattagctcataaggaccgccattgtataaccattcatcaacagatgcagcttcccaaattgggtaaaaatgcaatccgatcgccgcagaagtaggaataatagcaccagagataatattgtttccataaagtaaagaaccagaaacaggctcacgaataccatcaatatctactggaggagcagcgat

SEQ ID NO: 6305 - DNA, 1063 bp, Zea mays
  Zm_smallRNAprecursor_1794
acttcagcgccgtagcgcctggtatgagcctcgtggagaagcaatggctagtccacggggctcatacttcagcgctgcagcgcttggtactcggacctcggctcgaggcattttctctaccccttcttaccctgaaaaagcagggtcaccttgtgtccttaaacctataaccatctttcggctaacctagcctcctccgtccctccgtaccaacaaggggtagtacaggaatattgacctgttgtccatcgactacgcctttcggcctgatcttaggccctgactcaccctccgtggacgaaccttgcggaggaaaccttgggttttcggggcattggattctcaccaatgttttcgttactcaagccgacattctcgcttccgcttcgtcgacccccgctttcgcgtttgcttccctctaaggcggaacgctcccctactgatgcattttgacatcccacagcttcggcagatcgcttagccccgttcatcttcagcgcaagggcgctcgatcagtgagctattacgcactctttaaagggtggctgcttctaggcaaacctcctggctgtctttgcacccccacctcctttatcactgagcggtcatttaggggccttagctggtgatccgggctgtttccctctcgacgatgaagcttatcccccatcgtctcactggccgaccttgacccctgttatttttgggtcatatctagtattcagagtttgcctcgatttggtaccgctcgcgcagcccgcaccgaaacagtgctttacccctagatgtccagtcaactgctgcgcctcaacgcatttcggggagaaccagctagctctgggttcgagtggcatttcacccctaaccacaactcatccgctgattcttcaacatcagtcggttcggacctctgcttagtttcatccaagcttcatcctggtcatggatagatcacccaggttcgggtccataagcagtgacaatcgccctatgaagactcgctttcgctacggctccggtgggttccattcccttaaccaagccactgcctatgagtcgccgg

SEQ ID NO: 6306 - DNA, 1064 bp, Zea mays
  Zm_smallRNAprecursor_1795
gatcacccaggttcgggtccataagcagtgacaatcgccctatgaagactcgctttcgctacggctccggtgggttccattcccttaaccaagccactgcctatgagtcgccggctcattcttcaacaggcacgcggtcagagatcactttcccctcccactgcttgggagctcagcacggtttcacgttctatttcactacccactgggggttcttttcacctttccctcacggtactacttcgctatcggtcacccaggagtatttagccttgcaaggtggtccttgctgattcacacgggattccacgtgccccatgctactcgggtcagagcgtaagctagtgatgctttcggctactggactttagccatctagggtgcggcactcaaccgcttcgcctagcagcacaacgcttgtattgctctcccacaaccccgttttcacggtttaggctgctcccatttcgctcgccgctactacgggaatcgcttttgctttcttttcctctggctactaagatgtttcagttcgccaggttgtctcttgcctgctcatggattcagcaggcagttcaaaaggttgacctatttgggaatctccggatctatgcttattttcaactccccgaagcatttcgtcgcttgctacgcccttcctcgtctctgggtgcctaggtatccaccgcaagcctttcctcttttgaacctcgccattaacgttaaggctatgccatcctaaggtgctactaaatggaaggatcttatcaacgtccatgaatgcgaaatcatagatcgaactgacgaattggcaaccttcggtgctatcatagtatccgctaagttcacgggctggagataagcggactcgaaccgctgacatccgccacagggtaaaccaccgcctctcaggcctccccgacgggttctaccatagaggacaacgataggcaataactcccccccgaacacagcttacaactttcatcgtactgtgctctccaaagagcaactcttctcaaaatcccaaaacaaaaggtgctgagttggaatcccattctaag

SEQ ID NO: 6307 - DNA, 1095 bp, Zea mays
  Zm_smallRNAprecursor_1796
cgctgctacgtcgtcactgaccgagccagcaaaacgacttccgcgttgcaacttcggcatgcagcctccacatctcatcttatgtatctgcatcaggacataaaaataaagcggaatatctggagctgtgaaagataggttaccttaccggccgatatgatgtgcttcttcggcatgcagctgacactgccgagatccaatccaagtgcccctaatgccgcatggtcaaagggattgaagcctggtccgaaatctccggtcgacgacaacgactagctccgccggcaaggctagaagcacgtacgtatatgttatgaatcgatctcgaccggagaccccgagccagacaacaatccccctgacctaacccgagcatgcatgcatgaagcacctacgacatgaaataatctggcctccttctccctccctatgtgccactagctacctactagagtcatcatgaacaaagagacaccgtacgtggggatgcaccggtttgcgaggaatgaagcctggtccgacgcctctcgatctgtccggccggtagcaggcaaaacacgatctgcgctgcgactgcgagccaggacgcggatgcctcgagccagccaacattccccacaaacccccagaccaaggagctgagcagcaagacgatgatggagtggatctgatgagcgtatatattatagagaggagaaactaggtagagagagcaaagctgcaggatgcacggcggaagatatataggaggaggtgcttatgcgtgccatggtgggtgggaggcgtggagatgaggaggaagaaggggtcagggtttctgaagagggggccgggagaggagaaaagggaggggagggtgcgaggactggagggggcactaatggcaatttacaatttggcgcagtgccaggggtgccctaacgcccattacgacgttgcccggtccaggcgtcagtgggggcgatctttgcactccacacacctctcgctttccctggttcagaagaggccagggaagctagaaaggtgtggtaaaataagtgactccgatgcagtggtgatttgaattcccactcccacaggaatgcctcgtga

SEQ ID NO: 6308 - DNA, 1091 bp, Zea mays
  Zm_smallRNAprecursor_1797
ctgctacgtcgtcactgaccgagccagcaaaacgacttccgcgttgcaacttcggcatgcagcctccacatctcatcttatgtatctgcatcaggacataaaaataaagcggaatatctggagctgtgaaagataggttaccttaccggccgatatgatgtgcttcttcggcatgcagctgacactgccgagatccaatccaagtgcccctaatgccgcatggtcaaagggattgaagcctggtccgaaatctccggtcgacgacaacgactagctccgccggcaaggctagaagcacgtacgtatatgttatgaatcgatctcgaccggagaccccgagccagacaacaatccccctgacctaacccgagcatgcatgcatgaagcacctacgacatgaaataatctggcctccttctccctccctatgtgccactagctacctactagagtcatcatgaacaaagagacaccgtacgtggggatgcaccggtttgcgaggaatgaagcctggtccgacgcctctcgatctgtccggccggtagcaggcaaaacacgatctgcgctgcgactgcgagccaggacgcggatgcctcgagccagccaacattccccacaaacccccagaccaaggagctgagcagcaagacgatgatggagtggatctgatgagcgtatatattatagagaggagaaactaggtagagagagcaaagctgcaggatgcacggcggaagatatataggaggaggtgcttatgcgtgccatggtgggtgggaggcgtggagatgaggaggaagaaggggtcagggtttctgaagagggggccgggagaggagaaaagggaggggagggtgcgaggactggagggggcactaatggcaatttacaatttggcgcagtgccaggggtgccctaacgcccattacgacgttgcccggtccaggcgtcagtgggggcgatctttgcactccacacacctctcgctttccctggttcagaagaggccagggaagctagaaaggtgtggtaaaataagtgactccgatgcagtggtgatttgaattcccactcccacaggaatgcctcgt

SEQ ID NO: 6309 - DNA, 1093 bp, Zea mays
  Zm_smallRNAprecursor_1798
ctgctacgtcgtcactgaccgagccagcaaaacgacttccgcgttgcaacttcggcatgcagcctccacatctcatcttatgtatctgcatcaggacataaaaataaagcggaatatctggagctgtgaaagataggttaccttaccggccgatatgatgtgcttcttcggcatgcagctgacactgccgagatccaatccaagtgcccctaatgccgcatggtcaaagggattgaagcctggtccgaaatctccggtcgacgacaacgactagctccgccggcaaggctagaagcacgtacgtatatgttatgaatcgatctcgaccggagaccccgagccagacaacaatccccctgacctaacccgagcatgcatgcatgaagcacctacgacatgaaataatctggcctccttctccctccctatgtgccactagctacctactagagtcatcatgaacaaagagacaccgtacgtggggatgcaccggtttgcgaggaatgaagcctggtccgacgcctctcgatctgtccggccggtagcaggcaaaacacgatctgcgctgcgactgcgagccaggacgcggatgcctcgagccagccaacattccccacaaacccccagaccaaggagctgagcagcaagacgatgatggagtggatctgatgagcgtatatattatagagaggagaaactaggtagagagagcaaagctgcaggatgcacggcggaagatatataggaggaggtgcttatgcgtgccatggtgggtgggaggcgtggagatgaggaggaagaaggggtcagggtttctgaagagggggccgggagaggagaaaagggaggggagggtgcgaggactggagggggcactaatggcaatttacaatttggcgcagtgccaggggtgccctaacgcccattacgacgttgcccggtccaggcgtcagtgggggcgatctttgcactccacacacctctcgctttccctggttcagaagaggccagggaagctagaaaggtgtggtaaaataagtgactccgatgcagtggtgatttgaattcccactcccacaggaatgcctcgtga

SEQ ID NO: 6310 - DNA, 1043 bp, Zea mays
  Zm_smallRNAprecursor_1799
taaaaaaaacatttagtaatttagtgagcttttcatgtagctaaaaaaggttaagaacaaatttcttgaacaaaatctaacttagtaaaaatatagaaaacaattttgcattacgaatcattaactatttctaaatcactataactatttttatacatttttttcttccttatatacatttgctttgataaacagcatgccctacttattattattctccacaacctttcacatacagagatattggccgatcagtacatgagcatatattttgggtcgattttttcaattgtgaaaaaaaatctaggcgagaaataaatttaagcggacacaccaacgacataaacaaaaaaaacaaaaaaaatgcaaactatggggcttgaacccacgaccacatggttagaagccttgtgctctaccaagtgggctagatgggctttgtgctcatgtctgcaacaaatattttaataacacaaccgagctcggcgccaagatctgtggcgccgagctcggttccacgtcgacgccacgcgtctgggttgtgccaacgcaacacgacctcggcgccatagcctatggcgccgagctgtgttagctcggcgccataggctatggcgccgagcaaagggtccaaaactgcatttaaaatttttttaggtctaaacgtgattttacttctgtttaagggctaaaatacaaaaaattcgggcgattggttccgcttcaggctcagcctggcttgcatccatcgcccagtctccttggtagacattgggaacatctctgcaaagaacactatcgtttgttcaacatccagcctccttggtagccattgggacaagatatcatgtcaaactggctccacccaaaaaatacatcatctctaacgacaataccgagccaacacacgctcaaaaaacaacatgatttacggtttctggcttgttacaagcactgcacaataaaaaaggtaactataccatgtcaacctctatatgtttcagggaagccgcagtctgcaattctttatgggacatttgcca

SEQ ID NO: 6311 - DNA, 1044 bp, Zea mays
  Zm_smallRNAprecursor_1800
taaaaaaaacatttagtaatttagtgagcttttcatgtagctaaaaaaggttaagaacaaatttcttgaacaaaatctaacttagtaaaaatatagaaaacaattttgcattacgaatcattaactatttctaaatcactataactatttttatacatttttttcttccttatatacatttgctttgataaacagcatgccctacttattattattctccacaacctttcacatacagagatattggccgatcagtacatgagcatatattttgggtcgattttttcaattgtgaaaaaaaatctaggcgagaaataaatttaagcggacacaccaacgacataaacaaaaaaaacaaaaaaaatgcaaactatggggcttgaacccacgaccacatggttagaagccttgtgctctaccaagtgggctagatgggctttgtgctcatgtctgcaacaaatattttaataacacaaccgagctcggcgccaagatctgtggcgccgagctcggttccacgtcgacgccacgcgtctgggttgtgccaacgcaacacgacctcggcgccatagcctatggcgccgagctgtgttagctcggcgccataggctatggcgccgagcaaagggtccaaaactgcatttaaaatttttttaggtctaaacgtgattttacttctgtttaagggctaaaatacaaaaaattcgggcgattggttccgcttcaggctcagcctggcttgcatccatcgcccagtctccttggtagacattgggaacatctctgcaaagaacactatcgtttgttcaacatccagcctccttggtagccattgggacaagatatcatgtcaaactggctccacccaaaaaatacatcatctctaacgacaataccgagccaacacacgctcaaaaaacaacatgatttacggtttctggcttgttacaagcactgcacaataaaaaaggtaactataccatgtcaacctctatatgtttcagggaagccgcagtctgcaattctttatgggacatttgccat

SEQ ID NO: 6312 - DNA, 1041 bp, Zea mays
  Zm_smallRNAprecursor_1801
aaaaaaacatttagtaatttagtgagcttttcatgtagctaaaaaaggttaagaacaaatttcttgaacaaaatctaacttagtaaaaatatagaaaacaattttgcattacgaatcattaactatttctaaatcactataactatttttatacatttttttcttccttatatacatttgctttgataaacagcatgccctacttattattattctccacaacctttcacatacagagatattggccgatcagtacatgagcatatattttgggtcgattttttcaattgtgaaaaaaaatctaggcgagaaataaatttaagcggacacaccaacgacataaacaaaaaaaacaaaaaaaatgcaaactatggggcttgaacccacgaccacatggttagaagccttgtgctctaccaagtgggctagatgggctttgtgctcatgtctgcaacaaatattttaataacacaaccgagctcggcgccaagatctgtggcgccgagctcggttccacgtcgacgccacgcgtctgggttgtgccaacgcaacacgacctcggcgccatagcctatggcgccgagctgtgttagctcggcgccataggctatggcgccgagcaaagggtccaaaactgcatttaaaatttttttaggtctaaacgtgattttacttctgtttaagggctaaaatacaaaaaattcgggcgattggttccgcttcaggctcagcctggcttgcatccatcgcccagtctccttggtagacattgggaacatctctgcaaagaacactatcgtttgttcaacatccagcctccttggtagccattgggacaagatatcatgtcaaactggctccacccaaaaaatacatcatctctaacgacaataccgagccaacacacgctcaaaaaacaacatgatttacggtttctggcttgttacaagcactgcacaataaaaaaggtaactataccatgtcaacctctatatgtttcagggaagccgcagtctgcaattctttatgggacatttgcca

SEQ ID NO: 6313 - DNA, 1042 bp, Zea mays
  Zm_smallRNAprecursor_1802
aaaaaaacatttagtaatttagtgagcttttcatgtagctaaaaaaggttaagaacaaatttcttgaacaaaatctaacttagtaaaaatatagaaaacaattttgcattacgaatcattaactatttctaaatcactataactatttttatacatttttttcttccttatatacatttgctttgataaacagcatgccctacttattattattctccacaacctttcacatacagagatattggccgatcagtacatgagcatatattttgggtcgattttttcaattgtgaaaaaaaatctaggcgagaaataaatttaagcggacacaccaacgacataaacaaaaaaaacaaaaaaaatgcaaactatggggcttgaacccacgaccacatggttagaagccttgtgctctaccaagtgggctagatgggctttgtgctcatgtctgcaacaaatattttaataacacaaccgagctcggcgccaagatctgtggcgccgagctcggttccacgtcgacgccacgcgtctgggttgtgccaacgcaacacgacctcggcgccatagcctatggcgccgagctgtgttagctcggcgccataggctatggcgccgagcaaagggtccaaaactgcatttaaaatttttttaggtctaaacgtgattttacttctgtttaagggctaaaatacaaaaaattcgggcgattggttccgcttcaggctcagcctggcttgcatccatcgcccagtctccttggtagacattgggaacatctctgcaaagaacactatcgtttgttcaacatccagcctccttggtagccattgggacaagatatcatgtcaaactggctccacccaaaaaatacatcatctctaacgacaataccgagccaacacacgctcaaaaaacaacatgatttacggtttctggcttgttacaagcactgcacaataaaaaaggtaactataccatgtcaacctctatatgtttcagggaagccgcagtctgcaattctttatgggacatttgccat

SEQ ID NO: 6314 - DNA, 1092 bp, Zea mays
  Zm_smallRNAprecursor_1803
aggggagaggttagcgcgcgccgctgcgggaggaagggggggaactgtatcccctatacgatgaacagtagaaggggaggggaggggaagagtcatgcattgcagtcagtctcatgcattgttctgcacaagtcgaagctcaagtgaccttacataaataaaaaaaccatgtaactaaattattaagcgtgatcgcccagaataaattagcccttagcttgctactatgatgtttagaattgcttcgatatcaccattattattaattacagcagatcactaacgagtcaaaacattgcagcagaaccctaattatatatctgtatacctcgtgatgcatgttgcagcaatccctacctagtgatatgttggtagatcatccaacgcgcgcggcgcctggtaatcatccacctcccggccggcccccaaaattccggccgatcgagatcgattcggggagatctccgaccgatcaacgactggtctctctctctctgcaatttcccacagctttattgaactgccctcttgcttgcttggatcaattgaaactcgatcaggtccacagcacagcctgctgcatgcatgatgcagttcaagaaagctgtggaagatggcagggagggccattatgtctacgatattaactgatccggggtgtgggtacggtggtgtcctagcaaatctgggggaagctagaggagaagagacgatgggcggttatttatagggccgacgacgagaagatgacacgaaagggaaggagccgaggagtcgccggccgcccggaatggttgaacggacggtgttagtggtgcggtgagaaggaagaggtcattgtttttgaaaggaaaaaaaaaccgacgaaacgcctgtttgtaaaggaaaatttagtcaattaattttactgcttatttagagagttccatcccacacaagactcaattttcctctcctttaaaaactatttatttatgttgaaacttgtatcataatcaaaattaaaacagtttgacccaatttcacaagacgtcaatacctcatcgtgcatgctatctactggtacgtactatacggaggtagaagtagtac

SEQ ID NO: 6315 - DNA, 1092 bp, Zea mays; identical to SEQ ID NO: 6314
  Zm_smallRNAprecursor_1804

SEQ ID NO: 6316 - DNA, 1093 bp, Zea mays
  Zm_smallRNAprecursor_1805
aggggagaggttagcgcgcgccgctgcgggaggaagggggggaactgtatcccctatacgatgaacagtagaaggggaggggaggggaagagtcatgcattgcagtcagtctcatgcattgttctgcacaagtcgaagctcaagtgaccttacataaataaaaaaaccatgtaactaaattattaagcgtgatcgcccagaataaattagcccttagcttgctactatgatgtttagaattgcttcgatatcaccattattattaattacagcagatcactaacgagtcaaaacattgcagcagaaccctaattatatatctgtatacctcgtgatgcatgttgcagcaatccctacctagtgatatgttggtagatcatccaacgcgcgcggcgcctggtaatcatccacctcccggccggcccccaaaattccggccgatcgagatcgattcggggagatctccgaccgatcaacgactggtctctctctctctgcaatttcccacagctttattgaactgccctcttgcttgcttggatcaattgaaactcgatcaggtccacagcacagcctgctgcatgcatgatgcagttcaagaaagctgtggaagatggcagggagggccattatgtctacgatattaactgatccggggtgtgggtacggtggtgtcctagcaaatctgggggaagctagaggagaagagacgatgggcggttatttatagggccgacgacgagaagatgacacgaaagggaaggagccgaggagtcgccggccgcccggaatggttgaacggacggtgttagtggtgcggtgagaaggaagaggtcattgtttttgaaaggaaaaaaaaaccgacgaaacgcctgtttgtaaaggaaaatttagtcaattaattttactgcttatttagagagttccatcccacacaagactcaattttcctctcctttaaaaactatttatttatgttgaaacttgtatcataatcaaaattaaaacagtttgacccaatttcacaagacgtcaatacctcatcgtgcatgctatctactggtacgtactatacggaggtagaagtagtaca

SEQ ID NO: 6317 - DNA, 1093 bp, Zea mays; identical to SEQ ID NO: 6316
  Zm_smallRNAprecursor_1806

SEQ ID NO: 6318 - DNA, 1094 bp, Zea mays
  Zm_smallRNAprecursor_1807
aggggagaggttagcgcgcgccgctgcgggaggaagggggggaactgtatcccctatacgatgaacagtagaaggggaggggaggggaagagtcatgcattgcagtcagtctcatgcattgttctgcacaagtcgaagctcaagtgaccttacataaataaaaaaaccatgtaactaaattattaagcgtgatcgcccagaataaattagcccttagcttgctactatgatgtttagaattgcttcgatatcaccattattattaattacagcagatcactaacgagtcaaaacattgcagcagaaccctaattatatatctgtatacctcgtgatgcatgttgcagcaatccctacctagtgatatgttggtagatcatccaacgcgcgcggcgcctggtaatcatccacctcccggccggcccccaaaattccggccgatcgagatcgattcggggagatctccgaccgatcaacgactggtctctctctctctgcaatttcccacagctttattgaactgccctcttgcttgcttggatcaattgaaactcgatcaggtccacagcacagcctgctgcatgcatgatgcagttcaagaaagctgtggaagatggcagggagggccattatgtctacgatattaactgatccggggtgtgggtacggtggtgtcctagcaaatctgggggaagctagaggagaagagacgatgggcggttatttatagggccgacgacgagaagatgacacgaaagggaaggagccgaggagtcgccggccgcccggaatggttgaacggacggtgttagtggtgcggtgagaaggaagaggtcattgtttttgaaaggaaaaaaaaaccgacgaaacgcctgtttgtaaaggaaaatttagtcaattaattttactgcttatttagagagttccatcccacacaagactcaattttcctctcctttaaaaactatttatttatgttgaaacttgtatcataatcaaaattaaaacagtttgacccaatttcacaagacgtcaatacctcatcgtgcatgctatctactggtacgtactatacggaggtagaagtagtacat

SEQ ID NO: 6319 - DNA, 1127 bp, Zea mays
  Zm_smallRNAprecursor_1808
aacgcactaaacatgtggaaatcaatctccattttgtctgagagcatactacacttggtgatgtccatatccttgacatcccaacaatgtctcagttcgccgacatcttcatcaaggagctgcctccgtcggttttcacgaagttccgatctagtctcaacatccatctattccaccaaagcttcgactgtcaggattgttagactgttgtatgcacgtgcgtgtgggccttgagcctggcatgttcaatcggccagcccaaccttatatggttaggttgtctccaacagatcatgcatatggtcgtgtaaaacattgttttgtactgtagactgcaccggtcacatactgaagtttgaaataagagatgagataggagatgcaatgggtaagctgctgaagacactcaagacagtcttagtgtgttaaagagagatgaggtccttgattagggaacgtatcctgtgctcatggagctcttgtgctcatatgagcactttaaatctggtgccttcatttctcatccagggggtgagggcagcagcggcacacagaagagacaggcggcgcggcgcaacaagggtgggcacacagaagaaactaggaaatgtctattcacacttggatgagaaatgaaggcaccagatttatagtgatcataggagcacaagagctccatgagcacaggatatgttcccccttgattaatggcgtttctataaaccacaagatctcatcctgtagagatatgagatcctggattggtggtgtttctgtaaaccacaagatctcctcagcctatatataaatataaatataaatataaatatatgaatatctgccatcacatcaatcactcattccacataatcactatctctttcaaagaatgatagaatttgccgaaaaatcaggagtaatgcaatctcataatcagatgataaaatatgctacatgcatgctgaatatcaatatgattttacataggtgagtttattgttatttttacaggactttatcctgcacttttgtgttttttatcattatcattaaaaacaaatatgatagccaatgaggccatttggaaacggagaaataaacattgcaaatcctaactacagaacaga

SEQ ID NO: 6320 - DNA, 1133 bp, Zea mays
  Zm_smallRNAprecursor_1809
tcgagttttctagtgccgatcttgttgctgagcccggaggacttggaatttcctcttgagatggcctttttcttcctcctttgccctttccacttgcatggctttgttggagaggtgagaaaaactgaggaagtcttggctagccaggatggtcttgagttctggcctgagcctcttcaggaagcgggccatcttcttgacttcggttctgacgtcatctggcgcgtagcgggccaactccgtgaacttgtgcacatattcactgacagatcttccgtcttgagtcagttcccggaattcgtcttccttgagctgaacgatcccttggggcacatggtgctcccggaaagctatttcaaactccgcccaggtagcatctctgatggtgacattgaaggtatcccaccaggctaaggccattccagagagttgatgagcagccagttgaacacgctgattttccgggcatccgattgcttccagctttcttttaattatgtgcagccaatcgtcagcatcgaggggattgctagatccgacaaacgtgggaggcttgagcctcaggaaatctcccatcctgtcttgtggtcttccaccattcggacgttgattttctagacttcgagtgaggacctcgatgagtcgggtttggttggctagaacttgggctagatctaagggtagttctggaggtgcggggaggtgggtctcactttcctctctaccggcttccctttcagctctcaggggaaccctgctccaatcccggaggcggtaggtgtggttttatccgaagccatctgccagggggagataatcactattatgcacatgccaattgttttcaaccaagttattttattcattacaccaatacattacaagcatacaactactacaagtcgtactacatgcgagcgttctcagaggtactcccgaactctttttctaaggtgtccccaaattccttgagaaggtcatcaaggctagctagggacatatcctcgatgtcggacaaattctctatcctggcggcagctggtgctgggggagccttcttccttcactcagcttggcctccttggttcttggtcttcttttggattttcttcgtgggggcgagcttcttcagc

SEQ ID NO: 6321 - DNA, 1060 bp, Zea mays
  Zm_smallRNAprecursor_1810
cgtcgtcacgggtgagtgagtactgtagtactacagacgactacagagtctgaagaaggtgcctcgttgtcgttgtcgttcttgcgcgtggcgtgatggtcgtcaacgctgccgcctgtaaagttgccgctttgtggacgtctctgtgtgtgtgtttgtctctcaggcggcttcgagaagtttcgcgcggggtgacgatgatccgcccgctcacgggcgagcagtacgcggggaaagtggcggagaactgcgtggcgtactggaaggcggccggcctgtacacggacgccgagggcgtcgccgtggagaagttcaagcaggtgttcaagccccatacgttcccgccgggagcctccatccacttcacgcactcgcccgccggagtcctcaccgtgagttcagttcatttccgtgcgacgaaatgagaacgtatcttgtgcgcaaggagcgttggtgctcccatgagcaaaatcaatccagaccacaccctccacatccaacggtgctgtgtcagggggttttgtaaaatgttctttgcaactctgtacattttacaaaaaccccctgacgcagcaccgttggatgtggagggtgtggtctggattgattctgctcatgggagcagtagggctccttgctcataagatacggtgtccgacgaaataggatggtgacacgtacgtactcagtactcacgctgctgttctgctccgatccgctccatccaggtcgccttctccagggactcgtcggtgccggttgccggcggcgtggcgatcgacaacaagcttctctgcgaggccgtgctggagtccatcatcggggagcacggcgtgtcgccggccgcgaagctgagcctcgcggcgagggtgtcggagctcctgaccaaagggaccgccgcagccgcagccgcgctgcgggcggagcccgtctcggttaccgcctgagcggtccagcgaaccgcgaggagaaagagaaccgatcaagcaatcacgtctgccgcccttgcgtgctcctgctccgaacagatgccacgacggacggtgacgctgtcgcgtct

SEQ ID NO: 6322 - DNA, 1169 bp, Zea mays
  Zm_smallRNAprecursor_1811
gtagtgggcattggcagctggtggcgcctcgatcgggcctcgcgctcgcttcagctcaaagcaaaagatagtggggcttgatttggcgtagaaacaccggagaggtctctcgctctcccctgtttccctcactcctccccatgcctcaacaagcgtgacagttgtctcagtactccacagtgagtgagagagagagagagtgtgtgtgtcctgtgtgatcttcttcttgaactataaatagggcaaggcacttggggccattccatcttcattcacttccagcagtagctcacactccgatccatatatatatgggctagtgcggttgcttcgacagagcttggtcttgcgctgctagctgcaaagaacgacgtagctactatacatacacatattcatactcatagataggaatagtgttagacatgtgatggtgagaacctgatcatgcaagcatctgaggatcggagaaggaaggaagggtatggaacagtccttgaagctcaggagggatagcgcctaggaaatcacacatagattggagccacgaagaggaagggagaatgagagagagagagacagagcagctatgctgctctgtctctctctctcactttctcttggatccatctcaaggttctgtctatatatgatgaatcgatccgaagcgctatctatcctgagctccacggcttgttcttaccagttacgtaccacgtacgcgccgccgccgccgccggccgatctcgagctcctcgcgcgctcccagctagaattgccttctgtgtgcgtcgtactccttcattctttcttgttgagatgcaggaggcgagcctgagattgatcgaggtcgtcgtcgtcgtcgtctcgtcgctagtagcttcgcttcaagttcaaggacatcatcgtccccggccggccagtgcgcgtccgcggccgatccaggtgtctcatcctgctggctccatgcatgcatgcaggcatgattactttagtagtatatccgtgtgcaggcggatgaggtgtgtgtgcgcgcgctcaccagtcgcacgtgttatcatgcatgcatgcaacttgcaagagctttgacaagttatgggccggggcacgcacgccgcagcgcccccgcccaacttgcaagcgtgcagtaaatgctgacctaaccaatt

SEQ ID NO: 6323 - DNA, 1169 bp, Zea mays; identical to SEQ ID NO: 6322
  Zm_smallRNAprecursor_1812

SEQ ID NO: 6324 - DNA, 1170 bp, Zea mays
  Zm_smallRNAprecursor_1813
gtagtgggcattggcagctggtggcgcctcgatcgggcctcgcgctcgcttcagctcaaagcaaaagatagtggggcttgatttggcgtagaaacaccggagaggtctctcgctctcccctgtttccctcactcctccccatgcctcaacaagcgtgacagttgtctcagtactccacagtgagtgagagagagagagagtgtgtgtgtcctgtgtgatcttcttcttgaactataaatagggcaaggcacttggggccattccatcttcattcacttccagcagtagctcacactccgatccatatatatatgggctagtgcggttgcttcgacagagcttggtcttgcgctgctagctgcaaagaacgacgtagctactatacatacacatattcatactcatagataggaatagtgttagacatgtgatggtgagaacctgatcatgcaagcatctgaggatcggagaaggaaggaagggtatggaacagtccttgaagctcaggagggatagcgcctaggaaatcacacatagattggagccacgaagaggaagggagaatgagagagagagagacagagcagctatgctgctctgtctctctctctcactttctcttggatccatctcaaggttctgtctatatatgatgaatcgatccgaagcgctatctatcctgagctccacggcttgttcttaccagttacgtaccacgtacgcgccgccgccgccgccggccgatctcgagctcctcgcgcgctcccagctagaattgccttctgtgtgcgtcgtactccttcattctttcttgttgagatgcaggaggcgagcctgagattgatcgaggtcgtcgtcgtcgtcgtctcgtcgctagtagcttcgcttcaagttcaaggacatcatcgtccccggccggccagtgcgcgtccgcggccgatccaggtgtctcatcctgctggctccatgcatgcatgcaggcatgattactttagtagtatatccgtgtgcaggcggatgaggtgtgtgtgcgcgcgctcaccagtcgcacgtgttatcatgcatgcatgcaacttgcaagagctttgacaagttatgggccggggcacgcacgccgcagcgcccccgcccaacttgcaagcgtgcagtaaatgctgacctaaccaattc

SEQ ID NO: 6325 - DNA, 1170 bp, Zea mays; identical to SEQ ID NO: 6324
  Zm_smallRNAprecursor_1814

SEQ ID NO: 6326 - DNA, 1072 bp, Zea mays
  Zm_smallRNAprecursor_1815
cggtacaacctaatgctgatacatggaacatacatagcagtggcgaacttgtttgatttttttaataaaatagaaaagaaaaactaagggatgaacttcggatttgaagctgttgaagaacagtaaaacgttgttacagtgcacggataatgcactctcaaaatgctctaatttcacgcctaaccgggtccagtccattgcagcccgcagtccggttgtttccaaacacggaaaagaaaaatatgttgggttcgaggttaaaggcccatggactacaaggagtggcccacgagaactcaagcagcagcgcgcgcagaagtgcagaacgcgttcgttccgtctcaggatttagcaccacctcggctggcgaaggcagacgcgccacgagctcgcgctataagatgagcgctccgtgcttcgttgctccatacttacctggacggggtcgactggggatcaagaagccctgtggcctaggtcagtggcccgcattgcacatggcgggtgcgctggcttaccatctccccaagtaggagagtggacgtcataatttgtggtagagggggtacgcgttcgcgcggcccctgccaaatctgataaatttaatttaggtcctttgtcagttaaaagttgattgtttctcgaattgttgtttactgtactgtaagagtttgaaatctgttaaatttaaattaggtcctttgtcagttgaaagtttggtcgcgacttgcattattgttcactgtactgtttaaagagtttgaatagagaatatctactcataataacttaacaatcttgactagtgattaatatttattttgacaccgatattcatttcggctgtgtgattcagcgcttccattttcaggagatcctcttccttccgagagattctgatatttgctatcagcatgaaacatgtttgtaaaattgccatcagacccacatttcatagacccagctggacccacaattcatagacacagtggtaattataaaaagaagacaacattgtgagtggcaaaaatccaattatctccttcctgtgtgattcagcgcttccattttc

SEQ ID NO: 6327 - DNA, 1090 bp, Zea mays
  Zm_smallRNAprecursor_1816
cacaggccggccggccggccgccagccagacgacgacgacggagacggtagagcttggctacggcaagtcatcaaccaccacctgagcaaagacacgcatcgatcgccaataaggcatgtcattggcttcctctcgatcgatctgccccttctcctcacgtctcgccttgtcctgcattattttgcccgtggtgatgcgcgcctgctgctggttcggccgggagacgacatggacgtcccaaccatttcgcttatctttgcgattatttttttcttcctcggcttacgtacgcctacgcccattcgtaccgtcgccgcgcgcctattaattcggctgcttcgcctcgcctgcttgcttgctccgttgccagcacagcagctcaagttctccgtctccctccagtttagggttgcgtggctgggagctcgggtagctagtcgtccatggcgatcgatcgagaaggggtggtggcgtttggttgttggctgagagagtgcgatgttggcatggctcaatcaactcgccggccgcgggtggcttatagcttaattctgcgcattcgatcgaggtgcgggcgcagtgtttaattgattgagccgtgccaatatcacaaccttctctagcctatatatgtggagtggactacaggtacgggggttttgtgttctttgtcgtcctgctatgcgccgtgaaatttaattaagattcggttttccatctatatatcgtgtatataccatggatgtgtgtactgtttgtggcattattatcaggtcatgtttacaagtatagtaggtgtggcagcagttgacctatggttcccggataaaaagatgtctattgctattttatatataatagtaatccgtatatgcgattgctgcttaataagggctttgttcgattctgtgatgggattagaggagattaaatccccttcgatcgtatgaacattttggcagtgtatatgagcattttggcaggaggctagggtactctattgttggtcaaagcttgctctcattttggcagtgtatatgagcattcacagttcgctcgtgaaagaacagctgtttttttagcggacga

SEQ ID NO: 6328 - DNA, 1093 bp, Zea mays
  Zm_smallRNAprecursor_1817
cacaggccggccggccggccgccagccagacgacgacgacggagacggtagagcttggctacggcaagtcatcaaccaccacctgagcaaagacacgcatcgatcgccaataaggcatgtcattggcttcctctcgatcgatctgccccttctcctcacgtctcgccttgtcctgcattattttgcccgtggtgatgcgcgcctgctgctggttcggccgggagacgacatggacgtcccaaccatttcgcttatctttgcgattatttttttcttcctcggcttacgtacgcctacgcccattcgtaccgtcgccgcgcgcctattaattcggctgcttcgcctcgcctgcttgcttgctccgttgccagcacagcagctcaagttctccgtctccctccagtttagggttgcgtggctgggagctcgggtagctagtcgtccatggcgatcgatcgagaaggggtggtggcgtttggttgttggctgagagagtgcgatgttggcatggctcaatcaactcgccggccgcgggtggcttatagcttaattctgcgcattcgatcgaggtgcgggcgcagtgtttaattgattgagccgtgccaatatcacaaccttctctagcctatatatgtggagtggactacaggtacgggggttttgtgttctttgtcgtcctgctatgcgccgtgaaatttaattaagattcggttttccatctatatatcgtgtatataccatggatgtgtgtactgtttgtggcattattatcaggtcatgtttacaagtatagtaggtgtggcagcagttgacctatggttcccggataaaaagatgtctattgctattttatatataatagtaatccgtatatgcgattgctgcttaataagggctttgttcgattctgtgatgggattagaggagattaaatccccttcgatcgtatgaacattttggcagtgtatatgagcattttggcaggaggctagggtactctattgttggtcaaagcttgctctcattttggcagtgtatatgagcattcacagttcgctcgtgaaagaacagctgtttttttagcggacgatga

SEQ ID NO: 6329 - DNA, 1075 bp, Zea mays
  Zm_smallRNAprecursor_1818
tttttcaattcataagacggatctaaaccgaatccttagcgaatggaagaaaggaatgggatcggagtcggaggtgaggggaagtaatctcacctgaagtaaagcaagctccggagcctggaacctgaaggggacgatcgatttggccagtaaggggaggggagcgtgcgtgcagtgctgagctctcctagtctcctgcctgcttgcctgctgggcttatccaccgaccgatgccagagcagcacgcagctaggccatagtggaatgggagcggacagcggagtacacgagccggcgcgcgggggcggtggggcgcgcgtggggtggcggcggggcgctggcggcaggcgcgcgactggcaggtagcggcgggcgcgcgcggtagacagagcgaaagaagagagacgcacggggttagggatttaggttttgggttaagttcgatggtgttcacgtggcccacgaatttaacttaagaacgtgggtacccacgttcctaatacgataagttcgacggttttagcacgggcccacgaatttaatttaagaacgtgggtacccacgttcttaaattaacccacgaacataactcaattaagaacgttggtacccacgttcttaaattaacccacgaacatttattagtttcttgtagtgcacgtcaacaggaggcgtcatcatcaccctaccccgagctgactcgggccgcagggaacaagaccggcgtcccatctggctagctccgccagatagacaatgatggcgccccgcgtactctgtgacgacggcggctctcagcccccttacggaagcaagaggacgtcagcaaggactcaaccgctccgacagttgtccttccgccaggcttcatcgctcctccaacggccacgacatcacaccagctgggtgccaaaatctctccggctgccacaatggcatgtacttagggcgctagacacgtagcactctgctacacccccattgtacacctggatcctctccttacgcatataaaaggaaggaccagggccctcttagagagggttggcagcgcagggacgaggacgagacaggc

SEQ ID NO: 6330 - DNA, 1164 bp, Zea mays
  Zm_smallRNAprecursor_1819
aataaaatttgttttgcttcttttagtggatttatcatcatcaatataaacaaaaaaaattaagagctaaaacaaatactattttgaaacggatggagtattcgataagtaattgtgacattagtttaaacgagactagtcgataactcgatatcacatcgctctttgcgtatttgtgcctagaatatataggtttaacaaaaaaaatgctagcgtccagtggctagggggccctctgtttttggggggccggtgcggccgtaccctccgcaccccctcagtgccggccctggacatcacttggtgttggagacttggggacgccggcaacaaacgagccgaccaacagtcatcgatagtgttcggtgccggtggagtgagccacggactcgtggaagtggaatgtggatcactcaatgtgggctggatctctgaatctgtagattgttgtgttgtttggtctaatcacgtaacagagacttggcaacgacggttatgcaagcagtccttctgtgcaagcgtgcaagcaaaccatctgatctattagattacgatccaaccacagatacaaccatagtttgttaggggtttttataaagattattgagccggtggtggaagggtttaaatgttaaatgtgacctacggttggatcataatctaatggatcagatggtttgcttgcacacttgcacataaggactgcttgcatagcagttgttgcccagagacttatagccgaagaaccaaaaaacaatcgatttctagcaactaggaaccgaataacaaaccgactgaaatttcggtatgatggggttcagtttcagtcttatcgggtttggtctccggtctcgggttttttgcccagtcctagttagagtatagtagtactattgaagagagatatagggatagttatagtgatcaactctgatacgtgcaacttcgatactccaacaactttgatacatgcaacattggcaaactctagttgatacaactctaaccaactccaatggatgaactctaacaaactcgaggagatgaaattccggctaagtcaagttgatggaacctgacccatttccaacacacactttagacacacacaacattgtaaaggaaagaatcttagagaagttttcaatgagtacttgaaatgta

SEQ ID NO: 6331 - DNA, 1165 bp, Zea mays
  Zm_smallRNAprecursor_1820
aataaaatttgttttgcttcttttagtggatttatcatcatcaatataaacaaaaaaaattaagagctaaaacaaatactattttgaaacggatggagtattcgataagtaattgtgacattagtttaaacgagactagtcgataactcgatatcacatcgctctttgcgtatttgtgcctagaatatataggtttaacaaaaaaaatgctagcgtccagtggctagggggccctctgtttttggggggccggtgcggccgtaccctccgcaccccctcagtgccggccctggacatcacttggtgttggagacttggggacgccggcaacaaacgagccgaccaacagtcatcgatagtgttcggtgccggtggagtgagccacggactcgtggaagtggaatgtggatcactcaatgtgggctggatctctgaatctgtagattgttgtgttgtttggtctaatcacgtaacagagacttggcaacgacggttatgcaagcagtccttctgtgcaagcgtgcaagcaaaccatctgatctattagattacgatccaaccacagatacaaccatagtttgttaggggtttttataaagattattgagccggtggtggaagggtttaaatgttaaatgtgacctacggttggatcataatctaatggatcagatggtttgcttgcacacttgcacataaggactgcttgcatagcagttgttgcccagagacttatagccgaagaaccaaaaaacaatcgatttctagcaactaggaaccgaataacaaaccgactgaaatttcggtatgatggggttcagtttcagtcttatcgggtttggtctccggtctcgggttttttgcccagtcctagttagagtatagtagtactattgaagagagatatagggatagttatagtgatcaactctgatacgtgcaacttcgatactccaacaactttgatacatgcaacattggcaaactctagttgatacaactctaaccaactccaatggatgaactctaacaaactcgaggagatgaaattccggctaagtcaagttgatggaacctgacccatttccaacacacactttagacacacacaacattgtaaaggaaagaatcttagagaagttttcaatgagtacttgaaatgtaa

SEQ ID NO: 6332 - DNA, 1139 bp, Zea mays
  Zm_smallRNAprecursor_1821
gtggatttatcatcatcaatataaacaaaaaaaattaagagctaaaacaaatactattttgaaacggatggagtattcgataagtaattgtgacattagtttaaacgagactagtcgataactcgatatcacatcgctctttgcgtatttgtgcctagaatatataggtttaacaaaaaaaatgctagcgtccagtggctagggggccctctgtttttggggggccggtgcggccgtaccctccgcaccccctcagtgccggccctggacatcacttggtgttggagacttggggacgccggcaacaaacgagccgaccaacagtcatcgatagtgttcggtgccggtggagtgagccacggactcgtggaagtggaatgtggatcactcaatgtgggctggatctctgaatctgtagattgttgtgttgtttggtctaatcacgtaacagagacttggcaacgacggttatgcaagcagtccttctgtgcaagcgtgcaagcaaaccatctgatctattagattacgatccaaccacagatacaaccatagtttgttaggggtttttataaagattattgagccggtggtggaagggtttaaatgttaaatgtgacctacggttggatcataatctaatggatcagatggtttgcttgcacacttgcacataaggactgcttgcatagcagttgttgcccagagacttatagccgaagaaccaaaaaacaatcgatttctagcaactaggaaccgaataacaaaccgactgaaatttcggtatgatggggttcagtttcagtcttatcgggtttggtctccggtctcgggttttttgcccagtcctagttagagtatagtagtactattgaagagagatatagggatagttatagtgatcaactctgatacgtgcaacttcgatactccaacaactttgatacatgcaacattggcaaactctagttgatacaactctaaccaactccaatggatgaactctaacaaactcgaggagatgaaattccggctaagtcaagttgatggaacctgacccatttccaacacacactttagacacacacaacattgtaaaggaaagaatcttagagaagttttcaatgagtacttgaaatgta

SEQ ID NO: 6333 - DNA, 1140 bp, Zea mays
  Zm_smallRNAprecursor_1822
gtggatttatcatcatcaatataaacaaaaaaaattaagagctaaaacaaatactattttgaaacggatggagtattcgataagtaattgtgacattagtttaaacgagactagtcgataactcgatatcacatcgctctttgcgtatttgtgcctagaatatataggtttaacaaaaaaaatgctagcgtccagtggctagggggccctctgtttttggggggccggtgcggccgtaccctccgcaccccctcagtgccggccctggacatcacttggtgttggagacttggggacgccggcaacaaacgagccgaccaacagtcatcgatagtgttcggtgccggtggagtgagccacggactcgtggaagtggaatgtggatcactcaatgtgggctggatctctgaatctgtagattgttgtgttgtttggtctaatcacgtaacagagacttggcaacgacggttatgcaagcagtccttctgtgcaagcgtgcaagcaaaccatctgatctattagattacgatccaaccacagatacaaccatagtttgttaggggtttttataaagattattgagccggtggtggaagggtttaaatgttaaatgtgacctacggttggatcataatctaatggatcagatggtttgcttgcacacttgcacataaggactgcttgcatagcagttgttgcccagagacttatagccgaagaaccaaaaaacaatcgatttctagcaactaggaaccgaataacaaaccgactgaaatttcggtatgatggggttcagtttcagtcttatcgggtttggtctccggtctcgggttttttgcccagtcctagttagagtatagtagtactattgaagagagatatagggatagttatagtgatcaactctgatacgtgcaacttcgatactccaacaactttgatacatgcaacattggcaaactctagttgatacaactctaaccaactccaatggatgaactctaacaaactcgaggagatgaaattccggctaagtcaagttgatggaacctgacccatttccaacacacactttagacacacacaacattgtaaaggaaagaatcttagagaagttttcaatgagtacttgaaatgtaa

SEQ ID NO: 6334 - DNA, 1151 bp, Zea mays
  Zm_smallRNAprecursor_1823
catggaactaatagttagcagccccttagttaataattgagagaattatttccttggccctaaaaaaatgttcgggttactttcttaaccctttatttttgaacttacccatttggtctgaaagctatttttagttacttagggcccctttggcacggctctttggacggctctagctcaggtttattgtgaagccctaccaaacagtaaaaaaacgggttctcgtcgagagccctccaagagctggagctgtcttcttgttgggagcccgagcacccaaaccaaaaacgtgccttctgccagctccaacattttcctactacatcattcgaatttcgaaagaaacacaagagaaacagttttgccaaacgaattgcaaaatggctccggctcctccagagaagccaaggagccagagccctgccaaagggggccttatataaaagacacttatatgacccttccattagttttggagcttaaatgtgttaagtccagggtgaattgacgattttgcccctaggtggaaactgaattagtgcagagttctgtttgtctatgtttagctttgagaaatatttttaaaccatgtgaaatattcctcaaaattgagcatagacgaactaggctctgtttcatttttcactcagggtcaaaatcgtcaattcacccttgacttaacaccgtttagtcccaaaactagtggaagggccacataagtaactaaagataccttttgggtcaaataacataagaaagttcaaaactagaagggccaaaaaagtagctgttttttttgggccatggacataattctcttttaataattagcaggtctgtttgtattcactaatactaattttagctgctaatttttagtgctaatggatccaaacaagcccaggaaaagctaacttttgctgctaatttttagtgttagttggtctacctatagggctcaaaataagatgccagttttttttttctctggagatgagaagacaggaaaaagcaggtatcctgtcataacatctccagaaacagctggtatcttgacaattatcatgtactccctccgttgttttttatttgtcgcagtttagttcaaaaatgaactagtgagcgacaaatattcgagaacggaggtagta

SEQ ID NO: 6335 - DNA, 1058 bp, Zea mays
  Zm_smallRNAprecursor_1824
aaacccttcagcgtctgaggtttaccaaccccaccctcactcctcgtcatcctggtgtccaggaccctcggttctggaatcttttccaggctgacttctacaattctgtcattcttaccaagaaacacccagtcgtccgacatagatttattgactgggagggttgtgagaatatgggagatgctgacatgtcgtcagctctcgtaaaccttgagagaaaggggttacgtagcattatgaccatggaatacccctggaacgatgaggtggtagctcagttctatgccaccctctggataaagaaagtagatgaggaagctgatgggtatgagtacccagtcatgtatttcttcatctagggtaactggcacagagtcagttatcgtcgttttgcccatattctgggcttctctgatgcagacattctgggcagcaacatgcgagtgcatggcattcggctgcccaggcgggaagagacggaattcattcatgtctctgctgagcgggagttctggacaaccgctaacatgcataggtactacaggtaccttaattccttgtcccggatgaccgttctcccaaagggcggtaatcaaatgaacgtccttggggagagtcgagtcctcctcctcctcctgattatcgtacatcttcggcatctgttttttctgcggctgatgagccacctcgggactccacttttgaggaggacgcgatgaggacttttttccctgactacacttcatatcctccatcgtatcctccgtcatatcctcctcctggaggatactgattcttgtatccttgtctctctctctccgtttttggtacttgttgccaaaaagggggagaacatccaacttctagtttgtggttctttcgttttttttctttcttttggattatttttgtttttggccactgttgtggcttgtatcttttttttcccattgtatgaaataaaactgttggattgttattcaaagtaatatgatggtcttctggccatcatcttttgtcctatcagtttgtaatgtctactctgctatgaagtaaaa

SEQ ID NO: 6336 - DNA, 1057 bp, Zea mays
  Zm_smallRNAprecursor_1825
aacccttcagcgtctgaggtttaccaaccccaccctcactcctcgtcatcctggtgtccaggaccctcggttctggaatcttttccaggctgacttctacaattctgtcattcttaccaagaaacacccagtcgtccgacatagatttattgactgggagggttgtgagaatatgggagatgctgacatgtcgtcagctctcgtaaaccttgagagaaaggggttacgtagcattatgaccatggaatacccctggaacgatgaggtggtagctcagttctatgccaccctctggataaagaaagtagatgaggaagctgatgggtatgagtacccagtcatgtatttcttcatctagggtaactggcacagagtcagttatcgtcgttttgcccatattctgggcttctctgatgcagacattctgggcagcaacatgcgagtgcatggcattcggctgcccaggcgggaagagacggaattcattcatgtctctgctgagcgggagttctggacaaccgctaacatgcataggtactacaggtaccttaattccttgtcccggatgaccgttctcccaaagggcggtaatcaaatgaacgtccttggggagagtcgagtcctcctcctcctcctgattatcgtacatcttcggcatctgttttttctgcggctgatgagccacctcgggactccacttttgaggaggacgcgatgaggacttttttccctgactacacttcatatcctccatcgtatcctccgtcatatcctcctcctggaggatactgattcttgtatccttgtctctctctctccgtttttggtacttgttgccaaaaagggggagaacatccaacttctagtttgtggttctttcgttttttttctttcttttggattatttttgtttttggccactgttgtggcttgtatcttttttttcccattgtatgaaataaaactgttggattgttattcaaagtaatatgatggtcttctggccatcatcttttgtcctatcagtttgtaatgtctactctgctatgaagtaaaa

SEQ ID NO: 6337 - DNA, 1058 bp, Zea mays
  Zm_smallRNAprecursor_1826
aacccttcagcgtctgaggtttaccaaccccaccctcactcctcgtcatcctggtgtccaggaccctcggttctggaatcttttccaggctgacttctacaattctgtcattcttaccaagaaacacccagtcgtccgacatagatttattgactgggagggttgtgagaatatgggagatgctgacatgtcgtcagctctcgtaaaccttgagagaaaggggttacgtagcattatgaccatggaatacccctggaacgatgaggtggtagctcagttctatgccaccctctggataaagaaagtagatgaggaagctgatgggtatgagtacccagtcatgtatttcttcatctagggtaactggcacagagtcagttatcgtcgttttgcccatattctgggcttctctgatgcagacattctgggcagcaacatgcgagtgcatggcattcggctgcccaggcgggaagagacggaattcattcatgtctctgctgagcgggagttctggacaaccgctaacatgcataggtactacaggtaccttaattccttgtcccggatgaccgttctcccaaagggcggtaatcaaatgaacgtccttggggagagtcgagtcctcctcctcctcctgattatcgtacatcttcggcatctgttttttctgcggctgatgagccacctcgggactccacttttgaggaggacgcgatgaggacttttttccctgactacacttcatatcctccatcgtatcctccgtcatatcctcctcctggaggatactgattcttgtatccttgtctctctctctccgtttttggtacttgttgccaaaaagggggagaacatccaacttctagtttgtggttctttcgttttttttctttcttttggattatttttgtttttggccactgttgtggcttgtatcttttttttcccattgtatgaaataaaactgttggattgttattcaaagtaatatgatggtcttctggccatcatcttttgtcctatcagtttgtaatgtctactctgctatgaagtaaaaa

SEQ ID NO: 6338 - DNA, 1134 bp, Zea mays
  Zm_smallRNAprecursor_1827
aagatggattacgataagaagctaaagaagctcgcccccacgaagaaaatccagaagaagaccaagaaccaaggaggccaagctgagcggaggaagaaggcccctccagcatcaactcctgccaggatagagaatttgtctgacatcgagcatatgtccctagctagccttgatgaccttctcaaggaatttggggacgctttagaaaaagagttcggtagtacctcagagaacgctcgcgtgtagtacgacttgtagtagtcgtatgcttgtaatgtattggtgtaatgaataaaataacttggttgaaaataattggcatgtgcataatagtgactctctccccctggcagatggcttcggataaaaccacgcctaccgcctctgggattggagcagggtttcccctaagagctgaaagagaagccggtagagaagaaagcgagacccacctccccgcacctccagaactacctctagatttagctcaagttctagccaaccaaacccgactcatcgaggtcctcactcgaagtctggaaaatcaacgcccgaatggtgggagaccacacgacaggatgggaaatttcctgaggctcaagcctcccacgtttgccggatctagaaatcccctcgatgctgacgattggctgcgcacgattaaaagaaagctggaagccatcggatgcccggaaaatcagtgtgttcaactagctgctcatcaactttccggaatggccttagcctggtgggataccttcaatgttaccatcagagatgctacatgggcggagtttgaaacggctttccgggagcaccatgtgccccaagggatcgttcagctcaaggaagatgaattccgggaactgactcaagacggaagatctgtcagtgagtacgtgcacaaattcatggagttggcccgctacgcgccggatgacgtcagcaccgaagtcaagaagatggcccgcttcctgaaggggctcaaaccagaactcaagaccatcctagccagccaagacttcctcagtttatcgcacctctccaacaaagccgtgcaagtggaaagggcaaaggaagaagaaaaaggccatctcaagaggaaattccaagtcctccgagctcagcagcagg

SEQ ID NO: 6339 - DNA, 1048 bp, Zea mays
  Zm_smallRNAprecursor_1828
gcaactgagcacaacaagcaacatcagttatgtattcagcatcagcagtggaaagtgcaacacaattttgcttcttagagctccaagacaccagggaccgcccaaggaattggcacgtccccgaggtgctttttcgatcaactttacaaccgacatagtctgaatcagagtagccaaataaatcgaaaaaggaacccttgggataccagagacctagattttgggtgtgaactagatatctcaaaattctcttaacggtcactaagtgacgctcttttgggtttgcttgaaaacgagcacacatacacacactaagcatgatatctggcctagatgcacataaatatagtagagatcctatcattgatttataaagcttttgatctacagttttaccttcttcatttaagtcgagatgaccacttgaagccattggtgtcttggcgtgctttgccttttccatgccaaactttttgagcatgtcttgtgtgtacttggtttggcacagaaaggttccttccttgagttgtttaacttgaaaacccaggaagtacttgagctcacccatcatggacatctcaaacctatttgtcataaccctactaaattcctcacaaaaagtttcatcagtactgcaaaatataatgtcgtcgacatatatttgacaaacaaataattgattgtcaattttgtgagtgaataaagtagagtctacttttcctatttcaaaaccatttttaagcaagaaatctttaaggcaatcataccaagctctaggggcttgtttaagcccgtaaagtgccttgtgaagtaggtaaacgtggtttggcttctttggatcttcaaagcccaatggttgctccacatagaccctctcttgtagtggtccatttagaaatgcgctcttgacatccatttgatataacttgaaatcatggttagtagcataggcaattaatattctaattgactctaaccttgctaccggcgcatacatttccccaaaatcaagtccttccacttgagtgtagccttgggcaaccaatcg

SEQ ID NO: 6340 - DNA, 1102 bp, Zea mays
  Zm_smallRNAprecursor_1829
tcgagccacccatttgcaccatttcagtcattctataaaaccgatgtcagccatttcgtgtattgttcagccattccatggaactaatgtcagtcattcttgttttgttcggctattccatggttctaatgtcaacgacctatttttatttagccattcctgatattttgttcagctatttctagttttattcagccattctcattttgttggccatttcatgaaaattctcagccattctttatggtctcaaccattcttgcgatagtgagagtaagatcaatatgttaagtggatctatttttaaagctttcatcatgacgaacacaatagtgaaatcgatttttctaaattcgtcatccggtttagtacatattaacttttaaagtggaacaatgaatcatacatgcatgcattcttttttcgaaagagtggctagaggtggctgcatttgatcggacggggcgcacgcactctggcgcgtctgattcggttatggcttgtttgggagcaagtggaatgaagggtattgataggactataatcccttgctatctaaaattgaatagtggaggattatatgccctccaatccactctattacctttactcccaaacaagcccttagggactggtttgggtgatggacctctgatccatcaccataggtgacgaatagcgttttaagagtgtgcgtgcgtgtttatgtattgttattcgttattctaggtgatgatcacccattttagaatgactaacaaaaatcacgaatgactaaacgatcaaccagcaacaacttaaatgacttataaaaagcgtgaataacttaatcgatttgttaagacatttcagggtgggtggttatcatctaggattacgaatagcgtgtatatatatagagatttgctagtttattgtgcatagcacttgttagggagcgtttggcagagctccatagctccactcccagcgagaatcactctcacgtagcaaaacggcaaaaaagtaaactgctctatggtgggagtggagtaaaactagtcaccattttgtactagagagtgggagcaaaaaaaactgcttcccatcgcttccaacatga

SEQ ID NO: 6341 - DNA, 1041 bp, Zea mays
  Zm_smallRNAprecursor_1830
gataaaaatggcaacacacgtccatcctccacgaacacgatatatatttcttaccggccggacgagcttcgcgcatttgcgttttcactctgcgctgtgcggggaagacagagcgagcgttgaggcggcgaagaaattgctcagcttcggctaggcgctgcccgcacaggtaaaaaaattactgccatgaagcaagagggaaaaaaagcaggagtaatttatataataatcctgcattccaaatagtatacttaatgagttaattaaaaaaatgagttattcaaaagataaaaaaaatctaggcgagaaataaatttaagcggacacaccaacgacataaacaaaaaaaaaacaaaaaaatgcaaactatggggcttgaacccacgaccacatagttagaagccttgtgctctaccaagtgggctagatgggctttgtgctcatgtctgcaacaaatattttaataacacaacttagctcggcgccaagatctgtggcgccgagctcggttccacgtcgacgccacgcgtctgggttgtgccaacgcaacacgacctcggcgccatagcctatggcgccgagctgtgttagctcggcgccatagcctatggcgccgagcaaagggtccaaaactgcatttaaaatttttttaggtctaaacgtgattttacttctgtttaagggctaaaatacaaaaaattcggtctactggcctcattctggctaggcgtgccgccggaccaggctagccgacggggcgctagccgatggcgcttctgctgggctggccgcctggatgcttgggcgctggacgtggccgcctatggccagtgccacattgctcgaatgcgggaggcggtgagtgtgaggcgtaggtgaagggtgtagggggtggctggttgggacgggatgtgatgcgatctgacgtatagattttctcggtttatttgctagactgggcacacattttttgtatggcgcaggccacagtaggccaaaacacgggcaggccatagtgggccctctaccaccgacgagagg

SEQ ID NO: 6342 - DNA, 1040 bp, Zea mays
  Zm_smallRNAprecursor_1831
ataaaaatggcaacacacgtccatcctccacgaacacgatatatatttcttaccggccggacgagcttcgcgcatttgcgttttcactctgcgctgtgcggggaagacagagcgagcgttgaggcggcgaagaaattgctcagcttcggctaggcgctgcccgcacaggtaaaaaaattactgccatgaagcaagagggaaaaaaagcaggagtaatttatataataatcctgcattccaaatagtatacttaatgagttaattaaaaaaatgagttattcaaaagataaaaaaaatctaggcgagaaataaatttaagcggacacaccaacgacataaacaaaaaaaaaacaaaaaaatgcaaactatggggcttgaacccacgaccacatagttagaagccttgtgctctaccaagtgggctagatgggctttgtgctcatgtctgcaacaaatattttaataacacaacttagctcggcgccaagatctgtggcgccgagctcggttccacgtcgacgccacgcgtctgggttgtgccaacgcaacacgacctcggcgccatagcctatggcgccgagctgtgttagctcggcgccatagcctatggcgccgagcaaagggtccaaaactgcatttaaaatttttttaggtctaaacgtgattttacttctgtttaagggctaaaatacaaaaaattcggtctactggcctcattctggctaggcgtgccgccggaccaggctagccgacggggcgctagccgatggcgcttctgctgggctggccgcctggatgcttgggcgctggacgtggccgcctatggccagtgccacattgctcgaatgcgggaggcggtgagtgtgaggcgtaggtgaagggtgtagggggtggctggttgggacgggatgtgatgcgatctgacgtatagattttctcggtttatttgctagactgggcacacattttttgtatggcgcaggccacagtaggccaaaacacgggcaggccatagtgggccctctaccaccgacgagagg

SEQ ID NO: 6343 - DNA, 1068 bp, Zea mays
  Zm_smallRNAprecursor_1832
gagctccctctcctgatttcagaattaattgaattgcacttgctggcagattttgtttcatcagccttgttggcacctttttttgttgatgcttgcttttttggtccatgaactcttaaatcattgcagttcaaaattataaagtagtgtgttcacagttgagcctgtgatgattagctatacatttggaattaccatcagatttacttgtgaagactgttgtctggctttatgaggcttttgttccacacatctatattctatctgttttacaatgtttcagtttcatatcattagattactatgaatttccataggatattcaatatgattatttccctgtggtgctttgaataggcctaggcagtttattcatttttttcacatgtggattggagcctgatgacagtggctctgagttttattaggttttctggattgtttgttgaaacagtgttgttttactatcttttgattctttgttgttggctgctgtggtggaggttgatgatatggttttgtcgccccagtcttagatccggacttcccgtatctgtgctgattgacatcttatcgaatctgactccattgtatcaatttgcagtcaagtctgcttacgtagtctgttctttttctcatttacatccgattggttcatgacatgtttttcttcatttacacatcatcggttcatgacatgttttagttgcattgcaagagcttaaactcacctggatccgacaccttgatcgttggcttttgttgtttctttgaatttcagcacagcaaacgcatatttgcaattccttaaacaataaaaaggtcttataattatcaaacattatataaattataaataacaatatatgaactaataattatattttaaaaataaaaagaatacaatgttattttttgttggctgtcttttaataactacaaaaagtatttagtcaagagactatgcaaatggattgtacatatttttgggcggtctgatgggtggaaacgagccccctataatcattttgcattagagctgaatgtattgagtcttattgatggttt

SEQ ID NO: 6344 - DNA, 1040 bp, Zea mays
  Zm_smallRNAprecursor_1833
ttggtgattgatgccaaaacaattaaggtcaaaaagatatacatttgcaatagaaaatattttttgaatgattgtatatagatggctccccctaaatgtgtgcacgattgtgaatccaatgttttgacataatatgtcatgtgagcaacacatttagagatagtgacaagaaccatactgaatacaaccatctgaggggtgcaagagtgtcataacaggagttgtgatgcacatgactatctctaaatacacatcattttttcttcatagcaaagtaatcattacaaactgataggacaaaagatgatggccagaagaccatcatattactttgaataacaacccaacagttttattttatacaatggtaaaaggatacaagccacaacagtggccaaaacaaaattaatccaaaagaaaaccgaaagaaccacaaactagaggttggattttctccccctttttggcaacaagtaccaaaaacgaagagagagacaaggatacatgaatcaatatcctccaggaggaggatatgacggaggatatgatggagggtatgaagtgtagtcagggaagagggtcctcatcacgtcctcctcaaatgtggagtcccgaggtggctcatcagccgcagaaaaaacagatgccgaagatgtacgatgatcaggaggaggtggagggtggtgatggtaaccagagccggatggcctagggtcaccaggaatgggtcccggacccgggtagggaggcggagggtgagaggatgattgacccggatccccatggtagggaggcggggcaaactgctcgcgatcatcaacataggcttcttcttcttcttcgtcgtctgcagacataaatggcaccccgtaggcctgctggtgccactcattgatctccgggggaggaggatggagaggcacgtcaggcgagcgagggacaaatggcatacccatggtggaagcttgacgacgaagattgtcttcagtctcccgctgacgccgtgccacctcatggacatcagcagaaatgttgtggca

SEQ ID NO: 6345 - DNA, 1064 bp, Zea mays
  Zm_smallRNAprecursor_1834
cccggaaccacaagaatccttagaatgggattccaactcagcaccttttgttttgggattttgagaagagttgctctttggagagcacagtacgatgaaagttgtaagctgtgttcgggggggagttattgcctatcgttgtcctctatggtagaacccgtcggggaggcctgagaggcggtggtttaccctgtggcggatgtcagcggttcgagtccgcttatctccagcccgtgaacttagcggatactatgatagcaccgaaggttgccaattcgtcagttcgatctatgatttcgcattcatggacgttgataagatccttccatttagtagcaccttaggatggcatagccttaacgttaatggcgaggttcaaaagaggaaaggcttgcggtggatacctaggcacccagagacgaggaagggcgtagcaagcgacgaaatgcttcggggagttgaaaataagcatagatccggagattcccaaataggtcaaccttttgaactgcctgctgaatccatgagcaggcaagagacaacctggcgaactgaaacatcttagtagccagaggaaaagaaagcaaaagcgattcccgtagtagcggcgagcgaaatgggagcagcctaaaccgtgaaaacggggttgtgggagagcaatacaagcgttgtgctgctaggcgaagcggttgagtgccgcaccctagatggctaaagtccagtagccgaaagcatcactagcttacgctctgacccgagtagcatggggcacgtggaatcccgtgtgaatcagcaaggaccaccttgcaaggctaaatactcctgggtgaccgatagcgaagtagttccgtgagggaaaggtgaaaagaacccccagtgggtagtgaaatagaacgtgaaaccgtgctgagctcccaagcagtgggaggggaaagtgatctctgaccgcgtgccctgttgaagaatgagcccggcgactcataggcagtggctttgttaagggaatggaacccaccggagccgtagcgaaagcgagtcttcatagggcgattgtcactgcttat

SEQ ID NO: 6346 - DNA, 1063 bp, Zea mays
  Zm_smallRNAprecursor_1835
gccctgttgaagaatgagcccggcgactcataggcagtggctttgttaagggaatggaacccaccggagccgtagcgaaagcgagtcttcatagggcgattgtcactgcttatggacccgaacctgggtgatctatccatgaccaggatgaagcttggatgaaactaagcagaggtccgaaccgactgatgttgaagaatcagcggatgagttgtggttaggggtgaaatgccactcgaacccagagctagctggttctccccgaaatgcgttgaggcgcagcagttgactggacatctaggggtaaagcactgtttcggtgcgggctgcgcgagcggtaccaaatcgaggcaaactctgaatactagatatgacccaaaaataacaggggtcaaggtcggccagtgagacgatgggggataagcttcatcgtcgagagggaaacagcccggatcaccagctaaggcccctaaatgaccgctcagtgataaaggaggtgggggtgcaaagacagccaggaggtttgcctagaagcagccaccctttaaagagtgcgtaatagctcactgatcgagcgcccttgcgctgaagatgaacggggctaagcgatctgccgaagctgtgggatgtcaaaatgcatcggtaggggagcgttccgccttagagggaagcaaacgcgaaagcgggggtcgacgaagcggaagcgagaatgtcggcttgagtaacgaaaacattggtgagaatccaatgccccgaaaacccaaggtttcctccgcaaggttcgtccacggagggtgagtcagggcctaagatcaggccgaaaggcgtagtcgatggacaacaggtcaatattcctgtactaccccttgttggtacggagggacggaggaggctaggttagccgaaagatggttataggtttaaggacacaaggtgaccctgctttttcagggtaagaaggggtagagaaaatgcctcgagccgaggtccgagtaccaagcgctgcagcgctgaagtatgagccccgtggactagccattgcttctccacgaggctcatacca

SEQ ID NO: 6347 - DNA, 1088 bp, Zea mays
  Zm_smallRNAprecursor_1836
taaggttgattctgtaattatacatgcatcatgctaagaactatactaatcaaatttccccccttagaaaatgccgccgcgcacaaggagaacagcgcgcaaacacactggaccgattggtgtgccgagtcaccagctggccccaaggcatgataatagtagtagcggaagcaatgatcctataggggatctcgaagctgaagtaagtcggctccaagcggaactccgccgcaggacggctatctgggtcgtagatggcgaccgcataaatgagttgagaagagacgtccgccatctgccagatcagctcgcggactgggatttggcactcgactgggttgttcaatcccgttcgcttgcatgggacaaggagcaaaaagctcaagctcgagtagccgagctcaacttggccgttgatgaactgcagacatattgcaataccttacatgaagaggttcatgtattatattcgcaactgcatcccagtgagcctacgaatcctgttgagtcggaagccggaccctcgcatgttgcgggacacgcgcttggtggtgagttagacctttttcagccccctccttctatgaggctggtcgacgaatggtctcccacacccgacgacgaggccgccaaaagcaatgggaagcaggaatagtggtgtagtagaagtagaagtaatgtattgtataacaggttgtactattgtataataggtagtgtatttgtataataggtaatgtatcctgttgtaaaaattcgagtctgtacattactctttttggtaatgtaaagtggatggtttttcctttggcatatcatattatttccaaatgttgttgccacagatgccgttcaagacccgatcacaggatgcagctggaacttccagtgggagggagtctaccccaaatccacctcctgttcctcccacactggccgaggcgattgtcgccttggtaaatgtgaaagggaaatgtgcccttgggccatttctaagtattttggtgatttagtgtccaacacaagtgcctaagtgtaaaaaggtggacaaagtacaaatcaaggataaaggtatgtttctcagactt

SEQ ID NO: 6348 - DNA, 1141 bp, Zea mays
  Zm_smallRNAprecursor_1837
ggaaggtacataaagtacgtctctcaataacagtacaaaaccattaggtaatttaagatgtatatctccaatggcctcgattgctgcttcaactccatttgccactctaattgttcttctgccctttgggagcctttggcttgtacggagtccctgtagagagtttgcaacatgaacagttgcacctgagacaatccaccaagaataactaggatattctaagtataaagactcatttacaaaagtaacttggtgcttaccactctctagtagatactgcaggaattcagggcactttctcttgtaatgacctgtcttcttgcaatagaggcaggtatcagggggaactgagaaactgcctccttgtcttggctgattattattgctcgaggaagcatgattattctgtttaccttgcttcttgaactttttctttgagttcttgttctgtctggggatattgcctttgatgaggttgacaaagtctccagtctgctttaacctctcttcctcctggacacactgtgccaagagttggtctatattccacttatcagtgacactaatgttgtactgtatgtgaaaagtctcaaactccttaggcagagacttcattatcataaatactataaattcctcgtgtaaaggagacccgaggtacttgtttatcttagctatgatggatatcattttctgaatgaatggtctgacaccatttacatcgtattttgcattgacaaattcggttattagagagcaagcataagccttagaagaccctttatgatgagaggctaccctctcaaggtattccttggcagtctcgtactctggtatggaactcttaagaggctccttgatgctccttttaagaataatcatacatttgtcatttgatctctcccacttgaccttgtcgatgttgtattgcatccacctgtggttatagttgggagtgcccactgtgggctcaactggtttatcaaacctcagtgcgtaatctatctcacccactgtagttatcatgtctatatcttcccgccaagaatggtaattactaccatctagcggtttcatctgagcaatcttgctaatcagcatggcagtatgagcacctttgcaaaattaaaacagaaaatat

SEQ ID NO: 6349 - DNA, 1134 bp, Zea mays
  Zm_smallRNAprecursor_1838
aagatggattatgataagaagctgaagaagctcgcccccacgaagaaaatccagaagaagaccaagaatcaaggaggccaagctgagcgaaggatgaaggccccttcagcaccaactcctgccaggatagagaatttgtccgacatcgaggatatgtccctagctagccttgatgaccttctcaatgaatttggggacactttagaaaaatagttcggtagtacctcagagaacgctcgcgtgtagtacgacttgtagtagccgtatgcttgtaatgtattggtgtaatgaataaaataacttggttgaaaacaattggcatgtgcataatagtaactctctccccctagcagatggcttcggataaaaccacgtctaccgcctccgggattggagcagggtttcccctgagagctgaaagagaagccggtagagaggaaagtgagacccacctccccgcacctccagaactacccttagatttagcccaagttctagccaaccaaacccgactcatcgaggtcctcactcaaagtctggaaaatcaacgcccgaatggtggaagaccacaagacaggatgggagatttcctgaggctcaagcctcccacgtttgccggatctagcaatcccctcgatgctgacgattggctgcgcacgattaaaagaaagctggaagccatcggatgcccggaaaatcagcgtgttcaactggctgctcatcaacttttcggaatggatttagcctggtgggataccttcaatgtcaccatcagagatgctacctgggcggagtttgaaacggctttccgggagcaccatgtgccccaatggatcgttcagctaaaggaagatgaattccgagaactgactcaagatggaagatctgtcagtcagtacgtgcacaaattaacggagttggcccgctaagcgccggatgacgtcagcaccgaagtcaagaagatggcccgcttcttgaaggggctcagaccagaactcaagaccatcctagccagccaagacttccttagtttctcgcacctctccaacaaagccatgcaagtggaaagggcaaaagaagaagaaaaaggccatctcaagaggaaattccaagtcctccgagctcagcaacaag

SEQ ID NO: 6350 - DNA, 1175 bp, Zea mays
  Zm_smallRNAprecursor_1839
tctctttctctgtggtttatggtcgatttagttccattttggaagttgaacatatatgttcatatagatgcagcacaaaagataaatgtaggcagtgcctattagtttactaatgttatgaagtagtggtttatgattgttgagtgattaatttggacatgattgatgaccatatttatctgaaaaatatgatccagtaagtatataaaaagtgaaatgcattacagtttatttgaataatatatagtagcacgaagtcatgagcagcacacttgtttccacatcaaaatatcaacccctacttcataaaggtatgtataattcacatcattgcatatatcttcacccacacaatttgagcatacaacgagtctaaaacaacaggtccgtgaacctttatcaaagctaaaggctctatgataaacaactgaattataatcgcacaagaacagtaagatcaatgaagaccgttggtgggcatgtaaaatacctatgggacgcggtggcggaggattgacagcagcggccggctcgacgacactgtcaacggcggcgccgattaggtttaagttcgcgcggagacaaatgaaggcgattcacactgccgaaaggggggaaggagattaggaagttgcattgtaaagcataaatttaaaaaatcaactcgagtaccttggaatccggacgacatagcgaccgcggatgtgagccaatgtgacgcggggcgcgcaagattgacaacggcagcggctcgacgatgctgtcaacggcggcggcgattaatgttgagggcgtgcggcggtggaggacggcgaaacgcgctggcggcggcggatgaacaagaatcgccctggcgatcgctgaagaaacgcggcgagtcggccaggatggttgaccgcgcgggggttagggtatagaaatgtttgaccgcgtgggaagtggggtagtgggccaattcctttatttctggaacgtgggtcggctgaagtagttatgctaaatcactattatgtataaacggaagaatggaatagcgtaaacatgtgttgactaaggaagatatggttgaccacgtggaaagtgggcctaagccgctatttctggaacgagggctcgcggttgttactctgtttacgctaaaatgggtttccgtttacactaaatctgttcgcttg

SEQ ID NO: 6351 - DNA, 1075 bp, Zea mays
  Zm_smallRNAprecursor_1840
acgatctgcaccacttctaaggcttcgattagtagaactatttgccgatcgatatcttgtctcaggaacctctttaatctgcttatgaaatgcccccacaactcttgttgtcagttctaacgctcaactaagaatgattaaagaggaattacacaagctagaagcacgagcgggcgcgcgcggcgggacgctggcggaggggccgtaggtggcgagggcgggccgcgctgggtggcagcgctgggtggcagcgcgcgagccggcgcgcggtggggcggcgggtgcggggtggcggcggggcgtgcacggcgtggcgctggcggcgggcaggtagaggcgggctggcggcgaggcaggtagtggcgggtgcgcgcgcggtaggcagagggaaaagaagagagacgcgcggggtgagagagatttaggtttttgggttaagttcgacggtgtccacgtgtcccacgaatttaagttaagaacgtgggtacccacgttcctaatacgataagttcgacggttttaccacgggcccacgaatttaatataagaacgtgggtacccacattcttaaattaacccacgaacataactcaattaagaacgttggtacccacgttcttaaattaacccacgaacatttattagtttcttgtagtgacacatcaaagcctcacaagtgccacaaaagagagatcaagtaagaaagagctactcatgtgcgtttagtgataatgcgttgtgagaatcattgagagaaagtgtgtgttacctcttgtgatcatttgagcatggagttttgactcccattcattgtaaagctagcaagagccccttatctttgtggttggcgttgcggagactttggtcttttgttgacaaagaagaaggaaaactcaccggtcttggtgaccgttggagagagggaaagggttgaaaaatacccgtccttagtggactcttcaacggggattaggttcttagtgaaccgaacctcggtaaaacaaatcacccgtgtcacttgtgtttattgcttgtgatttgtttgtcttctcgctctataagttctcttgcacta

SEQ ID NO: 6352 - DNA, 1190 bp, Zea mays
  Zm_smallRNAprecursor_1841
gggccacttatcttctgttgcgggtaaaggtacagctcatctgaaataggcacatttctatgtattgccatgcaattttcacaagaagagagacaaagggttcttagcgacccaaaaaacaaaacctgatgaggctcatgttttcgaccctgtagtctttcgaggtctaatagccaagtacttccttagcacagagatttcatttcgaaagtgtgaagatccattctggaaagaaatgataaattactgccaaccatcttttcgattagtcggtcgacagactgtccgttcagattgcattttgttgtatgaaagaggagaatttgcaattgatgggccagtttacgaagttgaaatcccgtgttagtttgactgtcgatctttggtcctctaaccaaaaccttggctatcttggtgtaacagcacatttcattagtgaagactttgatttgcacaaaaagatcattgcattcaagaaaatttccttccctcatacatcttatgttgtgcaagatggtattacctcttgtttgctagagtggggattggttggggatttgtttactctgacattggataatgctagtgtaaacagatcttcagttctattgttcaagcattgggtcttgaaagtaaatcagggctgatttttgatgttccacatcgttggaatgcaacctatgacatgttaaatgaagcactaaaatataaggctgctcttaataggtatgtaacagagcaacatcatgaatgtcccactgaagaagattggtcaaagacagaagctcttcatggttttctacaagagtttagtgatgcaaccaaagcattctcagcggatagacatcccacagctcatctttttctcaagatgttgctggttatccgaggtgtgctacttgatgtgacttggaactcaaatgaactcattaatgagatggcaaatgttatgtatgctaagttccaaaaatattgtgaaaatcctaatattgtgttgctcatagctgctgttctagatccatcaatgaagaccgaatttgtcaagttctatttccacacaattggtgataatgttgatgtgaagatgagggagctcaaaaggtacttgaaaaaatattacctagagtatgagaaaatcatgaggagtcatagtttgcctgtctttattcctcatgagaatcagatgagaa

SEQ ID NO: 6353 - DNA, 1071 bp, Zea mays
  Zm_smallRNAprecursor_1842
gaaggttccccaagacccatcgcaaaacactgtccatacttcggcatctttatttgtttcttcatcctgagcccctggcgtccaatcggcgataaaatctgccaatgcttgggactggatcgaagatctatgcacataatcaatgcaaaattcattgagctctgcagcccattttccaatccgcccagtagcttctctatttctcataatatccttcaacggctgcgaagaaggaacaataatattgtatgcttgaaaataatgccgaagcttcctggatgccatcaaaacagcatataacaccttctctaattctgtatagtttttctttgatatactaagaacttcagatacaaaatacactgggacctgcttcttgacttggccatcaagcttctcctggacaagtgctgcacttaccgctgagtgcgaagctgccacatataataacaacggagcccctagcgctggtggagttaatgttgttaaatctatcaaatattgcttcaggtcctcgaaggctttttgttggcttggtccccattgaaagacttcggctgatttcagtacttcgaagaatggtagatttctttctgctgatctggatataaatctgttaagagatgccagcctccctgtcaatctttgggcacccttttttgtagttggtggctccattcgaagtatagcttcaattttacttggattagcttcaattccctttgttgaaaccaagcatccaagaaatttccccttcttgactccgaaaacacatttttctggattcaattttaggccagcttgcctaaaactggcgaaggtctcttgcaaatcagcaatgtgattttcctgcttcgtgctttttacaatgatatcatcaacataagttagcacatttctacctatctaagactggagaaccttcgcagtcattctgctgaaacttcctccagcattcttgagcccctcatgcatccgaaggtaacaatacgttccactaggggttatgaaactggttttaggctcatcctccttcttcatccaaatttgatgatagcctgaataacaatc

SEQ ID NO: 6354 - DNA, 1141 bp, Zea mays
  Zm_smallRNAprecursor_1843
ggaaggtacatatagtacgtctctcaacaacagtacaaaaccattaactaatttaagatgtatatctccaatggcctcgactgctgcttcaactccatttgccactctaattgttcttcggccctttgggagcctttggcttgtacggagtccctgtagagagtttgcaacatgaacagttgcacctgagtcaatccaccaagaataactgggatattctaagtataaagactcatttacaaaagtaacttggtccttaccactctctagtagatactgcaggaattcagggcactttctcttgtaatgacctgtcttcttgcaatagaggcagttatcagggggaactgagaaactgcctccttgtcttggctgattattattgctcgaggaagcctggttattctgtttaccttgcttcttgaactttttctttgagttcttgttctgtctggggatgttgcctttgatgaggttgacagagtctccagtctgctttaacctctcttcctcctggacacactgtgccaagagttggtctatattccacttatcagcgacactagtgttgtactgtatgtgaaaagtctcaaactccttgggcagagacttcattatcataaatactacaaattcctcgtgtaaaggagacccgaggtacttgtttatcttagctacgatggatatcattttctgaatgaatggtctgacaccatttccatcgtattttgcattgacaaattctgtcattagagagcaagcataagccttagaagacccttggtgatgagaggctaccctctcaaggtattctttggcagtctcgcactctggtatggaactcttaagaggctccttgatgctcctcttaagaataatcatacatttgtcatttgatctctcccacttgaccttgtcgatgctgtattgcatccacctgtggtcatagttgggagtgcccactgtgggctctactggtttatcaaaccttagtgtgtaatctatctcacccactgtggttatcatgtctatatcctcccgccaagaatggtaattactatcatctagcggtttcatctgagcaatctggctaatcagcatggcggtatgagcacctttgcaaaattaaaatagaaaatat

SEQ ID NO: 6355 - DNA, 1160 bp, Zea mays
  Zm_smallRNAprecursor_1844
acttggtccttaccactctctagtagatactgcaggaattcagggcactttctcttgtaatgacctgtcttcttgcaatagaggcagttatcagggggaactgagaaactgcctccttgtcttggctgattattattgctcgaggaagcctggttattctgtttaccttgcttcttgaactttttctttgagttcttgttctgtctggggatgttgcctttgatgaggttgacagagtctccagtctgctttaacctctcttcctcctggacacactgtgccaagagttggtctatattccacttatcagcgacactagtgttgtactgtatgtgaaaagtctcaaactccttgggcagagacttcattatcataaatactacaaattcctcgtgtaaaggagacccgaggtacttgtttatcttagctacgatggatatcattttctgaatgaatggtctgacaccatttccatcgtattttgcattgacaaattctgtcattagagagcaagcataagccttagaagacccttggtgatgagaggctaccctctcaaggtattctttggcagtctcgcactctggtatggaactcttaagaggctccttgatgctcctcttaagaataatcatacatttgtcatttgatctctcccacttgaccttgtcgatgctgtattgcatccacctgtggtcatagttgggagtgcccactgtgggctctactggtttatcaaaccttagtgtgtaatctatctcacccactgtggttatcatgtctatatcctcccgccaagaatggtaattactatcatctagcggtttcatctgagcaatctggctaatcagcatggcggtatgagcacctttgcaaaattaaaatagaaaatatttaggacatctgaaataaatactgaatactgaatcatagaacatgcatgaattaaatattcaacgttggtcaaataataaccatgtcatatctatgaaaatttctgatcacaaaaattctaaaccatcgttggatgatctagaaaacataaacttgtattaaattgtggtaacaatatccaacgttggttaaaatattcaatcaccacaaaattttctgaattctatgcaatttaaacaataattaatccacgttggtttcataat

SEQ ID NO: 6356 - DNA, 1058 bp, Zea mays
  Zm_smallRNAprecursor_1845
atctaataaaccacactaatacaaggaaaataatttaacgggaccctaaatcatataaaataaccttatttccgagggcatactaattaccctcggaaattaataatttaaattatatagacacctctacataacattatcacgggtgacaaatcatataaaatgactttatttccgagggtataataattaccctcggaaattaaaaattaaaattatctaagcaccactaattaaatttaggccctcggatataataagataaacattatttaacatactaactattaaataacaacattggaaactacaaaacaatattaatatatacaaaatattaataatacattaaatacattaatattaaataccttacaccggcggccgacggcgggcgggcgtcgacggcggcgagcgggcagagacagagagaagagagaagcgagcgcgcgcgcgtgaaaatgaaccgcgcaccgggccgggaccgtgttaaaaaagcttatctccgacggctagttacgaggccgtcggatataaccttatgtccgacggtctcgtaactagccgtcggagataagtctatatttccgagagcccatgttggccgtcggacataagataatatccgacggcctcgtaggaagtcgtcggagatagagtgaccgtcggatattcatcagtttactgtagtgctcctccatccacaactcttggaatctctccatattgactagaattccgcacaaatggcgatgatccttgttcaggcctttcgccgagcacttgggggcatcgacctggagcttgcttctacacactgttttgggattcttttgccggcatgaacacaaggcacggacggcaacgcatgaacgtggtgacgacgcatctgggggcatgcggaggtttgacatccgtcgcgaacagtgacgatgagatagagcgttgggcgtccatgactagggcgagactggaggcgagggcgctgggagctcgcagcggtgctccacgacggcggacaccacctcaaggtggagcgcactaagccgatgccaggg

SEQ ID NO: 6357 - DNA, 1070 bp, Zea mays
  Zm_smallRNAprecursor_1846
cggttggaaggagagggatcctcgatgccctcccaacctactcgtgggaggcgccataaggttggtgccactcgtccccgccgtagcacctcctccgcgggatacgctccttgccaggagaaggatggagcgttcgacgatgtagtcgatcttccatcgtctgacgctctcttcatcaccggtctgcacatgcatccggcgaatgtttcacagggaccaaacgaaccttcggtcgacttctctctgaagggggtggacgcccttcaacgtttaaggttcactaaccccactctcacacctcgtcatcctggtgtccaggaccctcggttctggaatctttttcaggatgacttttataactcagtcatcttgactaagaaacacccagtcgttagacatcgttttattgactgggaagggtgtgagaatatgggagatgctgacatgacgtcagctctccgtaacttggagagaaaggggttgaaaaatataatgactatggaatacccctggaacgatgaagtgatagctcagttctatgccacactctgggtcaagaaagtagatgaataagttgatgggtatgactacccagtcatgtattttttttatccaggggctctggcacaaagtcagctatcgtcgttttgtccacatcttgggcttctctaatgctaatatttagggcagcaacatgaaagttcatgacattaggctgcccatgcgggaagagactgaatttattcatgtctctttggatcaggagttttataccactgccaacatgcataggtactacaggtaccttaactctttgtccaagatgaccgttctcccgaagggcggaaatcaaatgaatgtccttggggagagtcgggttttccttcttctccttgctccaaatagtctcgcctgcatcaacgtgtttgacatgatctgggaagagatccttcgtgcttcctggtctccactcaaggggtgtctccttgcaccctttattatgaagatgatcgaagtggtcacccagactcactttgaaaaacctgtcaaacactcccgctatgtaccct

SEQ ID NO: 6358 - DNA, 1091 bp, Zea mays
  Zm_smallRNAprecursor_1847
tagtgatggccccgcttgacacaattatatttttttattttacaaaaaacgtatataaatgtgtacaatttatattcaatattaaaaacacctgatcataatgttctactggttagacggcttcacctagtgtctcccgcccttcttccattagggcatgggttcgaagcccaccctctgcaccgcttttttaacattatacgctgatttaaccaaaagacccaatgggctaaagggccgacccgacacagtcagtaggccaacatgtcatgcctggtctagagttggggcccgcgtgcccgtgtcgggccgccatttggtcatctatatgtggaggtgtgttttggaacgtggaggttggttgcacggagcggacggttgtgcagcgagttaatttgaaatagatgattggacgtggaggttggttgcgtggagcggacggtcatgcaacgggttaatttgaagggttttttaaattggtgtccttagttttggtggtgtgctcacctatacccttagtcgtgttttttgctcaactgtgcccttccagtgctatagaacagaagggcacaacttagcaagaaacacgactaagggtataggtgagcacaccaccaaaactaaggacaccaatttaaaaaacccttcaaattaacccgttgcatgaccgtccgctccacgcaaccaacctccacgtccaatcatctatttcaaattaactcgctgcacaaccgtccgctccgtgcaaccaacctccacgttccaaaacacacctccacatatagatgaccaaatggcggcccgacacgggcacgcaggccccaactctagacaaggcacggcatgttggcctgctgactgtgccgggccggccctttagcccattgggtcttttggttaaatcagcgtataatgttaaaaagcggtgcagatggtgggcttcgaacccatgccctaatggaagaagggcgggagacactaggtgaagccgtctaaccagtagaacattatgatcaggtgtttttaatattgaatataaattgtacacatttatatacgttttttgtaaaataaaaaatataatcgtgtca

SEQ ID NO: 6359 - DNA, 1151 bp, Zea mays
  Zm_smallRNAprecursor_1848
ccaaaagtaaaaggcgaagaagctccaaagtcattcctaagggaatgcagagcttacagcgaaaagtcaacgctgattccgccgaaagtaaaaggcgaaggagctccaaagtcgttcctaagggaatgcagagcttacagcgaaaagttagcactgatatgtgattgtttctaaggaaataatggctatgattatggcttcggatatgtgtttggacattcatttgcacatcacattacatcatagcatttgcattcataaacattcatccaggcatatgtaggataaccatcgtcatagcataagtggttgcttcggcaaaaagaaaaaaaaactgtcttttttacttcttcgtgtacgaaaagaagagcttcggaagaaagggaaatgttgttttctatgcttcgctgtgtacgaaaagaagggaaggtgtttttttttcgcctccggctcaaaaagataatttcgtccacatcaaagcacttctcatacattaatggaaggataagagcatattacaaggtatgaacagaattcattaaagacaagtttagtcacatttacaaaggttatctcaaaagtttcttaagtctgtctcagtctactcctatttaatcttcaagggacctcagcttcggcgtcattctctttaaccatcggcttcggcttcgtcatcctacatgaattaagttgttgtaagtcaaaatcgagcttgaaggaagaggtaagcacaaggtatgatttcttactggttcaagatgactccgagcttcgtctccagccttttctcgcccgccttttgtctatatcatctttacaaatctattggaaatgcttcgggcgagatcaggaatgtcatctagaattgatggtgataaagtgaaattgggcctattgacaatctttccatgatcgcagccagcttttaggaaagctgcagcagtgccccgagaagctacccaggcgcagaagtcaccgtgcccggctataacttcgtcaagctcatcaatttcaccctcaatatgttcgaaggtctttggtaaatcttcagctgacggggtgaatttctcactgctagctccgactgagtggaaaatttttctcagtcgttgaatacatttgttgctaaattccaaacatttgtcttgaag

SEQ ID NO: 6360 - DNA, 1153 bp, Zea mays
  Zm_smallRNAprecursor_1849
attccgccgaaagtaaaaggcgaagaagctccaaagtcgttcctaagggaatgcagagcttacagcgaaaagtcaacgctgattccgccgaaagtaaaaggcgaagaagctccaaagtcgttcctaagggaatgcagagcttacagtgaaaagtcagcactgatatgtgattgtttctaaggaaataatggctgtgattatggcttcggatatgtgtttggacattcatttgcacatcacattacatcatagcatttgcattcataaacattcatccaggcatatgtaggataaccatcatcatagcataagtggttgcttcggcaaaaagaaaaaactgtcttttttacttcttcgtgtacgaaaagaagagcttcggaagaaaggggaatgttgttttctatgcttcgttgtgtacgaaaagaagggaaggtgttttttcgctttcggctcaaaaagataatttcgtccacatcaaagcacctctcatacattaatggaaggataagagcatattacaaggtatgaacagaattcattaaagacaagtttagccacatttacaaaaatttatctcaaaagtttcttgagtctgtctacagtctactcctatttaatcttcaagggacctcagcttcggcgtcattctctttaaccatcggcttcggcttcgtcatcctacatgaattaagttgttgtaagtcaaaatcgagcttgaaggaagaggtaagcacaaggtatgatttcttactggttcaacatgactccgagcttcgtctccagccttttctcgcccgccttttgtccatatcatctttacaaatctattagaaatgcttcgggcgagatcaggaatgtcatctagaattgatggtgataaagtgaaattgggcctattgacaatttttccatgatcgcatccagcttttaggaaagctgcagcagtgccccgagaagctacccaggcgcagaagtcaccgtgcccggctataacttcgtcaagctcatcaatttcaccctcaatatgttcgaaggtctttggtaaatcttcagctgacggggtgaatttctcagtgctagctccaaatgagtggaaaatttttctcagtcgttgaatacatttgttgctaaattccaaacatttgtcttgaag

SEQ ID NO: 6361 - DNA, 1070 bp, Zea mays
  Zm_smallRNAprecursor_1850
ttccccaaatataaaagttgttaataactaataggggcctaacatattaaaagatggcattcatccaattccgtttgacatgctttgacattcagttttcgcgagtttccactgttttctaacccactgacaaaccagttttcgtgggtctataactttctaaccagtgcccgaatcacctcaatctctatacacgatttgtagagtatacatcaaggaacaaatcttctgcagtgatccgggtccgaatccaaacaaaaaatgccaaaactgggcgtccaaagtcgtcctgccatcacctgcaagcagactgtcatgtgcagagctctgcagcatgccacccgcgtccaccaatgcctgccgtcgacacctctttaaatggcatcccacctgccctgctcccttcctccccacgccgtcctccctctccctcgcgacaacaacaagccaagctcccttattcctttggggccaattccctgtatgccactggaaaatatactcattccttgtatgccactggccccacatgtcatagacaccaaaaaatatacctatatgccactcagtggcacacaagggatgagtataaaatctgatggcataccaggaattttctcattcctttgccatggctgcaagctccccacctaatcgccatcctctcaagtgctcggcgccctgctcgcctcgagcttggccatggttggcctccgcttcttccttgggccgacgctatcctcctctggcgcgagctcgcaggagaactagctcctatggcgctcggcaccctctgcatctcatccccacgcgcagcagcacaactgcacgacgcattctccaggaagaagaagacaactcgctgagccaatgacaagtgggtccaaggccaaatgaaaggtgcacaaaatcacagatttttgtgttatgttctaaaattcatatattgagtttcgaagctccaaaaatcacgaaatttgtttttttgacttccttatgaaatgcgctaactattggatctatatgtttgtatgttttagtggaaaagtttttctgtagaaattcgtatt

SEQ ID NO: 6362 - DNA, 1072 bp, Zea mays
  Zm_smallRNAprecursor_1851
caacctgtactgctctgctcgctgcgtccgccgctcatatggtaatggtatcgcatcgaatcccaagcctagctgggcgatcaaaccaccattgtactacaccttgttgaactgcagtcgcaaatgctattaattatttaattatatcttctaatctgagcagacaaagacctattaaacaaggaaattaataacgagcaagaagggtaagctgaaagagaagagagaagcttccctagtagaatataatggttccgaatttccgattctgcagcacatgccgagcatatccagatctcgtcttcacgtcgtctttcctctgctctttgcagcgtgtatatatataggtagctggcgggcaccagaggtaaggcccgagggcatggcggggagggagaagaagagaagcaagcatagcaaagaacaatagcaaacagagcggaggatggtgccatgagcatgagcatgtccatgagtgaagagctagggtgagaatcacagtgcagttctcctctggcacgaaccaaggctgagcagcttgccccatggctagcccacgacggcccttccttgccaaaggagaattgccctgccattcacaaccctacagaaagagagagagagagagaacgcccaataagcggatcgtggacttcgctcgagttttgaactttttcacataaaggttattagttttccagcaattttcaaaaaaaagaatgctgtaatttgcttcgatgatggccgaacctgaatttcattaccatgattacaaaatcatgaaatcttaatgtttcagcctacctaattgttagtaattacctaggtgtcaccatctattataatcatggaacacaagggagtgtagttgttcagaaagcccgaggcgcataacactaagccgctagcataacactaagccgctattttggctagacacaaccgcaacatgagtcaatggcctggtgtttcacaggttcgggctagtccgacctgagggacggagagagggcaaggtagggccgaagaccataccctgtccgcacccaattccccgaaagccttaacgggg

SEQ ID NO: 6363 - DNA, 1206 bp, Zea mays
  Zm_smallRNAprecursor_1852
ccaaggtgctcgagttgattttttacttttatgctttacaatgcaacttcctaatctccttccccactccggcagtgtgaatcgccttcatttgtctccgcgcgaactcaaccctaatcggcgctgtcaacagtctccgcgcgaactcaaccctaatcggcgccgccgttgacagtgtcgtcgagccggccgctgttgtaaatcctccgccaccgcgtcctataggtatttcacatgcccaccaacggtcttcattgatcttactgttcttgtgcgattatggttcagttatttatcatagagcctttaggtttgataaaggttcacggacctgttcttttggactcattgtatgctcaaattgtgtgggtgaagatatatgcaatgatgtgaattatacatacctttatgaagtaggggttgatattttgatgtggaaacaagtgtggtggggaggttgaattatgtaccgtgatagaccggacaggcccttgggcttccttgtatgggtaactttctgcattgataattccaccgtttctcataatgtagtctagggcctcggagcatgatccatgtttgcatccaaagttcctgaggttgtttccatctatcaggtgttgctcagaaagttttattaactccttgtttcgtatgaagtgagctgcctctatgagaccggtgacaccaaatgcccagcccgaacctaaagaacaaattacaagctcaggtctaatagtgtgcgctcagcaactatgcatataatttacagtagcgaattgctaataggtagtgacattgcatgcttaccacagtctccctgatcttgtattggtgtcacagctccataggtactccaattgacaaatgtcgggagcatgtcaggacctggtggtccaaatgggacatctgtaccaaaaggagcaccgccgccacgaaaaggggcgctaggtcctataagatgataacatagatatctttagaataaagtaacaaaagtatggacaaattgagtcccagcctcagaatgaagcagtgacaaacctagcctagacttataatggggaggacaccgataagacgattagttgcaattagtagtttataaccgattggcaccaaggaagcaataagcttgactaacagatgactagataacattgcccaggcagattccattcccttttgttttttcctttttgaagg

SEQ ID NO: 6364 - DNA, 1194 bp, Zea mays
  Zm_smallRNAprecursor_1853
aggtggtacagttgtgtagcaggtctctgtggtgcttcagaactaaaaaaggcgtgaaacatggagtaaaacttatacacacatataaagtagagtttcatttgtaaatataaacgacgctgcttctatccatgtaccatatataaggcaaattaaattgataaaaaatatgatagacgcataaaaaaataccgaacaatgtccaaatggttcttgtccttggcatatcttgcccttgtcagctcttgtcaatgcttgaataatattcctatcaaaatatttgatgcgtggtgttccacatttattgtgaggtgcagctgagtcatgaagatgatccaaataatatagctgcaaaagcataacatgaatcgttgtgagacataacaaagcctaatctaaatgtagatgaattttgcataaaaaaatatggctacatataacagacaaaaaaattgatatgcttataagaatgacgatggaacatccgtaaatagttatagaaacatttgtaacgctcctagtatgccacttcttggcaacttggcataaatcattgaatattagctggcaccagtccatctcgtggaaacgatccatttcctcagttaaaagaacctcatgattagttattccccagctggcagtagggaacaacaacctattgaacagtatcaggaagaaggatctgatgcttagatcatcgtcaaaccctttcctcagatgatcttgaagagctgcaactgttgcaaattcttcttttgataaaccaagttcagcccttaaattgtttgcagcaacagcttcatcaatgcctaatgtcgttcctccaccagcatttggtaaccccaaaataaggtgcaccgtctcctttgtaattttgagctccttccctgggccggctcgaattgtcatgtcattatggtcaagcttttccatcagccaagctaaatgagatctattgccaagtgcgtcaactctcatatcaagaatactggtgaaccccctccgtgcaatagcttggcgctgtctgtcatttaaaatctggatgcttactataacgtgttggggattgcatctcacattaagcctctgctgaaaaaatgtatacaatgaatagcgtaaacatttacatccgcataatcgcaactcaatgtttaaatcaaatctcaaaacaacataatttcacgcagaaaa

SEQ ID NO: 6365 - DNA, 1139 bp, Zea mays
  Zm_smallRNAprecursor_1854
tggtagggtggaaggagagggttcttccatgccctcgcagctggctcgcgggaggcgccaaaaagttggcgccactcgacctcgtcgcagcacttcttcctctggatatgctccttgccaggaggaggatggggcattcgacgacttcattgatcttccggcgcctgatgcactctacatcaccggtctgcacatgcatccggcgaatgttacccgcggaccaaatgaacctcctgtcgacttctctctgaagggagtggacacccttcagcacctgaggttcactaatccttctctcactcctcgtcatcctggtgtccaggaccctcggttctggaatcttttccaggctgatttctacaattctgtcattttatcctagaaacacccagtcgttaggcataggtttatagactgggaatgatgtgagaacaagggagatgctgacatgacgttagctctcctcaacggagagaaaggggttaaaaaatattatgaccatggaatacccctggaacgatgaggtggtagctcagttttatgccaccctctggatcaagaaagtagatgaggaagccgatgggtatgattaccctgtcatgtatttcttcatccaggggaactggcacaaagtcagttaccgtcgttttgcccatattctgggcttctctgatgctgatattcagggcagcaacatgcgagtccatgacattaagctgcccatgcgggaagagactgaatttattcatgtctctatggatccggagttctggacgaccgctaacatgcataggtactacaggtaccttaactctttgtccaggatgaccgttctcccgaagggcgggaatcaaatgaacgtccttggggagagtcgggtcttccttctcctccttgctcccaatagtctcacccgcattaatgtgtttgacatgatctgggaagagatcatccgtgcttcctggtctcctctcaaagggtgtcttcatgcaccctttatcatgaagatgatcgaagtggtcacccagactcacttcgaaaaacctgtcaagcactcctgctacgtaccctactgggttgattcctccaacccagctgctcgtacgaagcgggctccctcagggtctggaggccctgcc

SEQ ID NO: 6366 - DNA, 1175 bp, Zea mays
  Zm_smallRNAprecursor_1855
gccaagggccttcttggtgtcttcgccatttgccgcacccgagcagtcaaggagtctgtgcgccgtcgcaggaccgaccggctgcatgaggatcttcgtcgttatgcagccgcgactggtcatcctctccctcctgggtcccctccacctccagcccctaccttccccgcagaccttaatgagtggcaccaacaggagtttggtgtgccattcattaccccggaggatgaggtcgaggactatgatgatcctttcttcacctcggaccctcctcatcctcctcctccctactcgggtcagggacccactcccggtgaccctaggccgtccggctctggtcactatcctcctcctccctacccaggtccgggacccattcctggtgacctgcggcctttcgactctggttaccatcaccaccctccacctcctcctcatcctcgtacatcttcagcatccggtttttctgcgggtgatgagccccctagggactcctcactcgaggaagacgtgatgaggactttcttccctgactacacatcatatcctccatcatatcctccgtcctatccttctcctggaggatattgattcatgcgtcctcttctccctctctcttcgtttttggtacttgttgccaaaaagggggagaaaatccaaaatttctagtcattctgtttgtggttctttcggttatgtatttctttttgattattgttttttgttttggccactgttgtggcttgtatcctcttatcattgtatgaaataaaactgctggattattattcaatgtgatatgatggtcttctggccatcatcttttgtcccatcagtttgtaatgattgctttgctatgaagtaaaaatgatgtgtatttatagatagtcatatgcatcacaactcctgttatgacactcttgcacccctcggatggttgtatttagtatggtttttgtcactatctctaaatgtgttgctcacatgacatattatgtcaaaacattggattcacaatcgtgcacacatttagggggagccatctacatacaatcattcaaaagaaattttctatttcaaatgtttatctttttgaccttaattgttttggcatcaatcaccaaaaaggaggagattgtaagtgcaatcaaccccaagtgagggttttggtgatt

SEQ ID NO: 6367 - DNA, 1160 bp, Zea mays
  Zm_smallRNAprecursor_1856
acttggtccttaccactctctagtagatactgcaggaattcagggcactttctcttgtaatgacctgtcttcttgcaatagaggcaggtatcagggggaactgagaaactgcctccttgtcttggctgattattattgctcgaggaagcctggttattctgtttaccttgcttcttgaactttttctttgagttcttgttctgtctggggatattgcctttgatgaggttgacagagtctccagtctgctttaacctctcttcctcctggacacactgtgccaaaagttggtctatattccacttatcagtgacactagtgttgtactgtatgtgaaaagtctcaaactccttgggcagagacttcattatcataaatactacaaattcctcgtgtaaaggagacccgagatacttgtttatcttggctacgatggatatcattttctgaatgaatggtctgacaccatttccatcgtattttgcattgacaaattctgtcattagagagcaagcataagccttagaagacccttggtgatgagaggctaccctctcaaggtattctttggcagtctcacactctggtatggaactcttaagaggctccttgatgctcctcttaagaataatcatacatttgtcatttgatctctcccacttgaccttgtcgatgctgtattgcatccacctgtggtcatagttgggagtgcccactgtgggctcaactgatttatcaaacctcagtgcgtaatctatctcacccactgtggttatcatgtctatatcctcccgccaagaatggtaattactaccatctagcggtttcatctgagcaatctggctaatcagcatggcggtatgagcacctttgcaaaattaaaatagaaaatatttaggacatctgaaataaatactgaatactgaatcatagaacatgcatgaattaaatattcaacgttggtcaaataataatcatgccatatctatgaaaatttctgatcacaaaatttctaaaccatcgttggatgatctagaaaacataaacttgtattaaattgtggtaacaatatccaacgttggttaaaatattcaataaccacaaaattttctgaattctatgcaatttaaacaataattaatccacgttggtttcataat

SEQ ID NO: 6368 - DNA, 1041 bp, Zea mays
  Zm_smallRNAprecursor_1857
cggctgcacacgagcgcgaggggacaaagattattaatcaactgattataattaagcatgatatgcacggcgtacgtgcatgggcagatcagcgtgtctgtgtgttagtaattaagcacctttcaaagtctggcgcccggcgttctacccgggttttattcagcctgttgatgatctcgttacccgggatttttgctacataattacgtatagcacatgtgtgtgagtgtatagctaggaatattgtcgctcaggcgtgagtattatttgctagctacaggcgcaggataaaaaaaaatctaggcgagaaataaatttaagcggacacaccaacgatataaacaaaaaaaacaaaaaaaatgcaaactatggggcttgaacccacgaccacatggttagaagccttgtgctctaccaagtgggctagatgggctttgtgctcatgtctgcaacaaatattttaataacacaaccgagctcggcgccaagatctatggcgccgagctcggttccacgtcgacgccacgcgtctgggtcgtgccaacgcaacacgacctcggcgccatagcctatggcgccgagctgtgttagctcggcgccacggcctatggcgccgagcaaagggtccaaaactgcatttaaaatttttttaggtctaaacgtgattttacttcagtttaggggctaaaatacaaaaaattcggtccatccgtgcactgcactgtccgtgtctctttcccccatgctcttgtagtgaagttaagcgcgtgacattaatgccatggtccagtgaaggtacacgagggcatgacatatgatgattatcagtaagtagcccagctagagatgtcaatggggaattccccaccggattatagcatctcatactcatccccatcatgtttgatccatccccgtacccacccccatacccatcatgggtgcaaatctcatctcatactcatccccattcgggtttcgggtccccaatgggtcctcatccccaattaagatataactaggtactaacaggtagcacaa

SEQ ID NO: 6369 - DNA, 1040 bp, Zea mays
  Zm_smallRNAprecursor_1858
ggctgcacacgagcgcgaggggacaaagattattaatcaactgattataattaagcatgatatgcacggcgtacgtgcatgggcagatcagcgtgtctgtgtgttagtaattaagcacctttcaaagtctggcgcccggcgttctacccgggttttattcagcctgttgatgatctcgttacccgggatttttgctacataattacgtatagcacatgtgtgtgagtgtatagctaggaatattgtcgctcaggcgtgagtattatttgctagctacaggcgcaggataaaaaaaaatctaggcgagaaataaatttaagcggacacaccaacgatataaacaaaaaaaacaaaaaaaatgcaaactatggggcttgaacccacgaccacatggttagaagccttgtgctctaccaagtgggctagatgggctttgtgctcatgtctgcaacaaatattttaataacacaaccgagctcggcgccaagatctatggcgccgagctcggttccacgtcgacgccacgcgtctgggtcgtgccaacgcaacacgacctcggcgccatagcctatggcgccgagctgtgttagctcggcgccacggcctatggcgccgagcaaagggtccaaaactgcatttaaaatttttttaggtctaaacgtgattttacttcagtttaggggctaaaatacaaaaaattcggtccatccgtgcactgcactgtccgtgtctctttcccccatgctcttgtagtgaagttaagcgcgtgacattaatgccatggtccagtgaaggtacacgagggcatgacatatgatgattatcagtaagtagcccagctagagatgtcaatggggaattccccaccggattatagcatctcatactcatccccatcatgtttgatccatccccgtacccacccccatacccatcatgggtgcaaatctcatctcatactcatccccattcgggtttcgggtccccaatgggtcctcatccccaattaagatataactaggtactaacaggtagcacaa

SEQ ID NO: 6370 - DNA, 1134 bp, Zea mays
  Zm_smallRNAprecursor_1859
gaactatgataagaagctgaagaagctcgcccccacgaagaaaatccagaagaacaccaagaaccaaggaggccaagctgagcggaagaagaaagctcctcaagcaccacctcctgccgggatagaaaatctatccgacatcgaggatatgtccctagctagccttgatgaccttctcaaggaatttggggacactctagaaaaagagttcttcggtagtacctcagggaacgctcacgtgtagtacgacttgtagtagctgcatgcttgtaatgtattggtgtaatgaataaaataacttggttgaaaacaattggcatgtgcataatagtgactctcactccccctggcagatggcttcggataaaaccacgcctaccgccttcgagattggagcagggtttcccctgagagctgaaagggaagccggtagagaggaaagtgagacccacctccccgcacctccagaactacccttagatctagcccaagttctagccaaccaaacccgactcatcgaggtcctcactcgaagtctggaaaatcaacgtccgaatggtggaagaccgcaagacaggatgggagatttcctaaggctcaagcctcccacgtttgccggatctagcaatcccctcgatgctgacgattggctgcgcacgattaaaagaaagctggaagccatcagatgcccagaaaatcagcgtgttcaactggctgctcatcaactttccggaatggccttatcctggtgggataccttcaatgtcaccatcagagatgctacctaggcggagtttgaaacagctttccgggagcaccatgtgccccaaggactcgttcagctcaaggaagataaattccgggaactgacttaagacggaagatctgtcagcgaatatgtgcacaagttcacggaattagcccggtacgcgccagatgacatcggtaccgaagtcaagaagatggcccgcttcctgaagggactcaggctagaactcaagaccatcctggccagccaagacttcctcagtttctctcacctctccaacaaagccatgcaagtggaaagggcaaaggaggaagaaaaaggtcatctcaagaggaaattccaagtcctccgggctcaacagcaag

SEQ ID NO: 6371 - DNA, 1041 bp, Zea mays
  Zm_smallRNAprecursor_1860
gtggtgtgtagggagcggagaactcgtgcttgattccttcctcctcaaggtacttctccacttgcaagttcttgaactcggacccattgtcacttcttatctttttcaccttgagctcaaattcgttttgagctctccttagaaagcgctttagggtcccttgggtttctgatttatcctgcaaaaagaataccctagtgaagcgggaaaaatcatcaacaataacaagaccatacttacttcccccgatgctgaggtaggcaatgggtccgaagaggtccatatgaagtagctccagaggtcttgatgtggtcatcacattcttgctgtgatgagtacttcccacttgtttgcccgaaatttttgtattttagccatttttcggaaaaaaaattcacgtttagatcttaaaaaattttaatgtcatttttggaccctttgctcggcgccatagcctatggcgccgaagtaacacagctcggcgccataggctatggcaccgaggtcgtgttgcgttggcacaacacggacgcgtggcgtcgacgtggaaccgagctcggcgccacagatcttggcgccgagctcggttgtgttattaaaatatttgttgcaaacatgagcacaaagcccagctagcccacttggtatagcacaaggcttctaaccttgtggtcgtgggttcaagccccatagtttgcatttttgtgtgtccgctcaaatttatttctcgcctagattttttttatctttgtcactactcattttttaaataactcattaggtatatttttttcttaatcaatcattgggaaagcggctcttgcagccccactgaaaaaataaaaattttcggaagaacaaacaagtgcactgtatttgcattgtttaaaggtactctcagatacacagatagttggtcaacatataaaaggtggcagagaagcaccaatttgatgactgattcagaacctcatcccaggtacaagttccaattcatcgttttcacttctaaacttagccgaagacgacgaaagctataca

SEQ ID NO: 6372 - DNA, 1041 bp, Zea mays; identical to SEQ ID NO: 6371
  Zm_smallRNAprecursor_1861

SEQ ID NO: 6373 - DNA, 1042 bp, Zea mays
  Zm_smallRNAprecursor_1862
gtggtgtgtagggagcggagaactcgtgcttgattccttcctcctcaaggtacttctccacttgcaagttcttgaactcggacccattgtcacttcttatctttttcaccttgagctcaaattcgttttgagctctccttagaaagcgctttagggtcccttgggtttctgatttatcctgcaaaaagaataccctagtgaagcgggaaaaatcatcaacaataacaagaccatacttacttcccccgatgctgaggtaggcaatgggtccgaagaggtccatatgaagtagctccagaggtcttgatgtggtcatcacattcttgctgtgatgagtacttcccacttgtttgcccgaaatttttgtattttagccatttttcggaaaaaaaattcacgtttagatcttaaaaaattttaatgtcatttttggaccctttgctcggcgccatagcctatggcgccgaagtaacacagctcggcgccataggctatggcaccgaggtcgtgttgcgttggcacaacacggacgcgtggcgtcgacgtggaaccgagctcggcgccacagatcttggcgccgagctcggttgtgttattaaaatatttgttgcaaacatgagcacaaagcccagctagcccacttggtatagcacaaggcttctaaccttgtggtcgtgggttcaagccccatagtttgcatttttgtgtgtccgctcaaatttatttctcgcctagattttttttatctttgtcactactcattttttaaataactcattaggtatatttttttcttaatcaatcattgggaaagcggctcttgcagccccactgaaaaaataaaaattttcggaagaacaaacaagtgcactgtatttgcattgtttaaaggtactctcagatacacagatagttggtcaacatataaaaggtggcagagaagcaccaatttgatgactgattcagaacctcatcccaggtacaagttccaattcatcgttttcacttctaaacttagccgaagacgacgaaagctatacag

SEQ ID NO: 6374 - DNA, 1042 bp, Zea mays; identical to SEQ ID NO: 6373
  Zm_smallRNAprecursor_1863

SEQ ID NO: 6375 - DNA, 1043 bp, Zea mays
  Zm_smallRNAprecursor_1864
gtggtgtgtagggagcggagaactcgtgcttgattccttcctcctcaaggtacttctccacttgcaagttcttgaactcggacccattgtcacttcttatctttttcaccttgagctcaaattcgttttgagctctccttagaaagcgctttagggtcccttgggtttctgatttatcctgcaaaaagaataccctagtgaagcgggaaaaatcatcaacaataacaagaccatacttacttcccccgatgctgaggtaggcaatgggtccgaagaggtccatatgaagtagctccagaggtcttgatgtggtcatcacattcttgctgtgatgagtacttcccacttgtttgcccgaaatttttgtattttagccatttttcggaaaaaaaattcacgtttagatcttaaaaaattttaatgtcatttttggaccctttgctcggcgccatagcctatggcgccgaagtaacacagctcggcgccataggctatggcaccgaggtcgtgttgcgttggcacaacacggacgcgtggcgtcgacgtggaaccgagctcggcgccacagatcttggcgccgagctcggttgtgttattaaaatatttgttgcaaacatgagcacaaagcccagctagcccacttggtatagcacaaggcttctaaccttgtggtcgtgggttcaagccccatagtttgcatttttgtgtgtccgctcaaatttatttctcgcctagattttttttatctttgtcactactcattttttaaataactcattaggtatatttttttcttaatcaatcattgggaaagcggctcttgcagccccactgaaaaaataaaaattttcggaagaacaaacaagtgcactgtatttgcattgtttaaaggtactctcagatacacagatagttggtcaacatataaaaggtggcagagaagcaccaatttgatgactgattcagaacctcatcccaggtacaagttccaattcatcgttttcacttctaaacttagccgaagacgacgaaagctatacagg

SEQ ID NO: 6376 - DNA, 1043 bp, Zea mays; identical to SEQ ID NO: 6375
  Zm_smallRNAprecursor_1865

SEQ ID NO: 6377 - DNA, 1191 bp, Zea mays
  Zm_smallRNAprecursor_1866
tcatgttttggtgggcgcaatggtgaagaaacagagatggatgatagtccattcaagagggagtcaggttcagataagaatcccgggttcccaattaaatcaattagacattccctgcaccagggaaaaaagtcaataacggaccgtctacatctaccaaaattgacagctgcaacataaacaaaataaaatctggttaaaatatgccaaaattagaatgcacatctaaatttctttactagaatgactgctatattttttgtattcatcttatcctgaaaagttttaaacagttgagagaagagtgtgatatcagcaggaccagcttcatgcttatgtatcactgcaaaatcaactagatctgagagatgcattatgcatatcaattagatctttcattttgaagatttatactggaaaactttcaccaagtgcactaaataagaataccataacattcacttaactattctgttattctcggcaacaactgctatgcaagcagtccttctgtgcaagcgtgcaagcaaatcatctgatccattagatcgtgatccaaccgtaggtcacatttaacacttaaacccttccaccaccagctcaataatctttataaaagaacccctaacaaaccatggttgtatctgcggttggatcgtaatctaatgaatcagatgatttgcttgcacgcttgcacagaaggactgcttgcataacagtcgttgccgttattctcatatttgttatagtccgcaatagtactaagagtaaagctcatttgaaaggatacaacctgtcatgaccaaagcgcaccaagcaagaagtggcagcaccagctttgcagtacttgcatcccttcacaatgcgacagggcagattgatggaatccgccagggtctttttgttttgctcgcaaccaaagcaggcaggatcaatgcaagaaaatggaattgacaagaatagggtgacgataaataaaatagcgaatcatatatgatgcttcaaggtgaagcagcttttctccttataaaatatcaatatgatcgaattgatactagaaaaatattcatgatatgagcgtttgggagcggagagaacgagaaggccacacaagaccagcttagagtcttagcaaagagataattgcaactacatcatagaaaggaagacaagtaatattgtgccataaaa

SEQ ID NO: 6378 - DNA, 1189 bp, Zea mays
  Zm_smallRNAprecursor_1867
catgttttggtgggcgcaatggtgaagaaacagagatggatgatagtccattcaagagggagtcaggttcagataagaatcccgggttcccaattaaatcaattagacattccctgcaccagggaaaaaagtcaataacggaccgtctacatctaccaaaattgacagctgcaacataaacaaaataaaatctggttaaaatatgccaaaattagaatgcacatctaaatttctttactagaatgactgctatattttttgtattcatcttatcctgaaaagttttaaacagttgagagaagagtgtgatatcagcaggaccagcttcatgcttatgtatcactgcaaaatcaactagatctgagagatgcattatgcatatcaattagatctttcattttgaagatttatactggaaaactttcaccaagtgcactaaataagaataccataacattcacttaactattctgttattctcggcaacaactgctatgcaagcagtccttctgtgcaagcgtgcaagcaaatcatctgatccattagatcgtgatccaaccgtaggtcacatttaacacttaaacccttccaccaccagctcaataatctttataaaagaacccctaacaaaccatggttgtatctgcggttggatcgtaatctaatgaatcagatgatttgcttgcacgcttgcacagaaggactgcttgcataacagtcgttgccgttattctcatatttgttatagtccgcaatagtactaagagtaaagctcatttgaaaggatacaacctgtcatgaccaaagcgcaccaagcaagaagtggcagcaccagctttgcagtacttgcatcccttcacaatgcgacagggcagattgatggaatccgccagggtctttttgttttgctcgcaaccaaagcaggcaggatcaatgcaagaaaatggaattgacaagaatagggtgacgataaataaaatagcgaatcatatatgatgcttcaaggtgaagcagcttttctccttataaaatatcaatatgatcgaattgatactagaaaaatattcatgatatgagcgtttgggagcggagagaacgagaaggccacacaagaccagcttagagtcttagcaaagagataattgcaactacatcatagaaaggaagacaagtaatattgtgccataaa

SEQ ID NO: 6379 - DNA, 1190 bp, Zea mays
  Zm_smallRNAprecursor_1868
catgttttggtgggcgcaatggtgaagaaacagagatggatgatagtccattcaagagggagtcaggttcagataagaatcccgggttcccaattaaatcaattagacattccctgcaccagggaaaaaagtcaataacggaccgtctacatctaccaaaattgacagctgcaacataaacaaaataaaatctggttaaaatatgccaaaattagaatgcacatctaaatttctttactagaatgactgctatattttttgtattcatcttatcctgaaaagttttaaacagttgagagaagagtgtgatatcagcaggaccagcttcatgcttatgtatcactgcaaaatcaactagatctgagagatgcattatgcatatcaattagatctttcattttgaagatttatactggaaaactttcaccaagtgcactaaataagaataccataacattcacttaactattctgttattctcggcaacaactgctatgcaagcagtccttctgtgcaagcgtgcaagcaaatcatctgatccattagatcgtgatccaaccgtaggtcacatttaacacttaaacccttccaccaccagctcaataatctttataaaagaacccctaacaaaccatggttgtatctgcggttggatcgtaatctaatgaatcagatgatttgcttgcacgcttgcacagaaggactgcttgcataacagtcgttgccgttattctcatatttgttatagtccgcaatagtactaagagtaaagctcatttgaaaggatacaacctgtcatgaccaaagcgcaccaagcaagaagtggcagcaccagctttgcagtacttgcatcccttcacaatgcgacagggcagattgatggaatccgccagggtctttttgttttgctcgcaaccaaagcaggcaggatcaatgcaagaaaatggaattgacaagaatagggtgacgataaataaaatagcgaatcatatatgatgcttcaaggtgaagcagcttttctccttataaaatatcaatatgatcgaattgatactagaaaaatattcatgatatgagcgtttgggagcggagagaacgagaaggccacacaagaccagcttagagtcttagcaaagagataattgcaactacatcatagaaaggaagacaagtaatattgtgccataaaa

SEQ ID NO: 6380 - DNA, 1187 bp, Zea mays
  Zm_smallRNAprecursor_1869
atgttttggtgggcgcaatggtgaagaaacagagatggatgatagtccattcaagagggagtcaggttcagataagaatcccgggttcccaattaaatcaattagacattccctgcaccagggaaaaaagtcaataacggaccgtctacatctaccaaaattgacagctgcaacataaacaaaataaaatctggttaaaatatgccaaaattagaatgcacatctaaatttctttactagaatgactgctatattttttgtattcatcttatcctgaaaagttttaaacagttgagagaagagtgtgatatcagcaggaccagcttcatgcttatgtatcactgcaaaatcaactagatctgagagatgcattatgcatatcaattagatctttcattttgaagatttatactggaaaactttcaccaagtgcactaaataagaataccataacattcacttaactattctgttattctcggcaacaactgctatgcaagcagtccttctgtgcaagcgtgcaagcaaatcatctgatccattagatcgtgatccaaccgtaggtcacatttaacacttaaacccttccaccaccagctcaataatctttataaaagaacccctaacaaaccatggttgtatctgcggttggatcgtaatctaatgaatcagatgatttgcttgcacgcttgcacagaaggactgcttgcataacagtcgttgccgttattctcatatttgttatagtccgcaatagtactaagagtaaagctcatttgaaaggatacaacctgtcatgaccaaagcgcaccaagcaagaagtggcagcaccagctttgcagtacttgcatcccttcacaatgcgacagggcagattgatggaatccgccagggtctttttgttttgctcgcaaccaaagcaggcaggatcaatgcaagaaaatggaattgacaagaatagggtgacgataaataaaatagcgaatcatatatgatgcttcaaggtgaagcagcttttctccttataaaatatcaatatgatcgaattgatactagaaaaatattcatgatatgagcgtttgggagcggagagaacgagaaggccacacaagaccagcttagagtcttagcaaagagataattgcaactacatcatagaaaggaagacaagtaatattgtgccataa

SEQ ID NO: 6381 - DNA, 1188 bp, Zea mays
  Zm_smallRNAprecursor_1870
atgttttggtgggcgcaatggtgaagaaacagagatggatgatagtccattcaagagggagtcaggttcagataagaatcccgggttcccaattaaatcaattagacattccctgcaccagggaaaaaagtcaataacggaccgtctacatctaccaaaattgacagctgcaacataaacaaaataaaatctggttaaaatatgccaaaattagaatgcacatctaaatttctttactagaatgactgctatattttttgtattcatcttatcctgaaaagttttaaacagttgagagaagagtgtgatatcagcaggaccagcttcatgcttatgtatcactgcaaaatcaactagatctgagagatgcattatgcatatcaattagatctttcattttgaagatttatactggaaaactttcaccaagtgcactaaataagaataccataacattcacttaactattctgttattctcggcaacaactgctatgcaagcagtccttctgtgcaagcgtgcaagcaaatcatctgatccattagatcgtgatccaaccgtaggtcacatttaacacttaaacccttccaccaccagctcaataatctttataaaagaacccctaacaaaccatggttgtatctgcggttggatcgtaatctaatgaatcagatgatttgcttgcacgcttgcacagaaggactgcttgcataacagtcgttgccgttattctcatatttgttatagtccgcaatagtactaagagtaaagctcatttgaaaggatacaacctgtcatgaccaaagcgcaccaagcaagaagtggcagcaccagctttgcagtacttgcatcccttcacaatgcgacagggcagattgatggaatccgccagggtctttttgttttgctcgcaaccaaagcaggcaggatcaatgcaagaaaatggaattgacaagaatagggtgacgataaataaaatagcgaatcatatatgatgcttcaaggtgaagcagcttttctccttataaaatatcaatatgatcgaattgatactagaaaaatattcatgatatgagcgtttgggagcggagagaacgagaaggccacacaagaccagcttagagtcttagcaaagagataattgcaactacatcatagaaaggaagacaagtaatattgtgccataaa

SEQ ID NO: 6382 - DNA, 1171 bp, Zea mays
  Zm_smallRNAprecursor_1871
ttactgaaatctggccaacattgaaaatctgacaaggctgtgctcataaccatgtttgagtgatcaaatctatttggattggcttgaaattcagtttacttgctctatacatatgatagcaaagtctgtgcaaatttcataatcattggataagtgaaacttcttgattaagtcaatcttgtcagcacaaacacagcagttttcagcatgtacctactgtgggagatattatggctggcagcacatatgaagtcaaatgagtctcaactttttacagctgttagcagacttattaaagcacatctccaccaattgtcgtggtcataggatctgtacatcaaaatttatgaatgtttctttgaagtatacagaatctgtcataagtgacaagtatttgaaatattgaaagtcactttgattggaaggctctcatataggataaatcacataagttgtctgagagaccatagtttggtttttaattgatctataatcatggaaagtgaaggggtacaaggatatttgttgagaaatattttggcacttatcttggtactccaagttgaagatcaagaccaaagatgatcaaaattgaggttatcatataacagattgcataatcttctttcttacatatggtaatacaaatgcttaaattggttgtaagtatttcttggcacatttcaatttgattactctattattgccatgatctagacataaaagagaaaaccctcgtgttcgtgaatgaataaggtgctaagtaagaaattcaaattcttaaagcacttatctaaaggggaattctctatatgactagagttgtgaaactattttttttacctaagtgatctatgtagtttcacagcatgagaatgagtttctcaaatggactatgcaattaaacgaataaagaagaacaatccaaaactatgtgatgtattctctcttgtacatttggatttatttcttctacattaaatactcaccatgatatgatttaaaattagcctttgaacttaatcaatttatcatgcatgtttaatttgttaaaattaagcattgaagattaagagaattttagttcatataataaggtttccttgtttaagtatctgcctactttatatattcaaagtgttataaaagagaatttggtgcttgtattact

SEQ ID NO: 6383 - DNA, 1040 bp, Zea mays
  Zm_smallRNAprecursor_1872
gccaaaacaattaaggtcaaaaagatatacatttgcaatagaaaatttcttttgaatgattgtatgtagatggctccccctaaatgtgtgcacgattgtgaatccaacgttttgacataatatgtcatgtgagcaacacatttagagatagtgacaaaaaccatactaaatacaatcatccgaggggtgcaagagtgtcataacaggacttgtgatgcacatgactatctctaactacacatcatttttacttcatagcagagtagtcattacaaactgatattacaaaagatgatggccagaagaccatcatattactttgaataacaacccaacagttttatttcatacaattgtagaaggatacaagccacaacagtggccaaaacaaaaataatccaaaagaaaaaccgaaagaaccacaaaagaaccacaaactagaggttggattttctccccctttttggcaacaagtaccaaaaatggagagagagacaaggatacatgaatcaatatcctccaggaggaggatatgacggaggatatgatggagggtatgaagtgtaatcagggaagaaggtcctcatcgtgtcctcctcgaatgtggagtcccgaggtggctcatcagccgcagaaaaaacagatgccgaagatgtacgatgatcaggaggaggtggagggtggtgatggtaaccagagacggatagcctagggtcaccaggaatgggtcccggacccgggtagggaggcggagggtgagaggatgattgacccggatccccatggtagggaggcggggtaaactcctcacgatcatcaacataggcttcttcttcatcatcgtctgcagacataaatggcaccccataggtctgctggtgccactcattaatctccgggggaggaggatggagaggcacgtcaggcgagcgagggacaaatggcatacccatggtggaagcttgacgacgaagattgtcgtcagtctcccgctgacgccgtgccacctcatggacatcagcagaaatgttgcggcacat

SEQ ID NO: 6384 - DNA, 1043 bp, Zea mays
  Zm_smallRNAprecursor_1873
tctttctttctcaaattttgcttcacatagtcttgcctcttctcatttgcttgagccttcttctcaagattgtcgggacaccttgaggcaaagtgacccatatcatcacacatgtagcacttgatttgagccaaaccatccttcttcttttgatttgtgctcatcatgttatcttgattatatattgaatgtcttcttcttgttttctttttcttccccacatcaccattatattcatggttaatcttgatttgcttttggggatccttcctttgcccaactcgtggctttggttgaggcttcacttgtggcttcactaatttcttggttgggcacattgaggtgaggtgaccccaagtgtggcacttgaagcacttgtcatgctttagcctcctttcttccttcttcaacttgagcttccttttattggggcatgcctttgcaagatgacccatctcatggcatttatagcacatgaagtgagatagctcatttccttttaatttgaattgtctgcctttgatattgctcttgttgaaaccaaggccactcttgtcatcatatcttctttgatttttcaatataagatcatgagtgacttttgatttatgccatctctcaaacatgttgcttaaattcttcactttgtttttgagcttattattttccttcaaaaggttagtctcacaagacaaggaagaatagtaataatctatacttgaagaacatggcatagctaataaatcatcacaagaggtggatacatgcttcttgtcttcatcacatggattagcaacatttttcaattgatcatataattcatgggatgaattatcactagttttattttctttactagaaaactcgttagtgagaaaagcatgctcttgtatcaaatttttcatgagcaacactaagttcctcatgactcaattttagctcctcatgtgaacaagtaacaacataaagtagatgcttttgttgttcacatgaatactttagaaatgagttttcattttccaagtttcttgttttatctttct

SEQ ID NO: 6385 - DNA, 1067 bp, Zea mays
  Zm_smallRNAprecursor_1874
tccccacatcaccattatattcatggttaatcttgatttgcttttggggatccttcctttgcccaactcgtggctttggttgaggcttcacttgtggcttcactaatttcttggttgggcacattgaggtgaggtgaccccaagtgtggcacttgaagcacttgtcatgctttagcctcctttcttccttcttcaacttgagcttccttttattggggcatgcctttgcaagatgacccatctcatggcatttatagcacatgaagtgagatagctcatttccttttaatttgaattgtctgcctttgatattgctcttgttgaaaccaaggccactcttgtcatcatatcttctttgatttttcaatataagatcatgagtgacttttgatttatgccatctctcaaacatgttgcttaaattcttcactttgtttttgagcttattattttccttcaaaaggttagtctcacaagacaaggaagaatagtaataatctatacttgaagaacatggcatagctaataaatcatcacaagaggtggatacatgcttcttgtcttcatcacatggattagcaacatttttcaattgatcatataattcatgggatgaattatcactagttttattttctttactagaaaactcgttagtgagaaaagcatgctcttgtatcaaatttttcatgagcaacactaagttcctcatgactcaattttagctcctcatgtgaacaagtaacaacataaagtagatgcttttgttgttcacatgaatactttagaaatgagttttcattttccaagtttcttgttttatctttctcaatttctaaagcaatgttcatgcttgcaagtataccaacaagctcatcatatgaatatgaatgattagtcacattagcattatataccttcgtattaccttgtgacatgaagcaatgtgatgtaatggatgggcttgtagtagcgatatcattgtccgagcatgaacaatcaccataatcatcaagtatgcttgagatagaaccatcatttgcattacttgagttagagccaacaca

SEQ ID NO: 6386 - DNA, 1055 bp, Zea mays
  Zm_smallRNAprecursor_1875
ttggattgatttgtgttgaataaattcaagagacttcatttagtaagtggtttgaatggatatttgtcttttgaaagtagttcatttcagatttgattcaacttgaagaagaataactcaatatactgaaatctagccaatattgaaaatctgacaaggctgtgctcatagccatgtttgagtgatcaaatctatttgtattggcttgaaattcagtttacttgctccatgcatatgatagcaaagtctgtgcaaatttcataattattggataagtgaaacttcttgattaagtcaatcttgtcaacacaaacacagcagttttcagcatgtacctattgtgggagatgttgtggctggcagcacatatgaagtcaaatgagtctcaactttttacagctgttagcagacttattaaagcacatctccaccaattttcgtggtcataggatctgtacatcaaaatttatgaatgtttctttggagtatacaaaatctgtcataagtgacaagtatttgaaatattgaaagtcactttttgattggaaggctctcatataggataaatcacatgagttgtttgagagaccatagtttggtttttaattgatctataatcatggaaagtgaaggggtacaaggatatttgttgagaaatattttggcacttatcttggtactccaagttgaagatcaagaccaaagatgatcaaaattgaggttatcatataacagattacataatctttttccttacatatggcaatccaaatgcttaaattggttgtgagtatttcttgtaccccttcactttgattactctgttattgccatgatctagacatgaaagagaaaaacccctgttcgtgaatgaataaggtgctaagtaagaaattcaaattcttaaagcacttatcaaaaggggaattatctatatgactagaattgtgaaactaatgtttttacctaggtgatctatgtagtttcacagcatgagaatgagtttctcaaatggactatgcaattaaacgtataaagaagaacaatccaaaact

SEQ ID NO: 6387 - DNA, 1048 bp, Zea mays
  Zm_smallRNAprecursor_1876
caactgagcacaacaagcactagcagctatatattcggcctcagcagtggaaagtgcaacacagttttgcttcttagagctccaagacaccagggactgcccaaggaattggcaagtcccccgaggtgctttttcgatctactttgcaaccggcatagtctgaatcagagtagccaaataaatcgaaaaaggagcccttaggataccagagacctagattttgggtgtgaactaaatatctcaaaattctcttaacggtcactaggtgacactctttcgggttagcttgaaaacgggcacacatgcacacactaaacatgatatctggcctagatgcacataaatacagtagagatcctaccattgatctataaagcttttgatcgacagttttaccttcttcatttaagtcgagatgaccacttgaaaccattggtgtcttggcgtgctttgccttttccatgccaaacttcttgagcatgtcttgtgtgtacttggtttggcacagaaaggttccttccttgagttgtttaacttgaaaacccaggaagtacttgagctcacccatcatggacatctcaaacctatttgtcataaccctactaaattcctcacagaaagtttcatcattactgtcaaatataatgtcgtcgacatatatttgacaaacaaataattaattatcaactttgcgagtgaataaagtagagtctacttttctatttcaaaaccatttttaagcaagaaatctttaagacattcataccatgctctaggagcttgtttaagcccatagagcgctttgtgaagaaggtagacatggtttggcttcttaggatcttcaaaacccggtggttgctccacatagaccaactcttgtagtggtccatttaggaaagcacttttgacatccatttgatacaatttgaaatcatggttagtagcataggcaattattattcttatggactctaaccttgctactggtgcataggtttcaccaaaatcaagtccttccacttgagtgaaaccctgagcaaccagtcgt

SEQ ID NO: 6388 - DNA, 1159 bp, Zea mays
  Zm_smallRNAprecursor_1877
aaaatccaagatttgaatttttgggatgctacagaaaccaacgtggattaattattgttttgaattgcatagaattcagaaaattttgtggtgattgaatattttaaccaacgttgcatattgttaccacaagtttatgttttctaaatcattcaacgatggtttagaattttgtgacctgaatttttcatatatatggcatgattattatttgaccaacgttgaatatttaattcatgcatgttcaatgattcagtattcagtaattatttcagatgtcctaaatattttctgttttaattttgcaaaggtgctcataccgccatgctaattagccagattgctcagatgaaaccgctagatggtagtaattaccattcttggtgggaggatattaacatgataaccacagtgggtgagatagattacgcactgaggtttgataaaccagtagagcccacagtgggcactcctaactatgaccacacgtggatgcaatacaacatcgacaaggtcaagtgggaaagatcaaatgacaaatgtatgattattcttaagaggagcatcaaggagcctcttaagagttccataccagagtacgagactgtcaaagaataccttgagagggtagcctctcatcataaagggtcttctaaggcttatgcttgctctctaatgacataatttgtcaatgcaaaatacgatggaaatggtgtcagaccattcattcagaaaatgatatctatcgtagctaagataaataagtacctcgggtctcctttacacgaggaatttgtagtgtttatgataatgaagtctctacctgtgggggatagatatcccctgggtccactaaagaagtaaaaggcctcacgaaaggcccaagggcccaataattcgtaaggtcattctttcgtgggcctagggaaagacaaccaacaaagaagagaagacgtgagactggattggtgcaaacccggacggcccacaacgtcgaacgaatgaatcacaacagagacccgactttcccgcgctgaagcccccatgcaacggagccatgcgaggataagtcggcgagggttacgtagggataaactcaagaggttcactatcttttagctacttgttgttatcatatcacatgtactgccccacggtc

SEQ ID NO: 6389 - DNA, 1040 bp, Zea mays
  Zm_smallRNAprecursor_1878
ctttgcgttaaatgcccctgcaactcggtcagtcggtgcggcgatttagtcagggttgcttcttagcgaagccaaggcctcgggcgagccggagatgtgtccgccgttaaaaggggggcctcgggcgagacggaagtccctcgaggtcggctgcccgagtccgaggctaggctcgggtgaagcgtgatcgagtcactcgtatggactgatccctgacttaatcgcacccatcaggcctctgcagctttatgctgattgggggttaccagctgagaattaggcgtcttgagggtacccctaattatggtccccgacacacacattcacaacttaatttttcacaaaattaattgatttttttaaaagaaataagaatgataatctactaatttgtgtgtaactgtgtagctagatctatatatggctcctaccttaaaattaaaacatcacgttcatataaaattacataacatacaactatctcaatgcatggtatcactatacatgaatcaatatcctccaggaggaggataggacggaggatatgatggagggtatgatgtgtagtcagggaagaaggtcctcatcacgtcttcctcgaatgaggagtccctagggggctcatcacccgcagaaaaaacagatgccgaagatgtacgatgatgaggaggaggtggagggtggtgatggtaaccagagccggatggccgcgggtcaccaggaatgggtcccggacccgggtagggaggaggaggatagtgaccagagccggacgacctagggtcaccgggagtgggtccctgacccgagtagggaggcggagggtgagaggatgattgacccggatccccatggtagggaggtggggcaaactgctcgcgatcatcaacgtaggcttcttcttcttcttcttcgtctgctgacataaatggcaccccgtaggcctgccggtgccactcattgatctccgggggaggaggatgcataggcacgtcaggcgagcgaggggcaaagggcatacccatagtggaagcttgacg

SEQ ID NO: 6390 - DNA, 1070 bp, Zea mays
  Zm_smallRNAprecursor_1879
caaaaaagaattgtctcatgtgccagcataactttgatggcccacccctgttgtcctccaaggtgattcggaatctggggagcaggttctgcaacctgtcagatgatgacttatctgagcgccgtttgaagaagaagaaattggctgtgggagttgttggctagcagaggacgggcagaaaggattcggatgatgagaggactgatgactcaacagatgaggataagcaagatgagcgctaggtggaaggcgggtggtctgggcagtggtttttgcccctctaacttttgggtgtgcatgtttatgggttgggtcttcccaggacttctggacacttggctggcacctgtgggtgcttgttttacttttatgttcctcttttgctggccgactgacacttattttacccactggtttgggtatcgttctggctcaaaaacttctagtttactcaatgagtaacttaaagggccaattccctgtatgccactggaaaatatactcattccttgtatgccactggccccacatgtcatagacaccaaaaaatatacctatatgccactcagtggcacacaagggatgagtataaaatctgatggcataccaggaattttctctaacttaaatgatgttaattatttggagtggtctgtgctgagtcacaatgttagaggaattaaatcctctgttaaatggaacgccatccgctgttcaattcaggattctggatgcgatgttatctgtttacaagaaacaaaaaggatttctttgattcgacttacctaaaaaacttctgtccttctcaatttgattattttgcttttgttcccacggtggggaactcgggaggttcagttatcatctggcaaagctcaaaacttttaggaaatattatcttccaaaatgattatgctcagtcagtggaatttacttcaaatttatcggcttgctcctggattatcacaaacgtttatgatccttgtactccgcaaggaaaactcgatttcctcaattggctgcataatatttctatgccttctaacaagccttggctcctggttggggac

SEQ ID NO: 6391 - DNA, 1097 bp, Zea mays
  Zm_smallRNAprecursor_1880
aacgagcacggcgacgtggggaggatcaatatgggggcggatatactattcttttcctgtttgtgtagccaacctttgtctgctcacatggtggtggtggattcgctcgcggtctcgggaagtggcgaactgcgttatgtttagggtgctagggaaaaaatagaaaaataaacaaggtttgaattgtgattagctagtttaaaatgcaacactaagggggtgtttggttacaccccgctaaaatttagtcaatgtcccatcgaatgtttgaatctccgttccgggtattaaatgtagtcggattataaaactaatttgtcagccgaagattaaaagacgagacgaatctagtccagttggttgggtctatatttcatactcctatttaaaagtcaaacgtttgatatgcctcgggctaaactttagcaggagcaaccaaacaccccatagggccatttaatcttttgtcgtatgtacggtttgctagctttagggcgtgtttggtttacggtagattttaagaatctgattttaagaatatattatggatccaaacagagtttattctgtgccttagattctgcgctcatagaaacaaaatctgtagaatcaagccatagttgggttttcttgggtaacgtgaacatgcagattttaaaaatctgcggaaaccaaacgcggccttagaggcgactcaaatattttaccacttttgttggcgtggtatatgtaggcgtgccagcatgacgcccgccggtccggggtggcccgccccttggctcccttctactccacatagaattggagtaaacgattgttgggtagcggttgctgctgcttccttcacctggtttgttggttttagtgttagggcatgtttgtttacctcccagattatataatttggattaaataatcttaagagtcaaacaaacagtccagcttatttgcccagattatataatctaaccccttggattatgataatccataagcaagtgaggaggtgcttatttcagattatttttttcccacttccccattaccctttcaagttttctagaaattacccaccattgccattataatccaccgaa

SEQ ID NO: 6392 - DNA, 1041 bp, Zea mays
  Zm_smallRNAprecursor_1881
tcgcctgtcgccggtcgccgcaacgagcgcacaggagacggagaggccgagagaaaaaatgggatgctagggttacgcgtacgccttacgcgacgccgccgacgccttatacgccttaacgggccggcgccgtgccgtggcttacgtgggccggactcgtgcctgcaccacgggcccacttggcagccaagcacggcacgggcatcgggccaggctggcacgggcacaccggccgtcgtgccgggccgggcttttcccgtgcttgggcgtgtcgggtgccgggctcacgggctgcaccacgggccggcccgttttggacatgtatacatacgggcccgtacgtcatacacgcgccgcgtcgccatcatgtccgaattttttgtattttagcccttaaacagaagtaaaatcacgtttagacctaaaaaaattttaaatgcagttttggaccctttgctcggcgccgagctaacacagctcggcgccataggctatggcgccgaggtcgtgttgcgttggcacaacccagacgcgtggcgtcgacgtggaaccgagctcggcgccacagatcttggcgccgagctcggttgtgttattaaaatatttgttgcagacatgagcacaaagcccatctagcccacttggtagagcacaaggcttctaaccatgtggtcgtgggttcaagccccatagtttgcattttttttgttttttttgtttatgtcgttggtgtgtccgcttaaatttatttctcgcctagattttttttcacaattgaaaaaatcgacccaaaatatatgctcatgtactgatcggccaatatctctgtatgtgaaaggttgtggagaataataataagtagggcatgctgtttatcaaagcaaatgtatataaggaagaaaaaaatgtataaaaatagttatagtgatttagaaatagttaatgattcgtaatgcaaaattgttttctatatttttactaagttagattttgttcaagaaatttgttcttaaccttttttagctacatgaaaagctcact

SEQ ID NO: 6393 - DNA, 1041 bp, Zea mays; identical to SEQ ID NO: 6392
  Zm_smallRNAprecursor_1882

SEQ ID NO: 6394 - DNA, 1042 bp, Zea mays
  Zm_smallRNAprecursor_1883
tcgcctgtcgccggtcgccgcaacgagcgcacaggagacggagaggccgagagaaaaaatgggatgctagggttacgcgtacgccttacgcgacgccgccgacgccttatacgccttaacgggccggcgccgtgccgtggcttacgtgggccggactcgtgcctgcaccacgggcccacttggcagccaagcacggcacgggcatcgggccaggctggcacgggcacaccggccgtcgtgccgggccgggcttttcccgtgcttgggcgtgtcgggtgccgggctcacgggctgcaccacgggccggcccgttttggacatgtatacatacgggcccgtacgtcatacacgcgccgcgtcgccatcatgtccgaattttttgtattttagcccttaaacagaagtaaaatcacgtttagacctaaaaaaattttaaatgcagttttggaccctttgctcggcgccgagctaacacagctcggcgccataggctatggcgccgaggtcgtgttgcgttggcacaacccagacgcgtggcgtcgacgtggaaccgagctcggcgccacagatcttggcgccgagctcggttgtgttattaaaatatttgttgcagacatgagcacaaagcccatctagcccacttggtagagcacaaggcttctaaccatgtggtcgtgggttcaagccccatagtttgcattttttttgttttttttgtttatgtcgttggtgtgtccgcttaaatttatttctcgcctagattttttttcacaattgaaaaaatcgacccaaaatatatgctcatgtactgatcggccaatatctctgtatgtgaaaggttgtggagaataataataagtagggcatgctgtttatcaaagcaaatgtatataaggaagaaaaaaatgtataaaaatagttatagtgatttagaaatagttaatgattcgtaatgcaaaattgttttctatatttttactaagttagattttgttcaagaaatttgttcttaaccttttttagctacatgaaaagctcacta

SEQ ID NO: 6395 - DNA, 1042 bp, Zea mays; identical to SEQ ID NO: 6394
  Zm_smallRNAprecursor_1884

SEQ ID NO: 6396 - DNA, 1043 bp, Zea mays
  Zm_smallRNAprecursor_1885
tcgcctgtcgccggtcgccgcaacgagcgcacaggagacggagaggccgagagaaaaaatgggatgctagggttacgcgtacgccttacgcgacgccgccgacgccttatacgccttaacgggccggcgccgtgccgtggcttacgtgggccggactcgtgcctgcaccacgggcccacttggcagccaagcacggcacgggcatcgggccaggctggcacgggcacaccggccgtcgtgccgggccgggcttttcccgtgcttgggcgtgtcgggtgccgggctcacgggctgcaccacgggccggcccgttttggacatgtatacatacgggcccgtacgtcatacacgcgccgcgtcgccatcatgtccgaattttttgtattttagcccttaaacagaagtaaaatcacgtttagacctaaaaaaattttaaatgcagttttggaccctttgctcggcgccgagctaacacagctcggcgccataggctatggcgccgaggtcgtgttgcgttggcacaacccagacgcgtggcgtcgacgtggaaccgagctcggcgccacagatcttggcgccgagctcggttgtgttattaaaatatttgttgcagacatgagcacaaagcccatctagcccacttggtagagcacaaggcttctaaccatgtggtcgtgggttcaagccccatagtttgcattttttttgttttttttgtttatgtcgttggtgtgtccgcttaaatttatttctcgcctagattttttttcacaattgaaaaaatcgacccaaaatatatgctcatgtactgatcggccaatatctctgtatgtgaaaggttgtggagaataataataagtagggcatgctgtttatcaaagcaaatgtatataaggaagaaaaaaatgtataaaaatagttatagtgatttagaaatagttaatgattcgtaatgcaaaattgttttctatatttttactaagttagattttgttcaagaaatttgttcttaaccttttttagctacatgaaaagctcactaa

SEQ ID NO: 6397 - DNA, 1043 bp, Zea mays; identical to SEQ ID NO: 6396
  Zm_smallRNAprecursor_1886

SEQ ID NO: 6398 - DNA, 1127 bp, Zea mays
  Zm_smallRNAprecursor_1887
catggtttctcttggctatatggttcatctgggggggagatcgagcttcaagaaattgtgaatggtcttatcaatacacaaatgtataactccctaggaatttcaattgcgcttatattcatcactgtaggacttgggttcaagctttccccagccccttttcatcaatggactcctgacgtctacgaaggagtgtggttcgttcgacaaattcctacctctatctgaggtgtttgggatttgcaaaactccatagacatgcagaagagaaatgctatccccactccgaccaagacagaacttttaccaaaagtttattgtgatctttttgttcaaataacaattaaggtgaagcagggtcaggaacaacgaatctctttatgataaacagatccattttgcaagctcgttattacgggtagttcctacaaagaatcggactaatgacgtatacaatgcttgaattatcgatgtaaatgctacatagtgggttctcatccttcagagactacgagtgtaataggagcatccgttgacaaaaggatcaccctaagatgatcatctcatggctattgggaacgaatcaaatcagatggttctatttctcaacctttctgacttgctcctacggaaccaaggtcgaaaggattgaaaaagtcagtcattcacaaccactgatgaaggattcctcggaaagttaaggattagtagttctttttcgaaatccatttcgaaaaagaatggattcggtcttatacatacgcgaggaaggtaatcaaaaaagaaagaagacgagttcttctttcttttatcacttaggagccgtgcgagatgaaagtctcatgcacggttttgcatgagagaaagaagcgaggaatcctcttttcgactctgactcccccactccagtcgttgcttttctttctgttacttcgaaagtagctgcttcagctttagccacgcgaattctcgatattcctttttatttctcatcaaacgaatggcatcttcttctggaaatcctagctattcttagcatgatattggggaatctccttgctattactcaaacaagcatgaaacgtatgcttgcatattcgtccatagggcaaatcggatatgtaatt

SEQ ID NO: 6399 - DNA, 1070 bp, Zea mays
  Zm_smallRNAprecursor_1888
aaatcagatggttctatttctcaacctttctgacttgctcctacggaaccaaggtcgaaaggattgaaaaagtcagtcattcacaaccactgatgaaggattcctcggaaagttaaggattagtagttctttttcgaaatccatttcgaaaaagaatggattcggtcttatacatacgcgaggaaggtaatcaaaaaagaaagaagacgagttcttctttcttttatcacttaggagccgtgcgagatgaaagtctcatgcacggttttgcatgagagaaagaagcgaggaatcctcttttcgactctgactcccccactccagtcgttgcttttctttctgttacttcgaaagtagctgcttcagctttagccacgcgaattctcgatattcctttttatttctcatcaaacgaatggcatcttcttctggaaatcctagctattcttagcatgatattggggaatctccttgctattactcaaacaagcatgaaacgtatgcttgcatattcgtccatagggcaaatcggatatgtaattattggaataattgttggagactcaaatgatggatatgcaagcatgataacttatatgctgttctatatctccatgaatctaggaacttttgcttgcattgtattatttggtctacgtaccagaactgataacattcgagattatgcaggattatacacgaaagatccttttttggctctctctttagccctatgtctcttatccctaggaggccttcctccactagcaggtttcttcggaaaactctatctattctggtgtggatggcaagcaggcctatatttcttggtttcaataggactccttacgagcgttctttctatctactattatctaaaaataatcaagttattaatgactggacgaaaccaagaaataaccccttatgtgcgaaattatagaagatcccctttaagatcaaacaattccatcgaattgagtatgactgtatgtgtgatagcatctactataccaggaatatcaatgaaccccattcttgcaattgctcaggataccctcttttagctg

SEQ ID NO: 6400 - DNA, 1041 bp, Zea mays
  Zm_smallRNAprecursor_1889
aggggttaaatccttaaaaaaattctttatatttcctttgggtccaaagccggcaccccccctgattgccgacacatgagtacatgacgctgcttatgcggttcccgtacatgagcttcacgattcataattaacaaaactatgttactataaaaaaatgttaccatttgaatcccaaaccaggcgtacagctgtggcggaatgtttgggcggcacatgctcacctgcccacctggacctggagtgttgaggaaccaggctgtttgtttgctgtatgtgacgtgcgtgagtacgtatgtactgcgtacaactctacaacactacatgcgggtatacgcccgcccgcgcgattggtccgaattttttgtattttagcccttaaacagaagtaaaatcacgtttagacctaaaaaaattttaaatgcagttttggaccctttgctcggcgccatagcctatggcgccgagctaacacagctcggcgccataggctatggcgccgaggtcgtgttgcgttggcacaacccagacgcgtggcgtcgacgtggaaccgagctcggcgccacagatcttggcgccgagctcggttgtgttattaaaatatttgttgcagacatgagcacaaagcccatctagcccacttggtagagcataaggcttctaaccatgtggtcgtgggttcaaaccccatagtttgcattttttttgttttttttttgtttatgtcgttggtgtgtccgcttaaatttatttctcgcctagattttttttatgtcgttgtgcctagtgttgccttccatcttgcactgcatgcgcgcgcatttcaatctacagtttccgaatttaaaatgcgcgtaaataatcgactagctcaaatcatgcatgtgcaatacaaaagcaatgtagtaattttataaaatgtcatccgtgcattattcaaaattttactacttttttaaaaagaccgaatgcatggcatgcatgttttcatcttgcaaattaaaatccgcagagcttagtgcatctccaataatttaaaaa

SEQ ID NO: 6401 - DNA, 1041 bp, Zea mays; identical to SEQ ID NO: 6400
  Zm_smallRNAprecursor_1890

SEQ ID NO: 6402 - DNA, 1042 bp, Zea mays
  Zm_smallRNAprecursor_1891
aggggttaaatccttaaaaaaattctttatatttcctttgggtccaaagccggcaccccccctgattgccgacacatgagtacatgacgctgcttatgcggttcccgtacatgagcttcacgattcataattaacaaaactatgttactataaaaaaatgttaccatttgaatcccaaaccaggcgtacagctgtggcggaatgtttgggcggcacatgctcacctgcccacctggacctggagtgttgaggaaccaggctgtttgtttgctgtatgtgacgtgcgtgagtacgtatgtactgcgtacaactctacaacactacatgcgggtatacgcccgcccgcgcgattggtccgaattttttgtattttagcccttaaacagaagtaaaatcacgtttagacctaaaaaaattttaaatgcagttttggaccctttgctcggcgccatagcctatggcgccgagctaacacagctcggcgccataggctatggcgccgaggtcgtgttgcgttggcacaacccagacgcgtggcgtcgacgtggaaccgagctcggcgccacagatcttggcgccgagctcggttgtgttattaaaatatttgttgcagacatgagcacaaagcccatctagcccacttggtagagcataaggcttctaaccatgtggtcgtgggttcaaaccccatagtttgcattttttttgttttttttttgtttatgtcgttggtgtgtccgcttaaatttatttctcgcctagattttttttatgtcgttgtgcctagtgttgccttccatcttgcactgcatgcgcgcgcatttcaatctacagtttccgaatttaaaatgcgcgtaaataatcgactagctcaaatcatgcatgtgcaatacaaaagcaatgtagtaattttataaaatgtcatccgtgcattattcaaaattttactacttttttaaaaagaccgaatgcatggcatgcatgttttcatcttgcaaattaaaatccgcagagcttagtgcatctccaataatttaaaaaa

SEQ ID NO: 6403 - DNA, 1042 bp, Zea mays; identical to SEQ ID NO: 6402
  Zm_smallRNAprecursor_1892

SEQ ID NO: 6404 - DNA, 1043 bp, Zea mays
  Zm_smallRNAprecursor_1893
aggggttaaatccttaaaaaaattctttatatttcctttgggtccaaagccggcaccccccctgattgccgacacatgagtacatgacgctgcttatgcggttcccgtacatgagcttcacgattcataattaacaaaactatgttactataaaaaaatgttaccatttgaatcccaaaccaggcgtacagctgtggcggaatgtttgggcggcacatgctcacctgcccacctggacctggagtgttgaggaaccaggctgtttgtttgctgtatgtgacgtgcgtgagtacgtatgtactgcgtacaactctacaacactacatgcgggtatacgcccgcccgcgcgattggtccgaattttttgtattttagcccttaaacagaagtaaaatcacgtttagacctaaaaaaattttaaatgcagttttggaccctttgctcggcgccatagcctatggcgccgagctaacacagctcggcgccataggctatggcgccgaggtcgtgttgcgttggcacaacccagacgcgtggcgtcgacgtggaaccgagctcggcgccacagatcttggcgccgagctcggttgtgttattaaaatatttgttgcagacatgagcacaaagcccatctagcccacttggtagagcataaggcttctaaccatgtggtcgtgggttcaaaccccatagtttgcattttttttgttttttttttgtttatgtcgttggtgtgtccgcttaaatttatttctcgcctagattttttttatgtcgttgtgcctagtgttgccttccatcttgcactgcatgcgcgcgcatttcaatctacagtttccgaatttaaaatgcgcgtaaataatcgactagctcaaatcatgcatgtgcaatacaaaagcaatgtagtaattttataaaatgtcatccgtgcattattcaaaattttactacttttttaaaaagaccgaatgcatggcatgcatgttttcatcttgcaaattaaaatccgcagagcttagtgcatctccaataatttaaaaaaa

SEQ ID NO: 6405 - DNA, 1043 bp, Zea mays; identical to SEQ ID NO: 6404
  Zm_smallRNAprecursor_1894

SEQ ID NO: 6406 - DNA, 1041 bp, Zea mays
  Zm_smallRNAprecursor_1895
aaaaacatttagtaatttagtgagcttttcatgtagctaaaaaaggttaagaacaaatttcttgaacaaaatctaacttagtaaaaatatagaaaacaattttgcattacgaatcattaactatttctaaatcactataactatttttatacatttttttcttccttatatacatttgctttgataaacagcatgccctacttattattattctccacaacctttcacatacagagatattggccgatcagtacatgagcatatattttgggtcgattttttcaattgtgaaaaaaaatctaggcgagaaataaatttaagcggacacaccaacgacataaacaaaaaaaacaaaaaaaatgcaaactatggggcttgaacccacgaccacatggttagaagccttgtgctctaccaagtgggctagatgggctttgtgctcatgtctgcaacaaatattttaataacacaaccgagctcggcgccaagatctgtggcgccgagctcggttccacgtcgacgccacgcgtctgggttgtgccaacgcaacacgacctcggcgccatagcctatggcgccgagctgtgttagctcggcgccataggctatggcgccgagcaaagggtccaaaactgcatttaaaatttttttaggtctaaacgtgattttacttctgtttaagggctaaaatacaaaaaattcgggcgattggttccgcttcaggctcagcctggcttgcatccatcgcccagtctccttggtagacattgggaacatctctgcaaagaacactatcgtttgttcaacatccagcctccttggtagccattgggacaagatatcatgtcaaactggctccacccaaaaaatacatcatctctaacgacaataccgagccaacacacgctcaaaaaacaacatgatttacggtttctggcttgttacaagcactgcacaataaaaaaggtaactataccatgtcaacctctatatgtttcagggaagccgcagtctgcaattctttatgggacatttgccatt

SEQ ID NO: 6407 - DNA, 1040 bp, Zea mays
  Zm_smallRNAprecursor_1896
aaaacatttagtaatttagtgagcttttcatgtagctaaaaaaggttaagaacaaatttcttgaacaaaatctaacttagtaaaaatatagaaaacaattttgcattacgaatcattaactatttctaaatcactataactatttttatacatttttttcttccttatatacatttgctttgataaacagcatgccctacttattattattctccacaacctttcacatacagagatattggccgatcagtacatgagcatatattttgggtcgattttttcaattgtgaaaaaaaatctaggcgagaaataaatttaagcggacacaccaacgacataaacaaaaaaaacaaaaaaaatgcaaactatggggcttgaacccacgaccacatggttagaagccttgtgctctaccaagtgggctagatgggctttgtgctcatgtctgcaacaaatattttaataacacaaccgagctcggcgccaagatctgtggcgccgagctcggttccacgtcgacgccacgcgtctgggttgtgccaacgcaacacgacctcggcgccatagcctatggcgccgagctgtgttagctcggcgccataggctatggcgccgagcaaagggtccaaaactgcatttaaaatttttttaggtctaaacgtgattttacttctgtttaagggctaaaatacaaaaaattcgggcgattggttccgcttcaggctcagcctggcttgcatccatcgcccagtctccttggtagacattgggaacatctctgcaaagaacactatcgtttgttcaacatccagcctccttggtagccattgggacaagatatcatgtcaaactggctccacccaaaaaatacatcatctctaacgacaataccgagccaacacacgctcaaaaaacaacatgatttacggtttctggcttgttacaagcactgcacaataaaaaaggtaactataccatgtcaacctctatatgtttcagggaagccgcagtctgcaattctttatgggacatttgccatt

SEQ ID NO: 6408 - DNA, 1095 bp, Zea mays
  Zm_smallRNAprecursor_1897
gtacggtgtacttctgtaatagaacagacaaaggttgtccaatgaagctccagcaagctgcagtgcatagctagcctctgcattgcattgcatgacatgccatgtccttttttttaactcggtcaggtccctccaacatgtcctccatgaaaccttcgtttgttgttctaacgtcattgggatttgagaccacacacatgtcagctgcttcgttcggtaaattgcatgcgttggctacactctcgcctctccgcttcttcttactcctcctgcatgaggtcaggtccaccgtctacgtacgtatcatctcttgcattatagaacagccgcatagtggcgacaagctaagggcagccgcgccgagctagttcctggttatataaggaaggagatcaagagagacattgaaaaatgcatggcagcagcatataggttagagagagcaacaatatgcagtgtgtatgtgtagcctctcaactcttcaagtccatgccatgcctttccacagctttcttgaacttcttcttcttcttctctcttggaacggcagctttcttcgaatctgtctctctctctctcatctccgaagacgaaggtcaagaaagctgtgggaagaaatgacataacagggactctggaattatattctgtagctagtcagatgtgatgttaattggcggctctcttcctcacactatcgttctgtccgcaagcagcagcacacgggccggggccgatcttactcgttgagcaaggtgagcagctcatcagtcattcagttgcgcctcctccgtttcctccaggccattaattgttcatagttgcctgttcccctccgtgctggtagagagctccgtacgagctagcttcagcttgcgtccatgacggacgagcagcagcaagcctctccttccatcacacacctgcatgcatatgacaggtggacccatctgatataaagcacaaaaacatctatccaacaaattatcgccagcagataacagcagcacgaggtcacactctcattcactaatcgcgtttcattttctccccctgtgcatggttaattagcggccacacgtcgcacaatcaaaa

SEQ ID NO: 6409 - DNA, 1095 bp, Zea mays; identical to SEQ ID NO: 6408
  Zm_smallRNAprecursor_1898

SEQ ID NO: 6410 - DNA, 1095 bp, Zea mays; identical to SEQ ID NO: 6408
  Zm_smallRNAprecursor_1899

SEQ ID NO: 6411 - DNA, 1085 bp, Zea mays
  Zm_smallRNAprecursor_1900
gtgtacttctgtaatagaacagacaaaggttgtccaatgaagctccagcaagctgcagtgcatagctagcctctgcattgcattgcatgacatgccatgtccttttttttaactcggtcaggtccctccaacatgtcctccatgaaaccttcgtttgttgttctaacgtcattgggatttgagaccacacacatgtcagctgcttcgttcggtaaattgcatgcgttggctacactctcgcctctccgcttcttcttactcctcctgcatgaggtcaggtccaccgtctacgtacgtatcatctcttgcattatagaacagccgcatagtggcgacaagctaagggcagccgcgccgagctagttcctggttatataaggaaggagatcaagagagacattgaaaaatgcatggcagcagcatataggttagagagagcaacaatatgcagtgtgtatgtgtagcctctcaactcttcaagtccatgccatgcctttccacagctttcttgaacttcttcttcttcttctctcttggaacggcagctttcttcgaatctgtctctctctctctcatctccgaagacgaaggtcaagaaagctgtgggaagaaatgacataacagggactctggaattatattctgtagctagtcagatgtgatgttaattggcggctctcttcctcacactatcgttctgtccgcaagcagcagcacacgggccggggccgatcttactcgttgagcaaggtgagcagctcatcagtcattcagttgcgcctcctccgtttcctccaggccattaattgttcatagttgcctgttcccctccgtgctggtagagagctccgtacgagctagcttcagcttgcgtccatgacggacgagcagcagcaagcctctccttccatcacacacctgcatgcatatgacaggtggacccatctgatataaagcacaaaaacatctatccaacaaattatcgccagcagataacagcagcacgaggtcacactctcattcactaatcgcgtttcattttctccccctgtgcatggttaattagcggccacacgtcgcacaat

SEQ ID NO: 6412 - DNA, 1043 bp, Zea mays
  Zm_smallRNAprecursor_1901
ctcaaattttgcttcacattgtcttgcttcttctcatttgcttgagctttcttctcaagattgttgggacacctcgaggcaaagtgacccatatcaccatacatgtagtacttgatttgagccaaatcatccttcttcttttgatttgtgctcatcatgttatcttgattatatattgaatgccttcttctttctcttcttgttttctttttattccccacatcaccattatattcatggttaatcttgattttcttttggggatccttcctttgctcaactcgtggctttggttgaggtttcacttgtggcttcactaatttcttggttgggcacattgaggtgaggtgaccccaagtgtggcacttgaagcacttgtcatgctttagcctcctttcttccttcttcaacttgagcttccttttattggggcatgcctttgcaagatgacccatctcatggcatttatagcacattaagtgagatagcttatttccttttaatttgaattgtctgcctttgatattgctcttgttgaaaccaaggccactcttgtcatcatatcttctttgatttttcattataagatcatgagtgacttttgatttatgccacctctcaaacatgttgcttaaatttttcactttgtttttgagcttattattttccttcaaaaggttagtcccacaagacaaggaagaataataataatctatagttgaagaacatggcatagctaataaatcttcacaagaggtggatacattcttcttatcttcatcacatggattagcaacattttgcaattgatcatataaatcatgtgatgagttctcactagttttaatttcttcactataaatcatgttagtgagaaaaatgtgatcttgtaccaaattttcatgagcaacactaagttcctcatgactcaattttagttcctcatgtgaacaagtaataacataaagtagatgtttttgttgttcacatgaattctttagaaataagttttcgctttccaaatttcttgttttatctttctc

SEQ ID NO: 6413 - DNA, 1127 bp, Zea mays
  Zm_smallRNAprecursor_1902
cgcactaaacatgtggaaatcaatctccattttgtctgagagcatactacacttggtgatgtccatatccttgacatcccaacaatgtctcagttcgccgacatcttcatcaaggagctgcctccgtcggttttcacgaagttccgatctagtctcaacatccatctattccaccaaagcttcgactgtcaggattgttagactgttgtatgcacgtgcgtgtgggccttgagcctggcatgttcaatcggccagcccaaccttatatggttaggttgtctccaacagatcatgcatatggtcgtgtaaaacattgttttgtactgtagactgcaccggtcacatactgaagtttgaaataagagatgagataggagatgcaatgggtaagctgctgaagacactcaagacagtcttagtgtgttaaagagagatgaggtccttgattagggaacgtatcctgtgctcatggagctcttgtgctcatatgagcactttaaatctggtgccttcatttctcatccagggggtgagggcagcagcggcacacagaagagacaggcggcgcggcgcaacaagggtgggcacacagaagaaactaggaaatgtctattcacacttggatgagaaatgaaggcaccagatttatagtgatcataggagcacaagagctccatgagcacaggatatgttcccccttgattaatggcgtttctataaaccacaagatctcatcctgtagagatatgagatcctggattggtggtgtttctgtaaaccacaagatctcctcagcctatatataaatataaatataaatataaatatatgaatatctgccatcacatcaatcactcattccacataatcactatctctttcaaagaatgatagaatttgccgaaaaatcaggagtaatgcaatctcataatcagatgataaaatatgctacatgcatgctgaatatcaatatgattttacataggtgagtttattgttatttttacaggactttatcctgcacttttgtgttttttatcattatcattaaaaacaaatatgatagccaatgaggccatttggaaacggagaaataaacattgcaaatcctaactacagaacagaaa

SEQ ID NO: 6414 - DNA, 1070 bp, Zea mays
  Zm_smallRNAprecursor_1903
ggctgtgcacgtgtaccgggtaacttaacaaggctatcacgagttcaacaacttgaactcattatcccaaggatctcccacattcatgcatattacagtaatcacactcgatacacacacacttcggagatagagcggaagactttacaaaatatattttacatttccaaagctcaagttttacaacataagaagaattgtaattattacaagtcctgatagtacccaaagtgcataacttattaaaatagttggaagggtgaagcctttccataagatatatacataaacattctaagcttcaaggcctccacatgaagtaactaaccaaaagataagggaataaaacttctcctgcaaaaacaacaagggataaaaccctgagtacgcaattactcagcaagacttacctgactaaagaaaagactctcaagggtatgctagctgattgggaatcaaggtaaagtttagagaaaattcctggtatgccatcagattttatactcatcccttgtgtgccactgagtggcatataggtatattttttggtgtctatgacatgtggggccagtggcatacaaggaatgagtatattttccagtggcatacagggaattggccctaaagtttatcaatgatcaaagactcctttttgcagaaaagcttgctaccagttgatccttaagccaaattttatttcactagttaggttattacctgaatctatatttgcatggtctagttcaagcacttggcctatactagttgcattttattcattctcatatttcacttgctaactacgatgatggtcaccgggatgagtctccataaccgaggagcaacgacgattcgaaccgattatacccagctggggatctctaaccacacgacatatgtagcacttaacccttgcatatgtcaaccgttcccacggagtcctccactacatgaacaggtccgcgccacccgagagaacattacctaccaggcgtgctctgtgccaggagggtacatgctactctcgccatctctccactcccagtgcgcgattgtcccttcacgtatgg

SEQ ID NO: 6415 - DNA, 1127 bp, Zea mays
  Zm_smallRNAprecursor_1904
ttatgcttatccaatgcccaccacatgagattcctagatatttttattataggcattttccaagtcgataaaaaccatgtgcaagtccttcttctgctccttattaatgactagccttattaggaaaaatgcttccatggttgaccttccaggcatgaatctaaattggttcgtggtgatatgcgtcattcctctcaggcgatgctcaataactctcttccatagcttcatagtgtggcttatgagcttaatccttccatagttggtacaactttgaatatctcccttattcttgaagattggtactaatatactcctcctccactcatcgggcatcctgtttgatcgaaaaatatggttgaacaacttggttagccaaacggtagcaatatccccaaggcatttccgcacctctattgggataccatctgatcccctcgccttgccccctttcatcctctttaaagcttctttgacctctgattcttagatcctgcgtacaaagcatctatttaaatcatcgaaggagtcatccaattggatgtccatagtctcattctcaccattgaaaagattgccaaaatacctctgccacctctgtttgatgtcctgtcctttcaccaagagttgatccatctcatccttaatgcatttaacttggttgaggtccctcatcttcctttcccgaatcctagctatcttatagaagtctttgtccccttcctttgtacttagtcttcggtaaagatcatcataggctcgagcctttgcctcactcacagctcgctttgcagaattctttgccaccttatacctctctatgttgaccgcgctcctgtcatggaacaagctcctgcaacattctttcttctcctttattgctgaaagggaaatagggtttaaccttttcctataaatgattttggtggttgaatgcccaacacaaataattggactaactagtttgctttagattatatattctacaggtgcataaaggttcaacacaaaccaataaaaagatcaagttagggttcaaaaagaaaggagcaaaagaaacgaaggatgctctggtctggcgcaccggacccggacagtgtccggtgcactagggctgtacaagtcca

SEQ ID NO: 6416 - DNA, 1054 bp, Zea mays
  Zm_smallRNAprecursor_1905
atctttttcacctttagctcaaactcattttgagctctccttaggaagcgctttaatgtaccttgggtttcagatttatcctgcaaaaagaacacccaagtgaagtgggaaaaatcatcaacaattaaaagatcatacttacttcccctgatgctaagataagcaacaggaccaaagagatccatgtgtaggagttctagtggtcttgatgtcatcatcacgttcttgctttgatgagtagttccacatcctttcctgcctagcatgctacacaaggtatgtctttctcaaaacaaacatctgttagtcctaacacatgttctccctttagaagcttatgaagattcttcatcccaacatgtgctagacggtgatgctagagccagcctatattagtcgtagtgattaagcatgcatgtagatcaacattctcttttgacaaatcaactaacactacaagaaactaataaatgttcgtgggttaatttaagaacgtgggtaccgacgttcttaattaggttttgttcgtgagttaatttaagaacgtgggtacccacgttcttaaattaaattcgtgggcccatggtaaaaccgttgaacttatcgtattagaaacgtcggtacccacgttcttaattatttcaaaatcaactcaaagattgggggcgtgtgggggacatatatcccccgggtccactagaaagcaagaaggcctcacgcggggcctcgggctagttacctcgcaaggccatcccttcgtgggccgggctagagctattggcggatgggctgacttgagaaggcaacagattcaagcccaggcaacccgtcaattcgtgcgctatcgacagcaaccacccgactttcccacacatggcgtccttgaatatcggggcggattagggataagtcggcaatattgtaggaagatcagttcagccggttcactattatttaggagacacatgatcctcatgtacacatggagcaccccacggtcgagtatataaggtgcagggggtaccccatcatttccatcgaccatctacttatc

SEQ ID NO: 6417 - DNA, 1171 bp, Zea mays
  Zm_smallRNAprecursor_1906
agttgctaatctcaagcatactactctacccatatgctatgaatttgagcctgaatagagattttgaaatatttacatgcctgacaggagaagttttgatttgtccatcatagacatcaagcggccgatagattcattaaaaccaaaactttattatgaccatgcatatattattggtcataccacacatgataatgtgtgtcgtcttactgcattattacatatatagatagagagagatggatagaggagatttcccaaatatcatgaatcagtagtagggcggaatggcagcggagacgccacaggggttggtgcggtagctgggcagctggtactggtagagtccacccatggccggcatgttctgcgccatcatcatggccatggggttgagaccctgggctgccagcagctgctgctgctgctgcatcagagctggctcgtacaggctgctgctggcggcagcggcacgctcaagctgcatcatcatctgcagctgctgcgcgacggactgcacgtccatcatcctcatctgctgctggcagcactgttgccggagcggctggaacatggcgctcggctgcccacacccggcgtagtagggcgccgccgccagcgggctgcactgcggctgcctcaggtactccgcgtaggggtacagcccgccggcgcccatcatcgtcgtcaggccggcgccagcgccgtacaagccctgcagccccgcgcaggggcagggcatctgcattgcagaggcgctggcagctgacagagccaggcacacgacgagaacgatgaccatcttcatgctgttctgttcgacgatcctctctacgcactgccgctttgctgatctggattggatgatgatagagactagttcatatgtgggagctagccatttatagatgatccatggcttgcattctgcagcatcttgcaacccatggttttggaatgttgcgttgcatgacgtggaaacatagtacatggatttggatttacagatagatcattaagctttcttatacatatgaatcaactttacatgtcaagggttgtcaatgaattcatacgcttgtgaagctaactttgtaatgcctctttacacatcaccatgactcatcacctttcacttcattgtaggcacatatacaccaatattttgttg

SEQ ID NO: 6418 - DNA, 1149 bp, Zea mays
  Zm_smallRNAprecursor_1907
ttgcatgcttctgtccggtcacgtcgcgcgcgcagtaatttttttttggaccttagcccctgtccggtcgtcctgtctctttttgcatgaggactggccttgcgcgcccgacgccatgtacttgcagactgcagcgtcctgtcttttcccccgcgcagtttttttttcttttgcatgcagtctgctgcgtcaggtcacttccccctgcgctgcgcgcaaattagaattttttcctctgttgtttctggttctctgaccacactggtcagtaccagctgagctggcccatgggggcggttgaactggttctgaggactagctcaactgcctatatatacttcactcttcctcatctcttttcccacttcattcactctcgccttggtcgcttcacaacctttagagcctttccttcacacacttcaaccgcttcacagtttcaccaccgttttcaatcatggtgcgtcgccgcaacccctctgtggttgagtttagcagcgactccgacgagattcaggaggaatctcccatcccctctcctccgcctcgtcgctccctctctaagagaggacgtggctctggtcggatgcctggcgagggctcttccttgccctcgcagccgactcgcgggagacgccaaaaggttggcgcctctcgtcctcgtcgtagcacgtcttcctcagggtatgctccctgccaagaggaggatggggctttcgacgacttcgtcgaccttccggcgcctgatgctctctacgtcaccggactgcacatgcatccggcgaacgtcagccgcggtccgcatgaatctcccatcgacttcactcagaagggaatagaaacccttcagcgtctgaggttttccaaccctactctcactcctcgtcatcctggtgtccaggaccctcggttctggaatcttttccaggctgacttctacaattctgtcattcttaccaagaaacacccagtcgtacgacatagatttattgactgggagggttgtgagaatatgggagatgttgacatgtcgtcagctctcgttcacttagagagaaagggattacgtaacattatgaccatggaatacccctggaacgatgaggtggtagctcagttctatgccaccctctggataaagaaagtaga

SEQ ID NO: 6419 - DNA, 1088 bp, Zea mays
  Zm_smallRNAprecursor_1908
gctttgacaaacagcggtggtcgcgtctctaagaagtccatgtaagaggtttcacgggggccctgttgataaccccgcccgccttgttgtggaaactgttgacccgccatctctctcagaaaacgggtattatccgcggttgcatttaccaaggcggcaatcgcctcggccagtgtgggaggaacaggaggtggatttggggtagactccctcccactggaagttccagctgcatcctgtgatcgggtcttggatggcatctgtggcaacaacatttggaaacaatatgatatgccaaagaaaaaccttccattttacattaccaaaaagagtaatgtacagactcggatttttttacaacaggatacattacctattatacaaatacactacctattatacaatagtacaacctgttatacaatacactacttctacttctactacaccactattcctgcttcccattgcttttggcggcctcgtcgtcgggtgtgggagaccattcgtcgaccagcctcatggaaggagggggctaaaaaaggtctaactcaccaccaagcgcgtgtcccgcaacatgcgaggttccggcttccgactcaacaggattcgtaggctcactgggatgcagttgcgaatataatacatgaacctcttcatgtaaggtattgcaatatgtctacaggtcttcaacggccaagttgagctcggctactcgagcttgagctttttgctcgttgtcccatgcaagcgaacgggattgaacaacccagtcgagtgccaaatcccggtctacgagctgatctcgcagatggcggacatctcttctcaactcatttatgcggtcaccatctacgacccatatagctgtcctgtggcggagttccgcttggagccgacttacttcagcttcgagatcccctataggatcattgcttccgctactactattatcatgccttggggccagctggtgactcggcacaccaatcggtccagtatgtttgtgcgctgttctccttgtgcgcggcggcattttctaagggggaaaatttgattagtatggttcttagcatgatgcatgtata

SEQ ID NO: 6420 - DNA, 1076 bp, Zea mays
  Zm_smallRNAprecursor_1909
acttcactcaaatgcaaaatgtagagatagcaatgtatatgcgcacaagcataatggagacaaggttgtagctataactgtatttaatttcactatttgtaatgctagttgtaaatattataaattgaaagtagcacaaaccaattatgattcagttctaataaataagctgtaaaaagttgatggcttgatatactattaaaattagaataggtaagcgtaaatatttcattatgtcctggttactgaattaactttgacacccaatttatatatgtaatgaaataaaactcgtgatcaaacctttttcatcagaattgtaggtcctcccttcttatattatcaccgatggactccttacatagttgatcaggtcataaattttgcttgctatagaatattcatgactggataagaccgtacttttaatatgtagatagaaatatgctaggggacactacagtaaactaacaaaaatccgacggtcaatttatctccgacggctgtctacgatgccgtcggacataacgttatgtccgacggccaccaaggactctcggaaataccgccttacctccgacggctaccctgacagccatcggacataagcttatgtccgacggcctcgtacgtagccgtcggaggtaaggttttttaacacggcaagcccggcgcgcggttcatttttcatgcgcgctcgctctctcctctcttctctctgctcgtcgccgccgccgccgtgccgtcaccgcccgtcgccgccgccgccccgcccgcccgccgtcgacacccgccgcccgccccgtcaccgcccgtcgccgccgccgccccgctcgcccgccgtcgacacccgccgcccgccccccgtcgacacccgctgccggccgccactgccctgcccactgctaagtaagtatttttatttttattttgtagtttccactgttgttattaaattattagtatgttaaatgatgtttatcttattatatccgagggcctaaatttgattatatggcaaaatttggttatgtaattaattaagtttgttttcgtttacttagtgttgcttagat

SEQ ID NO: 6421 - DNA, 1171 bp, Zea mays
  Zm_smallRNAprecursor_1910
tttaaaataggatcatttctcatttatgaactttatgactgcaccaagcattagcattcaaccatatataaataatttgcatgaaagcacatgatttgagtataagtgatcatgaattgatgtcaaaccaaaaaatacttggattaaacatacatgataaattgattaagttcaaaggctaattttaaatcatatcatggtgagtatttaatgttgaagaaataaatccaaatgaacaagagagaatacatcacatagttttggattgttcttctttatacgtttaattgcatagtccatttgagaaactcattctcatgctgtgaaactacatagatcacttaggtaaaaaaatagtttcacaactctagtcatatagagaattcccctttagataagtgctttaagaatttgaatttcttacttagcaccttattcattcacgaacacggggtttttttttcttttttatgtctagatcatggcaataatagagtaatcaaattgaaatgtgccaagaaatacttacaaccaatttaagcatttggattgccatatgtaagaaagaagattatgcaatcggttatatgataacctcaactttgatcatctttggtcttgatcttcaacttggagtaccaagataagtgccaaaatatttctcaacaaatatccttgtaccccttcactttccatgattatagatcaattaaaaaccaaactatggtctctcagacaacttatgtgatttatcctatatgagagccttccaatcaaagtgactttcaatatttcaaatacttgtcacttatgacagattctgtatactccaaagaaacattcataaattttgatgtacagatcctatgaccacgacaattggtggagatgtgctttaataagtctgctaacagctgtaaaaagttgagactcatttgacttcatatgtgctgccagccataacatctcccacggtaggtacatgctgaaaactgctgtgtttgtgctgacaagattgacttaatcaagaagttacacttatccaatgattatgaaatttgcacagactttgctttcatatgcatagagcaagtaaactgaatttcaagccaatccaaatagatttgatcactcaaacatggttatgagccacagcctgtcagattttcaa

SEQ ID NO: 6422 - DNA, 1189 bp, Zea mays
  Zm_smallRNAprecursor_1911
ttgaccgcgcttctgtcatggaacaagctcctgtaacattctttgttctcctttattgccttttgaacatcctcggtccaccaccaagtatccttagattcaccgctgctccctttggtcactccaaacacctttgacgccatcttcctaatacaagttgtcatcttcacccacatgttatttgcacttcttcttcgaaccaagtgtcctccacaaaaactcttttcctaaaaactttggactcagctttgagtttccaccacttcgtcctcgtaattttggcttgtttaaccctatggaagcgtaacatactttgttgggactttatgcttatccaatgccgccacatgagattcctaggtattttatcgtaggccttttccaagtcgataaaaccatttgcaagtccttctgctccttatatcgctcaatgacctgccttattaagaaaattgcttccatggttgaccttctaggcatgaatccaaattggttcatggtgatatgcgtcattcctctcgatgctcaataactctctcccatagcttcatagtgtggctcatgagcttaatccctcgatagttggtacaactctgaatatctcccttgttcttgaagattgatactaatgtactcctccactcatcggacatcttgtttgatcgaaaaatatggttgaacaacctggttagccaaacgatagcaatatccccaaggcattttcacgcatctttgggataccatccgtgcccatcgccttgccacctttcattctcttgaaagcttctttgacctctgattcttggatcctacgtacgaagcatctatttaaatcatcaatggagtcatccaattggatgtccatagtctcattctcaccattgaagagattgtcaaaatacctctgccatctctgtttgatgtcttgtcctttcactaagagttgatccatctcatccttattccttaatgtatttaacttggttgaggtccctcgtcttcctttcttgaatcctagctatcttatagacatctttctccccttcctttgtacttagtcttcggtaaatatcatcataggctcgaccctttgcctcactcacaactcgctttgtagtcttctttgccaccttatacatctctatgttgaccacgctcctgtcatggaacaagctcctgtaacattctt

SEQ ID NO: 6423 - DNA, 1082 bp, Zea mays
  Zm_smallRNAprecursor_1912
catacacattaatttagtatgatttgaattttgggccactaaaaatattgaaaggtcaaattatcactaatttaattgttgggcatgatcttgatttaggagatgggatcaattgccatgcatctaccttatagaagctttattttgatcgatcaacttataaagaagatcaaggtgttgccataatcattatttgtcctaatggtgttgaaatttagatattaagctgattgaattactattgtgccaataatcaagctaaatatgaagctcacttattcagtttgaaaatataaggctaacatgttggctcaataagcatttgtctatgacattggtggatataacttttctatcaaaaaagtcaacacaaatatttttatctaatcatgaccaattgaaagctctatgtatggagtggcctgacctatacaataatgtgtcgtttggttcacatattggtaatgtaatgggtaactgataatgttatatcatgcttgtttaagtccaaccgtaatcgaataccacgctaaaaatgaatactagctatccatacttgttaccgccggtactcaagtgtgaatcattactattaccatttagtttacatttcgtgaaccaaacgccacctaagtgttatgcatatgataggttatgtacatacccaagtttgagtaaggatgacaaccatgaaaaagatgatgatgccagcaatgattgatcaagtgttcaacatgacaaacaaaagtattaaaatgaaatacaggggctcaaggcaaaattaaaacgaagatatttaattttaccgatcaagacacaatagaaggcatatatgttgtgctagtttatgtataaatctgttctaataccttttctactaaaattactaaaattactatagttacctgttctaagcatgagcacaacttcacccaaactactagcaacaagtaaaagctacgaaatagagaacaaccctaagtcattattgcaaatactaactaagcaaatacacaaagtaaaatgctcaaagtaaatgtgaaaagtaaactagggacaagaagactcctccaattttttct

SEQ ID NO: 6424 - DNA, 1064 bp, Zea mays
  Zm_smallRNAprecursor_1913
cagatcataatatatatcaataccctctaatatatatcaatatttcccttcttttatctatgcaaaacaaaaaagaatagtaattagaaacgacaggggccaaattttctcaatgtatttccaggatcataatacagatattttttgtgtaagtactataatatgatagggtatgtagctctttctacacacaaatgaaaaacgtctatggatgcagatataagctacgagcataaatgcatgcatatgcgtagccgactatagcgagtttttttaagtggatccactaatttttttgtcagatttggctcgggtgcatcaaaacttgcaaccctcagagtatcctgatattgatgaggtggccttttcctttgccctttttctttcgccctttaacccggaagaagaacgaagagcttgtattgctctcccacaaccccgttttcacggtttaggctgctcccatttcgctcgccgctactacgggaatcgcttttgctttcttttcctctggctactaagatgtttcagttcgccaggttgtctcttgcctgctcatggattcagcaggcagttcaaaaggttgacctatttgggaatctccggatctatgcttattttcaactcccatcttctgagtgaagggacaacccaatcactcctaagtaccagagccattcctttagttaaagtcaatagtagcctaccctctgtcccttgccgagtctacagtagtggaatttgctttttctttcacttgcttgctcacccgcttacaccactggaatagaacttacgaatcttatcttctgtccccagcgaagtcaccaaagagtaagttagcgtctttctgggtccaatactaacgatccctagagcctgcacatgacatgcaagacgttagggacttctctgtgggttggtggatcgttcgcagtaggtcatcgaaccgttcatgatggtgcagatagctccgagaagaattcggatcccaccccaggagggacccatcagggagtgatagtcgcctagagggggggggggtgaatagggcgaaactgaaa

SEQ ID NO: 6425 - DNA, 1127 bp, Zea mays
  Zm_smallRNAprecursor_1914
tagagggcatggcgcggctgtaggaaggagaagaagaggaggagccggagcaggaggaggcggcaataaattaagctctattaaacagcgctagtagcaaggagcagcagcagtatcggttcagacttcaggtccagtagctgaaaaggcaggcagggcatgaggccagtgaagatatggcatgggggacctttttgcaatccattctccccatcagaacccacttcgagttagcagtgtgtgtccgccactccgcctgaatctttctcctatatactgctgtatttaattagcaagagcaaagctctcactgcctttctaatgattgatcagaagtgcctttggcgaccccttgtctttctggacatctatatataataacgttcttcattcagctcctctgttctgttctgttcgttcgttcatggttgaattgaattgcggagggtgtcgaggaaggaagcgtatcttatgagcaaggagccctgctgctcccatgagcaaaatcaatccagaccacatcctccacatccaacggtgctgcgtcatgggggtttttgtaaaatgtacagagttgcaaagaacattttataaaaccccctgacacagcaccgttggatgtggaggatgtggtctggattgattttgctcatgggagcaccagcgctccttgcgcacaagatacggtcccgtcgaggaaaggaagggagagcatgtctgatgctgaaatgttcggtccagcctatggtctgtacgtgtatgcatttgccaattcgtcgttgcaggtcgacggagacggacactcgcaaggaagcaagcaagcaagcaaagggattgttgttgtcttggtagagtacgagtaccacagacaagaagcaaggaggcactagagttatcttggtagagatgaattcatctgttcacttcaaaaaaaaaaaaaaaatgaattcatctgtaatgctcgcctatcacgggggccgctgattcggacctgttgatcttgggtcctctcgccagcaactgtagtgttgccgcgggaggcgggcgctaagcatgcagccatggcatggcatccgatatcggagtggttgggcgcagccgcaatgattaccagtttaccacgatca

SEQ ID NO: 6426 - DNA, 1126 bp, Zea mays
  Zm_smallRNAprecursor_1915
cagtattttgcatgaccatttatacagactagagatggccttagagttggaaaattgtttaagagtagatagctagcggatatatttttagccttaatattaggatgggatgagcactatatgtttcatcctagctatcaattaacctttgcaacagtgtaggagataattattgtttggctttaattaaagatggtaatggggactcgttacccggtgggtaattactccattagggtatgagtttggttgtaattatattctcacgggtctattaacggaagaaaaatagaacctaacgggtagaacgggtatgagtacgtactcattaaacccgtattcctatccatggtattttatatccaaaatataaccaataattctctaacattttagcatagctcaatgatttgtattgggctcctggcttctgagtataactatacgctatgggaacgtatcatgtgcttatggagctcttgtgctcatatgagcactttaaatctggtgccttcatttctcatccagggggtgagggcagcagtggcacacagaagagacaggcggcgcggcgtaacaagggtgacacacagaagaaactagaaaatgtctattcacacttggatgagaaatgaaggcaccagatttaaagtgctcatatgagcacaagagctccatgagcacaggatacgttcccatacgctatataggccttgcgacacatggtagcagtaagcagacaaccagccaaaactttaaagcatgtccaaggctctaagtttctgcgatgccactcttcgttaatgtgcaatcaagcgaccaagttgtacacagacacatgacacgaccacacctagaagacggaagaccggatgttatcgctcggtgctaaccattcatcctaaactaaaatggacagataggtgcaactccaccactctagacgagtatgggtacccatcgggtatagaatacccggcgggtctgggtatgtgaaagggaaatagtctcaatatttcctataatcgaatctggtgtttaacgaccatcacaaaccttgtggactaaccagttcatctacaaccattctaagtcgactgtccggaataccgtagattattccgga

SEQ ID NO: 6427 - DNA, 1032 bp, Zea mays
  Zm_smallRNAprecursor_1916
ttggttttcaaaattcaatcctcaattttcaatactcaaatgtataatttgagatatctgaaattactattttatttcttcatatatttattttattgctgttaattaatttttttatacagattttgggccttacaccctccaaatcccatcccaccaaatcagcctcaatcattttccatactcttgatcccaaacatgctttgctcccaacaagatgaggtgccaagtacgggatgcggacacagaatgaagtcctgaatcggtaaatgtcgataaaaaatggaaatccgttggaatgtgttggcagtaaaaaaatggcaaaaaaaaaacacggcaggcagaggaatagcgttggaataaacaaaaaaataaggattcattaaagtcactgaaacagtattaaatgtcatttaaaaatatagagtgtagacatctgaaaggcttcaatgaaagtcatcgcagttataaaaaaattagacgcgccaggtaggggtcgaacctacggccttctgcttaggaaacagacgctctatccactgagctacaggcgccttgttgattctaaatgaaagtcactgcaattttaaaattaacttcaagaggccggtattacactcgcagtaaaaaaaatcaaacgcgccaggtaggggtcgaacctacggccttctgcttaggaaacagacgctctatccactgagctacaagcgccttattgtttctaaattatcatccattgattagactgcgcttactttcgtcatgctggcagaggagacaaccgcaccgtgtgtggccggtgtcctgaaaacgacgaaacggtgttcatcagcacgtctgctaaattcacagtgaacgaacatcctgtgacacgcggggcatgtttgattacgtggcctgggctagacaggtttagattttaatctaatagccagggtagctgaaatctagctgcaacaacgcaatccaatcttgttttatatatgtgacatttactggattttgatcgttacagtagtacatgccgtttta

SEQ ID NO: 6428 - DNA, 1127 bp, Zea mays
  Zm_smallRNAprecursor_1917
atactcaaatgtataatttgagatatctgaaattactattttatttcttcatatatttattttattgctgttaattaatttttttatacagattttgggccttacaccctccaaatcccatcccaccaaatcagcctcaatcattttccatactcttgatcccaaacatgctttgctcccaacaagatgaggtgccaagtacgggatgcggacacagaatgaagtcctgaatcggtaaatgtcgataaaaaatggaaatccgttggaatgtgttggcagtaaaaaaatggcaaaaaaaaaacacggcaggcagaggaatagcgttggaataaacaaaaaaataaggattcattaaagtcactgaaacagtattaaatgtcatttaaaaatatagagtgtagacatctgaaaggcttcaatgaaagtcatcgcagttataaaaaaattagacgcgccaggtaggggtcgaacctacggccttctgcttaggaaacagacgctctatccactgagctacaggcgccttgttgattctaaatgaaagtcactgcaattttaaaattaacttcaagaggccggtattacactcgcagtaaaaaaaatcaaacgcgccaggtaggggtcgaacctacggccttctgcttaggaaacagacgctctatccactgagctacaagcgccttattgtttctaaattatcatccattgattagactgcgcttactttcgtcatgctggcagaggagacaaccgcaccgtgtgtggccggtgtcctgaaaacgacgaaacggtgttcatcagcacgtctgctaaattcacagtgaacgaacatcctgtgacacgcggggcatgtttgattacgtggcctgggctagacaggtttagattttaatctaatagccagggtagctgaaatctagctgcaacaacgcaatccaatcttgttttatatatgtgacatttactggattttgatcgttacagtagtacatgccgttttacgcgttgtgcaggcggccaccctgcgtgcttgtgccttgtggtaccgctgctgcctccgccggctcggaatactctgaataaaagccaggtgatgaatccacccttatgcttctggtccaggtcct

SEQ ID NO: 6429 - DNA, 1085 bp, Zea mays
  Zm_smallRNAprecursor_1918
ttctactatggcataagatttgaaaaatgcaccgacggatgtagcaaaggtggatagagatatagctacactaaactgaacatatacaataaacaataattcatgacgcaaagaagaaaaaaataactattggtttgaaaaaactgaataattgacatgtctccctcttttaatctctgcttgtggttaagcaatgagcttcctttatttagtgaaaagagatggaaaaaaaaactgaatgagtaatagtatgcataattctaaagcctacattgtcagctcatcctgatgccttgctgagaaaccagcaactaccaaatgccaacacgttgttgttgttgttgtttcgacaggccgggaagcatacacgaatcctactcatgtggcattcatgatgcttgatttaacaataaagattaaacaagcacataccggtggcgaaggaactcatctgtcagtcgcctccctacacgacgccttgcgtttgctggctgcgagagagtgaagctgcaacatgatctggtgaatccaagcgtcaccgacgatcgagcgagcactcgagacgcccgccggcgtctgagcagccagatcatgctggcagcttcaacctctcacagcagcaaagttttgggacgcgcagacgagcagaagaggagggagagtgtgaggagagcgtgcagtgcagctatagttttcgcgtgtgcgaaggaaggcaaagggacgggacggcgggccgagacgaaaccagagcgcgactgcgcgagccatgcacggacgacggaggtcggctgttattaagcagaggcactgcataaatgcatggtccctcgcgcgcccaccccccctcctcgtgacgctgccgttttgcccccggccggcccagacgcgctgtcgtgctctcgctgcgtctgcacgcattcgtatgagccgtctgcgttggtagtcctggcatgggcagctcggcctcggcgccatctggtccttgcgacccggccccccctcaggcctcagtgcaactaactaagcagccctgttccgatagtgattgcaagcgacgtctctttcctcctctgaagaattcagcc

SEQ ID NO: 6430 - DNA, 1085 bp, Zea mays; identical to SEQ ID NO: 6429
  Zm_smallRNAprecursor_1919

SEQ ID NO: 6431 - DNA, 1086 bp, Zea mays
  Zm_smallRNAprecursor_1920
ttctactatggcataagatttgaaaaatgcaccgacggatgtagcaaaggtggatagagatatagctacactaaactgaacatatacaataaacaataattcatgacgcaaagaagaaaaaaataactattggtttgaaaaaactgaataattgacatgtctccctcttttaatctctgcttgtggttaagcaatgagcttcctttatttagtgaaaagagatggaaaaaaaaactgaatgagtaatagtatgcataattctaaagcctacattgtcagctcatcctgatgccttgctgagaaaccagcaactaccaaatgccaacacgttgttgttgttgttgtttcgacaggccgggaagcatacacgaatcctactcatgtggcattcatgatgcttgatttaacaataaagattaaacaagcacataccggtggcgaaggaactcatctgtcagtcgcctccctacacgacgccttgcgtttgctggctgcgagagagtgaagctgcaacatgatctggtgaatccaagcgtcaccgacgatcgagcgagcactcgagacgcccgccggcgtctgagcagccagatcatgctggcagcttcaacctctcacagcagcaaagttttgggacgcgcagacgagcagaagaggagggagagtgtgaggagagcgtgcagtgcagctatagttttcgcgtgtgcgaaggaaggcaaagggacgggacggcgggccgagacgaaaccagagcgcgactgcgcgagccatgcacggacgacggaggtcggctgttattaagcagaggcactgcataaatgcatggtccctcgcgcgcccaccccccctcctcgtgacgctgccgttttgcccccggccggcccagacgcgctgtcgtgctctcgctgcgtctgcacgcattcgtatgagccgtctgcgttggtagtcctggcatgggcagctcggcctcggcgccatctggtccttgcgacccggccccccctcaggcctcagtgcaactaactaagcagccctgttccgatagtgattgcaagcgacgtctctttcctcctctgaagaattcagcct

SEQ ID NO: 6432 - DNA, 1086 bp, Zea mays; identical to SEQ ID NO: 6431
  Zm_smallRNAprecursor_1921

SEQ ID NO: 6433 - DNA, 1086 bp, Zea mays; identical to SEQ ID NO: 6431
  Zm_smallRNAprecursor_1922

SEQ ID NO: 6434 - DNA, 1086 bp, Zea mays; identical to SEQ ID NO: 6431
  Zm_smallRNAprecursor_1923

SEQ ID NO: 6435 - DNA, 1087 bp, Zea mays
  Zm_smallRNAprecursor_1924
ttctactatggcataagatttgaaaaatgcaccgacggatgtagcaaaggtggatagagatatagctacactaaactgaacatatacaataaacaataattcatgacgcaaagaagaaaaaaataactattggtttgaaaaaactgaataattgacatgtctccctcttttaatctctgcttgtggttaagcaatgagcttcctttatttagtgaaaagagatggaaaaaaaaactgaatgagtaatagtatgcataattctaaagcctacattgtcagctcatcctgatgccttgctgagaaaccagcaactaccaaatgccaacacgttgttgttgttgttgtttcgacaggccgggaagcatacacgaatcctactcatgtggcattcatgatgcttgatttaacaataaagattaaacaagcacataccggtggcgaaggaactcatctgtcagtcgcctccctacacgacgccttgcgtttgctggctgcgagagagtgaagctgcaacatgatctggtgaatccaagcgtcaccgacgatcgagcgagcactcgagacgcccgccggcgtctgagcagccagatcatgctggcagcttcaacctctcacagcagcaaagttttgggacgcgcagacgagcagaagaggagggagagtgtgaggagagcgtgcagtgcagctatagttttcgcgtgtgcgaaggaaggcaaagggacgggacggcgggccgagacgaaaccagagcgcgactgcgcgagccatgcacggacgacggaggtcggctgttattaagcagaggcactgcataaatgcatggtccctcgcgcgcccaccccccctcctcgtgacgctgccgttttgcccccggccggcccagacgcgctgtcgtgctctcgctgcgtctgcacgcattcgtatgagccgtctgcgttggtagtcctggcatgggcagctcggcctcggcgccatctggtccttgcgacccggccccccctcaggcctcagtgcaactaactaagcagccctgttccgatagtgattgcaagcgacgtctctttcctcctctgaagaattcagcctt

SEQ ID NO: 6436 - DNA, 1084 bp, Zea mays
  Zm_smallRNAprecursor_1925
tctactatggcataagatttgaaaaatgcaccgacggatgtagcaaaggtggatagagatatagctacactaaactgaacatatacaataaacaataattcatgacgcaaagaagaaaaaaataactattggtttgaaaaaactgaataattgacatgtctccctcttttaatctctgcttgtggttaagcaatgagcttcctttatttagtgaaaagagatggaaaaaaaaactgaatgagtaatagtatgcataattctaaagcctacattgtcagctcatcctgatgccttgctgagaaaccagcaactaccaaatgccaacacgttgttgttgttgttgtttcgacaggccgggaagcatacacgaatcctactcatgtggcattcatgatgcttgatttaacaataaagattaaacaagcacataccggtggcgaaggaactcatctgtcagtcgcctccctacacgacgccttgcgtttgctggctgcgagagagtgaagctgcaacatgatctggtgaatccaagcgtcaccgacgatcgagcgagcactcgagacgcccgccggcgtctgagcagccagatcatgctggcagcttcaacctctcacagcagcaaagttttgggacgcgcagacgagcagaagaggagggagagtgtgaggagagcgtgcagtgcagctatagttttcgcgtgtgcgaaggaaggcaaagggacgggacggcgggccgagacgaaaccagagcgcgactgcgcgagccatgcacggacgacggaggtcggctgttattaagcagaggcactgcataaatgcatggtccctcgcgcgcccaccccccctcctcgtgacgctgccgttttgcccccggccggcccagacgcgctgtcgtgctctcgctgcgtctgcacgcattcgtatgagccgtctgcgttggtagtcctggcatgggcagctcggcctcggcgccatctggtccttgcgacccggccccccctcaggcctcagtgcaactaactaagcagccctgttccgatagtgattgcaagcgacgtctctttcctcctctgaagaattcagcc

SEQ ID NO: 6437 - DNA, 1084 bp, Zea mays; identical to SEQ ID NO: 6436
  Zm_smallRNAprecursor_1926

SEQ ID NO: 6438 - DNA, 1085 bp, Zea mays
  Zm_smallRNAprecursor_1927
tctactatggcataagatttgaaaaatgcaccgacggatgtagcaaaggtggatagagatatagctacactaaactgaacatatacaataaacaataattcatgacgcaaagaagaaaaaaataactattggtttgaaaaaactgaataattgacatgtctccctcttttaatctctgcttgtggttaagcaatgagcttcctttatttagtgaaaagagatggaaaaaaaaactgaatgagtaatagtatgcataattctaaagcctacattgtcagctcatcctgatgccttgctgagaaaccagcaactaccaaatgccaacacgttgttgttgttgttgtttcgacaggccgggaagcatacacgaatcctactcatgtggcattcatgatgcttgatttaacaataaagattaaacaagcacataccggtggcgaaggaactcatctgtcagtcgcctccctacacgacgccttgcgtttgctggctgcgagagagtgaagctgcaacatgatctggtgaatccaagcgtcaccgacgatcgagcgagcactcgagacgcccgccggcgtctgagcagccagatcatgctggcagcttcaacctctcacagcagcaaagttttgggacgcgcagacgagcagaagaggagggagagtgtgaggagagcgtgcagtgcagctatagttttcgcgtgtgcgaaggaaggcaaagggacgggacggcgggccgagacgaaaccagagcgcgactgcgcgagccatgcacggacgacggaggtcggctgttattaagcagaggcactgcataaatgcatggtccctcgcgcgcccaccccccctcctcgtgacgctgccgttttgcccccggccggcccagacgcgctgtcgtgctctcgctgcgtctgcacgcattcgtatgagccgtctgcgttggtagtcctggcatgggcagctcggcctcggcgccatctggtccttgcgacccggccccccctcaggcctcagtgcaactaactaagcagccctgttccgatagtgattgcaagcgacgtctctttcctcctctgaagaattcagcct

SEQ ID NO: 6439 - DNA, 1085 bp, Zea mays; identical to SEQ ID NO: 6438
  Zm_smallRNAprecursor_1928

SEQ ID NO: 6440 - DNA, 1083 bp, Zea mays
  Zm_smallRNAprecursor_1929
ctactatggcataagatttgaaaaatgcaccgacggatgtagcaaaggtggatagagatatagctacactaaactgaacatatacaataaacaataattcatgacgcaaagaagaaaaaaataactattggtttgaaaaaactgaataattgacatgtctccctcttttaatctctgcttgtggttaagcaatgagcttcctttatttagtgaaaagagatggaaaaaaaaactgaatgagtaatagtatgcataattctaaagcctacattgtcagctcatcctgatgccttgctgagaaaccagcaactaccaaatgccaacacgttgttgttgttgttgtttcgacaggccgggaagcatacacgaatcctactcatgtggcattcatgatgcttgatttaacaataaagattaaacaagcacataccggtggcgaaggaactcatctgtcagtcgcctccctacacgacgccttgcgtttgctggctgcgagagagtgaagctgcaacatgatctggtgaatccaagcgtcaccgacgatcgagcgagcactcgagacgcccgccggcgtctgagcagccagatcatgctggcagcttcaacctctcacagcagcaaagttttgggacgcgcagacgagcagaagaggagggagagtgtgaggagagcgtgcagtgcagctatagttttcgcgtgtgcgaaggaaggcaaagggacgggacggcgggccgagacgaaaccagagcgcgactgcgcgagccatgcacggacgacggaggtcggctgttattaagcagaggcactgcataaatgcatggtccctcgcgcgcccaccccccctcctcgtgacgctgccgttttgcccccggccggcccagacgcgctgtcgtgctctcgctgcgtctgcacgcattcgtatgagccgtctgcgttggtagtcctggcatgggcagctcggcctcggcgccatctggtccttgcgacccggccccccctcaggcctcagtgcaactaactaagcagccctgttccgatagtgattgcaagcgacgtctctttcctcctctgaagaattcagcc

SEQ ID NO: 6441 - DNA, 1083 bp, Zea mays; identical to SEQ ID NO: 6440
  Zm_smallRNAprecursor_1930

SEQ ID NO: 6442 - DNA, 1097 bp, Zea mays
  Zm_smallRNAprecursor_1931
ttctgtccggtcacttctcctctactgggcgcgcgcagtttttttttttgatgcttctgctcagcccgcgcaccatgctgcagcctttttctctctgttcggtcatttctcctcacagccatgcatgcgtgtcaggggcatcagcaatttttctttcctgtccagtcgcttccagcagctgcgcgcaaaaattttttagccccacactactgccgtgtgcgcagccttttggtcttgtgaccagtcactgtgtcacccgcgcagcaaggaaactatttttttgtcactttcatgcagcagtgtgagggatacagggcgcgcagaacttttcttttgcgcagttcttttttcttttgtcatccggtctcatctgcacagacacttggttctgatttttttttggcgcatggaatctccgcagtacactttttcagaatcctgcgtcagaaatttgattttttggcatcttccctctgctgtttctggttctctgaccacactggtcagaaccagctgaactggcccttgggggcggttgaactggtcctgaggaccagctcaactgcctatatatacttgactctccccttctcttctcccacttcattcactctcgccttagtcgcttcacaacctttagagccactctttcacacacctcaaccggttcacagtttcaccacctttttcaatcatggtgcgtcgtcgcaacccctctgtgattgagtttagcagcgactccgacgagattcaggaggaatctcccgtcccctctcctccgcctcgtcgctccctctctaagagaggacgtggctctggtcagatggatggcgagggctcttccatgccctcgcagccgactcgcgggagacgccaaaaggttggcgcctctcgtcctcgtcgtagcacgtcttcctctgggtatgctccctgccaggaggaggatggggctttcgacgacttcgtcgaccttccggcgcctgatgctctctacgtcaccggactccacatgcatccggcgaacgtcagccgcggtccgcatgaatctcctgttgacttcactctgaagggaatagacacccttcatcgtctgaggt

SEQ ID NO: 6443 - DNA, 1149 bp, Zea mays
  Zm_smallRNAprecursor_1932
tgaccagtcactgtgtcacccgcgcagcaaggaaactatttttttgtcactttcatgcagcagtgtgagggatacagggcgcgcagaacttttcttttgcgcagttcttttttcttttgtcatccggtctcatctgcacagacacttggttctgatttttttttggcgcatggaatctccgcagtacactttttcagaatcctgcgtcagaaatttgattttttggcatcttccctctgctgtttctggttctctgaccacactggtcagaaccagctgaactggcccttgggggcggttgaactggtcctgaggaccagctcaactgcctatatatacttgactctccccttctcttctcccacttcattcactctcgccttagtcgcttcacaacctttagagccactctttcacacacctcaaccggttcacagtttcaccacctttttcaatcatggtgcgtcgtcgcaacccctctgtgattgagtttagcagcgactccgacgagattcaggaggaatctcccgtcccctctcctccgcctcgtcgctccctctctaagagaggacgtggctctggtcagatggatggcgagggctcttccatgccctcgcagccgactcgcgggagacgccaaaaggttggcgcctctcgtcctcgtcgtagcacgtcttcctctgggtatgctccctgccaggaggaggatggggctttcgacgacttcgtcgaccttccggcgcctgatgctctctacgtcaccggactccacatgcatccggcgaacgtcagccgcggtccgcatgaatctcctgttgacttcactctgaagggaatagacacccttcatcgtctgaggtttaccaaccctactctcactcctcgtcatcctggtgtccaggaccctcggttctggaatcttttccaggctgacttctacaattctgtcattctttccaagaaacacccagtcgtccgatatagatttattgactgggagggttgtgagaatatgggagatgctgacatgtcgtcagctctcgtaaacttagagagaaaggggttacgaaacattatgaccatggaatacccctggaacgatgaggtggtagctcagttctatgccaccctctggataaagaaagtaga

SEQ ID NO: 6444 - DNA, 1058 bp, Zea mays
  Zm_smallRNAprecursor_1933
cagaaatgttgcggcacatggagaaaaatgccgcaaacccatggaccaagcgagcacccatcccgcggccacgaccacgaccacgaccatgagcatgtggcatgggagatccgcggccaggagagggacgcgaggcagcagcggggggagaggaggatggatgatggggaggctggcgaggtggctcagtggaggaggcaggggcctccagaccgtgagggagcccgcttcgtacgagcagctgggttggaggaatcaacccagtagggtacgtagcgggagtgtttgacgggtttttcgaagtgggtctgggtgaccacttcgatcatcttcatgataaagggtgcatgaagacaccctctgagaggagaccaggaagcacggatgatctcttcctagatcatgtcaaacacattgatgcaggcgagactatttggagcaaggaggaggaggaagactcgactctccccaaggacgttcatttgatttccgcccttcgggagaacggtcatccgggacaaagaattaaggtacctgtagtacctatgcatgttagcggttgtccagaactcccgctcagtagagacatgaatgaattccgtatcttcccgcatgggcagccgaatgtcatgcactcgcatgttgctgccctgaatatctgcatcagagaagcccataatatgggcaaaacgacgataactgactttgtgccagttaccctggatgaagaaatacatgactgggtaatcatacccatcggcttcctcatctactttctttatccagagggtggcatagaactgagctaccacctcatcgttccaggggtattccatggtcataatgtttcataacccctttctctctaagtttacgagagctgacgacatgtcagcatctcccatattctcacaaccctcccagtcaataaatctatgtcggacgactgggtgtttcttggaaagaatgacagaattgtagaagtcagcctggaaaagattccagaatcgagggtcctagacaccaggatgacgaggagtgagagtagggttggtaaa

SEQ ID NO: 6445 - DNA, 1057 bp, Zea mays
  Zm_smallRNAprecursor_1934
agaaatgttgcggcacatggagaaaaatgccgcaaacccatggaccaagcgagcacccatcccgcggccacgaccacgaccacgaccatgagcatgtggcatgggagatccgcggccaggagagggacgcgaggcagcagcggggggagaggaggatggatgatggggaggctggcgaggtggctcagtggaggaggcaggggcctccagaccgtgagggagcccgcttcgtacgagcagctgggttggaggaatcaacccagtagggtacgtagcgggagtgtttgacgggtttttcgaagtgggtctgggtgaccacttcgatcatcttcatgataaagggtgcatgaagacaccctctgagaggagaccaggaagcacggatgatctcttcctagatcatgtcaaacacattgatgcaggcgagactatttggagcaaggaggaggaggaagactcgactctccccaaggacgttcatttgatttccgcccttcgggagaacggtcatccgggacaaagaattaaggtacctgtagtacctatgcatgttagcggttgtccagaactcccgctcagtagagacatgaatgaattccgtatcttcccgcatgggcagccgaatgtcatgcactcgcatgttgctgccctgaatatctgcatcagagaagcccataatatgggcaaaacgacgataactgactttgtgccagttaccctggatgaagaaatacatgactgggtaatcatacccatcggcttcctcatctactttctttatccagagggtggcatagaactgagctaccacctcatcgttccaggggtattccatggtcataatgtttcataacccctttctctctaagtttacgagagctgacgacatgtcagcatctcccatattctcacaaccctcccagtcaataaatctatgtcggacgactgggtgtttcttggaaagaatgacagaattgtagaagtcagcctggaaaagattccagaatcgagggtcctagacaccaggatgacgaggagtgagagtagggttggtaaa

SEQ ID NO: 6446 - DNA, 1058 bp, Zea mays
  Zm_smallRNAprecursor_1935
agaaatgttgcggcacatggagaaaaatgccgcaaacccatggaccaagcgagcacccatcccgcggccacgaccacgaccacgaccatgagcatgtggcatgggagatccgcggccaggagagggacgcgaggcagcagcggggggagaggaggatggatgatggggaggctggcgaggtggctcagtggaggaggcaggggcctccagaccgtgagggagcccgcttcgtacgagcagctgggttggaggaatcaacccagtagggtacgtagcgggagtgtttgacgggtttttcgaagtgggtctgggtgaccacttcgatcatcttcatgataaagggtgcatgaagacaccctctgagaggagaccaggaagcacggatgatctcttcctagatcatgtcaaacacattgatgcaggcgagactatttggagcaaggaggaggaggaagactcgactctccccaaggacgttcatttgatttccgcccttcgggagaacggtcatccgggacaaagaattaaggtacctgtagtacctatgcatgttagcggttgtccagaactcccgctcagtagagacatgaatgaattccgtatcttcccgcatgggcagccgaatgtcatgcactcgcatgttgctgccctgaatatctgcatcagagaagcccataatatgggcaaaacgacgataactgactttgtgccagttaccctggatgaagaaatacatgactgggtaatcatacccatcggcttcctcatctactttctttatccagagggtggcatagaactgagctaccacctcatcgttccaggggtattccatggtcataatgtttcataacccctttctctctaagtttacgagagctgacgacatgtcagcatctcccatattctcacaaccctcccagtcaataaatctatgtcggacgactgggtgtttcttggaaagaatgacagaattgtagaagtcagcctggaaaagattccagaatcgagggtcctagacaccaggatgacgaggagtgagagtagggttggtaaac

SEQ ID NO: 6447 - DNA, 1171 bp, Zea mays
  Zm_smallRNAprecursor_1936
cgcatgggcagccgaatgtcatgcactcgcatgttgctgccctgaatatctgcatcagagaagcccataatatgggcaaaacgacgataactgactttgtgccagttaccctggatgaagaaatacatgactgggtaatcatacccatcggcttcctcatctactttctttatccagagggtggcatagaactgagctaccacctcatcgttccaggggtattccatggtcataatgtttcataacccctttctctctaagtttacgagagctgacgacatgtcagcatctcccatattctcacaaccctcccagtcaataaatctatgtcggacgactgggtgtttcttggaaagaatgacagaattgtagaagtcagcctggaaaagattccagaatcgagggtcctagacaccaggatgacgaggagtgagagtagggttggtaaacctcagacgctgaagggtgtctattcccttcagagtgaagtcgacgggagattcatgcggaccgcggctgacgttcgccggatgcatgtgcagtccggtgacgtagagagcatcaggcgacggaaggtcgacgaagtcgtcgaaagccccatcctcctcctggcagggagcatacccagaggaagacgtgctacgacgaggatgagaggcgccaaccttttggcgtctcccgcgagtcggctgcgaaggcatagaagagccctcgccatccttccgaccagagccatgtcctctcttagagagggagcgacgaggcggaggagaggggacgggagattcctcctgaatctcgtcggagtcgctgctaaactcaatcacagaggggttgcgacgacgcaccatgattgaaaaggtggtgaaactgagaaccggttgaagtgtgtgaaggagaggctctaaaggttgtgaagcgaccaaggcgagagtgaatgaagtgggagaagagaaggggagagtcaagtatatataggcagttgagctggtcctcaggaccagttcaaccgcccccatgggccagttcagctggttctgaccagtgtggtcagagaaccagaaacagcagagggaagatgccaaaaaaattgtttccttgctgcgcaggtgacacagtgactggccacaagagcgaaaggctgcgcacacgacagtagtgtggggctgta

SEQ ID NO: 6448 - DNA, 1040 bp, Zea mays
  Zm_smallRNAprecursor_1937
ctgctgagcggcaacaagcaaaaaaagagtactctgcgcgcgccgcaggggaagtgaccagacgcagaggaaatgaccggtcatgcaggatgcgaccaaaaaaaaattcacgccaggctgtcagcagaaggaggcgaccggtcaataggaaaaaaaggtgctgcacgccccagcaggatgtgaccggaaaaaaaaatcctgcgcgtctgacactgctgcagctgacagacctgcgtgaacaggcctgcgcggacagaacgggcagagactggttcaaccggtccactatgccggttcaaccggttttaaccaggatggtcctggtaaaaactggttaaaaccagctgagctgaagttcagctccgaagttcagctggtctcctccagctgaactagaaagttcagctggtcaagccagttgagcccaaaaaaaaaaatcttagcacagaaattcattcgaattttaacattttcaccaagtttttgaaagatcatcacaaagctttaaaactatcaatcaaaaatagtgaatcaaacaatttttgtgaccgttttcaagatagttacgagaatccaagatatttaattcactcctaagaaagcaaaacctagtctcatcgaggggttttgtgaagatatcagctagttgattttcggtgctcacatgaaacaattcgatatctcctttggcttcgtggtctctcaagaaatggtgtctgatgtcaatatgtttagttctagagtgttgcacaaggttgtttgcaagttttatgacactctcattgtcacacaaaagtggaattttgataaactcacaaccaaaatctctaagggtttgcttcatccataacaactgtgcacaacatgccccagctgctatgtactcagcttctgcagtggaaagtgcaacacaattttgtttcttggaactccatgatactaaggatcgcccaaggaattggcaagtcccagtagtgctttttcgatctactttgcaaccggcataatctgagtcagaatagccaagtaaatcgaaaagg

SEQ ID NO: 6449 - DNA, 1125 bp, Zea mays
  Zm_smallRNAprecursor_1938
atttgatgcctggagcacaactctccatggggagaccccacactaccatcggcgctacggagtttcacttctgagttcggcatggggtcaggtgggaccaccgcgctacggccgccaggcaaattctgttttatcagaccgcttctgcgttctgatttaatctgtatcaggctgaaaatcttctctcatccgccaaaacagcttcggcgttgtaaggttaagcctcacggttcattagtaccggttagctcaacgcatcgctgcgcttacacacccggcctatcaacgtcgtcgtcttcaacgttccttcaggacccttaaagggtcagggagaactcatctcggggcaagtttcgtgcttagatgctttcagcacttatctcttccgcatttagctaccgggcagtgccattggcatgacaacccgaacaccagtgatgcgtccactccggtcctctcgtactaggagcagcccccctcagttctccagcgcccacggcagatagggaccgaactgtctcacgacgttctaaacccagcttcgcgtaccactttaaatggcgaacagccataccctttgggacctacttcagccccaggatgtgatgagccgacatcgaggtgccaaacaccgccgtcgatatgaactcttgggcggtatcagcctgttatccccggagtaccttttatccgttgagcgatggcccttccattcagaaccaccggatcactatgacctgctttcgcacctgctcgcgccgtcacgctcgcagtcaagctggccttatgccattgcactaacctcctgatgtccgaccaggaatagccaccttcgtgctcctcgttactctttagaggagaccgccccagtcaactacccaccagacactgtccgcaacccggatcacgggtccacgttagaacatcaaacattaaagggtggtatatcaagaaaaaaaaaaaatgcagactggcgtccacacttcaaagcctcccacctatcctacacatcaaggctcaatgttcagtgtcaagctatagtaaaggttcacggggtctttccgtcttgccgcgggtacactgcatcttcacagcgagttcaatttcactgagtctcgggtggag

SEQ ID NO: 6450 - DNA, 1102 bp, Zea mays
  Zm_smallRNAprecursor_1939
tagtacgtccactctaacatggttagtgcgttcactctaacagtcatgaccacatttcaagtacacattggattctattcatcaactttgtgtccatgcctccatggtgatggcactgagcaatatttcccttcgtcgttgtatgatttatttcagacattaacagttccaacacaagactagacgtagtgggactgtgggagtgagaaacttgatatttacactgattagaacccctttcttgtttgcctcttctcttctctctgtttcttttgctccttgttgtacagttagcatgtgtgttgggttcaatgttattctttggttgctctttattacttgtaactgccggcagttcttctggttccagaaaaggcagtgggagtgagaagctgtttacccgtcaccagaaaacttaaacatagtgaagctggttgtagctctcttcttattggtctcctaaactgctctggacttgggtgtgttagaatactgttagggcttgtttgggagtaaaggtaatggagtggattggagggcatataatcctccactattcaattttagatagcaagggattatagtcctatcaatacccttcattccacttgctcccaaacaagcccttagggtttcgtccctgtatgattacttgtataccctcagtgtaatgggcttggcccaattactcagcctgtatatatgcaggcccaaccagttagggttagggttttttctccaacttggtaccagagctaggttttccctttttttctccctacccaccaacagggaaactataactttgtcaaaacggttcaggatcaggtgtaaataggtgttaatgcagactgcgaaccagttttgagttcagatggggtatttgtatccttgctaaaaccagtttgactacaaaccacataattatattttttaaatacacaaatcttctggctacagtgtgtttaagtcgataatgtatggggtgcttttttcctcaaaaaagaagagagtttttttatatttcaaatgttttgtggagccctaaaccctaacagtgtaagaagttttgtgatcgataatactgccactcttactaaaa

SEQ ID NO: 6451 - DNA, 1051 bp, Zea mays
  Zm_smallRNAprecursor_1940
agcagtgagctgcaggtacctaggggccgtgaggagaagctgaaatgggagacgaggaggccagagaagtgcggcgggcagcccaagtgcacctcgctcatcacctgctcatcctcggctccgccgcctgcggcttccattgcggtaggcggtggccggtgggctctcctcgtgcgcaacctattcagacgggcacctcgctctcaaaacctagactgagagaggagggaggcccgcccttataagtgcaacacggtccccttggctaggcgaggtggtactaacccagagcgtgcataccggtctctcacatcccaccccctaagaggcccaaagctctcccaggcagtagcggcaatatgggctccgataccaattgtaacgcacccattgggtcagtccgcccaaagctcaccatcgccagcgtcggacgttcatgcgctcgtgcgcaacctattcagacgggcacctcgctctcaaaacctaggctgagagaggagggaggcccgcccttataagtgcaacacggcccccttggctaggcgaggtggtactaacccagggcgtgcataccggtctctcacagtttcttgttctccatttttgtattcgatgggtggatgaatgtttactatttgtaattaattaatttggttcgtctacagtttgtatcctaataccaatattcctttaaacctgtgtaggaaaaagaagcagagaaaacataccacaacaccgtggtttgtgttggacaccaaaatgagcggacggtccggcccattggcccggacggtccgcgtgtcccgagattagattaactcggatgtttatccttatctcgtgcgtggttattcatctaatcacgtgggagtttgttggctatctcttaggaaaaggtccagacctcctcccctataaatataaaggggtacggccgattgagaaccccaaacacattccaatcgaaccaattatcttatttacttttcctgtcctaggagtagatgtagcataattctagttgtagccttccgcatatccaccttcaccc

SEQ ID NO: 6452 - DNA, 1055 bp, Zea mays
  Zm_smallRNAprecursor_1941
atatgcagggttttcgccaatctccataaaatcggcgtttacagacaaattgtccttattttacatgaaccggagggacctggacaaagcctcaggatagagtaatatgtaattaaacacagggaattcaagatagttgaaatttcagttctggtatgtaaaagcaggccaagtcatattcatacttgattattttgttaacaaattggaagtttcgggcatccgacacttgtgatttttcgaccatatgtcgtctgctacacatctgtgtttcaaaggagtgttgcaatccaaaagtagagatgaaactgttgcaatctaattgtaggtctacagacaataaaatactgttttcctttattatatactccccttttgtcgtgaaatatatctaaatgatttattaataaaatacggagtatggtaaaggaccactttgccccctcacgagtaagggatgtttggttcataagactaaactttgatcccttccttttagtttattttagtccctaaattattaaatataaggactaaaagacacctctttttagtttattttagtccctaaattattaaatatgaggactaaaagagaataaattagatttcattcccctttagttttatttttgataatttaaggattaaaaaagagggactaaagtttagtctcatgaaatcaaacatgttctaggaggtgtttaatttcatccaactaaagtttagtctatatcacattgaatatttcaaaaataattatggatattaaatattgtctaattataaaaccaattaaatagaaaaacgacaaatgtattaaatataattaagtatatatttaatacttataattgatatttaaatatttgatttcatatgaaccaattaaataggtaaaaacggcaaatgtattcaatataattaagtatatatttaatacttataattgatatttaaatatttgatttcatataaactaaactttagtaaacgaatcaaacaataaattgaggattgaggatccataacactttatattttaataataattt

SEQ ID NO: 6453 - DNA, 1167 bp, Zea mays
  Zm_smallRNAprecursor_1942
tattttggtctgcttaaatcataaacatagtttatgagtagttcggtatataaatttgttttaccttgtgatccttcaaatttagtatattgtttgaatttggaatgcatctttcattgtgtttggacaaagctttagtcaatgattacttaattaatatgcagatatgcttttgtgatacaaaacataactttcttatcatatgaacctagtaacattcaatacatcttttttgtgctcttctaaatgtgatttcttttaaactaactcaattaaatcttccagtggaaagcatgggcctctgaagttatcctctaccagattgatcagcattccagaatatttcaagtaagtgtctttgcttgacagggcacctatgaaccgtctcattgaagatattgacaatgacctcccgttcttaacccatgatagggttcgcaagctaatgagatctggattactccctttgtatttcagcaagacatgtggtttatcgattcctgacaccgatttcattgaagaaaaccttggtgtgctgcctgagttggatttactggtattcagatcactgaacatgagtcgctctgagtctgaaatagataattgctacaagtcatttgtgaagctcttcaaggctcttgtgggtaagtatgctgcaagggatgcaatcttcaagctacccaagtcactttatctgcatttgaagtaccttgagttgtctattgtcaaggactatcgtgtgatatatggtacatccctcttccccaagcttttgatctctataatgtactgcgaagtgcatcgacttttgagggagcagtgtccggcacgtggactgggtgctgcagccaatgcaatcatggtgacgattgaagagaaaatctttaacttcatgaagtcatgcagcacaaatactctgctaattagctattctggtgctcatggtgagagggcaaagaagcacattgtgggcagtgaagatagaggagatgaggcgctgacatctgaagttagtgatgacactaaagatctcaaagcgtcgaatgtcccactgaaagttagaaattttatgggtaacaaggagcttagtgttaagggcaaaagaactaccgcagaaggaaacgttgagattgttacaggagatgagctgacaactactctcttgga

SEQ ID NO: 6454 - DNA, 1174 bp, Zea mays
  Zm_smallRNAprecursor_1943
ttgatctctataatgtactgcgaagtgcatcgacttttgagggagcagtgtccggcacgtggactgggtgctgcagccaatgcaatcatggtgacgattgaagagaaaatctttaacttcatgaagtcatgcagcacaaatactctgctaattagctattctggtgctcatggtgagagggcaaagaagcacattgtgggcagtgaagatagaggagatgaggcgctgacatctgaagttagtgatgacactaaagatctcaaagcgtcgaatgtcccactgaaagttagaaattttatgggtaacaaggagcttagtgttaagggcaaaagaactaccgcagaaggaaacgttgagattgttacaggagatgagctgacaactactctcttggacgttgtgaatactattcagcgcactactactggatatgatcagattcgttcagcaaagaaaaaagttatgtcacacgtcaaacagatgaggatgtgccagattcggcttcttaagctgctacaagagaaagttatgcacaaagatctggaaattgatcttgaggacccagattccatgtcacagcttaagatcaatgacagaagcattcacaacttttaacttcacataggcattctttgggcactcaagataaatttccagatctttgtgcgtatctttctcttgtagcagcttaaaaagccgaatctggcacatcctcatctgtttgacgtgtgacattacttttttctttgttaaacgaatctgatcatatccagtagtagtgcgctgaatagtattcacagcgtccaaaagagtagttgtcatctcatctcctggaacaatctcaacgtttccttttgcggtagttcttttgccctcaacactgagcttcttgttgcccataaaatttctaactttcagggggacattcgacgctttgagatctttagcgtcatcactaacttcaaatgtcagtgcctcatctccatcttcactgacccaatgtgcttttttgccctctcaccatgagcaccagaatagctaattagcagagcatttgtactgcaagacttcatgaagtcaaagattttctcttcaatcgtcaccatgattgcattgcctgcagcaccctatccatgtgtcgggcacaactcactcaaaagtcgatgcatttcgc

SEQ ID NO: 6455 - DNA, 1123 bp, Zea mays
  Zm_smallRNAprecursor_1944
gcatcgacttttgagggagcagtgtccggcacgtggactgggtgctgcagccaatgcaatcatggtgacgattgaagagaaaatctttaacttcatgaagtcatgcagcacaaatactctgctaattagctattctggtgctcatggtgagagggcaaagaagcacattgtgggcagtgaagatagaggagatgaggcgctgacatctgaagttagtgatgacactaaagatctcaaagcgtcgaatgtcccactgaaagttagaaattttatgggtaacaaggagcttagtgttaagggcaaaagaactaccgcagaaggaaacgttgagattgttacaggagatgagctgacaactactctcttggacgttgtgaatactattcagcgcactactactggatatgatcagattcgttcagcaaagaaaaaagttatgtcacacgtcaaacagatgaggatgtgccagattcggcttcttaagctgctacaagagaaagttatgcacaaagatctggaaattgatcttgaggacccagattccatgtcacagcttaagatcaatgacagaagcattcacaacttttaacttcacataggcattctttgggcactcaagataaatttccagatctttgtgcgtatctttctcttgtagcagcttaaaaagccgaatctggcacatcctcatctgtttgacgtgtgacattacttttttctttgttaaacgaatctgatcatatccagtagtagtgcgctgaatagtattcacagcgtccaaaagagtagttgtcatctcatctcctggaacaatctcaacgtttccttttgcggtagttcttttgccctcaacactgagcttcttgttgcccataaaatttctaactttcagggggacattcgacgctttgagatctttagcgtcatcactaacttcaaatgtcagtgcctcatctccatcttcactgacccaatgtgcttttttgccctctcaccatgagcaccagaatagctaattagcagagcatttgtactgcaagacttcatgaagtcaaagattttctcttcaatcgtcaccatgattgcattgcctgcagcaccctatccatgtgtcgggcacaac

SEQ ID NO: 6456 - DNA, 1112 bp, Zea mays
  Zm_smallRNAprecursor_1945
gacttttgagggagcagtgtccggcacgtggactgggtgctgcagccaatgcaatcatggtgacgattgaagagaaaatctttaacttcatgaagtcatgcagcacaaatactctgctaattagctattctggtgctcatggtgagagggcaaagaagcacattgtgggcagtgaagatagaggagatgaggcgctgacatctgaagttagtgatgacactaaagatctcaaagcgtcgaatgtcccactgaaagttagaaattttatgggtaacaaggagcttagtgttaagggcaaaagaactaccgcagaaggaaacgttgagattgttacaggagatgagctgacaactactctcttggacgttgtgaatactattcagcgcactactactggatatgatcagattcgttcagcaaagaaaaaagttatgtcacacgtcaaacagatgaggatgtgccagattcggcttcttaagctgctacaagagaaagttatgcacaaagatctggaaattgatcttgaggacccagattccatgtcacagcttaagatcaatgacagaagcattcacaacttttaacttcacataggcattctttgggcactcaagataaatttccagatctttgtgcgtatctttctcttgtagcagcttaaaaagccgaatctggcacatcctcatctgtttgacgtgtgacattacttttttctttgttaaacgaatctgatcatatccagtagtagtgcgctgaatagtattcacagcgtccaaaagagtagttgtcatctcatctcctggaacaatctcaacgtttccttttgcggtagttcttttgccctcaacactgagcttcttgttgcccataaaatttctaactttcagggggacattcgacgctttgagatctttagcgtcatcactaacttcaaatgtcagtgcctcatctccatcttcactgacccaatgtgcttttttgccctctcaccatgagcaccagaatagctaattagcagagcatttgtactgcaagacttcatgaagtcaaagattttctcttcaatcgtcaccatgattgcattgcctgcagcaccctatccatgtgtcggg

SEQ ID NO: 6457 - DNA, 1191 bp, Zea mays
  Zm_smallRNAprecursor_1946
ctcgagtcgagagcctggacgacgacttgtggttgtgggcttgtacacctgccgccagtcgtcgatcttggctacccctcactcaggaagaactgtttttctttacctgaagaaacaagaccacaggcagtggccctcgctccgtgcttgctcaaaagcccatagctcatttacattactttgacgcttttatcttgaagtaactatacccgcatcacttctctgcaaaaaaaaaaaagaaagaaagaaagaaagaaagaaaaagagagagaaaatctagcccccaaaagtagggcgacttcaagtcttcaacattctccgacggatcctatatgtatatacgcgcgcgtatcgtctctactaccaaaagcgagacagcaaagcttccaagcattattctgtctactcgttccctttcagccagtagctacatgtatctgttctgtatttaggattattaaacaggggatatcttataattcagctcatgagttccataagatttatcacacggcttaactataacttatgcgagacaaattccaaagaaagttatatatatagtagatttccttaatttatttatcctacaaaacacatctttgtgtctcgacagtaaccatatttgggaggataaataaattaaacaaaccagctacataccttcttttaaaatttctctagccaagttgtagttgaagcctgtgatgaatcttaaaaaacttatgagtcgaattgtacaagaaatacactgttcaataattccaaatacaatactgtgcctgaatcctggcagaggaagtaatagtgtattgctctgaagtaccgtgcctgtggctgcctgcaagctggtaaccttattatttgcaggggtatggtgctcgcctggatccgaggctgaagagagaagaactagatagaggtgctaatagtgccatagaggtgcaggtgtgggctactgggcttgacggacgaagggcgtgcgctagctactacctctccaatgcgccgagcgaggcgagagagaacactactagtatctacttccttaaaacttgaagcccttccgagctctgtccgcgtttcacgcgctcacagccctccacggcgcgacgtgtgggcctatagtcggactctacgtccatggtctgtcccaccctctccaacccaccaggccaccacgacaccacc

SEQ ID NO: 6458 - DNA, 1192 bp, Zea mays
  Zm_smallRNAprecursor_1947
ctcgagtcgagagcctggacgacgacttgtggttgtgggcttgtacacctgccgccagtcgtcgatcttggctacccctcactcaggaagaactgtttttctttacctgaagaaacaagaccacaggcagtggccctcgctccgtgcttgctcaaaagcccatagctcatttacattactttgacgcttttatcttgaagtaactatacccgcatcacttctctgcaaaaaaaaaaaagaaagaaagaaagaaagaaagaaaaagagagagaaaatctagcccccaaaagtagggcgacttcaagtcttcaacattctccgacggatcctatatgtatatacgcgcgcgtatcgtctctactaccaaaagcgagacagcaaagcttccaagcattattctgtctactcgttccctttcagccagtagctacatgtatctgttctgtatttaggattattaaacaggggatatcttataattcagctcatgagttccataagatttatcacacggcttaactataacttatgcgagacaaattccaaagaaagttatatatatagtagatttccttaatttatttatcctacaaaacacatctttgtgtctcgacagtaaccatatttgggaggataaataaattaaacaaaccagctacataccttcttttaaaatttctctagccaagttgtagttgaagcctgtgatgaatcttaaaaaacttatgagtcgaattgtacaagaaatacactgttcaataattccaaatacaatactgtgcctgaatcctggcagaggaagtaatagtgtattgctctgaagtaccgtgcctgtggctgcctgcaagctggtaaccttattatttgcaggggtatggtgctcgcctggatccgaggctgaagagagaagaactagatagaggtgctaatagtgccatagaggtgcaggtgtgggctactgggcttgacggacgaagggcgtgcgctagctactacctctccaatgcgccgagcgaggcgagagagaacactactagtatctacttccttaaaacttgaagcccttccgagctctgtccgcgtttcacgcgctcacagccctccacggcgcgacgtgtgggcctatagtcggactctacgtccatggtctgtcccaccctctccaacccaccaggccaccacgacaccaccc

SEQ ID NO: 6459 - DNA, 1190 bp, Zea mays
  Zm_smallRNAprecursor_1948
tcgagtcgagagcctggacgacgacttgtggttgtgggcttgtacacctgccgccagtcgtcgatcttggctacccctcactcaggaagaactgtttttctttacctgaagaaacaagaccacaggcagtggccctcgctccgtgcttgctcaaaagcccatagctcatttacattactttgacgcttttatcttgaagtaactatacccgcatcacttctctgcaaaaaaaaaaaagaaagaaagaaagaaagaaagaaaaagagagagaaaatctagcccccaaaagtagggcgacttcaagtcttcaacattctccgacggatcctatatgtatatacgcgcgcgtatcgtctctactaccaaaagcgagacagcaaagcttccaagcattattctgtctactcgttccctttcagccagtagctacatgtatctgttctgtatttaggattattaaacaggggatatcttataattcagctcatgagttccataagatttatcacacggcttaactataacttatgcgagacaaattccaaagaaagttatatatatagtagatttccttaatttatttatcctacaaaacacatctttgtgtctcgacagtaaccatatttgggaggataaataaattaaacaaaccagctacataccttcttttaaaatttctctagccaagttgtagttgaagcctgtgatgaatcttaaaaaacttatgagtcgaattgtacaagaaatacactgttcaataattccaaatacaatactgtgcctgaatcctggcagaggaagtaatagtgtattgctctgaagtaccgtgcctgtggctgcctgcaagctggtaaccttattatttgcaggggtatggtgctcgcctggatccgaggctgaagagagaagaactagatagaggtgctaatagtgccatagaggtgcaggtgtgggctactgggcttgacggacgaagggcgtgcgctagctactacctctccaatgcgccgagcgaggcgagagagaacactactagtatctacttccttaaaacttgaagcccttccgagctctgtccgcgtttcacgcgctcacagccctccacggcgcgacgtgtgggcctatagtcggactctacgtccatggtctgtcccaccctctccaacccaccaggccaccacgacaccacc

SEQ ID NO: 6460 - DNA, 1189 bp, Zea mays
  Zm_smallRNAprecursor_1949
cgagagcctggacgacgacttgtggttgtgggcttgtacacctgccgccagtcgtcgatcttggctacccctcactcaggaagaactgtttttctttacctgaagaaacaagaccacaggcagtggccctcgctccgtgcttgctcaaaagcccatagctcatttacattactttgacgctttttatcttgaagtaactatacccgcatcacttctctgcaaaaaaaaaaaaaagaaagaaagaaagaaagaaagaaagaaaaagagagagaaaatctagcccccaaaagtagggcgacttcaagtcttcaacattctccgacggatcctatatgtatatacgcgcgcgtatcgtctctactaccaaaagcgagacagcaaagcttccaagcattattctgtctactcgttccctttcagccagtagctacatgtatctgttctgtatttaggattattaaacaggggatatcttataattcagctcatgagttccataagatttatcacacggcttaactataacttatgcgagacaaattccaaagaaagttatatatagtagatttccttaatttatttatcctacaaaacacatctttgtgtctggacagtaaccatatttgggaggataaataaattaaacaaaccagctacataccttcttttaaaatttctctagccaagttgtagttgaagcctgtgatgaatcttaaaaaacttatgagtcgaattgtacaagaaatacactgttcaataattccaaatacaatactgtgcctgaatcctggcagaggaagtaatagtgtattgctctgaagtaccgtgcctgtggctgcctgcaagctggtaaccttattatttgcaggggtatggtgctcgcctggatccgaggctgaagagagaagaactagatagaggtgctaatagtgccatagaggtgcaggtgtgggctactgggcttgacggacgaagggcgtgcgctagctactacctctccaatgcgccgagcgaggcgagagagaacactactagtatactctatatatagggataggatctcgatctcgtcgtccctcctcttactatctagcttattcatacagcagttagctcttcactcaccggttggcactagagatggccaaacgggccacccggcccggtgaagcacggctcgttttgggcc

SEQ ID NO: 6461 - DNA, 1190 bp, Zea mays
  Zm_smallRNAprecursor_1950
cgagagcctggacgacgacttgtggttgtgggcttgtacacctgccgccagtcgtcgatcttggctacccctcactcaggaagaactgtttttctttacctgaagaaacaagaccacaggcagtggccctcgctccgtgcttgctcaaaagcccatagctcatttacattactttgacgctttttatcttgaagtaactatacccgcatcacttctctgcaaaaaaaaaaaaaagaaagaaagaaagaaagaaagaaagaaaaagagagagaaaatctagcccccaaaagtagggcgacttcaagtcttcaacattctccgacggatcctatatgtatatacgcgcgcgtatcgtctctactaccaaaagcgagacagcaaagcttccaagcattattctgtctactcgttccctttcagccagtagctacatgtatctgttctgtatttaggattattaaacaggggatatcttataattcagctcatgagttccataagatttatcacacggcttaactataacttatgcgagacaaattccaaagaaagttatatatagtagatttccttaatttatttatcctacaaaacacatctttgtgtctggacagtaaccatatttgggaggataaataaattaaacaaaccagctacataccttcttttaaaatttctctagccaagttgtagttgaagcctgtgatgaatcttaaaaaacttatgagtcgaattgtacaagaaatacactgttcaataattccaaatacaatactgtgcctgaatcctggcagaggaagtaatagtgtattgctctgaagtaccgtgcctgtggctgcctgcaagctggtaaccttattatttgcaggggtatggtgctcgcctggatccgaggctgaagagagaagaactagatagaggtgctaatagtgccatagaggtgcaggtgtgggctactgggcttgacggacgaagggcgtgcgctagctactacctctccaatgcgccgagcgaggcgagagagaacactactagtatactctatatatagggataggatctcgatctcgtcgtccctcctcttactatctagcttattcatacagcagttagctcttcactcaccggttggcactagagatggccaaacgggccacccggcccggtgaagcacggctcgttttgggccc

SEQ ID NO: 6462 - DNA, 1188 bp, Zea mays
  Zm_smallRNAprecursor_1951
gagagcctggacgacgacttgtggttgtgggcttgtacacctgccgccagtcgtcgatcttggctacccctcactcaggaagaactgtttttctttacctgaagaaacaagaccacaggcagtggccctcgctccgtgcttgctcaaaagcccatagctcatttacattactttgacgctttttatcttgaagtaactatacccgcatcacttctctgcaaaaaaaaaaaaaagaaagaaagaaagaaagaaagaaagaaaaagagagagaaaatctagcccccaaaagtagggcgacttcaagtcttcaacattctccgacggatcctatatgtatatacgcgcgcgtatcgtctctactaccaaaagcgagacagcaaagcttccaagcattattctgtctactcgttccctttcagccagtagctacatgtatctgttctgtatttaggattattaaacaggggatatcttataattcagctcatgagttccataagatttatcacacggcttaactataacttatgcgagacaaattccaaagaaagttatatatagtagatttccttaatttatttatcctacaaaacacatctttgtgtctggacagtaaccatatttgggaggataaataaattaaacaaaccagctacataccttcttttaaaatttctctagccaagttgtagttgaagcctgtgatgaatcttaaaaaacttatgagtcgaattgtacaagaaatacactgttcaataattccaaatacaatactgtgcctgaatcctggcagaggaagtaatagtgtattgctctgaagtaccgtgcctgtggctgcctgcaagctggtaaccttattatttgcaggggtatggtgctcgcctggatccgaggctgaagagagaagaactagatagaggtgctaatagtgccatagaggtgcaggtgtgggctactgggcttgacggacgaagggcgtgcgctagctactacctctccaatgcgccgagcgaggcgagagagaacactactagtatactctatatatagggataggatctcgatctcgtcgtccctcctcttactatctagcttattcatacagcagttagctcttcactcaccggttggcactagagatggccaaacgggccacccggcccggtgaagcacggctcgttttgggcc

SEQ ID NO: 6463 - DNA, 1172 bp, Zea mays
  Zm_smallRNAprecursor_1952
cttagagctattggataaattaagccatgttcaagcaaaatactgatgaattttaaattattaggccaataaattattcatggagcctgggctaattggtgggtatattttgttcctctgcctgttagcgattacaaggtaaaagacttctctctctctccttatatatatatgtataacacacacacacacacacacacacacacacatatatatatatatatatatatatatatatatggcacaaacaaactttattttgttggtttccttcttttggatgtgacatatatttcgccctaccagtgagcccgagtcaagctgctaccagaaacacaaagcaggtccacatgctatttggataacaatttccgtaagtatatatatggtctattttgatctagggttcttatctagtatcgtcagtgatatttaaaaaaaacattatgttgatatatatatatatcaacactggcagtgttttgcttttggactgctcggcaccgtttattctactttttccataggcagtgactacaaatgcatacatgtatgttaattattcacacaaagagattagtcataactattaacaaaactgatgaatgtgtggtttattaactgaaaatgcctcaaaccttccatgcagttgtggaacattgtagagtcagaagacgacgtaccatatgggtatggctttttccatttcgtcttcgcggtgggctccatgtacgtcgggatggtgtttgtcggttgggacaaacatcataccatgaagcagtaagttcacggatctaaaaaaattatctaatttcgtcaatggataagatataaataaagtgtgttcttttatgcatgggctctacatacatgcgtgtctgatacaatattttgcatgctttcaccccagatggagcgtggatattgggtggatgagcacatgggttcatatcgccaacgaggctctcttagtagtattctacagtaagtgacctactgtgccaaagaccctcaatataaccccacttagctcatcacacatccaagagtcaaataattggacacataatgcggagaacgaggaggatgacgattcttttagagaatgggagagtgattaaatgttttcatcatttaccaacaccctaactgtagataggcatcgacgatat

SEQ ID NO: 6464 - DNA, 1149 bp, Zea mays
  Zm_smallRNAprecursor_1953
catgcagagtctgccagcgcgcgtctttttttctttgcatgcagacgcgcagtgtccggtcacttccctggcgcacagaacttttttttgcatgcagtcgctgcgtctggtcacttcagctctgctgcgcgcgcagactttctttatttattttctctgtccagttacttctcctcgcgccatgcatattttctttctttcttgcctcgctcaagtgcagggagcgcagacatttttttgagcagtttttttggtcgctgcgcagcaaaaccagctgaactgggccatgggggcagttgaactggtcctgaggaccagctcaactgcctatatatatttgacactctctccttctcttttcccacttcattcactctcgccttggtcgcttcacatcctttagagcctttccttcacacacttcaaccgcttcacagtttcaccaccgttttcaatcatggtgcgtcgccgcaacccctctgtggttgagtttagcagcgactccgacgagattcaggaggaatctcccatcccctctcctccgcctcgtcgctccctctctaagagaggacgtggctctggtcggatgcctggcgagggctcttccttgccctcgcagccgactcgcgggagacgccaaaaggttggcgcctctcgtcctcgtcgtagcacgtcttcctcagggtatgctccctgccaagaggaggatggggctttcgacgacttcgtcgaccttccggcgcctgatgctctctacgtcaccggactgcacatgcatccggcgaacgtcagccgcggtccgcatgaatctcccatcgacttcactcagaagggaatcgagacccttcagcgtcttaggtttaccaaccctactctcactcctcgtcatcctggtgtccaggaccctcggttctggaatcttttccaggctgacttctacaattctgttattcttaccaagaaacacccagtcgtctgacatagatttattgactgggagggttgtgagaatatgggagatgctgacatgacgtcagctctcgaaaaccttgagagaaaggggttacgtaacattatgaccatggaatacccctggaacgatgaggtggtagctcagttctatgccaccctctggataaagaaagtaga

SEQ ID NO: 6465 - DNA, 1190 bp, Zea mays
  Zm_smallRNAprecursor_1954
agctctcgaaaaccttgagagaaaggggttacgtaacattatgaccatggaatacccctggaacgatgaggtggtagctcagttctatgccaccctctggataaagaaagtagatgaggaagccgataggtatgattacccagtcatttatttcttcatccagggtaactggcacaaagtcagttatcgtcgttttgcccatattctgggcttctctgatgcagacattcagggcagcaacatgcgagtgcatggcattcggctgcccaggcgggaagagacggaattcattcatgtctctactgagcgggagttctggacaaccgctaacatgcataggtactataggtaccttaattccttgtcccggatgaccgttctcccaaagggcggtaatcaaatgaacgtccttggggagagtcgagtcctcctcctcctccttgctccaaacagtctcgcccgcatcaatgtgtttgacatgatctgggaggagatcgtccgtgcttcctggtctcctcacagagggtgtcttcatgcaccctttatcatgaagatgatcgaagtggtcacccagacccacttcgaaaaacccgtcaaacactcccgctacgtaccctactgggttgattcctccaacccagctgctcgtacgaagcgggttccctcacggtctggaggccctgcctcctcctctgagccacctcgccagcctccccaccatccttcctcctctccccccgctgctgcctcgcgtccctctcctggccgcggatctcccatgccccgtgctcgtggtcgtggtcgaggtcgtggccgcgggatgggtgctcgcttggtcaatgggcttgcgacatttttctccatgtgccgcaacatttctgctgatgtccatgaggtggcacggcgtcagcgggagactgacgacaatcttcgtcgtcaagcttcctccatgggcatgccttttgtccctcgttcgcctgatgtgcctctccatcctcctcccccggagatcaatgagtggtaccagcaggcctacggggtgccttttatgcctgcagacgatgaagatgaagaagtctttgttgatgatcgcgaggagtttgccccgcctccctaccatggggatccgggtcaatcatcctcccaccctccgcctccttacccgggtcctggacccattcctggtgacc

SEQ ID NO: 6466 - DNA, 1133 bp, Zea mays
  Zm_smallRNAprecursor_1955
tcgagttttctggtgccggtcttgctgctgagctcggaggacttggaatttcctcttgagatggcctttttcttcttcctttgccctttccacttgcatggctttgttggagagatgcgagaaattgaggaagtcttggctagctaggatggtcttgagttctggtctgagtcccttcaggaagcgggccatcttcttgacttcggtgctgacgtcatccggcgcgtagcgggccaactccgtgaacttgtgcacgtactcactgacagatcttccgtcttgagtcagttcccggaattcatcttccttgagctgaacgatcccttggggcacatggtgctcctggaaagccgtttcaaactccgcccaggtagcatctctgatggtgacattgaaggtatcccactaggctaaggccatcccggaaagttgatgagcaaccagttgaacacgttgattttccaggcatccgattgcttccagctttcttttaatcatgcgcagccaatcgtcagcatcgaggggattgctagatccggcaaacgtgggaggcttgagcctcaggaaatcccccatcctgtcttgcggtcttccaccattcagacgttgattttccagacttcaagtgaggacctcgatgagtcgggtttggttggctagaacttgggctaaatctaagggtagttctggaggtgcgggaaggtgggtctcactttcctctctaccggcttctctttcagctctcaggggaaaccctgctccaatcccagaggtggtaggcgtggttttatccaaagcaatctgctagggggagagagtcactattatgcacatgccaattgttttcaaccaagttattttattcattacaccaatacattacaagcatacagctactacaagtcgtagtacacgcgagcgttctctgaggtactaccgaactctttttctaaagtgtccccaaattccttgaggtcatcaaggctagctagggacatatcctcgatgttggacaaattctctatcctggcgggagctggtgccggaggggccttcttccttcgctcaatttggcctccttggttcctggtcttcttttggattttcttcgtgggggcgagcttcttcagctt

SEQ ID NO: 6467 - DNA, 1058 bp, Zea mays
  Zm_smallRNAprecursor_1956
cagaaatgttgcggcacatggagaaaaatgccgcaagcccatggaccaagcgagcacccatcccgcggccacgacctcgaccacgaccacgagcacgtggcatgggagatccgcggccaggagagggacgcgaggcagcagcggggggagaggaggaaggatggtggggaggctggcgaggtggctcagaggaggaggcagggcctccagacccgtgagggaaccctcttcgtacgagcagctgggttggaggaatcaacccagtagggtacgtagcgggagtgtttgacgggtttttcgaagtgggtctgggtgaccacttcgattatcttcatgataaagggtgcatgaagacaccctctgtgaggagaccaggaagcacggacgatctcctcccagatcatgtcaaacacattgatgcgggcgagacagtttggagcaaggaggaggaggaggactcgactctccccaaggacgttcatttgattaccgccctttgggagaacggtcatccgggacaaagaattaaggtacctgtagtacctatgcatgttagcggttgtccagaactcccgctcagtagagacatgaatgaattccgtctcttcccgcatgggcagccgaatgccatgcactcgcatgttgctgccctgaatgtctgcatcagagaagcccagaatatgggcaaaacgacgataactgactttgtgccagttaccctggatgaagaaatacatgactgggtaatcatacccatcggcttcctcatctactttctttatccagagggtggcatagaactgagctaccacctcatcgttccaggggtattccatggtcataatgttacgtaacccctttctctcaaggtttacgagagctgacgacatgtcagcatctcccatattctcacaaccctcccagtcaataaatctatgtcggacgactgggtgtttcttggtaagaatgacagaattgtagaagtcagcctggaaaagattccagaaccgagggtcctggaacccaggatgacgaggagtgagggtggggttggtaaa

SEQ ID NO: 6468 - DNA, 1057 bp, Zea mays
  Zm_smallRNAprecursor_1957
agaaatgttgcggcacatggagaaaaatgccgcaagcccatggaccaagcgagcacccatcccgcggccacgacctcgaccacgaccacgagcacgtggcatgggagatccgcggccaggagagggacgcgaggcagcagcggggggagaggaggaaggatggtggggaggctggcgaggtggctcagaggaggaggcagggcctccagacccgtgagggaaccctcttcgtacgagcagctgggttggaggaatcaacccagtagggtacgtagcgggagtgtttgacgggtttttcgaagtgggtctgggtgaccacttcgattatcttcatgataaagggtgcatgaagacaccctctgtgaggagaccaggaagcacggacgatctcctcccagatcatgtcaaacacattgatgcgggcgagacagtttggagcaaggaggaggaggaggactcgactctccccaaggacgttcatttgattaccgccctttgggagaacggtcatccgggacaaagaattaaggtacctgtagtacctatgcatgttagcggttgtccagaactcccgctcagtagagacatgaatgaattccgtctcttcccgcatgggcagccgaatgccatgcactcgcatgttgctgccctgaatgtctgcatcagagaagcccagaatatgggcaaaacgacgataactgactttgtgccagttaccctggatgaagaaatacatgactgggtaatcatacccatcggcttcctcatctactttctttatccagagggtggcatagaactgagctaccacctcatcgttccaggggtattccatggtcataatgttacgtaacccctttctctcaaggtttacgagagctgacgacatgtcagcatctcccatattctcacaaccctcccagtcaataaatctatgtcggacgactgggtgtttcttggtaagaatgacagaattgtagaagtcagcctggaaaagattccagaaccgagggtcctggaacccaggatgacgaggagtgagggtggggttggtaaa

SEQ ID NO: 6469 - DNA, 1058 bp, Zea mays
  Zm_smallRNAprecursor_1958
agaaatgttgcggcacatggagaaaaatgccgcaagcccatggaccaagcgagcacccatcccgcggccacgacctcgaccacgaccacgagcacgtggcatgggagatccgcggccaggagagggacgcgaggcagcagcggggggagaggaggaaggatggtggggaggctggcgaggtggctcagaggaggaggcagggcctccagacccgtgagggaaccctcttcgtacgagcagctgggttggaggaatcaacccagtagggtacgtagcgggagtgtttgacgggtttttcgaagtgggtctgggtgaccacttcgattatcttcatgataaagggtgcatgaagacaccctctgtgaggagaccaggaagcacggacgatctcctcccagatcatgtcaaacacattgatgcgggcgagacagtttggagcaaggaggaggaggaggactcgactctccccaaggacgttcatttgattaccgccctttgggagaacggtcatccgggacaaagaattaaggtacctgtagtacctatgcatgttagcggttgtccagaactcccgctcagtagagacatgaatgaattccgtctcttcccgcatgggcagccgaatgccatgcactcgcatgttgctgccctgaatgtctgcatcagagaagcccagaatatgggcaaaacgacgataactgactttgtgccagttaccctggatgaagaaatacatgactgggtaatcatacccatcggcttcctcatctactttctttatccagagggtggcatagaactgagctaccacctcatcgttccaggggtattccatggtcataatgttacgtaacccctttctctcaaggtttacgagagctgacgacatgtcagcatctcccatattctcacaaccctcccagtcaataaatctatgtcggacgactgggtgtttcttggtaagaatgacagaattgtagaagtcagcctggaaaagattccagaaccgagggtcctggaacccaggatgacgaggagtgagggtggggttggtaaac

SEQ ID NO: 6470 - DNA, 1052 bp, Zea mays
  Zm_smallRNAprecursor_1959
aagacataaatacccttttgccaccaacagccacaaatatggagtgtggggtgcgggtgggggagcagggtaggtgaagtaagggcatgtttggtttgtggctaaatgtgccacactttgcctaaggttagtcatccgaattgaataactaaccttaggcagaaaagttagtcaaagtgtggcaattgaggtaacgaaccaaacatgccttaaatgttgagctttagcccactttagctccatcttgtgggctaatggagctaaaccgttttaggctgtctccagcaacgtcatctatatccatcctttagagtcttctctaaaagattccatcttctatatctccttcctctccgacaacgtcctttaaatcacatcctctatacgcaaatacctatattagagacatttttatttttttattttttgtacatacatatttgtcatactctcaaatgtattgtacatattttagttttgctaaaccagttatttaaagtattcaaatggatagagaaccgtttagagaaactatatatttagagaatctagcagtgtcctctaaatttagaggaccgtttagaggacgctgatgtagagcgtagatgaccgtttgatcctctatatttagggtagaagaggctttaggggcccttacaagagccagccttagtccctttttagccattgtgtctggtacattagctcttaaaatgactaaatgttagctcttttacattagcctaggagaaccaaataggccctgacaaaagaactgcttcaactatgagagggtgtcaacacttatgatgtactacttgacgaccattcactctacatgaaatcatgctttggtgcatacacgattattcagcattgtgcaccttttcaagttaaactactaaagattaaatgcatgtattcattgtgacaaaaatccattataaatatcactaatgaataagctatgctaccttggacaccatcattttcttccaagggggcacgtttggatgggaatcttggattttcatggacattctaagaacctt

SEQ ID NO: 6471 - DNA, 1094 bp, Zea mays
  Zm_smallRNAprecursor_1960
tcggcatctgcatagccaactatttgtagggaattagatcttctgtacgtaagcatgagacctttagtaccttgaaggtaccttagagccttcttgactgctttccagtgttctatgcctggattcttctgatagcgtccaagcatcccggtggtaaaagctaagtcagggcgagtacatacttgagcatacataatgcttccgatagctgaagcatatggtactgacttcatcttgtttttctcatactgattcttgggacactgatattccccaaacttatcacccttgactattggaccaggcgaggcattacacttgtgcatattatacctctttagtacattttctatatatgacttctgtgagagtcctaatactcccttttgtctgtctctgtgaatttctattccaagaacataggaggcttctcccatgtctttcatatcaaaattcgaggaaagaaacccttttgtttccgctagtagatccttatcactactagctaagagtatgtcatcgacatacagaacaaggaagatatactttccttttctaaattttgcataaatgcaattgtcttccttgttttcctcgaaaccaaactttcttatagtctgatcaaacttgatgtaccactgtctggaggcctgttttaatccataaatggacctcctcaagtgacatcccatgtgttctttaccgctcacaacaaaaccctttggttgtgccatgaacacattttcttctaactctccatttaggaatgctgtctttacatccatctgatggagttctagatcaaaatgagcaactagtgccattatgatcctgaatgaatcttttgttgagacaggtgagaaggtttcatggtagtcaatgccttctctctgtgtgaaccctttggccacaagtctagccttatatctttctatgttccctctggagtcacgctttgtcttgtagacccatttacagcctactgttttggctccatggggaatgacttctaagtcccaaactttgttcattctcatggattctaattcatcttccatggctgatagccatttggatgaatttgcacttctcat

SEQ ID NO: 6472 - DNA, 1175 bp, Zea mays
  Zm_smallRNAprecursor_1961
acgtccgatcactttttacgcaagcgaactgatttagcgtaaacggaaactcattttagcgtaaagagagtaacaaccgcgagccctcgttccagaaatagcggcttaggcccactttccacgtggtcaaccatatcttccttagtcaacacatgtttacgctattccattcttccgtttatacataatagtgatttagcataactactccagccgacccacgttctagaaataaaggaattggcccactaccccacttcccacgcggtcaaacatttctataccctaacccccgtgcggtcaaccttcctggccgactcgccgcgtttcttcagaggtcgccagggcgattcttgttcatccgccgccgccagcgcgtttcgccgtcctccaccgccgcacgccctcaacattaatcgtcgccgccgttgacagcatcatcgagccgctgctgttgtcaatcttgcgcgccccgcgtcacattggctcacgtccgcggtcgctatgtcgtccggattccaaggtgctcgagttgattttttaaatttatgctttacaatgcaacttcctaatgtccttccccccttccggcagtgtgaatcgccttcatttgtctccgcgcgaactcaaccctaatcagcgccgccgttgacagtgtcgtcgagccggccgctgctgtcaatcctccgccaccgcgtcccataggtattttacatgcccaccaacggtcttcattaatcttactgttcttgtgcgattatggttcagttgtttatcatagagcctttagctttgataaaggttcacggacctgttgttttagactcattgtatgctcaaattgtgtgggagaatatatatgcaatgttgtgaattatacattcctttatgaagtaggggttgatattttgatgaggaaacaagtgtgctgcgcatgacttcatgctactatatattattcaaataaactgtaatgcatttcactttttatatacttactggatcatatttttcacataaatatggtcatcaatcatgtccaaattaatcactcaacaatcataaaccactacttcataacattagtaaactaataggcactgcctacatttatcttttgtgctgcagctatatgaacatataagttaaactcccaaaatggaactaaatcgacc

SEQ ID NO: 6473 - DNA, 1102 bp, Zea mays
  Zm_smallRNAprecursor_1962
catttaaattaccataagaaatatgattggaacatctgaaacaatattgtaatcattaaattgtgtgccaaagaatttgatcttgtttatatttttcacattttgacaataacaaacaaaagaggtactgaaaaaataacttcaaaaatataattttgttttcttctgttttgtcgaaatgaagacaaagactcttgaaataaggaaacagaacagtatactttcttatcagcatctgaagcttccttaaactttgcatccagtgtgccttgttcctccttgctcaactggccaactagatgttcctccaatacagggatctttggcttttgttgctctgccttaacagtatcgtcagcatctaaaggaagaggccttcgagatgttggcttcatggatgagggaagcatcccatgatgtggtccttgcattcctctacttgcgaatccttcaacaagtgttcagtaaaaacagcatcattgacaatgtattcccttagggcttgtttgggagtaaaggtaatggagtggattggagggcatataatcctccactattcaattttagatagcaagggattatagtcctatcaatacccttcattccacttgctcccaaacaagcccttagaagacggtgatagaaaaaatgaacttagcagtttcttttgtatatatacctgtacttgcatgagaaggcggtccactagggtttcctgcaaactggccggtagagggtagcgaggtgccctcagcccaaataccatctggtagtacatcaggaagaggacgatgctctcggtgtctctccattaaatacacggcaacacaaaattccttgaaagacagcatcccatccttatcctgatcagacaaatcccataccttccttaagatatctgtaggtggaggggcagatttttagaaactttatatgaataggaactcaatttcagaggaaactttgtacatcgtaagtaattcacaatggaaagaaaacaagatagtaaattaggaactcttcaatgcacctttgacaatgatataacgcaataaattgtaaattgaaggaatatcaaagcattgtggtaatggactgggac

SEQ ID NO: 6474 - DNA, 1171 bp, Zea mays
  Zm_smallRNAprecursor_1963
agctcaaaagagatgtcattagtaatacaagcaccaaattctcttttatatcactttgaatatataaagtaggcagatacttaaacaaggaaaccttattatatgaactaaaattctcttaatcttcaatgcttaattttaacaaattaaacatgcatgataaattgattaagttcaaaggctaattttaaatcatatcatggtgagtatttaatgtagaagaaataaatccaaatgtacaagagagaatacatcacatagttttggattgttcttctttatacgtttaattgcatagtccattgagaaactcattctcatgttgtgaaactacatagatcacttaggtaaaaacattagtttcacaactctagtcatatagagaattcccttttttgataagtgctttaagaatttgaatttcttacttagcaccttattcattcacgaacacggggtttttctcttttatgtctagatcatggcaataatagagtaatcaaattgaaatgtgccaagaaatacttacaaccaatttaagtatttggattgccatatgtaagaaagaagattatgtaatctgttatatgataacctcaaattttgatcatctttggtcttgatcttcaacttggagtaccaagataagtgccaaatatttctcaacaaatatccttgtaccccttcactttccttgattatagatcaattcaaaccaaactatggtctctcaaacaacttatgtgatttatcctatatgagagccttccaatcaaagtgacttccaatatttcaaatacttgtcacttatgacagattctgtatactccaaagaaacatccataaatttttatgtacagatcctatgaccacgaaaattggtggagatgtgctttaataagactgctaacagctgtaaaaagttgagactcatttgacttcatatgtgctgccagccacaacatctcccacaataggtacatgctgaaaactgctgtgtttgtgttgacaagattgacttaatcaagaagtttcacttatccaatgattatgaaatttgcacagactttgctatcatatgcatagagcaagtaaactgaatttcaagccaatctaaatagatttgatcactcaaacatggttatgagcacagccttgtcagattttcaat

SEQ ID NO: 6475 - DNA, 1065 bp, Zea mays
  Zm_smallRNAprecursor_1964
cctcaaattttgatcatctttggtcttgatcttcaacttggagtaccaagataagtgccaaatatttctcaacaaatatccttgtaccccttcactttccttgattatagatcaattcaaaccaaactatggtctctcaaacaacttatgtgatttatcctatatgagagccttccaatcaaagtgacttccaatatttcaaatacttgtcacttatgacagattctgtatactccaaagaaacatccataaatttttatgtacagatcctatgaccacgaaaattggtggagatgtgctttaataagactgctaacagctgtaaaaagttgagactcatttgacttcatatgtgctgccagccacaacatctcccacaataggtacatgctgaaaactgctgtgtttgtgttgacaagattgacttaatcaagaagtttcacttatccaatgattatgaaatttgcacagactttgctatcatatgcatagagcaagtaaactgaatttcaagccaatctaaatagatttgatcactcaaacatggttatgagcacagccttgtcagattttcaatgttggccagatttcagtaaattgagttactcttcttcaagttgaatcaaatctgaaatgaactactttcaaaagacaaatatccattcaaaccacttactaaatgaagtctcttgaatttattcaacataaatcaatccaaacttgattatttagcaaattgtccattcaatcatcttatagcaagcaacatatgcatatatatccaattcaatcaactcatatgcattcaaatgaatttgatcaacaaatattatactttatatacctcatgatcatccaatagcaagtttgaacttaacttatttgcaatccattcataatttaaccaacttgaataaagcacttgtatttggtagaatttggacttcacttattattgacttggcattgggatagaattttattagtcttcaacacttaattcaatagatgatgattaaatgaatattattgaatcaagcctccaatgcccaaggtacctgttta

SEQ ID NO: 6476 - DNA, 1043 bp, Zea mays
  Zm_smallRNAprecursor_1965
taattctaggcacttgaaacagatagtaatcctatctatctataacaaaccagcgcgcgcgcctaactggctgcgcgtatcgcgcgctcttctgtctagtgcacgtcgcgggcacgcttgcacctggtgtaggtgcgtccgcacatgacatctatccccccctcgacgtccagctcgtcctcgagctgaaggtccgaaaaccaggagcggaagtcgtcgagatcttcccatgtagctgacgaagcctgctcgccgcgccagtgcacaagcacttggcgaactctacgcgccaggcgagctcgcttgacccagaggggttctggaactaggcggagtctcgacaaacttcttgagtacgccaatatggaacacatcattgagacgcgcgcctggtgccgatttttttatattttggcccttcctcggaaaaaatacacgtttggaccttagaaaattttaatgtcatttttggaccctctgctcggcgccatcgtcaatggcgccgaggtacgtgctgcgctggcacaaacggacgtcgtggcaccgacgtggcaccgagctcggcgccatagatcttggcgccgagctctattatgtatacaaaacttgtctagctcagttagtagagcacaaggcttttaatcttgtggtcgtgggttcaagccccatgatgggcatgttttaatacttttttttgtctttgtcactgattttttttgttgtccagatttttcatttatgtcgctgatttgtccgtctagatttatttattatccagattttttgtttttgtgactgatttgtttatccgtccatatttttttgtttatccagcgagcacagcggctgtgtgccacagtggccgcaagcggtcaactttcccccttgtttgctcagctaaccacaataaaaatcaaatgagacaaaatttaagtttttcaagtggacaaaatactttgtgagcttgtgtctgtgtgtaggggtacaatccctcacttttatatttaatttacatactactaactaaacagtatatttaatcc

SEQ ID NO: 6477 - DNA, 1092 bp, Zea mays
  Zm_smallRNAprecursor_1966
cccttaggctttgtttggttactctaatatttaccccaaggcaacgactaatatacaaccaggtgttatgtgcaagcgaggttcatgatcccttagattatgatccaaacatgtatcacatttaacacttaaacccttccaccaccagctcgtgtacatttatagaaaatcccttaacaaacaacgattatatctacaattagatcatgatctaatggaccaaaaggctcgattgcacgttgcacataaagcctgattgtatattaattgttgccttaccctaatccacatttattgaggggattaagtgtaaattaaattaatttacaccataataaccctcaatctaattggattggtttgaatactaaagtatacaaacaagtcctaataatgtgtgtgacatcgcaactcagcgggttgcccaaaatgaggatctcaaatggcatgagcaataggtcttacatgtaaaggatcctgtatccatgattcaaaatttccttgccaagctacatgaaacggatttccagacgtccatagaaagattattgctaactgcccaaagtgagaagcaaaaatgttctgataaagacgttcctcagtaatatcatcatgactttcgaaatcatgtgcgatagcaataccaaactaaatacgatgagtagtggggtcctcagctaagccttgctaaacctgggaaatcttaattccataatgcctttcaaatcctccaagccactatcgtactgcaataattcttgctaagaagaatgcttatgttgtggcaattccaccagaaggtaatggattactcctacaacacgtacatgtataatgctcaaggctgagtagcaggagcaacttttaatttgttatgagcctaaacgatagattcaacgagttcttgccaataaccatgaccactgaataaaaacattaaactgaaagctcagacaaaatgaacgcctaagaagaaaaaagcaacaactaatatgcaagcagatattagatgtaaacgtgcaaacaaacttttttgtctgttagatctaaattcaacgtagatataattgtggtttgttagagttttttttt

SEQ ID NO: 6478 - DNA, 1065 bp, Zea mays
  Zm_smallRNAprecursor_1967
cttccttggaggtataggagtacaaggattgtcgtcactagaactatcctccccgctcccttcactggagctgctcgttgtctgccattcaagtttggtcgcgtcttcatcaactttgttagacgcaccggtgcagaccacatccatactaggctgctcgttgtctgccattcaagctggttccatcgataaagggatatactgttagtctgatatactggttccatcaataagggaacttggagaaaaggcactttccaatgcagttagacagagaaggcatggctgtgatgttataatgctgaaggaccccaagaagagattatgcactatagtctaccacctctcgttatttgtgggcttcaccgagggcgggaaacatttggtgacatcaaacgaccttcgggctggggacgtctgcgagcttgttaaggggccagacgatggtgagccggtgtactctgtccggatgtgtggtcacaaaatttaaagccgtcccgacttcatctgtgcgcttctcttctcttatgtcggctactaagatcacttagcaccccacctaagagaagagaagcacacacatgcagccggggcagcttttaattttgtgaccacacatccggacatagtacaccggctcaacatcgtctggcctcttaacaagctcgcagacgtcttcagcccgaaggtcgtttgctatcaccaaatgtttccagccatcggtgaagcccacaaataacgggaggtggtagactacagggcttaatctcttcttggggtctgtcacacccggttttagaaggcaaaccgaatgcgaaccatgtacgtgccaggatcagttattcacgtacacagcagttacataacatggacatcatcacacagtgctcaaaatagtattaagaagggaaatagtcgattacatcatacgtctgagacgtccatatagttcttacaataaatcaaagtgcggaaaagaaacgtagataaccgcggccttcacaggcagccgactgggggttgccgctaacccacacctagaacttgtcgtagtcttggaactcc

SEQ ID NO: 6479 - DNA, 1065 bp, Zea mays; identical to SEQ ID NO: 6478
  Zm_smallRNAprecursor_1968

SEQ ID NO: 6480 - DNA, 1094 bp, Zea mays; identical to SEQ ID NO: 6471
  Zm_smallRNAprecursor_1969

SEQ ID NO: 6481 - DNA, 1142 bp, Zea mays
  Zm_smallRNAprecursor_1970
caaaaggcatgcccatggaggaagcttgacgacgaagattgtcatcagtctcccgctgacgccgtgccacctcatggacatcagcagaaatgttgcagcacatggagaaaaatgccgcaaacccatggaccaagcgagcacccatcccgcggccacgacctcgaccacgaccacgagcacgtggcatgggagatccgcggccaggagagggacgcgaggcagcagcggggggagaggaggatggatgatggggaggctggcgaggtggctcagtggaggaggcagggcctctagaccgtgagggagcccgcttcgtacgagcagctgggttggaggaatcaacccagtagggtacgtagcgggagtgtttgacgggtttttcgaagtgggtctgggtgaccacttcgatcatcttcatgataaagggtgcatgaagacaccctctgagaggagactaggaagcacagacgatctcttcccagaacatgtcaaacacattgatgcgggcgagactgtttggagcaaggaggaggaggaagactcgactctccccaaggacgttcatttgattaccgctcttcgggagaacggtcatccgggacaaagaattaaggtacctgtagtacctatgcatgttagcggttgtccagaactcccgctcagtagagacatgaatgaattccgtctcttcccgcatgggcagccgaatgtcatgcactcgcatgttgctgccctgaatatctacatcagagaagcccagaatatgggcaaaatgacgataactgactttatgccagttaccctggatgaagaaatacatgactgggtaatcatacccatcggcttcctcatctactttctttatccagagggtggcatagaactgagctaccacctcgtcgttccaggggtattccatggtcataatgtttcgtaacccctttctctctaagttttcgagagctgacgtcatgtcagcatctcccatattctcacaacccttccagtcaataaacctatgtctgacgactgggtgtttcttggaaagaatgacagaattgtagaagtcagcctggaaaagattccagaaccgagggtcctggacaccaggatgacgaggagtgagagtagggttggtgaac

SEQ ID NO: 6482 - DNA, 1058 bp, Zea mays
  Zm_smallRNAprecursor_1971
gcagaaatgttgcagcacatggagaaaaatgccgcaaacccatggaccaagcgagcacccatcccgcggccacgacctcgaccacgaccacgagcacgtggcatgggagatccgcggccaggagagggacgcgaggcagcagcggggggagaggaggatggatgatggggaggctggcgaggtggctcagtggaggaggcagggcctctagaccgtgagggagcccgcttcgtacgagcagctgggttggaggaatcaacccagtagggtacgtagcgggagtgtttgacgggtttttcgaagtgggtctgggtgaccacttcgatcatcttcatgataaagggtgcatgaagacaccctctgagaggagactaggaagcacagacgatctcttcccagaacatgtcaaacacattgatgcgggcgagactgtttggagcaaggaggaggaggaagactcgactctccccaaggacgttcatttgattaccgctcttcgggagaacggtcatccgggacaaagaattaaggtacctgtagtacctatgcatgttagcggttgtccagaactcccgctcagtagagacatgaatgaattccgtctcttcccgcatgggcagccgaatgtcatgcactcgcatgttgctgccctgaatatctacatcagagaagcccagaatatgggcaaaatgacgataactgactttatgccagttaccctggatgaagaaatacatgactgggtaatcatacccatcggcttcctcatctactttctttatccagagggtggcatagaactgagctaccacctcgtcgttccaggggtattccatggtcataatgtttcgtaacccctttctctctaagttttcgagagctgacgtcatgtcagcatctcccatattctcacaacccttccagtcaataaacctatgtctgacgactgggtgtttcttggaaagaatgacagaattgtagaagtcagcctggaaaagattccagaaccgagggtcctggacaccaggatgacgaggagtgagagtagggttggtgaa

SEQ ID NO: 6483 - DNA, 1057 bp, Zea mays
  Zm_smallRNAprecursor_1972
cagaaatgttgcagcacatggagaaaaatgccgcaaacccatggaccaagcgagcacccatcccgcggccacgacctcgaccacgaccacgagcacgtggcatgggagatccgcggccaggagagggacgcgaggcagcagcggggggagaggaggatggatgatggggaggctggcgaggtggctcagtggaggaggcagggcctctagaccgtgagggagcccgcttcgtacgagcagctgggttggaggaatcaacccagtagggtacgtagcgggagtgtttgacgggtttttcgaagtgggtctgggtgaccacttcgatcatcttcatgataaagggtgcatgaagacaccctctgagaggagactaggaagcacagacgatctcttcccagaacatgtcaaacacattgatgcgggcgagactgtttggagcaaggaggaggaggaagactcgactctccccaaggacgttcatttgattaccgctcttcgggagaacggtcatccgggacaaagaattaaggtacctgtagtacctatgcatgttagcggttgtccagaactcccgctcagtagagacatgaatgaattccgtctcttcccgcatgggcagccgaatgtcatgcactcgcatgttgctgccctgaatatctacatcagagaagcccagaatatgggcaaaatgacgataactgactttatgccagttaccctggatgaagaaatacatgactgggtaatcatacccatcggcttcctcatctactttctttatccagagggtggcatagaactgagctaccacctcgtcgttccaggggtattccatggtcataatgtttcgtaacccctttctctctaagttttcgagagctgacgtcatgtcagcatctcccatattctcacaacccttccagtcaataaacctatgtctgacgactgggtgtttcttggaaagaatgacagaattgtagaagtcagcctggaaaagattccagaaccgagggtcctggacaccaggatgacgaggagtgagagtagggttggtgaa

SEQ ID NO: 6484 - DNA, 1058 bp, Zea mays
  Zm_smallRNAprecursor_1973
cagaaatgttgcagcacatggagaaaaatgccgcaaacccatggaccaagcgagcacccatcccgcggccacgacctcgaccacgaccacgagcacgtggcatgggagatccgcggccaggagagggacgcgaggcagcagcggggggagaggaggatggatgatggggaggctggcgaggtggctcagtggaggaggcagggcctctagaccgtgagggagcccgcttcgtacgagcagctgggttggaggaatcaacccagtagggtacgtagcgggagtgtttgacgggtttttcgaagtgggtctgggtgaccacttcgatcatcttcatgataaagggtgcatgaagacaccctctgagaggagactaggaagcacagacgatctcttcccagaacatgtcaaacacattgatgcgggcgagactgtttggagcaaggaggaggaggaagactcgactctccccaaggacgttcatttgattaccgctcttcgggagaacggtcatccgggacaaagaattaaggtacctgtagtacctatgcatgttagcggttgtccagaactcccgctcagtagagacatgaatgaattccgtctcttcccgcatgggcagccgaatgtcatgcactcgcatgttgctgccctgaatatctacatcagagaagcccagaatatgggcaaaatgacgataactgactttatgccagttaccctggatgaagaaatacatgactgggtaatcatacccatcggcttcctcatctactttctttatccagagggtggcatagaactgagctaccacctcgtcgttccaggggtattccatggtcataatgtttcgtaacccctttctctctaagttttcgagagctgacgtcatgtcagcatctcccatattctcacaacccttccagtcaataaacctatgtctgacgactgggtgtttcttggaaagaatgacagaattgtagaagtcagcctggaaaagattccagaaccgagggtcctggacaccaggatgacgaggagtgagagtagggttggtgaac

SEQ ID NO: 6485 - DNA, 1171 bp, Zea mays
  Zm_smallRNAprecursor_1974
cgcatgggcagccgaatgtcatgcactcgcatgttgctgccctgaatatctacatcagagaagcccagaatatgggcaaaatgacgataactgactttatgccagttaccctggatgaagaaatacatgactgggtaatcatacccatcggcttcctcatctactttctttatccagagggtggcatagaactgagctaccacctcgtcgttccaggggtattccatggtcataatgtttcgtaacccctttctctctaagttttcgagagctgacgtcatgtcagcatctcccatattctcacaacccttccagtcaataaacctatgtctgacgactgggtgtttcttggaaagaatgacagaattgtagaagtcagcctggaaaagattccagaaccgagggtcctggacaccaggatgacgaggagtgagagtagggttggtgaacctcaggcgctgaagggtgtctattcccttcagagtgaagtcgacgggagattcatgcggaccgcggctgacgttcgctggatgcatgtgcagtccggtgacgtagagagcatcaggcgccggaaggtcgacgaagtcgtcgaaagccccatcctcctcctggcagggagcatacccagaggaagacgtgctacgacgaggacaagaggcgccaaccttgtggcgtctcccgcgagtcggctgcgagggcatggaagagccctcaccatccatccgaccagagccacgtcctctcttagagagggagcgacgaggcggaggagaggggacaggagattcctcctgaatctcgtccgagtcgctgctaaactcaatcactgaagggttgcgacgacgcaccatgattgaaaaagtggtgaaacggtgaactggttgaggtgtgtgaaagagaggctctaaatgttgtgaagcgactaaggcgagagtggatgaagtgggagaaggggagtgtcaaatatatataggcagttgagctggtcctcaggaccggttcaaccgcccccttaggccagttcagctggttctgaccagtgtggtcagagagccagaaacagcagagggaagatgccaaaaattcaaatttctgacgcaggattctgaaaaagtgtgctgcagagattccatgcaaaaaaaacaaaaccaagtgtctgcgcagatgagac

SEQ ID NO: 6486 - DNA, 1040 bp, Zea mays
  Zm_smallRNAprecursor_1975
ctacgcgcccagcagaggaagtgaccggtcaataagaaaaaaaaatgatgtgcgccctgcagagtggattggactggacaaaagaaaaaaggtgctgcgcgccctgcaggatgcgaccggattaaaaaatttgcacgccaggctgccagcagaagtggaagcgaccggtcaatagagaaaaagatgttgcgcgactgaaaaaaggtgcagctgacagacctgcgcggacaggcttgcacggacagacctgcgcggacagaccggtcagagaccggttcaaccggtccactatgccggttcaaccggttttaaccaggatggtcctggtaaaaactggttaaaagcagctgagctgaagttcagctccgaagttcagctggcctcctccagctgaactagaaagttcagttggtcaagccagttgagccccaaaaaaatcttagcactaaaatgcattcgaattttaacattttcaccaagtttttgaaagatcatcacatagctttaaaactatcaatcaaaaatagtgaatcaaacaatttttgtgaccgttttcaagttaagttacgagaatccaagatatttaattcactcctaagaaaacaaaacctagtctcatcgaggggttttgtgaagatatcggctagttgattttcggtgctcacatgaaacaattcgatatctcctttagcttcgtggtctctcaagaaatggtgtctgatgtcaatatatttagttctagagtgttgcacaggattgtttgcaagttttatggcactctcattgtcacacaaaagtagaattttgttaaactcacaaccaaaatctctaagggtttgcttcatccataacaactgtgcacaacatgccccagctgctatgtactcagcttctgcagtggaaagtgcaacacaattttgtttcttagaactccatgatactaaggatcgcccaagaaattggcaagtcccaatagtgctttttcgatctactttgcaaccggcataatctgagtcagaatagccaagtaaatcgaaaag

SEQ ID NO: 6487 - DNA, 1058 bp, Zea mays
  Zm_smallRNAprecursor_1976
gcagaaatgttgcggcacatggagaaaaatgccgcaaacccatggaccaagcgagcacccatcccgcggccacgaccttgaccacgaccacgagcacgtggcatgggagatccgcggccaggagatggatgcgaggcagcagcggggtgagaggaagatggatgatggggaggctgggaaggtggctcagtggaggaggcagggcctccagaccgtgagggagcccgcttcgtacgagcagctgggttggaagaatcaacccagtagggtacgtagcgggagtgtttgacgggtttttcgaagtgggtctgggtgaccacttcgatcatcttcatgataaagggtgcatgaagacaccctctgagaggagaccaggaagcacggacgatctcttcccagatcatgtcaaacacattgatgcgggcgagactatttggagcaaggaggaggaggaagacgcgactctccccaaggacgttcatttgatttccgcccttcgggagaacggtcatccgggacaaagaattaaggtacatgtagtacctatgcatgttagcggttgtccagaactcccgctcagtagagacatgaatgaatttcgtctcttcccgcatgggcagccgaatgtcatgcactcgcatgttgctgccctgaatatctgcatcagagaagcccagaatatgggcaaaacgacgataactgactttgtgccagttaccctggatgaagaaatacatgactgggtaatcatacccatcggcttcctcatctactttctttatccagagggtggcatagaattgagctaccacctcgtcgttccaggggtattccatggtcataatgtttcgtaacccctttctctctaagttttcgagagctaacgtcatgtcagcatctcccatattctcacaaccctcccagtcaataaacctatgtctgacgactgggtgtttcttggaaagaatgacaaaattgtagaagtcagcctggaaaagattctagaaccgagggtcctggacaccaggatgacgaggagtgagagtagggttggtgaa

SEQ ID NO: 6488 - DNA, 1057 bp, Zea mays
  Zm_smallRNAprecursor_1977
cagaaatgttgcggcacatggagaaaaatgccgcaaacccatggaccaagcgagcacccatcccgcggccacgaccttgaccacgaccacgagcacgtggcatgggagatccgcggccaggagatggatgcgaggcagcagcggggtgagaggaagatggatgatggggaggctgggaaggtggctcagtggaggaggcagggcctccagaccgtgagggagcccgcttcgtacgagcagctgggttggaagaatcaacccagtagggtacgtagcgggagtgtttgacgggtttttcgaagtgggtctgggtgaccacttcgatcatcttcatgataaagggtgcatgaagacaccctctgagaggagaccaggaagcacggacgatctcttcccagatcatgtcaaacacattgatgcgggcgagactatttggagcaaggaggaggaggaagacgcgactctccccaaggacgttcatttgatttccgcccttcgggagaacggtcatccgggacaaagaattaaggtacatgtagtacctatgcatgttagcggttgtccagaactcccgctcagtagagacatgaatgaatttcgtctcttcccgcatgggcagccgaatgtcatgcactcgcatgttgctgccctgaatatctgcatcagagaagcccagaatatgggcaaaacgacgataactgactttgtgccagttaccctggatgaagaaatacatgactgggtaatcatacccatcggcttcctcatctactttctttatccagagggtggcatagaattgagctaccacctcgtcgttccaggggtattccatggtcataatgtttcgtaacccctttctctctaagttttcgagagctaacgtcatgtcagcatctcccatattctcacaaccctcccagtcaataaacctatgtctgacgactgggtgtttcttggaaagaatgacaaaattgtagaagtcagcctggaaaagattctagaaccgagggtcctggacaccaggatgacgaggagtgagagtagggttggtgaa

SEQ ID NO: 6489 - DNA, 1058 bp, Zea mays
  Zm_smallRNAprecursor_1978
cagaaatgttgcggcacatggagaaaaatgccgcaaacccatggaccaagcgagcacccatcccgcggccacgaccttgaccacgaccacgagcacgtggcatgggagatccgcggccaggagatggatgcgaggcagcagcggggtgagaggaagatggatgatggggaggctgggaaggtggctcagtggaggaggcagggcctccagaccgtgagggagcccgcttcgtacgagcagctgggttggaagaatcaacccagtagggtacgtagcgggagtgtttgacgggtttttcgaagtgggtctgggtgaccacttcgatcatcttcatgataaagggtgcatgaagacaccctctgagaggagaccaggaagcacggacgatctcttcccagatcatgtcaaacacattgatgcgggcgagactatttggagcaaggaggaggaggaagacgcgactctccccaaggacgttcatttgatttccgcccttcgggagaacggtcatccgggacaaagaattaaggtacatgtagtacctatgcatgttagcggttgtccagaactcccgctcagtagagacatgaatgaatttcgtctcttcccgcatgggcagccgaatgtcatgcactcgcatgttgctgccctgaatatctgcatcagagaagcccagaatatgggcaaaacgacgataactgactttgtgccagttaccctggatgaagaaatacatgactgggtaatcatacccatcggcttcctcatctactttctttatccagagggtggcatagaattgagctaccacctcgtcgttccaggggtattccatggtcataatgtttcgtaacccctttctctctaagttttcgagagctaacgtcatgtcagcatctcccatattctcacaaccctcccagtcaataaacctatgtctgacgactgggtgtttcttggaaagaatgacaaaattgtagaagtcagcctggaaaagattctagaaccgagggtcctggacaccaggatgacgaggagtgagagtagggttggtgaac

SEQ ID NO: 6490 - DNA, 1171 bp, Zea mays
  Zm_smallRNAprecursor_1979
cgcatgggcagccgaatgtcatgcactcgcatgttgctgccctgaatatctgcatcagagaagcccagaatatgggcaaaacgacgataactgactttgtgccagttaccctggatgaagaaatacatgactgggtaatcatacccatcggcttcctcatctactttctttatccagagggtggcatagaattgagctaccacctcgtcgttccaggggtattccatggtcataatgtttcgtaacccctttctctctaagttttcgagagctaacgtcatgtcagcatctcccatattctcacaaccctcccagtcaataaacctatgtctgacgactgggtgtttcttggaaagaatgacaaaattgtagaagtcagcctggaaaagattctagaaccgagggtcctggacaccaggatgacgaggagtgagagtagggttggtgaacctcaggcgctgaagggtgtctattcccttcagagtgaagtcgacggaaggttcatgcggaccgcggctgacgttcgccggatgcatgtgcagtccggtgacgtagagagcatcaggcgccggaaggtcgacgaagtcgtcgaaagccccatcctcctcctggcagggagcatacccagaggaagacgtgctacgacgaggacgagaggcgccaaccttttggcgtctcccgcgagtcggctgcgagggcatggaagagccctcaccatccatccgaccagagccacgtcctctcttagagagggagcgacgaggcggaggagaggggacgggagattcctcctgaatctcgtccgagtcgctgctaaactcaatcacagaagggttgcgacgatgcaccatgattgaaaaggtggtgaaactgtgaaccggttgaggtgtgtgaaagagaggctctaaaggttgtgaagcgactaaggcgagagtgaatgaagtgggagaagagaaggggagtgtcaaatatatataggcagttgagctggtcctcaggaccggttcaaccgcccccatgggccagttcaactggttctgaccagtgtggtcagagagccagaaacagcagagggaagacgccaaaaattcaaatttctgacgcaggattctgaaaaagtgtactgcagagattccatgcgcaaaaaaaaccaagtgtctgcgcagatgag

SEQ ID NO: 6491 - DNA, 1040 bp, Zea mays
  Zm_smallRNAprecursor_1980
ataaaaaaagtggcgcgcactgacgctgctgagcggcagcaagcaaaaaaaaatatgcgtgcccagcagaggaagtgaccggtcaataagaaaaagaaaaaaaatgttgcgcgccctgcaggatgcgaccggattaaaaaaatttgcacgccaggccgccagcagagatggaagcgaccggtcaataaagaaaaagatgctccatgactaaaaaaggatgcagctgacagacctgcgcggacaggcctgcgcggacagaccggtcagataccggttcaaccggtccactatgccggtttcaacccggttataccaggatggtcctggtaaaaaatggttaaaaacagctgagctgaagttcagctccgaagttcagctggcctcctccagctgaactagaaagttcagctggtcaagccagttgagccaaaaaaaaaacttagcactaaaattcattcgaattttaacattttcaccaagtttttgaaagatcatcacatagctttaaaactatcaatcaaaaatagtgaatcaaacaatttttgtgaccgttttcaagttaagttacgagaatccaagatatttaattcactcctaagaaagcaaaacctagtctcatcgaggggttttgtgaagatatcggctagttgattttcggtgctcacatgaaacaattcgatatctcctttggcttcgtggtctctcaagaaatggtgtctgatgtcaatatgtttagttctagagtgttgcacagggttgtttgcaagttttatggcactctcattgtcacacaaaagtggaattttgttaaactcacaaccaaaatctagggtttgcttcaccataacaactgtgcacaacatgccccagctgctatgtactcagcttctgcagtggaaagtgcaacacaattttgtttcttagaactccatgatactaaggatcgcccaaggaattggcaagtcccagtagtgctttttcgatctactttgcaaccggcataatctgaatcagaatagccaagtaaatcgaaaagggag

SEQ ID NO: 6492 - DNA, 1097 bp, Zea mays
  Zm_smallRNAprecursor_1981
ttttccacttttccctgtccggtccttcacgcgagtggagaatcttttatttggtcacctggttgtctcagcttgcatgcaaatgtcagggcgtcaatgcgcgcagtgtacttttttttgcatgcatacacctttgccttgtccgatcacttcccctggcgcgcagataaagtttttttttgcttgctgccgctcagcgcgccactttttctgtccggtcgcttcttgtctgcgtgcacagtcctttttttgtggagttcggtcagcaggggtgtgcatgcagaatcttttttctgggtgtgcatgctgtgtccggtcacttctcctctgctgagcgcgcgcagatttttcttggacatttctgctctgcccgcgcactagccatgcatgcgtgtcaggggcgcccatttttcctgtccagtcgcttccagcagctgcgcgcaaatttgaatttttttttttgcatcttccctctgctgtttctggttctctgaccacagtggtcagaaccagctgaactggcctatgggggcggttgaactggtcctgaggaccagctcaactgcctatatatacttgactctccccttctcttctcccacttcattcactctcgccttagtcgcttcacaatctttagagcctctccttcacacacttcaaccggttcgcagtttcaccaccttttcaatcatggtgcgtcgtcgcaatccctctgtgattgagtttagcagcgactccgacgagattcaggaggaatctcccgtcccctctcctccgcctcgtcgctccctctctaagagaggacgtggctctggtcggatggatggcgagggctcttccatgccctcgcagccgactcgcgggagacgccaaaaggttggcgcctctcgtcctcgtcgtagcacgtcttcctctgggtatgctccctgccaggaggaggatggggctttcgacgacttcgtcgaccttccggcgcctgatgctctctacgtcaccggactgcacatgcatccggcgaacgtcagccgcggtccgcatgaatctcccgtcgacttcactcagaagggaatagacacccttcagcgtctgaggtt

SEQ ID NO: 6493 - DNA, 1149 bp, Zea mays
  Zm_smallRNAprecursor_1982
cacagtcctttttttgtggagttcggtcagcaggggtgtgcatgcagaatcttttttctgggtgtgcatgctgtgtccggtcacttctcctctgctgagcgcgcgcagatttttcttggacatttctgctctgcccgcgcactagccatgcatgcgtgtcaggggcgcccatttttcctgtccagtcgcttccagcagctgcgcgcaaatttgaatttttttttttgcatcttccctctgctgtttctggttctctgaccacagtggtcagaaccagctgaactggcctatgggggcggttgaactggtcctgaggaccagctcaactgcctatatatacttgactctccccttctcttctcccacttcattcactctcgccttagtcgcttcacaatctttagagcctctccttcacacacttcaaccggttcgcagtttcaccaccttttcaatcatggtgcgtcgtcgcaatccctctgtgattgagtttagcagcgactccgacgagattcaggaggaatctcccgtcccctctcctccgcctcgtcgctccctctctaagagaggacgtggctctggtcggatggatggcgagggctcttccatgccctcgcagccgactcgcgggagacgccaaaaggttggcgcctctcgtcctcgtcgtagcacgtcttcctctgggtatgctccctgccaggaggaggatggggctttcgacgacttcgtcgaccttccggcgcctgatgctctctacgtcaccggactgcacatgcatccggcgaacgtcagccgcggtccgcatgaatctcccgtcgacttcactcagaagggaatagacacccttcagcgtctgaggtttaccaaccctactctcactcctcgtcatcctggtgtccaggaccctcggttctggaatcttttccaggctgacttctacaattctgtcattctttccaagaaacacccagtcgtccgacatagatttattgactgggagggttgtgagaatatgggagatgctgacatgtcgtcagctctcgtaaacttagagagaaaggggttacgaaacattatgaccatggaatacccctggaacgatgaggtggtagctcagttctatgccaccctctggataaagaaagtaga

SEQ ID NO: 6494 - DNA, 1067 bp, Zea mays
  Zm_smallRNAprecursor_1983
gtttctggttctctgaccacagtggtcagaaccagctgaactggcctatgggggcggttgaactggtcctgaggaccagctcaactgcctatatatacttgactctccccttctcttctcccacttcattcactctcgccttagtcgcttcacaatctttagagcctctccttcacacacttcaaccggttcgcagtttcaccaccttttcaatcatggtgcgtcgtcgcaatccctctgtgattgagtttagcagcgactccgacgagattcaggaggaatctcccgtcccctctcctccgcctcgtcgctccctctctaagagaggacgtggctctggtcggatggatggcgagggctcttccatgccctcgcagccgactcgcgggagacgccaaaaggttggcgcctctcgtcctcgtcgtagcacgtcttcctctgggtatgctccctgccaggaggaggatggggctttcgacgacttcgtcgaccttccggcgcctgatgctctctacgtcaccggactgcacatgcatccggcgaacgtcagccgcggtccgcatgaatctcccgtcgacttcactcagaagggaatagacacccttcagcgtctgaggtttaccaaccctactctcactcctcgtcatcctggtgtccaggaccctcggttctggaatcttttccaggctgacttctacaattctgtcattctttccaagaaacacccagtcgtccgacatagatttattgactgggagggttgtgagaatatgggagatgctgacatgtcgtcagctctcgtaaacttagagagaaaggggttacgaaacattatgaccatggaatacccctggaacgatgaggtggtagctcagttctatgccaccctctggataaagaaagtagatgaggaagccgatgggtatgattacccagtcatgtatttcttcatccagggtaactggcacaaagtcagttatcgtcgttttgcccatattctgggcttctctgatgcagacattcagggcagcaacatgcgagtgcatggcattcggctgcccatgcgg

SEQ ID NO: 6495 - DNA, 1190 bp, Zea mays
  Zm_smallRNAprecursor_1984
agctctcgtaaacttagagagaaaggggttacgaaacattatgaccatggaatacccctggaacgatgaggtggtagctcagttctatgccaccctctggataaagaaagtagatgaggaagccgatgggtatgattacccagtcatgtatttcttcatccagggtaactggcacaaagtcagttatcgtcgttttgcccatattctgggcttctctgatgcagacattcagggcagcaacatgcgagtgcatggcattcggctgcccatgcgggaagagacggaattcattcatgtctctactgagcgggagttctggacaaccgctaacatgcataggtactacaggtaccttaattctttgtcccggatgaccgttctcccgaagggcggtaatcaaatgaacgtccttggggagagtcgagttttcctcctcctccttgctccaaacagtctcgcccgcatcaatgtgtttgacatgatctgagaagagatcgtccgtgcttcctggtctcctcacagagggtgtcttcatgcaccctttatcatgaagatgatcgaagtggtcacccagacccacttcgaaaaacccgtcaaacactcccgctacgtgccctactgggttgattcctccaacccagctgctcgtacgaagcgggctccctcacggtctggaggccctgcctcctcctctgagccacctcgccagcctccccatcatccatcctcctctcccccgctgctgcctcgcgtccctctcctggccgcggctctcccatgccacgtgctcgtggtcgtggtcgaggtcgtggccgcgggatgggtgctcgcttggtccatgggcttgcggcatttttctccatgtgccgcaacatttctgctgatgtccatgaggtggcacggcgtcagcgggagactgacaacaatcttcgtcgtcaagcttcctccatgggcatgccttttgtccctcgttcgcctgatgtgcctctccatcctcctcccccggagatcaatgagtggcaccagcaggcctacggggtgccttttatgtctgcagacgatgaagatgaagaagtctatgttgatgatcgcgaggagtttgccccgcctccctaccatggggatccgggtcaatcatcctcccaccctccgcctccttacctgggtccgggacccattcctggtgaccc

SEQ ID NO: 6496 - DNA, 1141 bp, Zea mays
  Zm_smallRNAprecursor_1985
actctattcgtcacataagataaaccaatcgatgcatcacatggacctatggtggaaccagtcaaccaatcgattgactagtgaaactagatcatggaatggatccgattaagccatttattgggtccacgcgcattggttttctgctagggcaacggttacaattattccattagcactttcagtcattccattacagttccagtcattttgttgcagactcatccattcactcatttagccattctgttatagtttcagacattcgactacagttttagtcgttccattacatttcacccgttatagttttagtcattctgttacagtttcagtcattccattaccgttgtagtttttagtcatctaataagagcgtggggcatgtggggatcaacatgtggtgagttgttaggacgtgcgggatgattgggtgtgctaggtagcgctcctagttgggggcaacgactgctatacaagcagtccttctgtgcaagcgtgcaagcaaaccatctgatccattagatcatgatctaaccgtaggtcacatttaacacttaaactcttccaccaccagctttataatctttataaaaaacccctaacaaaccatggttgtatctgtggttggatcgtaatctaatggatcagatagtttgcttgcacgcttgcacaaaaggacttcttgcataacagacgttgcccctaattggtgcatgtgctagtcacggtgcagaagcggtggcacgtcagatattgattaggttggtccaggtgacggactggtgaataaatctaccatttatatatatagacacacatgcatgttgtttttcatcctaggtgaagcttcacccagccagtaatgattgagcattatatactagcagtgaaatgactgagcaatcttcagtaattatcggctatgtgaaacattatgggcgtgtttggtttgaggaatcattctatacaaaatgaggtgatgcatcatggatccattcctcaaatttggtggaatgacctcaatcctcatattactactaactaattaattatggggaatgaggtggtgatggatcaactcattccaatccacaaaccaaacaaaaaagtgaggagtgagaagataatggactagctc

SEQ ID NO: 6497 - DNA, 1142 bp, Zea mays
  Zm_smallRNAprecursor_1986
actctattcgtcacataagataaaccaatcgatgcatcacatggacctatggtggaaccagtcaaccaatcgattgactagtgaaactagatcatggaatggatccgattaagccatttattgggtccacgcgcattggttttctgctagggcaacggttacaattattccattagcactttcagtcattccattacagttccagtcattttgttgcagactcatccattcactcatttagccattctgttatagtttcagacattcgactacagttttagtcgttccattacatttcacccgttatagttttagtcattctgttacagtttcagtcattccattaccgttgtagtttttagtcatctaataagagcgtggggcatgtggggatcaacatgtggtgagttgttaggacgtgcgggatgattgggtgtgctaggtagcgctcctagttgggggcaacgactgctatacaagcagtccttctgtgcaagcgtgcaagcaaaccatctgatccattagatcatgatctaaccgtaggtcacatttaacacttaaactcttccaccaccagctttataatctttataaaaaacccctaacaaaccatggttgtatctgtggttggatcgtaatctaatggatcagatagtttgcttgcacgcttgcacaaaaggacttcttgcataacagacgttgcccctaattggtgcatgtgctagtcacggtgcagaagcggtggcacgtcagatattgattaggttggtccaggtgacggactggtgaataaatctaccatttatatatatagacacacatgcatgttgtttttcatcctaggtgaagcttcacccagccagtaatgattgagcattatatactagcagtgaaatgactgagcaatcttcagtaattatcggctatgtgaaacattatgggcgtgtttggtttgaggaatcattctatacaaaatgaggtgatgcatcatggatccattcctcaaatttggtggaatgacctcaatcctcatattactactaactaattaattatggggaatgaggtggtgatggatcaactcattccaatccacaaaccaaacaaaaaagtgaggagtgagaagataatggactagctca

SEQ ID NO: 6498 - DNA, 1140 bp, Zea mays
  Zm_smallRNAprecursor_1987
ctctattcgtcacataagataaaccaatcgatgcatcacatggacctatggtggaaccagtcaaccaatcgattgactagtgaaactagatcatggaatggatccgattaagccatttattgggtccacgcgcattggttttctgctagggcaacggttacaattattccattagcactttcagtcattccattacagttccagtcattttgttgcagactcatccattcactcatttagccattctgttatagtttcagacattcgactacagttttagtcgttccattacatttcacccgttatagttttagtcattctgttacagtttcagtcattccattaccgttgtagtttttagtcatctaataagagcgtggggcatgtggggatcaacatgtggtgagttgttaggacgtgcgggatgattgggtgtgctaggtagcgctcctagttgggggcaacgactgctatacaagcagtccttctgtgcaagcgtgcaagcaaaccatctgatccattagatcatgatctaaccgtaggtcacatttaacacttaaactcttccaccaccagctttataatctttataaaaaacccctaacaaaccatggttgtatctgtggttggatcgtaatctaatggatcagatagtttgcttgcacgcttgcacaaaaggacttcttgcataacagacgttgcccctaattggtgcatgtgctagtcacggtgcagaagcggtggcacgtcagatattgattaggttggtccaggtgacggactggtgaataaatctaccatttatatatatagacacacatgcatgttgtttttcatcctaggtgaagcttcacccagccagtaatgattgagcattatatactagcagtgaaatgactgagcaatcttcagtaattatcggctatgtgaaacattatgggcgtgtttggtttgaggaatcattctatacaaaatgaggtgatgcatcatggatccattcctcaaatttggtggaatgacctcaatcctcatattactactaactaattaattatggggaatgaggtggtgatggatcaactcattccaatccacaaaccaaacaaaaaagtgaggagtgagaagataatggactagctc

SEQ ID NO: 6499 - DNA, 1167 bp, Zea mays
  Zm_smallRNAprecursor_1988
tccgagcgggccatgggaatgtgttgcttgcttcgttcgtttctgtcctggagtatgtcatgacaccaatgcgggagatacatctggggagcttagctagtcgtcaaattaaacaaagcgccaggcgttgcctaatcgagccgaaaatattgtcgggatcatcaagagcggctttactatattatacaatgttttataaattttaacagtaaagatttataaaatttatcgaggtcaggtgagatcaggcctcttcatgtttgtgatataatccattcagattatataatctaacaaattttaaactaaaacttaatttaaaatttgttatattatataatctagacaaattaaaaccacaaacgaacaccccgcttaatacgttggatacatcaggttaggattattgaatgaattgttacttagctttcccacgagagttgctcctagtttctgttacggtaacgactgctatgcaaacagtccttctgtgcaagcgtgcaagcaaaccatctgatccattagatcgtgatccaatcgtaggtcacatttaacgcgtaaaccctttcaccaccagctcaataatctttataaaaaaactcctaacaaatcatgattgtatctgtggttggatcgtaatctaatggattagatggtttgcttgtacgcttgcacagaaggactgcttgcataaccgtcgttgccttctgttacaatactagtactcctctcgttctaaattgtactaaactggtttcacttctttacatgccaagctttttagtaccatatttctaattttggatttgtcatgttccttcctatagttgcttatgttagagtacaatgtctataaacctctattataataggacttggcccacctaactttctattaatacactcccaacccagaattagggttaagatttcccattccaatagcttatcatcgtcgaaaacaatcatttggacattggtatggttttctgattcaatgactcatttcagaacactttcctttctcaacaaagcttagttcaactttgtatacaatctacttccaacaaaaaaaaagaccaaaacctaaaatttacaccccttcatcccaaattataaattattttaaaattttgagatctaaaccatctcaagtccaatcttcat

SEQ ID NO: 6500 - DNA, 1165 bp, Zea mays
  Zm_smallRNAprecursor_1989
ccactagctcttgaattttcaaagtagttatgcaaagtcctttccggcgtactaaaatctgaaaaattacaataataaaataattcatccttcaatcatagttcaatcgaatttagtgttccaattaaagaatatttaaactttaaagaataggaaacaaccttggaggatggagctgtggaggataatttgctggctactgcagggagcatgccgaaggggagctaatccccaccggccacacaaatttgctgcatgctagcgtagccgcgcaggggccagtcggccagaccctactgggcaccgcaggtgcaggccgacagcgacgcagcggcggagaggccgtggcgacttggcaagcaacaaccgaataggtgcaatgcaaagttgcaaacgacggcgtggggaacagcagggggctaatcttgaaaggtttctttaatgggcttcagctttttttaacctctctatatcttagggggtgtttggttaccccaaactaaaatttagcccctgtcatatcgaatgtttgaacctccgttccgggtattaaatgtagtcggattataaaactaatttctcagccgaagattaaaaaacgagacgaatctagtccagttggttgggtctatatttcatactcctatttgaaagtcaaatgcttgatgtgacccggactaaactttagtccctacaaccaaacacccccttaatcttactttactataatatcacgctcataaattgttacgaagcagtagcagccccggagcagtagggagacttaaaattttactttttttgaatatttttttaataagataagtgattaattttttaaaaaaaattaatggtgtcatatatttatgaacggagttagtactgtattttagagagttttgaaacgttagcaatcagcgcttaattttaggtacaagccaagccaggctaaggttgtctccagcaggagactgtaaagggtcatgtactctaaatgtaggggacggtcgagtcctttatccctccagcaaggaactctaaagcgtcctctaaattaaaatttagaggatggcatgcgtcccctatctgtagagggtgctctatacactgtacacctttttgtgtctgtacgctcacgtggtgacgagtagtaaaaaataatata

SEQ ID NO: 6501 - DNA, 1070 bp, Zea mays
  Zm_smallRNAprecursor_1990
gctcgccagcctctctcgttgatcgccgaggcgtcggccacatctttggcaatgaaatgacgacgagctgtccagtacgtactagtaaatttttcggtaggtgacggagtttagtagtgtatgccattgcattccttcttgctgctgtatgcagaattgcattcttcaagggggagcttctcaaagcaggcatttttctttaaaaaagaagcttgctgcaaggacctgttttgcactagcgttaggttttattgttattattatacctagagaaattttcgcacatttatcccctatcgtgttggggtccaggactcatgtaagcgtcagtcctaggtctaaattttatggccatcaaagggtcttttgttttggttgatgtttaaaagtcactttttagtcatggcccggttgaaccttttgtcctagttggtgttactgttagaatcatgcccttagttttttaaattggtgcccttagttttggtggtgtgctcacttatacccttagtcgtgtttttttctcagctgtgcccttccagtgctatagaacagaagggcacagctgagcaaaaaacacgactaagggtataggtgagcacaccactaaaactaagggcactaatttaaataggagttgatatgttttgctagatgtcgctgttaattattgggataaataagagtacttggatcatgtctatgtatatgtgaacctataaggtcacacacttaaggagaaggaaagcttaatttggataggatctgaattagactgggtttagggttgctggtgggtctcagagttagaagcccatcaagacacctatgtaatgagggatggggtggggttagggttaacctaatttgcccactagaacaccaacagtcgcgctcctctcaccatgtcgtcgtagtggacctagtagtcagatacgtgatgcttcctccctacacgtgtggatacctcaaaggtgctgcatctggagcactaggacgaacgacgcgaggacgtgaaggacaccgatgactgcatggcactgctcgacacattcatctacatcgagatg

SEQ ID NO: 6502 - DNA, 1056 bp, Zea mays
  Zm_smallRNAprecursor_1991
cagttttttttagtctatctatctaccactcactctcgagtgttttgagctcttctcatactcgattttcccccccttcaaatcttcatccctttcctcctcccgacgcgccgccgccccgtagggtctcccgttcctatcgtctgccttgcctacctcccgcaatttcttctaaggccgcgggagatggtgaagaagagaagggaagaatcgggtgttggaagactggagtgagacgtaggctttctgttttttttcttctttttactctcagagtcaccgtctcgtgtgttcaatcgtgatgagctgtacttacttggaattgatctcttaactatatcatatgtcgctatgtctcctctgctatttcacacgctttcacagctactagcatccttctcttggcgcaggtgcaaatcggcgattgcttttttttgtgtgtgtgtaggcacactgttctatcagtgagaaatttgccattatagaagtcctcagacgcggcttcgacgatttggaggcgtagacgagggattcgctgttataaaaaactagggactacccacactccaaaatgaacatgaccacgccattacaaggtaacgtctatgattaaaccattgatactcacgtcgtctctacatccgctatccttctccttctctctattctcgctaccaggcacgcaccctagcagccaccgtcgtcttgctccgtcctccgctcgccaggtctcgacgcgcgcgcagactctgcctcggcgtgccgctgccgtgccccgtctaagagctgccgctccggacgccacggacgcggcggcggccctcatggtcgcgcgcgccgaggccggggacttcgcggaggcctggtccctctgggcgcagctcctgcacagctccgccgcgccgtgcctgcccgccgtggcgccgcgccttctgccggcgtacgcgcgcctgggccgcttcgacgagatcctcctcgcagtgcgcgagctctcggcgcgggaccgcggcgcggcacgcacgctctacccgctcgccgtctcctgcctcggcgccg

SEQ ID NO: 6503 - DNA, 1071 bp, Zea mays
  Zm_smallRNAprecursor_1992
agggcggcttccacgccagctccgaggtgctgctggagaccgccggcgggaaggggcgctggacgtactacaagctgctcggcgtctacctcaggaagcagcataggagaaaccaagttttctggaactactgatgctaatcagttcagcgactagggtagtgcttacattgtaatttttagtgattaaaatgtgcttgccattgccagcaactccatatatctaggagcttgcaacagacataccaagactggaagatgatttatactcgcatcaatagttctgtgcactgattctgaaatggtggtggctaggcccatgaggccgaactcgttgtccatgtgcacctcgtcggtgatgtcgaggaacgggtacgccggcagaaggcacggcgccacggcgggcaggcacggcgcgacggagctgtgcaggagctgcgcccagagggaccgggcctccgcgaagtccccggcctcggcgcacgcgaccatgagggccgccgccgcgtccgtggcgtccggagcggcagctcttagacggggcacggcagcggcacgccgaggcggagtctgcgcgcgcgtcgagacctggcgagcggaggacggagcaagacgacggtggctgctagggtgcgtgcctggtagcgagaatagggagaaggagaaggataacggatgtagagacgacgttagtatcaatggtttaatcatagacgttaccttgtaatggcgtggtcatgttcattttggagtgtgggtagtcccctagttttttataacagcgaatccctcgcctacgcctccaaatcgtcgaagccgcacctgaggacttctataatggcaaatttctcgcggcggcacggtggccaggaacaccttgccggcctgggtgctgaggaacacgcgggcggacccgtccgggtgcgccgccatgttgaggtaggagccgttgccgacgcgctccaggaacatgctgcggagcggcagcgccgccgggcgggtggagttgaacgccgcgccgccgccgtccaggcacggcgacctgccggcgccgcccagcgagccgcagaac

SEQ ID NO: 6504 - DNA, 1171 bp, Zea mays
  Zm_smallRNAprecursor_1993
catgggcagccgaatgccatgcactcgcatgttgctgccctgaatgtctgcatcagtgaagcccagaatatgggcaaaacgacgataactgactctgtgccagttaccctggatgaagaaatacatgactgggtactcatacccatcggcttcctcatctactttctttatccagagggtggcatagaactgagctaccacctcatcgttccaggggtattccatggtcataatgtttcgtaacccctttctctcaaggtttacgagagctgacgacatgtcagcatctcccatattctcacaaccctcccagtcaaataaatctatgtcggacgactgggtgtttcttggtaagaatgacagaattgtagaagtcagcctgaaaaagattccagaaccgagggtcctggacaccaggatgacgagggagtgagagtggggttggtaaacctcaaacgctgaagggtttctattcccttctgagtgaagtcgacgggagattcatgcggaccgcggctgacgttcgccggatgcatgtgcagtccggtgacgtagagagcatcaggcgccggaaggtcgacgaagtcgtcgaaagccccatcctcctcttggcagggagcataccctgaggaagacgtgctacgacgaggacgagaggcgccaaccttttggcgtctcccgcgagtcggctgcgagggcatggaagatccctcgccaggcatccgaccagagccacgtcctctcttagagagggagcgacgaggcggaggagaggggacgggagattcctcctgaatctcgtcggagtcgctgctaaactcaaccacagaggggttgcgacgacgcaccatgattgaaaaggtggtgaaactgtgaagcggttgaagtgtgtgaaagagaggctctagaggttgtgaagcgaccaaggcgagagagaatgaagtgggagaagagaaggggagagtcaagtatatataggcagttgagctggtcctcaggaccagttcaaccgcccccatgggccagttcagctggttctgaccagtgtggcagagaaccagaaacaacagagggaaggaagaaaaattcaaatttgcgcgcagctgctggaagtgaccggacaaaaaaaaagtggtgctcacatgaaacaattcgatatctcctttggctt

SEQ ID NO: 6505 - DNA, 1112 bp, Zea mays
  Zm_smallRNAprecursor_1994
aaactcctcgcgatcatcaacataggcttcttcttcttcatcgtctgcagacataaatgacaccccgtaggcctgctggtgccactcattgatctccgggggaggaggatggagaggcacgtcaggcgagcgagggacaaatggcatgcccatggtggaagcttgacgacgaagattgtcatcagtctcccgctgacgccgtgccacctcatggacatcagcagaaatgttgcggcacatggagaaaaatgccgcaaacccatggaccaagcgagcacccatccctcggccacgacctcgaccacgtccacgaggacgtggcatgggagatccgcggccaggagagggacgcgaggaggcggcggggcgagaggaagatggatgatggggaggctggggaggtggctcagaggaggaggcagggcctccagaccctgagggagcccgcttcgtacgagcagctgggttggaggaatcaacccagtagggtacgtagcgagagtgtttgacgggtttttcgaagtgggtctgggtgaccacttcgatcatcttcatgataaagggtgcatgaagacaccctctgagaggagaccaggaagcacggacgatctcttcacagatcatgtcaaacacattgatgcgggtgagactgtttggagcaaggaggaggaggaagactcgactctccccaaggacgtttatttgatttccgcccttcgggagaccggtcatcctggacaaagaattaaggtacctatagtacctatgcatgttagcggtcgtccagaactcccgctcattagagacatgaataaattctgtctcttcccgcatgggcagccgaatgttatgcactcgcatgttgctgccctgaatatctgcatcagagaagcccagaatatgggcaaaacgacgataactgactttgtgccagttaccctggatgaagaaatacatgactggataatcatacccatcggcttcctcatctactttctttatccagagggtggcatagaactgagctaccacctcgtcgttccaggggtattccatggtcataatgtttcgtaacccctttctctctaagttttggagagctgacgtcatgt

SEQ ID NO: 6506 - DNA, 1040 bp, Zea mays
  Zm_smallRNAprecursor_1995
gagtgttctatatcagataaattctacactagctatttcccgtttaaagcatttcgagactaatactaatgtagttgtagaaagagtacccctttttgcccggacttcaagcagtttagctttaaccgtgtaaatggtctcacattattggtctatagagaatcaaagtaaatttaccaatgaatcgcgaaatgctatggttcttccatatgatttctgaagttattcagaagtaattcgtcgagatcgtgcaccttttcttatttatcaaaaaaaatactaaaaatattctaaagtgcagccggatagatccaatctattcttgaaatagacaactcgcacacactccctttccaaaaaaaatcaatacaccaaccactacagttagatttattagatttgttgctaaaatatcggtattaagcccgaaactcccagcgaatggccagtgagctaaaaaaacaaaagaatgggttacatttttcatatgctctcctcttatagataggacgaacaaagaagaaagtttttcgattacttacttcgctcgtccttttttgatcggtttttttaatgcaaatagattcaatctaataatttcttttagattaagtcttaggtctcgtttgacctgtgaaagatctcctttgttgaaatgttcccaaaattcctaaaataaaaggaaaaatactttccactgtcctaaactaaggacgggaaggaagagggcgagcatatcctctaaattgatcatgctcaaatcagcccttcttggggttcctagggtattgtctgtcccgataaatacaaaatttccggaataatataaaaaagaaataatataataaataggagtaaagtaaagtattgatatacttagaattacataagcaaatgccaatgtactaaaaaaagaaaaaagtatctaatctaaaggactcattttcttttttaggattaaacaaaagggttcgcaaataaaagcgctagtgccacaaccagtccataaattgttaaagcttccataaaagctagactaa

SEQ ID NO: 6507 - DNA, 1034 bp, Zea mays
  Zm_smallRNAprecursor_1996
gtgttctatatcagataaattctacactagctatttcccgtttaaagcatttcgagactaatactaatgtagttgtagaaagagtacccctttttgcccggacttcaagcagtttagctttaaccgtgtaaatggtctcacattattggtctatagagaatcaaagtaaatttaccaatgaatcgcgaaatgctatggttcttccatatgatttctgaagttattcagaagtaattcgtcgagatcgtgcaccttttcttatttatcaaaaaaaatactaaaaatattctaaagtgcagccggatagatccaatctattcttgaaatagacaactcgcacacactccctttccaaaaaaaatcaatacaccaaccactacagttagatttattagatttgttgctaaaatatcggtattaagcccgaaactcccagcgaatggccagtgagctaaaaaaacaaaagaatgggttacatttttcatatgctctcctcttatagataggacgaacaaagaagaaagtttttcgattacttacttcgctcgtccttttttgatcggtttttttaatgcaaatagattcaatctaataatttcttttagattaagtcttaggtctcgtttgacctgtgaaagatctcctttgttgaaatgttcccaaaattcctaaaataaaaggaaaaatactttccactgtcctaaactaaggacgggaaggaagagggcgagcatatcctctaaattgatcatgctcaaatcagcccttcttggggttcctagggtattgtctgtcccgataaatacaaaatttccggaataatataaaaaagaaataatataataaataggagtaaagtaaagtattgatatacttagaattacataagcaaatgccaatgtactaaaaaaagaaaaaagtatctaatctaaaggactcattttcttttttaggattaaacaaaagggttcgcaaataaaagcgctagtgccacaaccagtccataaattgttaaagcttccataaaagctaga

SEQ ID NO: 6508 - DNA, 1109 bp, Zea mays
  Zm_smallRNAprecursor_1997
ttggtttaatatatttttcgaaataactcaatccttttttgctaagacccgcataaaaatatgccgctgatgttagtaaagctaaagcaacagtagtatttatatcattcgtgggcgctgctaattccccatggggtaactctataattttccaaggtaaaagagcacctgaccaattcgaaacaaaaataaaaaggaacatagttccaataaagggaacccagggaccatattcttctccaatctgagttttgctcaagtctcgaataaactcaaggacatattcgaagaaattctgatcatcggtcgggatggtttgtggattccgaacagctatgataactgatctagcaaaatagtaattacgacccaagaagtgatgagtacttgggcatgaatttggaaacctcctatttgccaatagaagtgttgccctacttctacacccgatatatcatataaccccttgagtgttttaatggaacatggtgtaatattcatattgtcctctgataaaaattgaacttcaaaaaaggaattcttttgattcaagcatctctttctcaactcagcaacttgaagtattaatcttatatttaatataccaagaaatcacatcagatcataatatatatcaataccctctaatatatatcaatatttcccttcttttatctatgcaaaacaaaaaagaatagtaattaatcctataaatctacgcagttgctcaagaattcactattcttcttaatcaacgatttcttatatagagagaacggccctcagaaattgcaaatactaatttgttaagaattaatcgaattgaagtcatagtgtcatcgttggcaggaatcgatatattcgcaagatctgggtcacaatttgtatcgactaaagaaatagtaggaatccccaaaatggcacattcctgaagagctatatactctttttgctgatcaaggacgatcacaatgtcaggcaacctcgtcatatatttgatcccgccgagatatctttgcaaggtagataattttctctttaagattgccgcatctctttttgggagatggtggaattttcccattttttcttctgctcttaagtctcta

SEQ ID NO: 6509 - DNA, 1142 bp, Zea mays
  Zm_smallRNAprecursor_1998
actcttctcttattcgttttctcctgtttcaagcacttagacacaatacattagtcttcaaaacaatgtactaaggcttagaaacatacctttactgttgatttgcactttgttcatccgtgggcatagatttacacttaagcacttgtgtttgcactcaatcaccaaaatacttagaaatggctcaagggctcatttccctttcagagggacgcgaggcagcagcggggggagaggaggaaggatggtggggaggctggcgaggtggctcagaggaggaggcagggcctccagaccgtgagggaacccgcttcgtacaagcagctgggttggaggaatcaacccagtagggtacgtagcgggagtgtttgacgggtttttcgaagtgggtctgggtgaccacttcgatcatcttcatgataaagggtgcatgaagacaccctctgtgaggagaccaggaagcacggacgatctcttcccagatcatgtcaaacacattgatgcgggcgagactgtttggagcaaggaggaggaggaggactcgactctccccaaggacgttcatttgattaccgccctttgggagaacggtcatccgggacaaagaattaaggtacctgtagtacctatgcatgttaacggttgtccagaactcccgctcagtagagacatgaatgaattccgtctcttcccgcatgggcagccgaatgccatgcactcgcatgttgctgccctgaatgtctgcatcagagaagcccagaatatgggcaaaacgacgataactgactttgtgccagttaccctggatgaagaaatacataactgggtaatcatacccatcggcttcctcatctactttctttatccagagggtggcatagaactgagctaccacctcatcgttccaggggtattccatggtcataatgtttcggaacccctttctctctaagtttacgagagctgacgacatgtcagcatctcccatattctcacaaccctcccagtcaataaatctatgtcggatgactgggtgtttcttggaaagaatgacagaattgtagaagtcagcctggaaaagattccagaaccgagggtcctggacaccaggatgacgaggagtgagagtagggttggtaaac

SEQ ID NO: 6510 - DNA, 1058 bp, Zea mays
  Zm_smallRNAprecursor_1999
acatacctttactgttgatttgcactttgttcatccgtgggcatagatttacacttaagcacttgtgtttgcactcaatcaccaaaatacttagaaatggctcaagggctcatttccctttcagagggacgcgaggcagcagcggggggagaggaggaaggatggtggggaggctggcgaggtggctcagaggaggaggcagggcctccagaccgtgagggaacccgcttcgtacaagcagctgggttggaggaatcaacccagtagggtacgtagcgggagtgtttgacgggtttttcgaagtgggtctgggtgaccacttcgatcatcttcatgataaagggtgcatgaagacaccctctgtgaggagaccaggaagcacggacgatctcttcccagatcatgtcaaacacattgatgcgggcgagactgtttggagcaaggaggaggaggaggactcgactctccccaaggacgttcatttgattaccgccctttgggagaacggtcatccgggacaaagaattaaggtacctgtagtacctatgcatgttaacggttgtccagaactcccgctcagtagagacatgaatgaattccgtctcttcccgcatgggcagccgaatgccatgcactcgcatgttgctgccctgaatgtctgcatcagagaagcccagaatatgggcaaaacgacgataactgactttgtgccagttaccctggatgaagaaatacataactgggtaatcatacccatcggcttcctcatctactttctttatccagagggtggcatagaactgagctaccacctcatcgttccaggggtattccatggtcataatgtttcggaacccctttctctctaagtttacgagagctgacgacatgtcagcatctcccatattctcacaaccctcccagtcaataaatctatgtcggatgactgggtgtttcttggaaagaatgacagaattgtagaagtcagcctggaaaagattccagaaccgagggtcctggacaccaggatgacgaggagtgagagtagggttggtaaa

SEQ ID NO: 6511 - DNA, 1057 bp, Zea mays
  Zm_smallRNAprecursor_2000
catacctttactgttgatttgcactttgttcatccgtgggcatagatttacacttaagcacttgtgtttgcactcaatcaccaaaatacttagaaatggctcaagggctcatttccctttcagagggacgcgaggcagcagcggggggagaggaggaaggatggtggggaggctggcgaggtggctcagaggaggaggcagggcctccagaccgtgagggaacccgcttcgtacaagcagctgggttggaggaatcaacccagtagggtacgtagcgggagtgtttgacgggtttttcgaagtgggtctgggtgaccacttcgatcatcttcatgataaagggtgcatgaagacaccctctgtgaggagaccaggaagcacggacgatctcttcccagatcatgtcaaacacattgatgcgggcgagactgtttggagcaaggaggaggaggaggactcgactctccccaaggacgttcatttgattaccgccctttgggagaacggtcatccgggacaaagaattaaggtacctgtagtacctatgcatgttaacggttgtccagaactcccgctcagtagagacatgaatgaattccgtctcttcccgcatgggcagccgaatgccatgcactcgcatgttgctgccctgaatgtctgcatcagagaagcccagaatatgggcaaaacgacgataactgactttgtgccagttaccctggatgaagaaatacataactgggtaatcatacccatcggcttcctcatctactttctttatccagagggtggcatagaactgagctaccacctcatcgttccaggggtattccatggtcataatgtttcggaacccctttctctctaagtttacgagagctgacgacatgtcagcatctcccatattctcacaaccctcccagtcaataaatctatgtcggatgactgggtgtttcttggaaagaatgacagaattgtagaagtcagcctggaaaagattccagaaccgagggtcctggacaccaggatgacgaggagtgagagtagggttggtaaa

SEQ ID NO: 6512 - DNA, 1058 bp, Zea mays
  Zm_smallRNAprecursor_2001
catacctttactgttgatttgcactttgttcatccgtgggcatagatttacacttaagcacttgtgtttgcactcaatcaccaaaatacttagaaatggctcaagggctcatttccctttcagagggacgcgaggcagcagcggggggagaggaggaaggatggtggggaggctggcgaggtggctcagaggaggaggcagggcctccagaccgtgagggaacccgcttcgtacaagcagctgggttggaggaatcaacccagtagggtacgtagcgggagtgtttgacgggtttttcgaagtgggtctgggtgaccacttcgatcatcttcatgataaagggtgcatgaagacaccctctgtgaggagaccaggaagcacggacgatctcttcccagatcatgtcaaacacattgatgcgggcgagactgtttggagcaaggaggaggaggaggactcgactctccccaaggacgttcatttgattaccgccctttgggagaacggtcatccgggacaaagaattaaggtacctgtagtacctatgcatgttaacggttgtccagaactcccgctcagtagagacatgaatgaattccgtctcttcccgcatgggcagccgaatgccatgcactcgcatgttgctgccctgaatgtctgcatcagagaagcccagaatatgggcaaaacgacgataactgactttgtgccagttaccctggatgaagaaatacataactgggtaatcatacccatcggcttcctcatctactttctttatccagagggtggcatagaactgagctaccacctcatcgttccaggggtattccatggtcataatgtttcggaacccctttctctctaagtttacgagagctgacgacatgtcagcatctcccatattctcacaaccctcccagtcaataaatctatgtcggatgactgggtgtttcttggaaagaatgacagaattgtagaagtcagcctggaaaagattccagaaccgagggtcctggacaccaggatgacgaggagtgagagtagggttggtaaac

SEQ ID NO: 6513 - DNA, 1171 bp, Zea mays
  Zm_smallRNAprecursor_2002
cgcatgggcagccgaatgccatgcactcgcatgttgctgccctgaatgtctgcatcagagaagcccagaatatgggcaaaacgacgataactgactttgtgccagttaccctggatgaagaaatacataactgggtaatcatacccatcggcttcctcatctactttctttatccagagggtggcatagaactgagctaccacctcatcgttccaggggtattccatggtcataatgtttcggaacccctttctctctaagtttacgagagctgacgacatgtcagcatctcccatattctcacaaccctcccagtcaataaatctatgtcggatgactgggtgtttcttggaaagaatgacagaattgtagaagtcagcctggaaaagattccagaaccgagggtcctggacaccaggatgacgaggagtgagagtagggttggtaaacctcagacgctgaagggtttctattcccttctgagtgaagtcgacgggagattcatgcggaccgcggctgacgttcgccggatgcatgtgcagtccggtgacgtagagagcatcaggcgccggaaggtcgacgaagtcgtcgaaagccccaccctcctcttggcagggagcataccctgaggaagacgtgctacgacgaggacgagaggcgccaaccttttggcgtctcccgcgagtcggctgcgagggcatggaagagccctcgccagccatccgaccagagccacgtcctctcttagagagggagcgacgaggcggaggagaggggacgggagattcctccagaatctcgtcggagtcgctgctaaactcaaccacagaggggttgcgacgacgcgccatgatttgaaaaggtggtgaaactgtgaagcggatgaagtatgtgaaggagaggctctaaaggttgtgaagcgaccaaggcgagagtgaatgaagtgggagaagggaaggggtagtcaagtatatataggcagttgagctggtcctcaggaccagttcaaccgcccccatgggccagttcagctggttctgactagtgtggtcagagaaccagaaacaacagagggaagaaaaaaattcaaatttgcgcgcagctgctggaagtgactggacagaaaaaaatgggcgcccctgacacgcatgcatggctagtgcgcgggcag

SEQ ID NO: 6514 - DNA, 1097 bp, Zea mays
  Zm_smallRNAprecursor_2003
agtggatcggagctggccgtgtgtgtggtgtgggtgcgtgaatcgagcaccatgatcggagacaggattggcgcgaaagcaacacaacaagtacccggcccggccgagagctgcaggcttcagatcgatcggctcgcgatcggaatgaagagcaaatcatgcatgcatgccgccgcttcaattcatcatgctgctgtgcttgtgcttccagctcactcgtgttccgtactagcgtcggtagaaacggtgcccactccaaccctccctccctcctccattaggaaccaaagacatcatgtcggctacctgtggcgcgagatcatggtcccaaacttacataacggacgtctaaaccgtagattgttaggctatggccatgagatcgtgcaatgttgactgcactgttttgcaacatgggctgcaatgtttatatatgtacaagagatgtagatgaataagctgctggagatattagagctgatctcagaatccgttaggccttgttcgtttctgctggattggtgggtcggaacgattccggaccggattgcttctctaatttatataaaatttgattagctggtacaattccgggtgcaatccgacggaaacgaacaaggctttaataatatttcaccaaatcctgcttgatctcagaagctcttagggcgcgattggttcggtggcatgctcttaatgcaatctatgcattggttagaatttattctttaattaattgttcaatataatcccccccctctaaaatgtggcctgaaagacaatgccactgtttcaacaacgtgattctcatttcgcttacactatacctacatcacataaattcagtagatgtttcctttatcttattcacatgatcagagttaggaagtaaatatgctgtcatacttttcagtaattatttttttcttaatgacggtgctaccatatgaatttggaaaaccagtaaattgtcactaaaactaatcaattaagatactcaatggtaatttgatattctagctaggattgcttccctgatgaactctgcgagagctcctgattgccattatatattttttatttggtctctcctattt

SEQ ID NO: 6515 - DNA, 1050 bp, Zea mays
  Zm_smallRNAprecursor_2004
tgtgtgcatttaggccagatatcatgcttattgtgtgcatatgtgcccgttttcaaactaacccaaaagagtgtcacttagtggccgttaagagaattttgagatatctagttcacacccaaaatctaggtctctggtatcctaagggctccttttccgatttatttggctactctgattcagactatgccggttgtaaagtagatcgaaaaagcacctcagagacttgccaattccttgggcggtccctggtgtcttggagctctaagaagcaaaactgtgttgcactttccactgccgaggccgaatacatagctgctggtgcttgttgtgctcagttgctatggatgaagcaaactttgagagattttgactgtgagtttaaaagaatccactactttgtgacaatgagagcgccattaaactagccaacaatcctgtgcaacattctagaaccaaacacatagatataagacaccattttctgagggaccacgaagtaaaaggagatgtcgaattatgtcatgtaaacacagaaaatcaactagccgatatcttcacaaaacccttcgatgatactagattttgctttcttaggagtgaattaaatatcttagattctcgtaacttaacttgaaaacggacacaccgattgtttgattcactattttttgattgatagttttaaagctttgtgatgatctttcgaaacttggtggaaatgttaaaattcaaatgaatttgagtgctaagattttttaaaatttttcacttgaagctcaactggcttggccggctgaactttctagttcagctggaggaggccagctgaacttcggagctaaacttcagctcagctgcttttaaccagaattaaccaggactatcctggccaaaaccggttgaatcggtattgaggaccggttgaaccggtctggctctgactggtctgctgcagttctgtccgcgcagactttttgcagctgtgtcagccgtgtcagctcctgtgtcagccgcgcagcagcttttgcagttgactggtcacatctg

SEQ ID NO: 6516 - DNA, 1160 bp, Zea mays
  Zm_smallRNAprecursor_2005
tgtcatgtcaggtcgcgtcagtcactttttggaacaccttttcagaaacctgtgcagtactttttcagcttttactgtttgaagaatctgctttttactgcgcagacgcgtcagaaatttaaattttttggcgtttctggccctctgaccgcgctggtcagatgcggttgaaccggcccttgaagggcggttgaacccggtcctggggaccagctcaactgcctatttatatgtcgctccccttctcttccctcactccaaaccattctcgccttagtctctccgcagtgtttagagcctcctctatcactcacctcaaccggttcatagttccaaaacctctccaatcatagtgcgtcgtcgcaacccttccgtgattgagtttagcagcgactcggatgagattcaggaggaatctccagtcccctctcctccgcctcgtcgctccctctctaagagaggacgcggctctggtaggatggatggagagggttcttccatgccctcgcagccggctcgtgggaggcgccaaaaggttggcgccactcgacctcgtcgcagcacttcttcctctggatatgctccttgccaggaagagaatgggactttcgacgacttcatcgaccctccggcgccagatgcactctacgtcaccggtctgcacgtgcatccggcgaacgttacccgcggtccacatgaacctcctgtcgacttctctctaaagggagtagacacccttcagcgcctgaggttcaccaatccttctctcactcctcgtcatcctggtgtctaggaccctcggttctggaatcttttccaggctgatttctacaattctgtcattttatccaagaaacacccagtcgtcaggcataggtttatagactggggagggatgtgagaacatggggcgatgctgacacgacgtcagctctccaaaacttagagagaaagggggtaaaatattttaatgacccatggaataccccctggaacgacgaggtggtagctcagttttatgccaccctctggatcaagaaagtagatgaggaagccgatgggtatgattaccctgtcatgtatttcttcatccaggataactggcacaaagtcagttatcgtcgttttgcccatattctgggcttctctgatgctgatat

SEQ ID NO: 6517 - DNA, 1102 bp, Zea mays
  Zm_smallRNAprecursor_2006
tctgatgctgatattcagggcaacaacatgcgagtgcataacattaggctgctcatgcgtgaagagactgaatttattcatgtctctaatgatcgggagttctgaacgaccgctaacatgcataggtactacaggtaccttaactctttgtccagaatgaccgttctcccgaagggcgagaatcaaatgaacgtccttggggagagtcgggtctcccttctcctccttgctcccaacagtctcgcccgcattaatgtgtttgacatgatctgggaagagatcatccgtgcttcctggtctcctctcaaagggtgtcttcatgcaccctttatcatgaagatgatcgaagtggtcacccagactcacttcgaaaaacatgtcaaacactcccgctacgtaccctactgggttgattcctccaacccagctgctcgtacgaagcgggctccctcaggatctggaggccctgcctcctctgctgagccacctccccagcctcctcatcatccatcttcctctcgcgccgccgctgcctcgcgtccctctcctggccgcggatctcccatgccacgtggtcgtggtcgtggccgagggatgggtgcccgcttggtccatgggattgtggcatttttttctatgtgctggaacatttctgctgatgtacatgagctggcaaggcgtcaccgggagactgacgacaatcttcgtcgtcaagcttccactatgggtatgcccctcgctcgcctgacgtgcctctccatcctcctcccccggagatcaatgagtggcaccggcaggcctacggggtgtcatttatgtcagcagacgacgaagaagaagcctacgttgatgatcgcgagcagtttgcccccacctccctaccatggggatccgggtcaatcatcctctcaccctccgcctccctactcgggtcagggacccactcccggtgaccctaggccatccggctctggttaccatcaccaccctccacctcctcatcatcgtacatcttcggcatctgttttttctgcggctgatgagctacctagggactcctcattcgaggaagacgtgatgaggaccctcttccctgactaca

SEQ ID NO: 6518 - DNA, 1040 bp, Zea mays
  Zm_smallRNAprecursor_2007
gcttggtccatgggattgtggcatttttttctatgtgctggaacatttctgctgatgtacatgagctggcaaggcgtcaccgggagactgacgacaatcttcgtcgtcaagcttccactatgggtatgcccctcgctcgcctgacgtgcctctccatcctcctcccccggagatcaatgagtggcaccggcaggcctacggggtgtcatttatgtcagcagacgacgaagaagaagcctacgttgatgatcgcgagcagtttgcccccacctccctaccatggggatccgggtcaatcatcctctcaccctccgcctccctactcgggtcagggacccactcccggtgaccctaggccatccggctctggttaccatcaccaccctccacctcctcatcatcgtacatcttcggcatctgttttttctgcggctgatgagctacctagggactcctcattcgaggaagacgtgatgaggaccctcttccctgactacacatcataccctccatcatatccttcgtcctatcctcctcctggaggatattgattcatgtatccatgtctctctcttcgtttttggtacttgttgccaaaaaggggagaaaatccaaaatttctagtcattctgtttgtggttttttcggttatgtatttcttttggtttatttttgttttggccactgttgtgtcttgtatcctcttatcattgtatgaaataaaactgttgggttattattcaaagtgatatgatggtcttctggccatcatcttttgtcccgtcagtttgtaatgattgctttgctatgaagtaaaaatgatgtgtatttagagatagtcatatgcatcacaactcctgtttgacactcttgcacccctcggatggttgtattcagtatgatttttgtcactatctctaaatgtgttgctcacatgacatattatgtcaaaacattggattcacaatcgtgcacacatttagtctaaagtttataaaacagttggattggttcagagtggttcaacttgcgcacgtagc

SEQ ID NO: 6519 - DNA, 1175 bp, Zea mays
  Zm_smallRNAprecursor_2008
gttggattggttcagagtggttcaacttgcgcacgtagctgttgaaccggcctgcaccagtcgaactgtgtatttaacaatctttcgaagtttgttgtgaaaattttcagattagcctattcacccccccccccccactctagactactttcaagatggctccccctaaatgtgtgcacgattgtgaatccaatgttttgacataatatgtcatgtgaacaacacatttagagatagtgacaaaaaccatactgaatacaaccatccgaggggtgcaagagtgtcataacaggagttgtgatgcatatgactatctctaaatacacatcattttcacttcatagcaaagcaatcattacaaactgatgggacaaaagatgatggccagaagaccatcatatcactttgaataaaaacccagcagttttatttcatacaatgataagaggatacaagccacaacagtggccaaaacaaaaataatccaaaagaaatacataaccgaaagaaccacaaacagaatgactagaaattttggattttctccccctttttggcaacaagtaccaaaaacgaagaaagagagagacaaggatacatgaatcaatatcctccaggaggaggataggacggaggatatgatggagggtatgatgtgtagtcagggaagaaggtcctcatcacgtcttcctcgagtgaggagtccctaaggggctcatcacccgcagaaaaaacagatgacgaagatgtacgatgaggaggaggaggtggagggtggtgatggtaactagagccggatagccgcgggtcaccaagaatgggtcccggacccgggtagggaggaggatgagaggatgattgacccggatccccatggtagggaggcggagcaaactgctcgcgatcatcaacgtaggcttcttcttcttcgtcgtcgtcgtctgctgacataaagggcaccccgtaggcctgccggtgccactcatttgatctccgggggaggaggatggagaggcacgtcaggcgagcgaggggcaaagggcatacccatagtggaagtttgacgacgaagattgtcgtcagtctcccgctgacgccttgctagctcatgtacatcagcagaaatgttccggcacatagagaaaaatgccgcaatcccatggaccaagcgagca

SEQ ID NO: 6520 - DNA, 1083 bp, Zea mays
  Zm_smallRNAprecursor_2009
agaatatgggcaaaacgacgataactgactttgtgtcagttaccctggatgaagaaatacatgatagggtaatcatacccatcgacttcctcatctactttcttgatccagagggtggcataaaactgagataccacctcgtcgttccaggggtattccatggtcataatattttttaacccctttctctctaagttgcggagagctgacgtcatgtcagcatcgcccatgttctcacatccctcccagtctataaacctatgcctgacgactgggtgtttcttggataaaatgacagaattgtagaaatcagcctggaaaagattccagaaccgagggtcctggacaccaggatgacgaggagtgagagaaggattgatgaacctcaggcgctgaagggtgtctactcccttcagagagaagtcgacagaggttcatgtggaccgcgggtaacgttcgccggatgcatgtgcagaccggtgacgtagagtgcatctggcggcggaaggttgatgaagtcgtcgaaagccccatcctcctcctggcagggagcatatccagaggaagaagtgctacgacgaggtcgagtgacgccaaccttttggcgcctcccgcgagccggctgcgagggcatggaagaaccctctccatccatcctaccagagccgcgtcctctcttagagagggagcgacgaggcggaggagaggggacgggagattcctcctaaatctcatctgagtcgctgctgaactcaatcacggatgggttgcgacgacgcaccatgtttggagaggttttgaaactatgaaccggttgaggtgagtgagagaggaggctctaaacactgcggagagactaagtcgagaatgattggagtgagggaagagacggggagcgacatataaataggcagttgagctggtccccaggaccggttcaaccgcccaccaagggtcggttcaaccgcatctgaccagcgcggtcagagggccagaaacggtcagagggaaaacgcccaaaaaaaaattaaatttctgacgcatctgtgcagtaaaaagcagattcttcaaacagtaaaagct

SEQ ID NO: 6521 - DNA, 1067 bp, Zea mays
  Zm_smallRNAprecursor_2010
ggtcataatattttttaacccctttctctctaagttgcggagagctgacgtcatgtcagcatcgcccatgttctcacatccctcccagtctataaacctatgcctgacgactgggtgtttcttggataaaatgacagaattgtagaaatcagcctggaaaagattccagaaccgagggtcctggacaccaggatgacgaggagtgagagaaggattgatgaacctcaggcgctgaagggtgtctactcccttcagagagaagtcgacagaggttcatgtggaccgcgggtaacgttcgccggatgcatgtgcagaccggtgacgtagagtgcatctggcggcggaaggttgatgaagtcgtcgaaagccccatcctcctcctggcagggagcatatccagaggaagaagtgctacgacgaggtcgagtgacgccaaccttttggcgcctcccgcgagccggctgcgagggcatggaagaaccctctccatccatcctaccagagccgcgtcctctcttagagagggagcgacgaggcggaggagaggggacgggagattcctcctaaatctcatctgagtcgctgctgaactcaatcacggatgggttgcgacgacgcaccatgtttggagaggttttgaaactatgaaccggttgaggtgagtgagagaggaggctctaaacactgcggagagactaagtcgagaatgattggagtgagggaagagacggggagcgacatataaataggcagttgagctggtccccaggaccggttcaaccgcccaccaagggtcggttcaaccgcatctgaccagcgcggtcagagggccagaaacggtcagagggaaaacgcccaaaaaaaaattaaatttctgacgcatctgtgcagtaaaaagcagattcttcaaacagtaaaagctgaaaaggtactgcacaggtttctgaaaagttgttccaaaaagtgactgacgcgacctgacatggcattaattaaagcagcagattccaaaagtcacaaaagtcaaaaagttgctgcgcagatgtgaccagacggctgcaaaagct

SEQ ID NO: 6522 - DNA, 1097 bp, Zea mays
  Zm_smallRNAprecursor_2011
ttcacgagcgcgcagtgttttgttttttatttgctgccgctctgcagacagcagcgtctgtcagcgcccctgtccggtcacttcacgcgcgcgcagaaatattttttttgggctgtgcatgcagaggctttttcattttttctctgtctggtccttcacgagagtggagaattgttttctgggtgtgcatgcagaatcgttttctgggtgtgcatgcagagtcaagtcgtttcttgtctgcgcgcacagtttttttttgtgtgctgtccggtcaacagcaggggtgcgcatgcagattttttttatttgttctgtccggtcacctcttctctgcttagcgcgcgcagatttttcttggacatttctgctctgctcgcgcactagccatgcatgcgtgtcaggggcgtccaattttttttctgtccggtcacttctagcagctgcgcgcaaatttgaatttttctttcttccctctgttgtttctggttctctgaccacactggtcagaaccagctgaactggcccatgggggcggttgaactggtcctgaggaccagctcaactgcctatatatacttgactctccccttctcttctcccacttcattcactctcgccttggtcgcttcacaacctttagagcctctccttcacacacttcaaccgcttcacagtttcaccaccttttcaatcatggtgcgtcgtcgcaacccctctgtggttgagtttagcagcgactccgacgagattcaggaggaatctcctgtcccctctcctccgcctcgtcgctccctctctaagagaggacgtggcactggtcggatggctggcgagggctcttccatgccctcgcagccgactcgcgggagacgccaaaaggttggcgcctctcggcctcgtcgtagcacgtcttcctcagggtatgctccctgccaggagaaggatggggctttcgacgacttcgtcgaccttccggcgcctgatgctctctacgtcaccggactgcacatgcatccggcgaacgtcagccgcggtccgcatgaatctccagtcgacttcactcagaagggaatagaaacccttcagcgtctgaggtt

SEQ ID NO: 6523 - DNA, 1190 bp, Zea mays
  Zm_smallRNAprecursor_2012
agctctcgtaaaccttgagagaaaggggttacgtaacattatgaccatggaatacccctggaacgatgaggtggtagctcagttctatgccaccctctggataaagaaagtagatgaggaagccgatgggtatgagtacccagtcatgtatttcttcatccagggtaactggcacagagtcagttatcgttgttttgcccatattctgggcttctctgatacagacattcagggcagcaacatgcgagtgcatggcattcggctgcccatgcgggaagagacggaattcattcatgtctctactgagcgggagttctggacaacagctaacatgcataggtactacaggtaccttaattctttgtcccggatgaccgttctcccaaagggcggaaatcaaatgaatgtccttggggagagtcgcgtcttcctcctcctccttgctccaaactgtctcgcccgcatcaatgtgtttgacatgatctgggaagagatcgtccgtgcttcctggtctcctcacagagggtgtcttcatgcaccctttatcatgaagatgatcgaagtggtcacccagacccacttcgaaaaacccgtcaaacactcccgctacgtaccctactgggttgattcctccaacccagctgctcgtacgaagcgggttccctcacggtctggaggccctgcctcctcctctgagccacctcgccagcctcctcaccatccttcctcctctccccccgctgctgcctcgcgtccctctcctggccgcggatctcccatgccacgtgctcgtggtcgtggtcgaggtcgtggccgcgggatgggtgctcgcttggtccatgggcttgcggcatttttctccatgtgccgcaacatttctgctgatgtccatgaggtggcacggcgtcagcgggagactgacgacaatcttcgtcgtcaagcttcctccatgggcatgccttttgtccctcgttcacctgatgtgcctctccatcctcctcccccagagatcaatgagtggcaccagcaggcctacggggtgccttttatgtctgcagacgatgaagatgaagaagtctatgttgatgatcgcgaggagtttgccccgcctccctaccatggggatccgggtcaatcatcctctcaccctccgcctccttacccgggtccgggacccattcctggtgacc

SEQ ID NO: 6524 - DNA, 1180 bp, Zea mays
  Zm_smallRNAprecursor_2013
tcttgctgctgtcgcatctgatgacgtagcactgcccgcacgacgcaccgtcattgaagagcgccatgctcagcgccgcgttgttcacaccgtagccctgctcgtacaggtcgccatacccgcacgcgccacctgcgtgcagccacgttgtaatacgcacgtgaaaataaattaaagcaaccctgaacaagctgatgacatctatatacccattgtgtcggagccgtcagcgccgccgtagaacgtggcggtggccggaagccagtcgtccgatctcgccggcgagacgaagagtgccagggcgacggcgagcagctggtggaggaagcgtttccccatgttgctcggaaacacggccggccggcgatcgatgctgctactacactacagtaaacgcagaaacgtccgacggccaaagccgtcggacataaggaataaaccgtcggaaatagattatttccgacggtaaagccttatctccgacggcttaaagccgtcggagataactcgtcggaaatagtgctatgtccgacggctgccgtcggacataagttatctccgacggctgcatacgcccgtcggagataacaaatcccaaccgttttaccggtcgggggtgtgggccccacagaattaagtccgacggctcccactaggccgtcggagataagcaagtgttatgtccgacggcattaactaccgtcggacataaccaagtgttatgtccgacggctaccattaggccgtcggacataacaaattacagaatttacacaaaattctgttttttaaaaaatctgacatttacaaaacaaaaacagattcatgcacatatacaaattcacattcacaatcacaaatatacacattctaataagtattcacaatcacaaatattctcacataaatattaacattcacaaatttaacatcaacatataggttcgacggttgttgcaaactgaaattgtgtctcacaaacaagtgttgcaaagtgtttcataaaaaaacatcacgacacatcaatcatatccatcgtctggacggttcgagtagccacctcctccggctggactctgcgtgttgaaaatggtgttcacccacgaatttgttttgtcgtcctgaccagacccatctccaggtgcggcaactgaagcgggtggtgtctgaaatccctata

SEQ ID NO: 6525 - DNA, 1150 bp, Zea mays
  Zm_smallRNAprecursor_2014
caatgacaatatattttcctgatttttctgcctgaaaattgagctgcaatgttaaatgtttcattacttcttattgcagggaatggtcgttgttgcagcaagagcaacgaggcttccaatttactcttcttttgccaaagaaggcaatcttagtgatttatttgctaaaggggaagccatatcaacacttttcaatgtcatgggaattggagctggaattggattggcatctactgtttgttcaacaactcaagggaaggtacatatttgcaggatgacatatcatcgtctatcctatcattatagctgttccattacaccatcatcaggcaaatatacacagtgaaaaattgcacttgacatgcattgcaaatgcaaccatacgacaccgcatgccagcgtagatctacatgaacttctgcttatattaatattatccaggagagcgaaaggggctctatctgagttggttagaccatctccaacagcttacccatacccatattcaaactacactctataaacagcgcaatctacaatataaaacgatgcaaaacggtgtttttagtgaccatataggtgcaatgtacaataatccacccatatggtcacaaaaaacactttttgcactgtagattgtattgtttgtagagtgtagtttgaatatgggtaagctgctggagatggtcttaggtggtctgaatagcactctttaggtcctgagttcgaatcctagtgagagcgaattccagactgagattaaaaaaggtcactcgctagttcccttagttgtgtgcacacgagatagactgacctatagggagaggatcttcgtgtaggggttgggagggctcaaagcgcgagtaaagatctagcctatgggggatcctcatgctacacaggggccagctttcgtgacatttctaggtcgggctccgattgagcttttcttaatataataccgtgggggtggtctttcctctaccggctgagttttatattatctagttgaactctgcctaccattgtccagtgttttatggatttccaagttccaaaatcaactatactcaaaacaagttatgaagtcatctgaaacagggtgtcatttatgttattacgttctatgcatcaaatgaatttcgtggca

SEQ ID NO: 6526 - DNA, 1082 bp, Zea mays
  Zm_smallRNAprecursor_2015
tttgttttgaaaaatacgggcaaatatgtaaagtctaaaaaataagggtaaatatgcagttataccttaaaacaagggcactaacataattgcccttttttctgcacgtcccatttccgttgtaatgctatcagaactcgtaattgatatatatatatatatatatatagacattgatatatttaatttaacatgtaaaataattattgaggaataaaatcgaccaaactaacaatatatcacgtggggcttttccccctccatcgaaaatataatatatatatatatatatatatatatatatatatatatatatatatatatatatatttgtaccttgaagctaatatgattagcttaacgaagaatagaactttatcacatccattgcttctcatgaaaagatagtcttcaataactttaattttgagaaacctcgttcagccaaagctacagtcgcatgtacagctaaggtgtcgtttggttcatgaaatataacgtaaatggtaatagtaatgattcatgctcgaatattagcggtaacaattttgaataagccagtatccatttctagtgtggtatcgattacggttggacttaaacaaacgtaatttaacgttatcagttacccattacttactaatatgtgaaccaaacgacacctaagagaattcgataggcaactgtaacatttggatataaatctacatccatatcaaactttagaatctcagacgctgacatttaagaatctagcaaactcgcttgcaacacctttaattttgaataaaaaatcatggacctcaacatcggatgtgttatcatgagtaaatttttcttcaaaaatcttgtagcgcgacaaaaaaatttagttcatttgtgcgttcaaatgtgtgtgttggatgttcggtaagcaatcctagctttactattctattagaagttaggcccctctcctttctagacccggtggtcgtctctgttgcatgaccctaggtctcatgggacactgctcctgttgggaccatgcttcgtcgccgaaggtcctgcagaaagaaacagcttcggccgaagctgctcgt

SEQ ID NO: 6527 - DNA, 1090 bp, Zea mays
  Zm_smallRNAprecursor_2016
cttccttgatactgggtcttgttctgctggctgatggaggagggcaccttggggcggatgcggaggtattcttggggccattcaccgagttggagtaggcaggtcctgatggcttcagctggggacagttgttcttgaagtgactggaatctccgtagtgccaacatgcattcgccgggggttggttgcttgcaactgagggggcatgaaaggagctctggctctgctgactgaaccgtgacggggtgggtccagctggtctactgaagcttggtcccttgggtggaaatccaaaggatcaagttttctggtgccgatcttgctgctgagcccggaggacttggaatttcctcttgagatggcctttttcttcctcctttgccctttccacttgcatggctttgttggagaggtgagagaaagtgaggaagtcttggctagccaggatagtcttgagttctggtctgagccccttcaggaagcgggccatcttcttgacttcggtactgacgtcatctggcgcgtagcgggccaattccgtgaacttgtgcacgtactcgctgacagatcttccgtcttgagtcagttcccagaattcgtcttccttgagctgaacgatcccttggggcacatggtgctcccggaaagctgtttcaaactccgcccaggtagcatctctgatggtgacattgaaggtatcccaccaggctaaggccatcccagaaagttaatgagcagccagttgaacacgctgattttctaggcatccgatggcttccagctttcttttaatcgtgcgcaaccaatcgtcagcatcgaggggattgctagatccggcaaacgtgggaggcttgagcctcaggaaattccccatcctgtcttgcggtcttccaccatttggacgttgtttttccagacttcgagtgagggccacgatgagtcgggtttggttggctagaacttgggctagatctaagggtagttctggaggtgcggggaggtgggtctcactttcctctctaccggcttccctttcagctctcaggggaaaccctgctccaatcccggaggcggtagacgtggttttatc

SEQ ID NO: 6528 - DNA, 1171 bp, Zea mays
  Zm_smallRNAprecursor_2017
atcaagcttggattgatttatgttgaataaattcaagagacttcatttaccatgtttgaatgatcaaatctatttggattggcttgaaattcagtttacttgctctatgcatatgatagcaaagtctgtgcaaatttcataatcattggataagtgaaacttcttgattaagtcaatcttgtcagcacaaacacagcagttttcagcatgtacctaccgtgggagatgttatggctgtcagcacatatgaagtcaaatgagtctcaactttttacagctgttagcagacctattaaagcacatctccaccaattgtcgtggtcataggatctgtacatcaaaatttatgaatgtttctttggagtatacagaatctgtcataagtgacaagtatttgaaatattgaaagtcactttgattggaaggctctcatataggataaatcacataagttgtctgagagaccatagtttggtttttaattgatctataatcatggaaagtgaaggggtacaaggatatttgttgagaaatattttggcacttatcttggtactccaagttgaagatcaagaccaaagatgatcaaagtcgaggttatcatataaccgattgcataatcttctttcttacatatggcaatccaaatgcttaaattggttgtaagtatttcttggcacatttcaatttgattactctattattgccatgatctagacataaaagaaaaaaaacccgtgttcgtgaatgaataaggtgctaagtaagaaattcaaattcttaaagcacttatcaaaaaggggaattctctatatgactagagttgtgaaactaatgtttttacctaagtgatctatgtagtttcacaacatgagaatgagtttctcaatggactatgcaattaaacgtataaagaagagcaatccaaaactatgtgatgtattctctcctgtacatttggatttatttcttctacattaaatactcaccatgatatgatttaaaattagcctttgaacttaatcaatttatcatgcatgtttaatttgttaaaattaagcattgaagattaagagaattttagttcatataataaggtttccttgtttaagtatctgcctactttatatattcaaagtgttataaaagagaattttgtgcttgtattact

SEQ ID NO: 6529 - DNA, 1171 bp, Zea mays
  Zm_smallRNAprecursor_2018
tgtacttgcagactgcagcgtcctgtcttttcccccgcgcagtttttttttcttttgcatgcagtctgctgcgtcaggtcacttccccctgcgctgcgcgcaaattagaattttttcctctgttgtttctggttctctgaccacactggtcagtaccagctgagctggcccatgggggcggttgaactggttctgaggactagctcaactgcctatatatacttcactcttcctcatctcttttcccacttcattcactctcgccttggtcgcttcacaacctttagagcctttccttcacacacttcaaccgcttcacagtttcaccaccgttttcaatcatggtgcgtcgccgcaacccctctgtggttgagtttagcagcgactccgacgagattcaggaggaatctcccatcccctctcctccgcctcgtcgctccctctctaagagaggacgtggctctggtcggatgcctggcgagggctcttccttgccctcgcagccgactcgcgggagacgccaaaaggttggcgcctctcgtcctcgtcgtagcacgtcttcctcagggtatgctccctgccaagaggaggatggggctttcgacgacttcgtcgaccttccggcgcctgatgctctctacgtcaccggactgcacatgcatccggcgaacgtcagccgcggtccgcatgaatctcccatcgacttcactcagaagggaatagaaacccttcagcgtctgaggttttccaaccctactctcactcctcgtcatcctggtgtccaggaccctcggttctggaatcttttccaggctgacttctacaattctgtcattcttaccaagaaacacccagtcgtacgacatagatttattgactgggagggttgtgagaatatgggagatgttgacatgtcgtcagctctcgttcacttagagagaaagggattacgtaacattatgaccatggaatacccctggaacgatgaggtggtagctcagttctatgccaccctctggataaagaaagtagatgaggaagccgatgggtatgattacccagttatgtatttcttcatccagggtaactggcacaaagtcagttatcgtcgttttgcccatattctgggcttctctgatgcagacattcagggcagcaacatgcgagtgca

SEQ ID NO: 6530 - DNA, 1058 bp, Zea mays
  Zm_smallRNAprecursor_2019
aaacccttcagcgtctgaggttttccaaccctactctcactcctcgtcatcctggtgtccaggaccctcggttctggaatcttttccaggctgacttctacaattctgtcattcttaccaagaaacacccagtcgtacgacatagatttattgactgggagggttgtgagaatatgggagatgttgacatgtcgtcagctctcgttcacttagagagaaagggattacgtaacattatgaccatggaatacccctggaacgatgaggtggtagctcagttctatgccaccctctggataaagaaagtagatgaggaagccgatgggtatgattacccagttatgtatttcttcatccagggtaactggcacaaagtcagttatcgtcgttttgcccatattctgggcttctctgatgcagacattcagggcagcaacatgcgagtgcatggcattcggctgcccatgcgggaagagacggaattcattcatgtctctactgagcgggagttctggacaaccgctaacatgcataggtactacaggtaccttaattccttgtcccggatgaccgttctcccaaagggcggtaatcaaatgaacgtccttggggagagtcgagtcctcctcctcctcctagctccaaacagtctcgcccgcatcaatgtgtttgacatgatctgggaggagatcgttcgtgcctcctggtctcctcacagagggtgtcttcatgcaccctttatcatgaagatgatcgaagtggtcacccagacccacttcgaaaaacccgtcaaacactcccgctatgtaccctactgggttgattcctccaacccagctgctcgtacgaagcgggttccctcacggtctggaggccctgcctcctcctctgagccacctcgccagcctccccaccatccttcctcctcccccccccgctgctgcctcgcgtccctctcctggccgcggctctcccatgccacgtgctcgtggtcgtggtcgtggtcgtggccgtgggatgggtgctcgctttgtccatgggtttgtggcatttttctc

SEQ ID NO: 6531 - DNA, 1141 bp, Zea mays
  Zm_smallRNAprecursor_2020
aaacccttcagcgtctgaggttttccaaccctactctcactcctcgtcatcctggtgtccaggaccctcggttctggaatcttttccaggctgacttctacaattctgtcattcttaccaagaaacacccagtcgtacgacatagatttattgactgggagggttgtgagaatatgggagatgttgacatgtcgtcagctctcgttcacttagagagaaagggattacgtaacattatgaccatggaatacccctggaacgatgaggtggtagctcagttctatgccaccctctggataaagaaagtagatgaggaagccgatgggtatgattacccagttatgtatttcttcatccagggtaactggcacaaagtcagttatcgtcgttttgcccatattctgggcttctctgatgcagacattcagggcagcaacatgcgagtgcatggcattcggctgcccatgcgggaagagacggaattcattcatgtctctactgagcgggagttctggacaaccgctaacatgcataggtactacaggtaccttaattccttgtcccggatgaccgttctcccaaagggcggtaatcaaatgaacgtccttggggagagtcgagtcctcctcctcctcctagctccaaacagtctcgcccgcatcaatgtgtttgacatgatctgggaggagatcgttcgtgcctcctggtctcctcacagagggtgtcttcatgcaccctttatcatgaagatgatcgaagtggtcacccagacccacttcgaaaaacccgtcaaacactcccgctatgtaccctactgggttgattcctccaacccagctgctcgtacgaagcgggttccctcacggtctggaggccctgcctcctcctctgagccacctcgccagcctccccaccatccttcctcctcccccccccgctgctgcctcgcgtccctctcctggccgcggctctcccatgccacgtgctcgtggtcgtggtcgtggtcgtggccgtgggatgggtgctcgctttgtccatgggtttgtggcatttttctccatgtgccgcaacgttgctgctgacgtccatgaggtggcacggcgtcagcgggagactgacgacaatcttcgtcgtcaggctt

SEQ ID NO: 6532 - DNA, 1057 bp, Zea mays
  Zm_smallRNAprecursor_2021
aacccttcagcgtctgaggttttccaaccctactctcactcctcgtcatcctggtgtccaggaccctcggttctggaatcttttccaggctgacttctacaattctgtcattcttaccaagaaacacccagtcgtacgacatagatttattgactgggagggttgtgagaatatgggagatgttgacatgtcgtcagctctcgttcacttagagagaaagggattacgtaacattatgaccatggaatacccctggaacgatgaggtggtagctcagttctatgccaccctctggataaagaaagtagatgaggaagccgatgggtatgattacccagttatgtatttcttcatccagggtaactggcacaaagtcagttatcgtcgttttgcccatattctgggcttctctgatgcagacattcagggcagcaacatgcgagtgcatggcattcggctgcccatgcgggaagagacggaattcattcatgtctctactgagcgggagttctggacaaccgctaacatgcataggtactacaggtaccttaattccttgtcccggatgaccgttctcccaaagggcggtaatcaaatgaacgtccttggggagagtcgagtcctcctcctcctcctagctccaaacagtctcgcccgcatcaatgtgtttgacatgatctgggaggagatcgttcgtgcctcctggtctcctcacagagggtgtcttcatgcaccctttatcatgaagatgatcgaagtggtcacccagacccacttcgaaaaacccgtcaaacactcccgctatgtaccctactgggttgattcctccaacccagctgctcgtacgaagcgggttccctcacggtctggaggccctgcctcctcctctgagccacctcgccagcctccccaccatccttcctcctcccccccccgctgctgcctcgcgtccctctcctggccgcggctctcccatgccacgtgctcgtggtcgtggtcgtggtcgtggccgtgggatgggtgctcgctttgtccatgggtttgtggcatttttctc

SEQ ID NO: 6533 - DNA, 1058 bp, Zea mays
  Zm_smallRNAprecursor_2022
aacccttcagcgtctgaggttttccaaccctactctcactcctcgtcatcctggtgtccaggaccctcggttctggaatcttttccaggctgacttctacaattctgtcattcttaccaagaaacacccagtcgtacgacatagatttattgactgggagggttgtgagaatatgggagatgttgacatgtcgtcagctctcgttcacttagagagaaagggattacgtaacattatgaccatggaatacccctggaacgatgaggtggtagctcagttctatgccaccctctggataaagaaagtagatgaggaagccgatgggtatgattacccagttatgtatttcttcatccagggtaactggcacaaagtcagttatcgtcgttttgcccatattctgggcttctctgatgcagacattcagggcagcaacatgcgagtgcatggcattcggctgcccatgcgggaagagacggaattcattcatgtctctactgagcgggagttctggacaaccgctaacatgcataggtactacaggtaccttaattccttgtcccggatgaccgttctcccaaagggcggtaatcaaatgaacgtccttggggagagtcgagtcctcctcctcctcctagctccaaacagtctcgcccgcatcaatgtgtttgacatgatctgggaggagatcgttcgtgcctcctggtctcctcacagagggtgtcttcatgcaccctttatcatgaagatgatcgaagtggtcacccagacccacttcgaaaaacccgtcaaacactcccgctatgtaccctactgggttgattcctccaacccagctgctcgtacgaagcgggttccctcacggtctggaggccctgcctcctcctctgagccacctcgccagcctccccaccatccttcctcctcccccccccgctgctgcctcgcgtccctctcctggccgcggctctcccatgccacgtgctcgtggtcgtggtcgtggtcgtggccgtgggatgggtgctcgctttgtccatgggtttgtggcatttttctcc

SEQ ID NO: 6534 - DNA, 1040 bp, Zea mays
  Zm_smallRNAprecursor_2023
tttttggtgattgatgccaaaacaattaaggtcaaaaagatatatatttgcaatagaaaatttcttttgaatgattgtatgtagatggctccccctaaatgtgtgcacgattgtgaatccaacgttttgacataatatgtaatgtgagcaacacatttagagatagtgacaaaaaccatactaaatacaaccatccgaggggtgcaagagtgtcaacaggagttgtgatgcacatgactatctctaaatacacatcatttttacttcatagcaaagtaatcattacaaactgataggacaaaagatgatggccagaagaccatcatattactttgaatagcaacccaacatttttatttcatataatggtaagaggatacaagccacaacagtggccaaaacaaaaataatccaaaagaaaaacgaaagaaccacaaactagaagttggattttctccccctttttggcaacaagtaccaaaacgaagagagagacaaggatacatgaatcaatatcctctaggaggaggatatgacggaggatatgatggagggtatgaagtgtagtcagggaagagggtcctcatcacgtcctcctcaaatgtggagtcccgaggtggctcatcagccgcagaaaaaacagatgtcgaagatgtacgatgatcaggaggaggtggagggtggtgatggtaaccagagccggatggcctagggtcaccaggaatgggtcccggacccgggtagggaggcggaggatgagaggatgattgacccggatccccatggtagggaggcggggcaaactgctcgcgatcatgaacataggcttcttcttcttcttcttcttcgtctgctgacataaatggcaccccgtaggcctgctggtgccactcattgatctccgggggaggaggatggagaggcacgtcaggcgagcgaggggcaaagggcacacccatagtggaagcttgacgacgaagattgtcgtcagtctcccgctgacgccttgccacctcatggacatcagcagaaatgttgcg

SEQ ID NO: 6535 - DNA, 1069 bp, Zea mays
  Zm_smallRNAprecursor_2024
gatgttccacctcacgaaaggagtgtcgtcagcttgctccgtggcgttggaggggtcgatgaagttgtcgccggcgtacaagaccgggcacgctttgtaggagaagatgccgtccttgttgcacgccggggttacattgaacgcctgggcgacgcattcgcggcaggcagtggcgttgtagtcgccttggcagaaggctagagcgtagacgacgtcgggggcctggccgacgatggcggtggcgaactgcacgggggaggaggaggtgttttggggcagagtggcggccacctgtttaaggttgtcgcagaatacgtcggcggctgccggagatggcctgagaccgccgccgaccaccaagagcaggacgccgaagatgacatagttcatcatggctacgctagctagttaccttacctgcttcgagattttcactttcggtggttactttaaaggggtttttaatttcgtgcccttagttttggtgttgtgctcatctatacccttagtcgtgttttttgctcagctatgcccttgtgttctatagcactagaagggcacagctgagaaaaaacacgactaagggtatagatgagcacaacaccaaaactaagggcacgaaattaaaaaaccctatattttttgtgcttgtagtaaaagtttgtaggtggtgttcactggtgtttcactaatgcactttcgagaatatgctacttgtcgctctttttcctgatataagtgaaaattatttgcttagagtcaatgactcggtagtcaatagtcagacacgattatttatgccattgtaataagtgtatgaaagcgcccaacccttagttaaaattaaaaataagattattgtgactaacatgttttatagagttattacgagttagatcatgataatgatgattgttcagataatcaatagtttttgatgaaatttgtttcggttttgaaagcaaggatgataagattaatgatagacaaggtctatgtgctatttggagttggaagacacttatattaagtttagaactttatttttccattgaccatactataatga

SEQ ID NO: 6536 - DNA, 1099 bp, Zea mays
  Zm_smallRNAprecursor_2025
attataaacctaaatagtgttacgcgatagcggatttaaacacctagtggcgaggcgttgtacaattttatacgataatactggttatcgacctacgactaagcacaataattaagcttctctaaattaaacgaacctaacgtaagcatcacgaaacaacaaactatacacattaatacaactagcctaaacacaacttatcagctaattaattaaattctaaacttatcccttgctttacaaattatactacatcgctcaccaagaactattttaattttatttcactcatcacatattttacatgtcaacaattaatcaaacaattctttatgttatttattttgtaattgacaacgacaaaattcatcatgaaatactaaatctatcctttacgtcgccacctcgcttagatatccctaaattcatctacctttcgcattactaaacccatcgtacttcacttatttttaacactaccaccacgcgcctgcgctaaatatgaggattattacgactaataattctagttaatctaatcatcagataaacttacaaaaattataaatcggctcaccggcatcaaacgcgacccaatactcgtacgaatgctgataaattctggctcgagctttctgtcgtgcacttggtgaacaccacgctgttggctccgtcttcactcgactcttgagatttcttgctgacgtgcggaacgacgacgagatcgggtttggggcgagctagtgaggtgggggtcgagcaggggatgccgtttttgacgactcgacagcaaatgacgcaacgacgagctgagcaggatctaagctaataggtatagtatggaatagtgaccagcacgatggacgaactaagtcgcgacgaggtcgactgacgagggaaaataaggaacacgacagtcagtcggcgaactgaagattgggagcgacaaccgatgaaaagcttatctccatagagccgcgcgagggaatctgaaaattaattcgatagtggttcagtggcaactgatggccggtagaggaacgcggctgcgcgcagaggagcagggagaagactgttggtttcctatttagcgagcagg

SEQ ID NO: 6537 - DNA, 1088 bp, Zea mays
  Zm_smallRNAprecursor_2026
taaggttgattctgtaattatacatgcaccatgctaagaactgtactaatcaaattttcccccttagaaaatgccgccgcgcacaaggagaacatcgcgcaaacatactggaccgattggtgtgccaagtcaccagctggccccaaggcatgataatagtagtagcggaagcaacgatcctataggggatctcgaagctgaagtaagtcggctccaagcggaactccgccgcaggacggctatatgggtcgtagatggcgaccgcataaatgagttaagaagagatgtccaccatctgcgagatcagctcgcggaccaggatttggcactcgactgggttgttcaatctcgttcgcttgcatgggacaaggagcaaaaagctcaagctcgagtagccgagctcaacttggccgttgatgaactgcagacatattgcaataccttacatgaagaagttcatgtattatattcgcaactgcatcccagtgagcctacgaatcctgttgagtcggaagccggaccctcgcatgtagcgggacacgtgcttggtggtgagttagacctttttcagccccctccttctatgaggctggtcgacgaatggtctcccacacccgacgacgaggccgccaaaagcaacggaaagcagaaatagtggtgtagtagttgaaatagaagtagtgtattgtataacaggttgtactattgtataataggtagtgtatttgtataataggtaatgtatcctattgtaaaaatccgagtctgtacattactctttttggtaatgtaaaatggatggtttttcctttggcatatcatattgtttccaaatgttgttgccacagatgccgtccaagacccgatcacaggatgcagctggaacttccagtgggagggagtctaccccaaatccacctcctattcctcccacactagccgaggcgattgccgccttggtaaatgcaaccgtggataatacccgttttctgagagagatggcgggtcaacagtttcaacagcaaggcgggcggggttatcaacagggccccagtgaaacctcttacttggacttctcagagacgcga

SEQ ID NO: 6538 - DNA, 1127 bp, Zea mays
  Zm_smallRNAprecursor_2027
gagggcatggcgcggctgtaggaaggagaagaagaggaggagccggagcaggaggaggcggcaataaattaagctctattaaacagcgctagtagcaaggagcagcagcagtatcggttcagacttcaggtccagtagctgaaaaggcaggcagggcatgaggccagtgaagatatggcatgggggacctttttgcaatccattctccccatcagaacccacttcgagttagcagtgtgtgtccgccactccgcctgaatctttctcctatatactgctgtatttaattagcaagagcaaagctctcactgcctttctaatgattgatcagaagtgcctttggcgaccccttgtctttctggacatctatatataataacgttcttcattcagctcctctgttctgttctgttcgttcgttcatggttgaattgaattgcggagggtgtcgaggaaggaagcgtatcttatgagcaaggagccctgctgctcccatgagcaaaatcaatccagaccacatcctccacatccaacggtgctgcgtcatgggggtttttgtaaaatgtacagagttgcaaagaacattttataaaaccccctgacacagcaccgttggatgtggaggatgtggtctggattgattttgctcatgggagcaccagcgctccttgcgcacaagatacggtcccgtcgaggaaaggaagggagagcatgtctgatgctgaaatgttcggtccagcctatggtctgtacgtgtatgcatttgccaattcgtcgttgcaggtcgacggagacggacactcgcaaggaagcaagcaagcaagcaaagggattgttgttgtcttggtagagtacgagtaccacagacaagaagcaaggaggcactagagttatcttggtagagatgaattcatctgttcacttcaaaaaaaaaaaaaaaatgaattcatctgtaatgctcgcctatcacgggggccgctgattcggacctgttgatcttgggtcctctcgccagcaactgtagtgttgccgcgggaggcgggcgctaagcatgcagccatggcatggcatccgatatcggagtggttgggcgcagccgcaatgattaccagtttaccacgatcatc

SEQ ID NO: 6539 - DNA, 1126 bp, Zea mays
  Zm_smallRNAprecursor_2028
gtattttgcatgaccatttatacagactagagatggccttagagttggaaaattgtttaagagtagatagctagcggatatatttttagccttaatattaggatgggatgagcactatatgtttcatcctagctatcaattaacctttgcaacagtgtaggagataattattgtttggctttaattaaagatggtaatggggactcgttacccggtgggtaattactccattagggtatgagtttggttgtaattatattctcacgggtctattaacggaagaaaaatagaacctaacgggtagaacgggtatgagtacgtactcattaaacccgtattcctatccatggtattttatatccaaaatataaccaataattctctaacattttagcatagctcaatgatttgtattgggctcctggcttctgagtataactatacgctatgggaacgtatcatgtgcttatggagctcttgtgctcatatgagcactttaaatctggtgccttcatttctcatccagggggtgagggcagcagtggcacacagaagagacaggcggcgcggcgtaacaagggtgacacacagaagaaactagaaaatgtctattcacacttggatgagaaatgaaggcaccagatttaaagtgctcatatgagcacaagagctccatgagcacaggatacgttcccatacgctatataggccttgcgacacatggtagcagtaagcagacaaccagccaaaactttaaagcatgtccaaggctctaagtttctgcgatgccactcttcgttaatgtgcaatcaagcgaccaagttgtacacagacacatgacacgaccacacctagaagacggaagaccggatgttatcgctcggtgctaaccattcatcctaaactaaaatggacagataggtgcaactccaccactctagacgagtatgggtacccatcgggtatagaatacccggcgggtctgggtatgtgaaagggaaatagtctcaatatttcctataatcgaatctggtgtttaacgaccatcacaaaccttgtggactaaccagttcatctacaaccattctaagtcgactgtccggaataccgtagattattccggaca

SEQ ID NO: 6540 - DNA, 1040 bp, Zea mays
  Zm_smallRNAprecursor_2029
ttggtgattgatgccaaaacaattaaggtaaaaaagatatacatttgcaatagaaaatttcttttgaatgattgtatgtagatggctccccctaaatttgtgcacgattgtgaatccaatgttttgacataatatgtcatgtgagcaacacatttagagatagtgacaaaaaccatactgaatacaaccatccgagtggtgcaagagtgtcataacaggatttgtgatgcacatgactatctctaaatacacatcatttttacttcttagcaaagtaatcattacaaactgataggacaaaagatgatggccagaagaccatcatatcactttgaataataacccagcagttttatttcatacaatgataagaggatacaagccacaacagtggccaaaacaaaaataatccaaaagaaaaccgaaagaaccacaaactagaagttggattttctccccctttttggcaacaagtaccaaaaacgaagagagagacatggatacatgaatcaatatcctccagggggaggataggacggaggatatgatggagggtatgaagtgtagtcagggaagagggtcctcatcacgtcctcctcgaatgtggagtccctaggtggctcatcagccgcagaaaaaacagatgccgaagatgtacgatgatcaggaggaggtggagggtggtgatggtaaccagagccggatggcctagggtcaccaggaatgggtcccggacccgggtagggaggcggagggtgagagaatgattgacccggatccccatggtagggaggtggggcaaactgctcgcgatcatcaacgtaggcttcttcttcttcttcgtcgtctgctgacataaatggcaccccgtagcctgctggtgccactcattgatctccgggggaggaggatggagaggcatgttaggcgagcgaggggcaaagggcatacccatagtggaagcttgacgacgaagattgtcgttagtctcccgctgacgccttgccacctcatgtacatcagcagaaatgttgcggcac

SEQ ID NO: 6541 - DNA, 1064 bp, Zea mays
  Zm_smallRNAprecursor_2030
atatatatcttgtgcttacgaatttctcaaatattaaaatagtgtcggtttcatttattttgaatgatatcatcttattgaatgcaagatattatactgaaatatgataatataacaaagaaggtgaccatattcagttcattcctcattcatccatcatcacgaaacaacaagagatagtacaactccaacccactttaaccctataatcaaacaagaaactaggttcgatctgtcactgaaaccaaacatgaaacggatccgacccaacccaaaaaatggctcggctccgatccaacccatgtcgttccgaaacaaacacatgcttggtgcgtgatcatcgccaagatttatttgctcaatcctctttccacctcatgcgcacttgctgtttgctcttgctcttctaccgattatatattcgtcgttgttcatcgtgcgactccatggagctaggcaatgttaattacgtcagcagtcttggtcgattggctcgtgcatgcctggctccctgtatgccacacatgtagcccaacccgtgatgtgattggatgctgtgggtggcgtgcaaggagccaagcatgtatgcatatataacatgccatgatcatctcctctctctatatatatcttttgatccattgaacttttttctgctcgtttttttcgaaaaggatatgatcgatgttgtgtgttacatctgtacgacatgttgcttatcttgtgaacgcttgggttcaattcgaaatgcttctggagggggagaatttagggattcgacgaagctctaaggcaggtgcgcgttccaatcctctttcaaagatagatcaatcgagaccacaatgacgttgacctgcttttcttttgctaacaatgggagtctaaccgcctcttttcgctgaatctgtgtgtcaatttgtttggtttctgcttgtcggggaccataattaggggtaccctcaagactcctaaatctcagctggtaacccccatcagcacaaagctgcaaaggcctgatgggtgcgattaagtcaaagatcggtccattcaagggacgcgatcgc

SEQ ID NO: 6542 - DNA, 1052 bp, Zea mays
  Zm_smallRNAprecursor_2031
agagtccccctcctctcatcagcctggcttttgggatgtgagtggtgggctctcttggctgggccagcccacgagcgcatgaacgcccgaagctgtcgagtgtgggctgggccgggggttggacgctgacatctggtatcagagcccggtttggcccatgcctgccttgggggggggttcccaagggggtgggatgtaaggggctggtagtcagcgccccggctttagtcccacatcggctagccaagggggccgtgggcagcttaaaagggagagtctccctcctcccatcagcctggcttttgggatgtgagtggtgggctctcttggctgggccggcccacgagcgcatgaacgcccgaagctgtcgagtgtggcgatggtgggctttgggcggactggcccagtgggtgcgttacaattggtatcggagcctacattgccgctgctgcctgggagagctttgggcctcttaggggggtgggatgtaagggaccggtatgcacgccctgggttagtaccacctcgcctagccaagggggccgtgttgcacttataagggcgggcctcccttctctctcagcttaggttttgagagcgaggtgcccgggcggactggcccagtgggtgcgttacactccgatttcgctagtacttaatcccagttacatcaacaagaattgctcctctaagttctattggagcgtaatctgatcggtttgggtcggttcgagaacttgagattgcgatttgggagttgcgggagagaaaggaagagatgggccagagcaaggcggagtttttggagcagttcggtggggactacggttacccggacgcgcccaggggcatcgacgatctgcgggccgccgagttcaagcggctggaaggtgtgatttcgcgtccttctcaattcatacgcgaaaacttgaaattgaatttgttggttcctgtaaaaatgaagacagctatttaatgtttgggttaattatgtccgtgccattataattttctacgttttgatatgtgccactaaatttcttaagcttgta

SEQ ID NO: 6543 - DNA, 1038 bp, Zea mays
  Zm_smallRNAprecursor_2032
atggtatcccaaaggctcccttttcgatttacttggctattctgactcagattatgccggttgcaaagtagatcgaaaaagcactactgggacttgccaattccttgggcgatccttagtatcatggagttccaagaaacaaaattgtgttgcactttccactgcagaagctgagtacatagcagctggggcatgttgtgcacagttgttatggatgaagcaaacccttagagattttggttgtgagtttaacaaaattccacttttgtgtgacaatgagggtgccataaaacttgcaaacaaccctgtgcaacactctagaactaaacatattgacatcagacacaatttcttgagagaccacgaagccaaaggagatatcgaattgtttcatgtgagcaccgaaaatcaactagctgatatcttcacaaaacccctcgatgagactaggttttgttttcttaggagtgaattaaatatcttggattctcataacttaacttgaaaacggtcacaaaaattgtttgattcactatttttgattgatagttttaaagctatgtgatgatctttcaaaaacttagtgaaaatgttaaaattcgaatgcattttagtgctaagattttttttggggctcaactggcttgaccagctgaactttctagttcagctggaggaggccagctgaacttcgaagctgaacttcagctcagctgcttttaaccagttcttaccaggaccatcctggttaaaaccggttgaaccggcatagtggaccggttgaaccggtctctgcccggtctatcggcgcaggcctgttcacgcaggtctgtcagctgcagcagtgtcagacgggcaggattttttttaaccggtcacatcctgctggggcgcgcagcatctttttctctattgaccggtcgcctccttctgctgatagcctggcgtgaaattttttttatccggtcgcatcctgcatgaccggtcatttcctctgctgggcgcgcagatttttttttctgcttgctgccgctcagc

SEQ ID NO: 6544 - DNA, 1171 bp, Zea mays
  Zm_smallRNAprecursor_2033
ttgtcatccggtctcatctgcacagacacttggttctgatttttttttggcgcatggaatctccgcagtacactttttcagaatcctgcgtcagaaatttgattttttggcatcttccctctgctgtttctggttctctgaccacactggtcagaaccagctgaactggcccttgggggcggttgaactggtcctgaggaccagctcaactgcctatatatacttgactctccccttctcttctcccacttcattcactctcgccttagtcgcttcacaacctttagagccactctttcacacacctcaaccggttcacagtttcaccacctttttcaatcatggtgcgtcgtcgcaacccctctgtgattgagtttagcagcgactccgacgagattcaggaggaatctcccgtcccctctcctccgcctcgtcgctccctctctaagagaggacgtggctctggtcagatggatggcgagggctcttccatgccctcgcagccgactcgcgggagacgccaaaaggttggcgcctctcgtcctcgtcgtagcacgtcttcctctgggtatgctccctgccaggaggaggatggggctttcgacgacttcgtcgaccttccggcgcctgatgctctctacgtcaccggactccacatgcatccggcgaacgtcagccgcggtccgcatgaatctcctgttgacttcactctgaagggaatagacacccttcatcgtctgaggtttaccaaccctactctcactcctcgtcatcctggtgtccaggaccctcggttctggaatcttttccaggctgacttctacaattctgtcattctttccaagaaacacccagtcgtccgatatagatttattgactgggagggttgtgagaatatgggagatgctgacatgtcgtcagctctcgtaaacttagagagaaaggggttacgaaacattatgaccatggaatacccctggaacgatgaggtggtagctcagttctatgccaccctctggataaagaaagtagatgaggaagccgatgggtatgattacccagtcatgtatttcttcatccagggtaactggcacaaagtcagttatcgtcgttttgcccatattctgggcttctttgatgcagatattcagggcagcaacatgtgagtgca

SEQ ID NO: 6545 - DNA, 1058 bp, Zea mays
  Zm_smallRNAprecursor_2034
acacccttcatcgtctgaggtttaccaaccctactctcactcctcgtcatcctggtgtccaggaccctcggttctggaatcttttccaggctgacttctacaattctgtcattctttccaagaaacacccagtcgtccgatatagatttattgactgggagggttgtgagaatatgggagatgctgacatgtcgtcagctctcgtaaacttagagagaaaggggttacgaaacattatgaccatggaatacccctggaacgatgaggtggtagctcagttctatgccaccctctggataaagaaagtagatgaggaagccgatgggtatgattacccagtcatgtatttcttcatccagggtaactggcacaaagtcagttatcgtcgttttgcccatattctgggcttctttgatgcagatattcagggcagcaacatgtgagtgcatgacattcggctgcccatgcgggaagagacggaattcattcatgtctctactgagcgggagttctggacaaccgctaacatgcataggtactacatgtaccttaattctttgtcccggatgaccgttctcccgaagggcggaaatcaaatgaacgtccttggggagagtcgagtcttcctcctcctccttgctccaaacagtctcgcccgcatcaatgtgtttgacatgatctgggaagagatcgtatgtgcttcctggtctcctctcagagggtgtcttcatacaccctttatcatgaagatgatcgaagtggtcacccagacccacttcgaaaaacccgtcaaacactcccactacgtaccctactgggttgattcctccaacccagctgctcgtacgaagcgggctccctcacggtctggaggccctgcctcctccactgagccacctcgccagcctccccatcatccatcctcctctccccccgctgctgcctcgcgtcccactcctggctgcggatctcccatgccacgtgctcgtggtcgtggtcgaggtcgtggccgcgggatgggtgctcgcttggtccatggatttgcggcatttttctcc

SEQ ID NO: 6546 - DNA, 1141 bp, Zea mays
  Zm_smallRNAprecursor_2035
acacccttcatcgtctgaggtttaccaaccctactctcactcctcgtcatcctggtgtccaggaccctcggttctggaatcttttccaggctgacttctacaattctgtcattctttccaagaaacacccagtcgtccgatatagatttattgactgggagggttgtgagaatatgggagatgctgacatgtcgtcagctctcgtaaacttagagagaaaggggttacgaaacattatgaccatggaatacccctggaacgatgaggtggtagctcagttctatgccaccctctggataaagaaagtagatgaggaagccgatgggtatgattacccagtcatgtatttcttcatccagggtaactggcacaaagtcagttatcgtcgttttgcccatattctgggcttctttgatgcagatattcagggcagcaacatgtgagtgcatgacattcggctgcccatgcgggaagagacggaattcattcatgtctctactgagcgggagttctggacaaccgctaacatgcataggtactacatgtaccttaattctttgtcccggatgaccgttctcccgaagggcggaaatcaaatgaacgtccttggggagagtcgagtcttcctcctcctccttgctccaaacagtctcgcccgcatcaatgtgtttgacatgatctgggaagagatcgtatgtgcttcctggtctcctctcagagggtgtcttcatacaccctttatcatgaagatgatcgaagtggtcacccagacccacttcgaaaaacccgtcaaacactcccactacgtaccctactgggttgattcctccaacccagctgctcgtacgaagcgggctccctcacggtctggaggccctgcctcctccactgagccacctcgccagcctccccatcatccatcctcctctccccccgctgctgcctcgcgtcccactcctggctgcggatctcccatgccacgtgctcgtggtcgtggtcgaggtcgtggccgcgggatgggtgctcgcttggtccatggatttgcggcatttttctccatgtgccgcaacatttctgctgatgtccatgaggtggcacggcgtcagagggagactgacgacaatcttcgtcgtcaagcttc

SEQ ID NO: 6547 - DNA, 1057 bp, Zea mays
  Zm_smallRNAprecursor_2036
cacccttcatcgtctgaggtttaccaaccctactctcactcctcgtcatcctggtgtccaggaccctcggttctggaatcttttccaggctgacttctacaattctgtcattctttccaagaaacacccagtcgtccgatatagatttattgactgggagggttgtgagaatatgggagatgctgacatgtcgtcagctctcgtaaacttagagagaaaggggttacgaaacattatgaccatggaatacccctggaacgatgaggtggtagctcagttctatgccaccctctggataaagaaagtagatgaggaagccgatgggtatgattacccagtcatgtatttcttcatccagggtaactggcacaaagtcagttatcgtcgttttgcccatattctgggcttctttgatgcagatattcagggcagcaacatgtgagtgcatgacattcggctgcccatgcgggaagagacggaattcattcatgtctctactgagcgggagttctggacaaccgctaacatgcataggtactacatgtaccttaattctttgtcccggatgaccgttctcccgaagggcggaaatcaaatgaacgtccttggggagagtcgagtcttcctcctcctccttgctccaaacagtctcgcccgcatcaatgtgtttgacatgatctgggaagagatcgtatgtgcttcctggtctcctctcagagggtgtcttcatacaccctttatcatgaagatgatcgaagtggtcacccagacccacttcgaaaaacccgtcaaacactcccactacgtaccctactgggttgattcctccaacccagctgctcgtacgaagcgggctccctcacggtctggaggccctgcctcctccactgagccacctcgccagcctccccatcatccatcctcctctccccccgctgctgcctcgcgtcccactcctggctgcggatctcccatgccacgtgctcgtggtcgtggtcgaggtcgtggccgcgggatgggtgctcgcttggtccatggatttgcggcatttttctcc

SEQ ID NO: 6548 - DNA, 1058 bp, Zea mays
  Zm_smallRNAprecursor_2037
cacccttcatcgtctgaggtttaccaaccctactctcactcctcgtcatcctggtgtccaggaccctcggttctggaatcttttccaggctgacttctacaattctgtcattctttccaagaaacacccagtcgtccgatatagatttattgactgggagggttgtgagaatatgggagatgctgacatgtcgtcagctctcgtaaacttagagagaaaggggttacgaaacattatgaccatggaatacccctggaacgatgaggtggtagctcagttctatgccaccctctggataaagaaagtagatgaggaagccgatgggtatgattacccagtcatgtatttcttcatccagggtaactggcacaaagtcagttatcgtcgttttgcccatattctgggcttctttgatgcagatattcagggcagcaacatgtgagtgcatgacattcggctgcccatgcgggaagagacggaattcattcatgtctctactgagcgggagttctggacaaccgctaacatgcataggtactacatgtaccttaattctttgtcccggatgaccgttctcccgaagggcggaaatcaaatgaacgtccttggggagagtcgagtcttcctcctcctccttgctccaaacagtctcgcccgcatcaatgtgtttgacatgatctgggaagagatcgtatgtgcttcctggtctcctctcagagggtgtcttcatacaccctttatcatgaagatgatcgaagtggtcacccagacccacttcgaaaaacccgtcaaacactcccactacgtaccctactgggttgattcctccaacccagctgctcgtacgaagcgggctccctcacggtctggaggccctgcctcctccactgagccacctcgccagcctccccatcatccatcctcctctccccccgctgctgcctcgcgtcccactcctggctgcggatctcccatgccacgtgctcgtggtcgtggtcgaggtcgtggccgcgggatgggtgctcgcttggtccatggatttgcggcatttttctcca

SEQ ID NO: 6549 - DNA, 1070 bp, Zea mays
  Zm_smallRNAprecursor_2038
caccccccattagtcccatacacagtgcaggtttctgaaccgtgcaagtggtaagtccaagaagtacacaaatcagcaagagcaagtggtaggaatacttgggttatctgaacatttcgtacatcatcagctcagctaacttcctgccacccaaaagtttcaagagacccaccgaagcgattattcccagacgcaagcttgtccgacgcagccaccggcctccatgcatgcataagcataactgatcgagtggatgaaggaaaccggtcaacatcatgacagccattctgaaaaattgtgtaatgttcactggttctcgcttatttgctcaatcagtcctcgcttatttccgtagtaggaacttgctctaattatgtagaccctgagctttgtttgctcaatcagctggaagaccaccaggcaatctccatccagcagggtgatcatctcgtcacgcttggggcaggtacttccggcagaaatgagtcgatcggaaatatactcattccttgtatgccactggccccacatgtcatagacaccaaaaaatatacctatatgccactcagtggcacacaagggatgagtataaaatctgatggcatgccaggaattttctcaactaaaagcccgcggtgacatgggactggccgactgggtcgtgggcttgatgaagatggggaagctggagtccagctcttgctccagatcctccgccttagagatggcgtaggtagctcctcgcctcgtcggtcgcgtacacccggttggccagatcccttagaggcggcggcctctctgatggcagcatgcagagaggtggtggagctgcagctcctccagcttccgtttgttcgcctccacctgctgctcctcagctcgtacggcgtcgcttgcgccatctctcttctatctcccgtctcccttctgttccccacttcgatttctctgtgggtggttttcgaaggcgaacggaatggaggagcagaggaggagaggagaggagaggaggaggaggaggaggaggcggcggcggcgaaataataataattctttcgatttccttttcc

SEQ ID NO: 6550 - DNA, 1096 bp, Zea mays
  Zm_smallRNAprecursor_2039
gagtgagagtagggttggtaaacctcagacgctgaagggtgtctattcccttcagagtgaagtcgacgggagattcatgcggaccgcggctgacgttcgccggatgcatgtgcagtccggtgacgtagagagcatcaggcgacggaaggtcgacgaagtcgtcgaaagccccatcctcctcctggcagggagcatacccagaggaagacgtgctacgacgaggatgagaggcgccaaccttttggcgtctcccgcgagtcggctgcgaaggcatagaagagccctcgccatccttccgaccagagccatgtcctctcttagagagggagcgacgaggcggaggagaggggacgggagattcctcctgaatctcgtcggagtcgctgctaaactcaatcacagaggggttgcgacgacgcaccatgattgaaaaggtggtgaaactgagaaccggttgaagtgtgtgaaggagaggctctaaaggttgtgaagcgaccaaggcgagagtgaatgaagtgggagaagagaaggggagagtcaagtatatataggcagttgagctggtcctcaggaccagttcaaccgcccccatgggccagttcagctggttctgaccagtgtggtcagagaaccagaaacagcagagggaagatgccaaaaaaattgtttccttgctgcgcaggtgacacagtgactggccacaagagcgaaaggctgcgcacacgacagtagtgtggggctgtaaaaaaaatgtgcgcgcagctgctggaagcgactggacaggaaaaatttgcgcccctgacacgcatgcatggctagtgcgcgggcagagcagaaacgtccaagaaaaatgctgcgcgcgcccagacagaggggaagtgaccggactctgcatgcacacccagaaaaaagattctgcatgcacaccagaccggactccacaaaaaaaagattctggcgcgcacaggccctgctgagcggcaacaagcaaaaaaagagtactctgcgcgcgccgcaggggaagtgaccagacgcagaggaaatgaccggtcatgcaggatgcgaccaaaaaaaaattcacgccaggctgtcagca

SEQ ID NO: 6551 - DNA, 1194 bp, Zea mays
  Zm_smallRNAprecursor_2040
ctaaccgtgcctagcaggccgggcccaaaacgggccgtgcttcaccgggccgggtggcccgtttggccatctctagtgccaaccggtgagtgaagagctaactgctgtatgaataagctagatagtaagaggagggacgacgagatcgagatcctatccctatatatagagtatactagtagtgttctctctcgcctcgctcggcgcattggagaggtagtagctagcgcacgcccttcgtccgtcaagcccagtagcccacacctgcacctctatggcactattagcacctctatctagttcttctctcttcagcctcggatccaggcgagcaccatacccctgcaaataataaggttaccagcttgcaggcagccacaggcacggtacttcagagcaatacactaatacttcctctgccaggattcaggcacagtattgtatttggaattattgaacagtgtatttcttgtacaattcgactcataagttttttaagattcatcacaggcttcaactacaacttggctagagaaattttaaaagaaggtatgtagctggtttgtttaatttatttatcctcccaaatatggttactgtccagacacaaagatgtgttttgtaggataaataaattaaggaaatctactatatatatataactttctttggaatttgtctcgcatatgttatagttaagccgtgtgataaatcttatggaactcatgagctgaattataagatataccctgtttaataatcctaaatacagaacagacgatcaaactgacatgtagctactggctgaaagggaacgagtagacagaataatgcttggaagctttgctgtctcgcttttgatggtagaggcgatacgcgcgcgtatatacatataggatccgtcggagaatgttgaagacttgaagtcgccctacttttgggggctagattttctctctctttttctttctttctttctttctttctttctttctttcttttttttgcagagaagtgatgcgggtatagttacttcaagataaaagcgtcaaagtaatgtaaatgagctatgggcttttgagcaagcagggagcgagggccactgcctgtggtcttgtttcttcaggtaaagaaaaacagttcttcctgagtgaggggtagccaagatcgacgactggcggcaggtgtacaagc

SEQ ID NO: 6552 - DNA, 1192 bp, Zea mays
  Zm_smallRNAprecursor_2041
taaccgtgcctagcaggccgggcccaaaacgggccgtgcttcaccgggccgggtggcccgtttggccatctctagtgccaaccggtgagtgaagagctaactgctgtatgaataagctagatagtaagaggagggacgacgagatcgagatcctatccctatatatagagtatactagtagtgttctctctcgcctcgctcggcgcattggagaggtagtagctagcgcacgcccttcgtccgtcaagcccagtagcccacacctgcacctctatggcactattagcacctctatctagttcttctctcttcagcctcggatccaggcgagcaccatacccctgcaaataataaggttaccagcttgcaggcagccacaggcacggtacttcagagcaatacactaatacttcctctgccaggattcaggcacagtattgtatttggaattattgaacagtgtatttcttgtacaattcgactcataagttttttaagattcatcacaggcttcaactacaacttggctagagaaattttaaaagaaggtatgtagctggtttgtttaatttatttatcctcccaaatatggttactgtccagacacaaagatgtgttttgtaggataaataaattaaggaaatctactatatatatataactttctttggaatttgtctcgcatatgttatagttaagccgtgtgataaatcttatggaactcatgagctgaattataagatataccctgtttaataatcctaaatacagaacagacgatcaaactgacatgtagctactggctgaaagggaacgagtagacagaataatgcttggaagctttgctgtctcgcttttgatggtagaggcgatacgcgcgcgtatatacatataggatccgtcggagaatgttgaagacttgaagtcgccctacttttgggggctagattttctctctctttttctttctttctttctttctttctttctttctttcttttttttgcagagaagtgatgcgggtatagttacttcaagataaaagcgtcaaagtaatgtaaatgagctatgggcttttgagcaagcagggagcgagggccactgcctgtggtcttgtttcttcaggtaaagaaaaacagttcttcctgagtgaggggtagccaagatcgacgactggcggcaggtgtacaag

SEQ ID NO: 6553 - DNA, 1193 bp, Zea mays
  Zm_smallRNAprecursor_2042
taaccgtgcctagcaggccgggcccaaaacgggccgtgcttcaccgggccgggtggcccgtttggccatctctagtgccaaccggtgagtgaagagctaactgctgtatgaataagctagatagtaagaggagggacgacgagatcgagatcctatccctatatatagagtatactagtagtgttctctctcgcctcgctcggcgcattggagaggtagtagctagcgcacgcccttcgtccgtcaagcccagtagcccacacctgcacctctatggcactattagcacctctatctagttcttctctcttcagcctcggatccaggcgagcaccatacccctgcaaataataaggttaccagcttgcaggcagccacaggcacggtacttcagagcaatacactaatacttcctctgccaggattcaggcacagtattgtatttggaattattgaacagtgtatttcttgtacaattcgactcataagttttttaagattcatcacaggcttcaactacaacttggctagagaaattttaaaagaaggtatgtagctggtttgtttaatttatttatcctcccaaatatggttactgtccagacacaaagatgtgttttgtaggataaataaattaaggaaatctactatatatatataactttctttggaatttgtctcgcatatgttatagttaagccgtgtgataaatcttatggaactcatgagctgaattataagatataccctgtttaataatcctaaatacagaacagacgatcaaactgacatgtagctactggctgaaagggaacgagtagacagaataatgcttggaagctttgctgtctcgcttttgatggtagaggcgatacgcgcgcgtatatacatataggatccgtcggagaatgttgaagacttgaagtcgccctacttttgggggctagattttctctctctttttctttctttctttctttctttctttctttctttcttttttttgcagagaagtgatgcgggtatagttacttcaagataaaagcgtcaaagtaatgtaaatgagctatgggcttttgagcaagcagggagcgagggccactgcctgtggtcttgtttcttcaggtaaagaaaaacagttcttcctgagtgaggggtagccaagatcgacgactggcggcaggtgtacaagc

SEQ ID NO: 6554 - DNA, 1081 bp, Zea mays
  Zm_smallRNAprecursor_2043
cagcggtgaccgggcggcttcagttttatgccggccggctccgccagtgtctagcatgcagtagctaatttgattatatatatgccaatcctatttctctaaaatatagcaatactgtgaataatgaaatatacatatccgctgcaggaagccaagcaaagcagatacctctacgcggctctcttcctctattgcatttgcagtagcaatacgtactgtttgctagaattttcggaataggctggctccggcatctccttgccaagatctttggggcaggtgacgagttgcacggtggtgaatcccagacgacggccacatctgatgagacatacacaatgccgtcgtctttgtcatcattctacctgacagttgagaagacgatgaccacatatgatgagatctacacagtgccatcgtcttagtcatcattgtacctgacacccgaggagacgccgaacaatggtgccatttcgataagcaactacgacactgatgaaccaccttcgccgccacatgtatcgttggtatctgatgagataaacatttctgaatcatcacctccgccatctccgtcgccacatacagcggatgagatggacaactctgaggcgtcaccttcacctttgtctcacaccatagaactccaaatgtttgaggtaccaaccacctctggcaataatgaggaggacgaggaggatgacgattcttttagagaatgagagagtgattaaatgttttcatcagttaacaacacctcaattgtagaaaggcatcagcgatatgctataatataggtggagacatgtttgtcgtatggatttgtttgaaatggtaagacatgtttgatgcgtatacttctagccatactcctcttgattagtaaggtatgctcacggatgaatggaatttgaacaagctcgtttatttggcggttcatggtgtcacttaggcttgttgaagttccctaatccttcaaagatcacaatataatacaaacccttgtcacaggaggaacataattaaatttatttatcagatgataaggagtattgagtcatattaaacaaagattatatat

SEQ ID NO: 6555 - DNA, 1171 bp, Zea mays
  Zm_smallRNAprecursor_2044
cagctctgctgcgcgcgcagactttctttatttattttctctgtccagttacttctcctcgcgccatgcatattttctttctttcttgcctcgctcaagtgcagggagcgcagacatttttttgagcagtttttttggtcgctgcgcagcaaaaccagctgaactgggccatgggggcagttgaactggtcctgaggaccagctcaactgcctatatatatttgacactctctccttctcttttcccacttcattcactctcgccttggtcgcttcacatcctttagagcctttccttcacacacttcaaccgcttcacagtttcaccaccgttttcaatcatggtgcgtcgccgcaacccctctgtggttgagtttagcagcgactccgacgagattcaggaggaatctcccatcccctctcctccgcctcgtcgctccctctctaagagaggacgtggctctggtcggatgcctggcgagggctcttccttgccctcgcagccgactcgcgggagacgccaaaaggttggcgcctctcgtcctcgtcgtagcacgtcttcctcagggtatgctccctgccaagaggaggatggggctttcgacgacttcgtcgaccttccggcgcctgatgctctctacgtcaccggactgcacatgcatccggcgaacgtcagccgcggtccgcatgaatctcccatcgacttcactcagaagggaatcgagacccttcagcgtcttaggtttaccaaccctactctcactcctcgtcatcctggtgtccaggaccctcggttctggaatcttttccaggctgacttctacaattctgttattcttaccaagaaacacccagtcgtctgacatagatttattgactgggagggttgtgagaatatgggagatgctgacatgacgtcagctctcgaaaaccttgagagaaaggggttacgtaacattatgaccatggaatacccctggaacgatgaggtggtagctcagttctatgccaccctctggataaagaaagtagatgaggaagccgataggtatgattacccagtcatttatttcttcatccagggtaactggcacaaagtcagttatcgtcgttttgcccatattctgggcttctctgatgcagacattcagggcagcaacatgcgagtgca

SEQ ID NO: 6556 - DNA, 1058 bp, Zea mays; identical to SEQ ID NO: 5006
  Zm_smallRNAprecursor_2045

SEQ ID NO: 6557 - DNA, 1141 bp, Zea mays; identical to SEQ ID NO: 5007
  Zm_smallRNAprecursor_2046

SEQ ID NO: 6558 - DNA, 1057 bp, Zea mays; identical to SEQ ID NO: 5008
  Zm_smallRNAprecursor_2047

SEQ ID NO: 6559 - DNA, 1058 bp, Zea mays; identical to SEQ ID NO: 5009
  Zm_smallRNAprecursor_2048

SEQ ID NO: 6560 - DNA, 1130 bp, Zea mays
  Zm_smallRNAprecursor_2049
atccactatcaaggccttgataatatgaaataataacaagtgatcccatgctacatgggtttttttaattacttatacaacttaaagttgtatacaaaattctcgaatagaaaagaagaagaagaaaagtacataattcttgaaaatacaaaacaagataaaaaacttcatattcttgagagtgatgaagaagaaaaatacataattcttggatacaaaggaagataaaaaaaatagtacaagataaaaaaggtacatacattcagttgacgccacgtagtaccatgatacgccttggggtatttattttggcagtctgaaggtagcatgtccaagcagatgcggaatacttttgttgagtacatgaattaaacagggtcgtgcacaagcacgtgcgaccaatttggctgaacagggccccatttttttgtgcccctaagagcaactccaagagactaggtatatggttttgtaaagttaaatttagctaatattgaaagaaaattgtatccaatagactctgtaaacgactcttcaaatttagtggctctttatttctccatcttcgctctctaattttggatagcctgcttcactctctattcagtctgtagatttaccgagtctgttggattagcctacacttttttctctaaaatctattttagagagtagctaaatcagtaaatttgactaatgtttttagctaatctcttggagttgctctaaacttccatctataaaggcctattagtaattagtgattaggtcattaggatacaactggaacttaaaatacttggcgcatcatcttcgttcgtcctcgtctgccgcgagggcgctcctaccgttctgctcgatctcgcttgctctaccatagtgtcgtggctgcacgcctacgaaaagatatgcctagagaaagatcaaagatacatccagggcgacaggcccccatgcctaggtatgtctccactctcaaggctacagaccctatcctattcatatatattagggactcaaatagcatctataagttatcagctttagctttggttgtgaacgttcaaatgtacttaggaaaaaaccaaccaaattacaaggtacctccggtatcttagtatatgtatata

SEQ ID NO: 6561 - DNA, 1114 bp, Zea mays
  Zm_smallRNAprecursor_2050
gcgggctcagtgaatcgggtgtacataactccgtatgttcactacaccaaatccccccaaaaaaattatggttaaagaccgccaagaaaatattttatgatggactatagttaagcaatgcccaccaaatatagagagcaaagaaattctctgacggtttggccgtcaagaaaattgggccatagcaaaagttagtgaaccaccaaataaaatcgtacagacacgtcacgcatatggtcaaaataaacacggattttgccatgagcattcaagttaataatgtttgttcacaataaatgagcccctcattgacggtagccatcgacactgggcagcaacttcgtcgtatggtttgtcaattcgattcaacggttcggggacttgaacaaaacagaaacagtgtctaaaaagccaagacgccataattaggaatatggacagtacgtgtgaaaataataacggcttagcctaagggggtgtttggtttgtagggactaatttttagtccctacattttatttcactttagttacaaaattatcaaatatagaaactaaaactctattttagtttattttagtttctatatttgtcaattttatattaaaatggaacaaaatgaagggactaaacattagtccctagaaaccaaacacctcataaattgccaaagaaaatggacgtgcaacgaaaatatggaatttaccagtatcagtctgtcatttacatttcgtaatggagcattgagcacccgttgtattcgtatatctacatgaataatggtctcataacatctcctgacaacaaatattcattacgattgggaacataacctaaatccttactataaacattcctagaccaattttactcatccaaataacctgtggcctgtggcttagtaaaatttaagtcgtctccaaaatgtccaagacatcactgctcttccaaacacaatataagaggtatacgtgaataaaaaccttgattctaattctataacaggttactttcgggacagtagaacaaaaatacagtggtagtgatcgttgtgttagtaagagcgccgaacctgctgatggttaagaagatataattctgacccacggcgcca

SEQ ID NO: 6562 - DNA, 1191 bp, Zea mays
  Zm_smallRNAprecursor_2051
accagagccggatggcctagggtcaccaggaatgggtcccggaccagggtaaggaggcggagggtgagaggatgattgacccggatccccatggtagggaggcggagcaaactcctcgcgatcatcaacataaacttcttcatcttcatcgtctgcagacataaaaggcaccccgtaggcctgctggtgccactcattgatctccgggggaggaggatggagaggcacatcaggcgaacgagggacaaaaggcatgcccatggaggaagcttgacgacgaagattgtcgtcagtctcccgctgacgccgtgccacctcatggacatcagcagaaatgttgcggcacatggagaaaaatgccgcaagcccatggaccaagcgagcacccatcccgcggccacgacctcgaccacgaccacgagcacgtggcatgggagatccgcggccaggagagggacgcgaggcagcagcggggggagaggaggaaggatggtggggaggctggcgaggtggctcagaggaggaggcagggcctccagacccgtgagggaaccctcttcgtacgagcagctgggttggaggaatcaacccagtagggtacgtagcgggagtgtttgacgggtttttcgaagtgggtctgggtgaccacttcgattatcttcatgataaagggtgcatgaagacaccctctgtgaggagaccaggaagcacggacgatctcctcccagatcatgtcaaacacattgatgcgggcgagacagtttggagcaaggaggaggaggaggactcgactctccccaaggacgttcatttgattaccgccctttgggagaacggtcatccgggacaaagaattaaggtacctgtagtacctatgcatgttagcggttgtccagaactcccgctcagtagagacatgaatgaattccgtctcttcccgcatgggcagccgaatgccatgcactcgcatgttgctgccctgaatgtctgcatcagagaagcccagaatatgggcaaaacgacgataactgactttgtgccagttaccctggatgaagaaatacatgactgggtaatcatacccatcggcttcctcatctactttctttatccagagggtggcatagaactgagctaccacctcatcgttccaggggtattccatggtcataatgttacgtaacccctttc

SEQ ID NO: 6563 - DNA, 1068 bp, Zea mays
  Zm_smallRNAprecursor_2052
gaatgaattccgtctcttcccgcatgggcagccgaatgccatgcactcgcatgttgctgccctgaatgtctgcatcagagaagcccagaatatgggcaaaacgacgataactgactttgtgccagttaccctggatgaagaaatacatgactgggtaatcatacccatcggcttcctcatctactttctttatccagagggtggcatagaactgagctaccacctcatcgttccaggggtattccatggtcataatgttacgtaacccctttctctcaaggtttacgagagctgacgacatgtcagcatctcccatattctcacaaccctcccagtcaataaatctatgtcggacgactgggtgtttcttggtaagaatgacagaattgtagaagtcagcctggaaaagattccagaaccgagggtcctggaacccaggatgacgaggagtgagggtggggttggtaaacctcagacgctgaagggtttctattcccttctgagtgaagtcgacgggagattcatgcggaccgcggctgacgttcgccggatgcatgtgcagtccggtgacgtagagagcatcaggcgccggaaggtcgacgaagtcgtcgaaagccccatcctcctcttggcagggagcataccctgaggaagacgtgctacgacgaggacgagaggcgccaaccttttggcgtctcccgcgagtcggctgcgagggcatggaagatccctcgccaggcatccgaccagagccacgtcctctcttagagagggagcgacgaggcggaggagaggggacgggagattcctcctgaatctcgtcggagtcgctgctaaactcaaccacagaggggttgcgacgacgcaccatgattgaaaaggtggtgaaactgtgaagcggttgaagtgtgtgaaggagaggctctaaaggttgtgaagcgaccaaggcgagagtgaatgaagtgggagaagagaaggggagagacaagtatatataggcagttgagctggtcctcaggaccagttcaaccgcccccatgggccagttcagctggttctgaccagagt

SEQ ID NO: 6564 - DNA, 1037 bp, Zea mays
  Zm_smallRNAprecursor_2053
tccctgtccaggattaaatattctagcttctgctggacaaccccatatatggaagtagttgagcgtgggttttctgccagtccacaactcatatggagttctagtcactgatttactaggaactctgttgagtatatgcatagcggtttttaaagcctccatccatagacccaatggcaggttagagaaacttagcatactccttaccatatccattagcgttctgttacgcctttcggcaaccccattctgttgtggttcgccaggtgttgaatactgagcaacaataccgttttctcttaggaacctcgcgaaaggtcctgggacctggccatactcggtatgacgcccatagtactcccccccacgatctgatcgaacaatctttatcttcaaatcgtgttgattctctacttcagccttgaactgtttaaacttgtctaaagcttctgatctttccttaattggataaatataaccgtagcgagagtagtcatctgtgaaggttatgaacgagttaaacccatctactgtcctaactggaaaaggaccacagatatctgtatgaataatttctaacactctcgtactatgcttagcatctttcttaatctgcttcgcgaatttacccttaatgcaatctctgcattgctctaagtctgtgaaatctaggggatggagaatctgttccttaacaagactttctattctccccctcgaaatatggcccaaacgatagtgccataatttcgacgaggtttctccatcacttcgttttcttttcctgccactgttggctggatcattttctggtatatctaatacattaacaacatcactttgcgaaagtaaataaagcatatctcgtcggatggcgagaccaacatctttattatcaaactgaatgacacattgtctatcaccaaaatgacaatgaatgtgctgatcatctaatctagaaaccgaaataaggttccttcgcaaggaaggtacataaagtacgtctctcaacaacagtacaaaaccattaactaatt

SEQ ID NO: 6565 - DNA, 1160 bp, Zea mays
  Zm_smallRNAprecursor_2054
acttggtccttaccactctctagtagatactgcaggaattcagggcactttctcttgtaatgacctgtcttcttgcaatagaggcaggtatcagggggaactgagaaactgcctccttgtcttggctgattattattgctcgaggaagcctggttattctgtttaccttgcttcttgaactttttctttgagttcttgttctgtctggggacattgcctttgatgagattgacagagtctccagtctgctttaacctctcttcctcctggacacactgtgccaagagttggtctatattccacttatcagtgacactagtgttgtactgtatgtgaaaagtctcaaactccttgggcagagacttcattatcataaatactacaaattcctcgtgtaaaggagacccgaggtatttgtttatcttagctacgatggatatcattttctgaatgaatggtctgacaccatttccatcgtattttgcattgacaaattctgtcattagagagcaagcataagccttagaagacccttggtgatgagaggctaccctctcaaggtattctttggcagtctcgcactctggtatggaactcttaagaggctccttgatgctcctcttaagaataatcatacatttgtcatttgatctctcccacttgaccttgtcgatgctgtattgcatccacctgtggtcatagttgggagtgcccactgtgggctcaactggtttatcaaacctcagtgcgtaatctatctcacccactgtggttatcatgtctatatcctcccgccaagaatggtaattactaccatctagcggtttcatctgagcaatctggctaatcagcatggcggtatgagcacctttgcaaaattaaaacagaaaatatttaggacatctgaaataaatactgaatactgaatcatagaacatgcatgaattaaatattcaacgttggtcaaataataaccatgccatatctatgaaaatttctgatcacaaaatttctaaaccatcgttggatgatatagaaaacataaacttgtattaaattgtggtaacaatattcaacgttggttgaaatattcaatcaccacaaaattttctgaattctatgcaatttaagcaataatcaatccacgttggtttcataat

SEQ ID NO: 6566 - DNA, 1148 bp, Zea mays
  Zm_smallRNAprecursor_2055
gccagcaacagtgtctactaccttctaagtctttggtcaaggctggtgacatccgtgccttacttgaaaggtgaaacaccaagtcttcttgatgaaactgttcccaagatcacagaaggttttatcacttccagaattaattctgttcaggtattagttcatacgggatgcttctgctcttttcagttcaaaaaagtttgtttttaccatttttgtcatttgttgtttctacccttctcaggccatccttgctgacaactcactggaaaatcctttggatagtgtggaagttctccaggaccagctggagtttcttcctttcctttgcagattccaggtgttacctaattttggtttttggtgtttcaaaaactattcatctggttctccttttttaatacagtagggaataagatcctttaaattcttaattgatcagtttgagatcttcctgtacttatgctctgttccagcctagtgcttgttcggttaggggtggattgagggggattggaggggattaaatccctccctattcaattttgattagggagggatttaatccacttccaccgagtgcaggaaacacattgttttctccccgtattttactatggagggatttaatcactccaatccccttcgatccagacgcaaccgaacaagccctcaatcccctctaatccccctgtaactgaacagggccttattagggtaaatgatgataaataaaattttctgaatctggattgtaaatttgcctccaatttgtatatgttaacttaatatggataatttttagttaattaaatgaacaaaaaaattataagtactcttcctaccaattggacagctgagattccttattattttttccgacttcatttaatattttcctacaacgtttcatattacattacacaacctgattcttcttttctttcaatgaattgcagtaccaaagtagtagtctgtacatcataaacatcatggaacctcttctgcaagcttatacggtatgtttgtgttgtttcacacaatcctttttttaatataattatattaaaaaataatctactacaggaaaggtccagattacccgctcctggtgatgctgatgagctgtctgtcattgaaggccaaattgc

SEQ ID NO: 6567 - DNA, 1126 bp, Zea mays
  Zm_smallRNAprecursor_2056
acacaacaaacatcatgtatgttctatttgtcgagcttgttgagtttgtgatccaaattctacatataaagaccgtacgtgttggcgagcgtggagtctcatgttgctaatttttttttactaatgtgagactaattaaacctaacacaaactccaatttgcatcagagctaccatggatggattcacagcttacgtgattatagagaagtaaaagtcgtaaaccatcataggaatccaaacgtacacacgcagcccaaccaatcggcaaacgaggtgtgtggaatgcatgcatgtctgccggccggcgcctgtgaggcactcagacgcgcctgaaaattcatgctgtgtcgtctctcctgtgcaaatggcgtcgtggttggcgacacgtcttcgaccaatctatgctatgcgcacgcacgttcctctttgcgctcgccgatatggacccatcggcggcaccgtatcttatgagcaagcagccctgctgctcccatgagcaaaatcaatccagaccacatcctccacatccaacggtgttgtgtcaggggggttttgtaaaatgtacagagttgcaaagaacattttataaaaccccctgacacagcaccgttagatgtgaaaggtgtggtctggattgattttgctcatgggagcaccagcgctctttgcgcacaagatacggtctccccatcggcatcgcgtaggtagctagagaggagctagctaggtttcggatcctcatatgcatgcaacgcaggagccagggaggatcgagatcgacgacggcgatcgatcgagcatgcgcagagggttcaggcgtatgcaaatcctcgcaggagcgcacctgccgcaccaccatggaccacgccgatcgaggactcgcatcagcaagcaccatcctcctgacggtcttgcgaagaaatcaaaggcgccaaccactctttgcccccacagcaaactgttcttctcttttgtttagatgcgtacttaaagctggatcggaaaaaaggggagacgaagagatatgctagctatagtagctagcttttccattcgtttgctttgggcaaatgggctcctctgcgctgcggcgcatctgggcctgcgcgtctgcaatactagct

SEQ ID NO: 6568 - DNA, 1190 bp, Zea mays
  Zm_smallRNAprecursor_2057
accagagccggatggcctagggtcaccaggaatgggtcccggacccgggtaaggaggcggagggtgggaggatgattgacccggatccccatggtagggaggcggggcaaactcctcgcgatcatcaacatagacttcgtcatcttcatcgtctgcagacataaaaggcaccccgtaggcctgctggtgccactcattgatctccgggggaggaggatggagaggcacatcaggcaaacgagggacaaaaggcatgcccatggaggaagcttgacgacgaagattgtcgtcagtctcccgctgacgccgtgccacctcatggacatcagcagaaatgttgcggcacatggagaaaaatgccgcaagcccatggaccaagcgagcacccatcccgcggccacgacctcgaccacgaccacgagcacgtggcatgggagatccgcggccaggagagggacgcgaggcagcagcggggggagaggaggaaggatggtggggaggctggcgaggtggctcagaggaggaggcagggcctccagaccgtgagggaacccacttcgtacgagcagctgggttggaggaatcaacccagtagggtacgtagcgggagtgtttgacgggtttttcgaagtgggtctgggtgaccacttcgatcatcttcatgataaagggtgcatgaagacaccctctgtgaggagaccaggaagcacggacgatctcttcccagatcatgtcaaacacattgatgcgggcgagactgtttggagcaaggaggaggaggaggactcgactctccccaaggacgttcatttgattaccgccctttgggagaacggtcatccgggacaaggaattaaggtacctgtagtacctatgcatgttagcggttgtccagaactcccactcagtagagacatgaatgaattccgtctcttcccgcatgggcagccgaatgccatgcactcgcatgttgctgccctgaatgtctgcatcagagaagcccagaatatgggcaaaacgacgataactgactttgtgccagttaccctggatgaagaaatacatgactgggtaatcatacccatcggcttcctcatctactttctttatccagagggttgcatagaactgagctaccacctcatcgttccaggggtattccatggtcataatgttacgtaacccctttc

SEQ ID NO: 6569 - DNA, 1148 bp, Zea mays
  Zm_smallRNAprecursor_2058
atacccatcggcttcctcatctactttctttatccagagggttgcatagaactgagctaccacctcatcgttccaggggtattccatggtcataatgttacgtaacccctttctctctaagtttacgagagctgacgacatgtcagcatctcccatattctcacaaccctcccagtcaataaatctatgtcggacgactgggtgtttcttggtaagaatgacagaattgtagaagtcagcctagaaaagattccagaaccgagggtcctggacaccaggatgacgaggagtgagagtagggttggtaaacctcagacgctgaagggtgtctattcccttctgagtgaagtcgacgagagattcatgcggaccgcgactgacgttcgccggatgcatgtgcagtccggtgacgtagagagcatcaggcgccggaaggtcgacgaagtcgtcgaaagccccatcctcctcttggcagggagcataccctgaggaagacgtgctacgacgaggacgagaggcgccaaccttttgacgtctcccgcgagtcggctgcgagggcatggaagagccctcgccagccatccgaccagagccacgtcctctcttagagagggagcgacgaggcggaggagaggggacgggagattcctcctgaatctcgtcggagtcgctgctaaactcaaccatagaggggttgcgacgacgcaccatgattgaaaaggtggtgaaactgtgaaccggttgaagtgtgtgaaggagaggctctaaaggttgtgaagcgaccaaggcgagagtgaatgaagtgggagaagagaaggggagagtcaagtatatataggcagttgagctggtcctcaggaccagttcaaccgcccccatgggccagttcagctggttctgaccagtgtggtcagagaaccagaaacaacagagggaagaaaaaaattcaaatttgcgcgcagctgctggaagtgactggacagaaaaaaatgggcgcccctgacacgcatgcatggctagtgtgcgggcaaagcagaaatgtccaagaaaaatctgcgcgcgcagcaggggggaagtgaccggacaaggcaaaggtgtctgcatgacaaaagaaaaaggtgcagcgcgacaaaaaagggcaggtgaca

SEQ ID NO: 6570 - DNA, 1096 bp, Zea mays
  Zm_smallRNAprecursor_2059
gagtgagagtagggttggtaaacctcagacgctgaagggtgtctattcccttctgagtgaagtcgacgagagattcatgcggaccgcgactgacgttcgccggatgcatgtgcagtccggtgacgtagagagcatcaggcgccggaaggtcgacgaagtcgtcgaaagccccatcctcctcttggcagggagcataccctgaggaagacgtgctacgacgaggacgagaggcgccaaccttttgacgtctcccgcgagtcggctgcgagggcatggaagagccctcgccagccatccgaccagagccacgtcctctcttagagagggagcgacgaggcggaggagaggggacgggagattcctcctgaatctcgtcggagtcgctgctaaactcaaccatagaggggttgcgacgacgcaccatgattgaaaaggtggtgaaactgtgaaccggttgaagtgtgtgaaggagaggctctaaaggttgtgaagcgaccaaggcgagagtgaatgaagtgggagaagagaaggggagagtcaagtatatataggcagttgagctggtcctcaggaccagttcaaccgcccccatgggccagttcagctggttctgaccagtgtggtcagagaaccagaaacaacagagggaagaaaaaaattcaaatttgcgcgcagctgctggaagtgactggacagaaaaaaatgggcgcccctgacacgcatgcatggctagtgtgcgggcaaagcagaaatgtccaagaaaaatctgcgcgcgcagcaggggggaagtgaccggacaaggcaaaggtgtctgcatgacaaaagaaaaaggtgcagcgcgacaaaaaagggcaggtgacagacctgcgaccggtcaaaaaggtgctgcgcaactgaaaaaattgcaggtgacagacctgcgcggacaggccggtcagagaccggttcaaccggtccactatgccggttcaaccggttttaaccaggatggtcctggtaaaaactggttaaaaacagctgagctgaagttcagctgctaagttcagctggcctcctccagctgaactagaaagttcagctggtcaagccagttgaa

SEQ ID NO: 6571 - DNA, 1097 bp, Zea mays
  Zm_smallRNAprecursor_2060
gaacgttttcatgggagtcgacgctgactcccatgaaagcgctgttccacctccatccacggcagcctggctggcgtctggcgccaccttccacgaaccgagaagcgtcggtcggcggcccgtactaatgacaataaatatattatgtttttctttttcgcaaaaaaacgtattaggtttaaagtaaaaaaactagaaaaatattaaagtattttgcagcaaaaaatacatagagaccaaagtactgtacttattctactccaacggtacttgctagtttaaaccgtaactatgtaggtgtgctatctttctttgatcgttcgccggtgcttggcggtagatgagcaggtgactgtgagtgacaggtgagcaatagctttctccgaccagaagcgtcagtgcgagtcaggcgccgccgacttccttcctgttttgtttgcctcgtgacacgcacgtacgactcccttcctgtccattagctaccgatgattcgggcgtgtttggtttacggtagattttaagaatctgattttaagaatatattatggatccaaacagagtttattctgtgccttagattctgcgctcatagaaacaaaatctgtagaatcaagccatagttgggttttcttgggtaacgtgaacatgcagattttaaaaatctgcggaaaccaaacgcggccgaagattcatcacgggatagatggtggtgggtatgaaagtcttcgccaagagtggccggtagtttgttgtataaaatactattttatattatatatgatgttgtttatagattggagattagatatatagctcgaggaccggctaaaccttcgtgccgtttttatcttcttcttctcctcattgtttatattctcaccaaaacgttcaccactttatgctagattatgattttcttctatcgatgaaaaaatcattgctcttggaaatatctttttccgtacatgtaaattgcatcatgatttttttatttcacatattgtataattcaaaatattaatgagcttatagctcctaaaaactatatatatatacacatatatatatatatatatatatatatatatatatatata

SEQ ID NO: 6572 - DNA, 1043 bp, Zea mays
  Zm_smallRNAprecursor_2061
tctttctttctcaaattttgcttcacatagtcttgcctcttctcatttgcttgagccttcttctcaagattgtcgggacaccttgaggcaaagtgacccatatcatcacacatgtagcacttgatttgagccaaaccatccttcttcttttgatttgtgctcatcatgttatcttgattatatattgaatgtcttcttcttgttttctttttcttccccacatcaccattatattcatggttaatcttgatttgcttttggggatccttcctttgctcaactcgtggctttggttgaggcttcacttgtggcttcactaatttcttggttgggcacattgaggtgaggtgaccccaagtgtggcacttgaagcacttgtcatgctttagcctcctttcttccttcttcaacttgagcttccttttattggggcatgcctttgcaagatgacccatctcatggcatttatagcacatgaagtgagatagctcatttccttttaatttgaattgtctgcctttgatattgctcttgttgaaaccaaggccactcttgtcatcatatcttctttgatttttcaatataagatcatgagtgacttttgatttatgccatctctcaaacatgttgcttaaattcttcactttgtttttgagcttattattttccttcaaaaggttagtctcacaagacaaggaagaatagtaataatctatacttgaagaacatggcatagctaataaatcatcacaagaggtggatacatgcttcttgtcttcatcacatggattagcaacatttttcaattgatcatataattcatgagatgaaatctcactagttttattttctttactagaaaatttgttagtgagaaaagcatgctcttgtatcaaattttcatgagcaacactaagttcctcatgactcaattttagctcctcgtgtgaacaagtaacaacataaagtagatgcttttgttgttcacatgaatactttagaaatgagttttcattttccaagtttcttgttttatctttctc

SEQ ID NO: 6573 - DNA, 1067 bp, Zea mays
  Zm_smallRNAprecursor_2062
tccccacatcaccattatattcatggttaatcttgatttgcttttggggatccttcctttgctcaactcgtggctttggttgaggcttcacttgtggcttcactaatttcttggttgggcacattgaggtgaggtgaccccaagtgtggcacttgaagcacttgtcatgctttagcctcctttcttccttcttcaacttgagcttccttttattggggcatgcctttgcaagatgacccatctcatggcatttatagcacatgaagtgagatagctcatttccttttaatttgaattgtctgcctttgatattgctcttgttgaaaccaaggccactcttgtcatcatatcttctttgatttttcaatataagatcatgagtgacttttgatttatgccatctctcaaacatgttgcttaaattcttcactttgtttttgagcttattattttccttcaaaaggttagtctcacaagacaaggaagaatagtaataatctatacttgaagaacatggcatagctaataaatcatcacaagaggtggatacatgcttcttgtcttcatcacatggattagcaacatttttcaattgatcatataattcatgagatgaaatctcactagttttattttctttactagaaaatttgttagtgagaaaagcatgctcttgtatcaaattttcatgagcaacactaagttcctcatgactcaattttagctcctcgtgtgaacaagtaacaacataaagtagatgcttttgttgttcacatgaatactttagaaatgagttttcattttccaagtttcttgttttatctttctcaatttctaaagcaatgtccatgctagcaagtataccaacaagctcatcatatgaatatgaatgattagtcatattagcattatataccttcgtattaccttgtgacatgaagcaatgtgatgtaatggatgggtttgtagtagcgatatcattgtccgagcatgaacaatcaccataatcatcaagtatgcttgagatagaaacatcatttgcatcacttgagttagagccaacacaa

SEQ ID NO: 6574 - DNA, 1102 bp, Zea mays
  Zm_smallRNAprecursor_2063
ttgcattttaaattcgacaaactcggatgcaattttcttgagagctgagacgatttcaaataaaaaaagttgtcaactataaagtttcataactttttgatatctacaagttttattttgatttttttatcatccgaggtcatttgaaaaactcaaaaaaaaaaaggtttctagcggtggttccttaaaaaactgacactagaaatcatatttctatatacggttcgttaagaaaaccgtcactaggattccgagcatcggttttcttaacgaaccgtcactacaaatagtactgacggttgataaccgaaaccgtctgaaaatattatatgctaccacagactttgagctattttctactagtgatagagcaaagacataatttcttggtcaagatatatatgtgtcttcagtttttttatatttatactataatacatgctcgaagacacaacttaaaatattgattgtatatgctctactactactacactaggggcttgtttgggagcaagtggaatgaagggtattgataggactataatcccttgctatctaaaattgaatagtggaggattatatgccctccaatccactccattacctttactcccaaacaagccctagaggggcccatagtcgtccgtctgcgatcatctccgtgatcgattggtttatcatcatgctgccttggtggatcgatatagcgcgtacgtgtcggcttctcggcgtttcgtatgggcctggcctgcccaagaaagaggctgcatcttttgctatgaattcgcaatcaggctgctggtcattccgcaaagcataagtaacatcggctgtctaatgccatgaattatatgtatcgacgaggtcgtcgttccacgtatgatgtgtgggcgttcgtacacgtaccggtgtttggtttgatcaatcctcaaatttaatagtatgactttatttttcgtattagtaactaactataaagaataatataatatcaattcattctattcaacatactaaacaaaaaagtgagaaataagaagattatagactagatcattttcgaaccatacatgctagtattcgactgagcgcgttcatctga

SEQ ID NO: 6575 - DNA, 1136 bp, Zea mays
  Zm_smallRNAprecursor_2064
ttagctatatgcattcaaacagtccaattaaaagtgtaactaatagttagttatatcctaaatatttattagttgcctagctacccatacctggctaaaagcagctaacgagttttctgttcctccccaccgctctgcgaccgcatgaggcaccaggtgccgcacttcacgccgatgccgggccggtagggcagggcggtgcgctcatctccgctgctggtcccctccactgccatcgctgataccccaccaccgcagccaccaatcccctccatcgtcgctgcacctcgtcgcgattactggtgccctgcgctgtcgccggtcccttacgccgccatcgtcacctacgccgttgtcgtcccctgcatcgccaacgcacaaggtgcgaagatcgacatattagattagacaacgactaatatgcaagtgcgcgtgtaagtaggttttttgtctaggcaacgactgttgtgcaagcagtctttccgtgcaagcatgcaaacaaaccatctgatccgttagatcgtgatccaaccgtaggtcatatttaacacttaaacccttccaccaccagcttaataatctatataaaaaactccataacaaaccatggttgtatctgtagttggatcgtaatctaacggatcagatggtttgcttgcacgcttgcacagaaggactgcttgcacagcagtcgttgtcttttgtctattagatttagatctaaccgtagcatttaaatcctgccaccaccagcttgtgtagctttataaaaaagaccttaacaaatcatgattacacatacagttggatctagatcaaacggaccaagagagctgcttgtacgcttgcacctagtgactgcttgcatattaatcgttgccattagattaggacgaggactagctccatcccgatcggacagttcaatattgtttgctaatgctaattcaagagaggaatcagtggggtgttgtttatagatcgctcatttgcgcctttattgttcaaatgcaccctagtccttcgattttcaggaagaacgagtggttcattcatagtgttgtatcgtattgtgctgtgttgtgctgctgcgctttattgtttataacgaaatagttcagagtgattgttgcatt

SEQ ID NO: 6576 - DNA, 1141 bp, Zea mays
  Zm_smallRNAprecursor_2065
ggaaggtacataaagtacgtctctcaacaacagtacaaaaccattaactaatttaagatgtatatctccaatggcctcgactgctgcttcaactccatttgccactctaattgttcttcggccctttgggagcctttggcttgtacggagtccctgtagagagtttgcaacatgaacagttgcacctgagtcaatccaccaagaataactgggatattctaagtataaagactcatttacaaaagtaacttggtccttaccactctctaatagatactgcaggaattcagggcactttctcttgtaatgacctgtcttcttgcaatagaggcaggtatcagggggaactgagaaactgcctccttgtcttggctgattattattgctcgaggaagcctggttattctgtttgccttgcttcttgaactttttctttgagttcttgttctgtctgggaatattgcctttaatgaggttgacagagtctccagtctgctttaacctctcttcctcctggacacactgtgccaagagttggtctatattccacttatcagtgacactagtgttgtactgtatgtgaaaagtctcaaactccttgggcagagacttcattatcataaatactacaaattcctcgtgtaaaggagacccgaggtacttgtttatcttagctacgatggatatcattttctgaatgaatggtctgacaccatttccatcgtattttgcattgacaaattctgtcattagagagcaagcataagccttagaagacccttggtgatgagaggctaccctctcaaggtattctttggcagtctcgcactctggtatggaactcttaagaggctccttgatgctcctcttaagaataatcatacatttgtcatttgatctctcccacttgaccttgtcgatgctgtattgcatccacctgtggtcatagttgggagtgcccactgtgggctcaactggtttatcaaacctcagtgcgtaatctatctcacccactgtggttatcatgtctatatcctcccgccaagaatggtaattactaccatctagcggtttcatctgagcaatctggctaatcagcatggcggtatgagcacctttgcaaaattaaaacagaaaatat

SEQ ID NO: 6577 - DNA, 1160 bp, Zea mays
  Zm_smallRNAprecursor_2066
acttggtccttaccactctctaatagatactgcaggaattcagggcactttctcttgtaatgacctgtcttcttgcaatagaggcaggtatcagggggaactgagaaactgcctccttgtcttggctgattattattgctcgaggaagcctggttattctgtttgccttgcttcttgaactttttctttgagttcttgttctgtctgggaatattgcctttaatgaggttgacagagtctccagtctgctttaacctctcttcctcctggacacactgtgccaagagttggtctatattccacttatcagtgacactagtgttgtactgtatgtgaaaagtctcaaactccttgggcagagacttcattatcataaatactacaaattcctcgtgtaaaggagacccgaggtacttgtttatcttagctacgatggatatcattttctgaatgaatggtctgacaccatttccatcgtattttgcattgacaaattctgtcattagagagcaagcataagccttagaagacccttggtgatgagaggctaccctctcaaggtattctttggcagtctcgcactctggtatggaactcttaagaggctccttgatgctcctcttaagaataatcatacatttgtcatttgatctctcccacttgaccttgtcgatgctgtattgcatccacctgtggtcatagttgggagtgcccactgtgggctcaactggtttatcaaacctcagtgcgtaatctatctcacccactgtggttatcatgtctatatcctcccgccaagaatggtaattactaccatctagcggtttcatctgagcaatctggctaatcagcatggcggtatgagcacctttgcaaaattaaaacagaaaatatttaggacatctgaaataaatactgaatactgaatcatagaacatgcatgaattaaatattcaacgttggtcaaataataactatgccatatctatgaaaatttctgatcacaaaattctaaatcatcgttggatgatctagaaaaacataaacttgtataaaattgtggtaacaatatccaacgttggttaaaatattcaatcaccacaaaatttctgaattctatgcaatttaaacaataattaatccacgttggtttcataatt

SEQ ID NO: 6578 - DNA, 1096 bp, Zea mays
  Zm_smallRNAprecursor_2067
aactatgcgcgcagctgctgttgacaggaagcgactggacaaaaaaatcgttggcgcccctgacacgcttgcatggctgtgaggagaaaaaaatttgcagcatggcgcccaaacggactgtgcagaagtgaccgaacagagagaaaaaaaatttctgcatgcgcagcagctgttgaccggacaccacaaaaaaaaattgtgcgcgcattgacgctagagcacagcggatactgcatggctccctgacatttgcatgcattgctgagaccagacagccccaaaaaaagttactggcgcgcgggctgacaaagctgaggagaagcgaccggacggaacaacaaaaaaaatggcgcacactgacgctgctgagcggcagcaagcagacaaaaaaagtaatctacgcgcccagcagaggaagtgaccggtcaataagaaaaaaaaatgatgtgcgccctgcagagtggattggactggacaaaagaaaaaaggtgctgcgcgccctgcaggatgcgaccggattaaaaaatttgcacgccaggctgccagcagaagtggaagcgaccggtcaatagagaaaaagatgttgcgcgactgaaaaaaggtgcagctgacagacctgcgcggacaggcttgcacggacagacctgcgcggacagaccggtcagagaccggttcaaccggtccactatgccggttcaaccggttttaaccaggatggtcctggtaaaaactggttaaaagcagctgagctgaagttcagctccgaagttcagctggcctcctccagctgaactagaaagttcagttggtcaagccagttgagccccaaaaaaatcttagcactaaaatgcattcgaattttaacattttcaccaagtttttgaaagatcatcacatagctttaaaactatcaatcaaaaatagtgaatcaaacaatttttgtgaccgttttcaagttaagttacgagaatccaagatatttaattcactcctaagaaaacaaaacctagtctcatcgaggggttttgtgaagatatcggctagttgattttcggtgctcacatgaaacaattcgatatctcctttagcttcgtgg

SEQ ID NO: 6579 - DNA, 1038 bp, Zea mays
  Zm_smallRNAprecursor_2068
atggtatcccaaaggctcccttttcgatttacttggctattctgactcagattatgccggttgcaaagtagatcgaaaaagcactactgggacttgccaattccttgggcgatccttagtatcatggagttccaagaaacaaaattgtgttgcactttccactgcagaagctgagtacatagcagctggggcatgttgtgcacagttgttatggatgaagcaaacacttcgagattttggttgtgagtttaacaaaattccacttttgtgtgacaatgagagtgccataaaacttgcaaacaaccctgtgcaacactctagaactaaacatattgacatcagacaccatttcttgagagaccacgaagccaaaggagatatcgaattgtttcatgtgagcaccgaaaatcaactagccgatatcttcacaaaacccctcgatgagactaggttttgctttcttaggagtgaattaaatatcttggattctcgtaacttaacttgaaaacggtcacaaaaattgtttgattcactgtttttgattgatagttttaaagctatgtgatgatctttcaaaaacttggtgaaaatgttaaaatttgaatgcattttagtgctaagatttcttttgggctcaactggcttgaccagctgaactttctagttcagctggaggaggccagttgaacttagcagctgaacttcagctcagctgcttttaaccagtttttaccaggaccatcctggttaaaaccggttgaaccggcatagtggaccgtttgaaccggtctctgaccggcctgtccgcgcaggtctgtcacctgcactttttcagtcgcacaacacctttttgaccggtcgcaggtctgtcacctgcacttttttcagtcgcgctgcaccttttcttttggtctcgcagcactttttcttgaccggtcgcttcctcgtgcattttttttattcggttgcatcctgcatgaccagtcatttcatctgcgtccggtcacttcccctgcggcgcacgcagtgttttgtttt

SEQ ID NO: 6580 - DNA, 1171 bp, Zea mays
  Zm_smallRNAprecursor_2069
tggacatttctgctctgcccgcgcactagccatgcatgcgtgtcaggggcgcccatttttcctgtccagtcgcttccagcagctgcgcgcaaatttgaatttttttttttgcatcttccctctgctgtttctggttctctgaccacagtggtcagaaccagctgaactggcctatgggggcggttgaactggtcctgaggaccagctcaactgcctatatatacttgactctccccttctcttctcccacttcattcactctcgccttagtcgcttcacaatctttagagcctctccttcacacacttcaaccggttcgcagtttcaccaccttttcaatcatggtgcgtcgtcgcaatccctctgtgattgagtttagcagcgactccgacgagattcaggaggaatctcccgtcccctctcctccgcctcgtcgctccctctctaagagaggacgtggctctggtcggatggatggcgagggctcttccatgccctcgcagccgactcgcgggagacgccaaaaggttggcgcctctcgtcctcgtcgtagcacgtcttcctctgggtatgctccctgccaggaggaggatggggctttcgacgacttcgtcgaccttccggcgcctgatgctctctacgtcaccggactgcacatgcatccggcgaacgtcagccgcggtccgcatgaatctcccgtcgacttcactcagaagggaatagacacccttcagcgtctgaggtttaccaaccctactctcactcctcgtcatcctggtgtccaggaccctcggttctggaatcttttccaggctgacttctacaattctgtcattctttccaagaaacacccagtcgtccgacatagatttattgactgggagggttgtgagaatatgggagatgctgacatgtcgtcagctctcgtaaacttagagagaaaggggttacgaaacattatgaccatggaatacccctggaacgatgaggtggtagctcagttctatgccaccctctggataaagaaagtagatgaggaagccgatgggtatgattacccagtcatgtatttcttcatccagggtaactggcacaaagtcagttatcgtcgttttgcccatattctgggcttctctgatgcagacattcagggcagcaacatgcgagtgca

SEQ ID NO: 6581 - DNA, 1058 bp, Zea mays
  Zm_smallRNAprecursor_2070
acacccttcagcgtctgaggtttaccaaccctactctcactcctcgtcatcctggtgtccaggaccctcggttctggaatcttttccaggctgacttctacaattctgtcattctttccaagaaacacccagtcgtccgacatagatttattgactgggagggttgtgagaatatgggagatgctgacatgtcgtcagctctcgtaaacttagagagaaaggggttacgaaacattatgaccatggaatacccctggaacgatgaggtggtagctcagttctatgccaccctctggataaagaaagtagatgaggaagccgatgggtatgattacccagtcatgtatttcttcatccagggtaactggcacaaagtcagttatcgtcgttttgcccatattctgggcttctctgatgcagacattcagggcagcaacatgcgagtgcatggcattcggctgcccatgcgggaagagacggaattcattcatgtctctactgagcgggagttctggacaaccgctaacatgcataggtactacaggtaccttaattctttgtcccggatgaccgttctcccgaagggcggtaatcaaatgaacgtccttggggagagtcgagttttcctcctcctccttgctccaaacagtctcgcccgcatcaatgtgtttgacatgatctgagaagagatcgtccgtgcttcctggtctcctcacagagggtgtcttcatgcaccctttatcatgaagatgatcgaagtggtcacccagacccacttcgaaaaacccgtcaaacactcccgctacgtgccctactgggttgattcctccaacccagctgctcgtacgaagcgggctccctcacggtctggaggccctgcctcctcctctgagccacctcgccagcctccccatcatccatcctcctctcccccgctgctgcctcgcgtccctctcctggccgcggctctcccatgccacgtgctcgtggtcgtggtcgaggtcgtggccgcgggatgggtgctcgcttggtccatgggcttgcggcatttttctcca

SEQ ID NO: 6582 - DNA, 1141 bp, Zea mays
  Zm_smallRNAprecursor_2071
acacccttcagcgtctgaggtttaccaaccctactctcactcctcgtcatcctggtgtccaggaccctcggttctggaatcttttccaggctgacttctacaattctgtcattctttccaagaaacacccagtcgtccgacatagatttattgactgggagggttgtgagaatatgggagatgctgacatgtcgtcagctctcgtaaacttagagagaaaggggttacgaaacattatgaccatggaatacccctggaacgatgaggtggtagctcagttctatgccaccctctggataaagaaagtagatgaggaagccgatgggtatgattacccagtcatgtatttcttcatccagggtaactggcacaaagtcagttatcgtcgttttgcccatattctgggcttctctgatgcagacattcagggcagcaacatgcgagtgcatggcattcggctgcccatgcgggaagagacggaattcattcatgtctctactgagcgggagttctggacaaccgctaacatgcataggtactacaggtaccttaattctttgtcccggatgaccgttctcccgaagggcggtaatcaaatgaacgtccttggggagagtcgagttttcctcctcctccttgctccaaacagtctcgcccgcatcaatgtgtttgacatgatctgagaagagatcgtccgtgcttcctggtctcctcacagagggtgtcttcatgcaccctttatcatgaagatgatcgaagtggtcacccagacccacttcgaaaaacccgtcaaacactcccgctacgtgccctactgggttgattcctccaacccagctgctcgtacgaagcgggctccctcacggtctggaggccctgcctcctcctctgagccacctcgccagcctccccatcatccatcctcctctcccccgctgctgcctcgcgtccctctcctggccgcggctctcccatgccacgtgctcgtggtcgtggtcgaggtcgtggccgcgggatgggtgctcgcttggtccatgggcttgcggcatttttctccatgtgccgcaacatttctgctgatgtccatgaggtggcacggcgtcagcgggagactgacaacaatcttcgtcgtcaagcttcc

SEQ ID NO: 6583 - DNA, 1057 bp, Zea mays
  Zm_smallRNAprecursor_2072
cacccttcagcgtctgaggtttaccaaccctactctcactcctcgtcatcctggtgtccaggaccctcggttctggaatcttttccaggctgacttctacaattctgtcattctttccaagaaacacccagtcgtccgacatagatttattgactgggagggttgtgagaatatgggagatgctgacatgtcgtcagctctcgtaaacttagagagaaaggggttacgaaacattatgaccatggaatacccctggaacgatgaggtggtagctcagttctatgccaccctctggataaagaaagtagatgaggaagccgatgggtatgattacccagtcatgtatttcttcatccagggtaactggcacaaagtcagttatcgtcgttttgcccatattctgggcttctctgatgcagacattcagggcagcaacatgcgagtgcatggcattcggctgcccatgcgggaagagacggaattcattcatgtctctactgagcgggagttctggacaaccgctaacatgcataggtactacaggtaccttaattctttgtcccggatgaccgttctcccgaagggcggtaatcaaatgaacgtccttggggagagtcgagttttcctcctcctccttgctccaaacagtctcgcccgcatcaatgtgtttgacatgatctgagaagagatcgtccgtgcttcctggtctcctcacagagggtgtcttcatgcaccctttatcatgaagatgatcgaagtggtcacccagacccacttcgaaaaacccgtcaaacactcccgctacgtgccctactgggttgattcctccaacccagctgctcgtacgaagcgggctccctcacggtctggaggccctgcctcctcctctgagccacctcgccagcctccccatcatccatcctcctctcccccgctgctgcctcgcgtccctctcctggccgcggctctcccatgccacgtgctcgtggtcgtggtcgaggtcgtggccgcgggatgggtgctcgcttggtccatgggcttgcggcatttttctcca

SEQ ID NO: 6584 - DNA, 1058 bp, Zea mays
  Zm_smallRNAprecursor_2073
cacccttcagcgtctgaggtttaccaaccctactctcactcctcgtcatcctggtgtccaggaccctcggttctggaatcttttccaggctgacttctacaattctgtcattctttccaagaaacacccagtcgtccgacatagatttattgactgggagggttgtgagaatatgggagatgctgacatgtcgtcagctctcgtaaacttagagagaaaggggttacgaaacattatgaccatggaatacccctggaacgatgaggtggtagctcagttctatgccaccctctggataaagaaagtagatgaggaagccgatgggtatgattacccagtcatgtatttcttcatccagggtaactggcacaaagtcagttatcgtcgttttgcccatattctgggcttctctgatgcagacattcagggcagcaacatgcgagtgcatggcattcggctgcccatgcgggaagagacggaattcattcatgtctctactgagcgggagttctggacaaccgctaacatgcataggtactacaggtaccttaattctttgtcccggatgaccgttctcccgaagggcggtaatcaaatgaacgtccttggggagagtcgagttttcctcctcctccttgctccaaacagtctcgcccgcatcaatgtgtttgacatgatctgagaagagatcgtccgtgcttcctggtctcctcacagagggtgtcttcatgcaccctttatcatgaagatgatcgaagtggtcacccagacccacttcgaaaaacccgtcaaacactcccgctacgtgccctactgggttgattcctccaacccagctgctcgtacgaagcgggctccctcacggtctggaggccctgcctcctcctctgagccacctcgccagcctccccatcatccatcctcctctcccccgctgctgcctcgcgtccctctcctggccgcggctctcccatgccacgtgctcgtggtcgtggtcgaggtcgtggccgcgggatgggtgctcgcttggtccatgggcttgcggcatttttctccat

SEQ ID NO: 6585 - DNA, 1073 bp, Zea mays
  Zm_smallRNAprecursor_2074
atagtgatggaagctgcgacaggggagagtgatggtagggtaattttggttattagccactagtttcgtctcaggccgataggattgcttcctctctctatttttttttttggatagagggtggagtagttaattaagcagcgatccaacggtccaagtcaagcgtacgtttttcaacgacacctacgtgcggtccgcggggcgctcttggaaatcagttgcttgctactcgcagtcgcagctatgatgaacagtgtagcgacaattaataaaccggcacgcgtacgcatatcgctggcaattcctgtagcaatagcacccgcgggagtaagtaaaacaccgttgctccgctataaatacaggccagagccagagggggatcggtggaagaaggtgaattcgagaattgcgaagctgagtgcagacgtccgatccccgatccatggctccttttctggcacttgagagatgtgtgtgtggtagacggtggctgtgcgtggtggagaagcagggcacgtgcattaccatccaatgccgccgggtgggtgggtggaatggatggatggttcttgatgtgcccatcttctccaccgagcacgaactgtcttggatccgcgcgcgcgtgccgtacatacctcgtcatgcaggagttcaggtgctgcctaatcctcggcggccctcaccgcgccaccggcgtctcgcgtcgtcgctgccgatcgatcgatcgtccagcccgccgccagttgagttccgaaccccgatgcttatagcctcccatccctggttagcaagcatcgtgtgtatcttgcatctcagacttgcttcctcttcatcattcattcattcatactcaagcattaattattcaggaccaagcaagcggtagaattcaaattcaattcgcacaaccctttgcttgtcagctagcttaccttgtgtattggatttgaatacatgctggtaatccatctaataagaaagcgctgtgtggcgctacctgtccgtagtatggccgcgccgactgtctgtcggctggcatggcatgatatacattctagttatcttgaaccaaa

SEQ ID NO: 6586 - DNA, 1073 bp, Zea mays; identical to SEQ ID NO: 6585
  Zm_smallRNAprecursor_2075

SEQ ID NO: 6587 - DNA, 1187 bp, Zea mays
  Zm_smallRNAprecursor_2076
aaccaacctcttggtccctttccgagcgggccatgggaatgtgttgcttgcttcgttcgtttctgtcctggagtatgtcatgacaccaatgcgggagatacatctggggagcttagctagtcgtcaaattaaacaaagcgccaggcgttgcctaatcgagccgaaaatattgtcgggatcatcaagagcggctttactatattatacaatgttttataaattttaacagtaaagatttataaaatttatcgaggtcaggtgagatcaggcctcttcatgtttgtgatataatccattcagattatataatctaacaaattttaaactaaaacttaatttaaaatttgttatattatataatctagacaaattaaaaccacaaacgaacaccccgcttaatacgttggatacatcaggttaggattattgaatgaattgttacttagctttcccacgagagttgctcctagtttctgttacggtaacgactgctatgcaaacagtccttctgtgcaagcgtgcaagcaaaccatctgatccattagatcgtgatccaatcgtaggtcacatttaacgcgtaaaccctttcaccaccagctcaataatctttataaaaaaactcctaacaaatcatgattgtatctgtggttggatcgtaatctaatggattagatggtttgcttgtacgcttgcacagaaggactgcttgcataaccgtcgttgccttctgttacaatactagtactcctctcgttctaaattgtactaaactggtttcacttctttacatgccaagctttttagtaccatatttctaattttggatttgtcatgttccttcctatagttgcttatgttagagtacaatgtctataaacctctattataataggacttggcccacctaactttctattaatacactcccaacccagaattagggttaagatttcccattccaatagcttatcatcgtcgaaaacaatcatttggacattggtatggttttctgattcaatgactcatttcagaacactttcctttctcaacaaagcttagttcaactttgtatacaatctacttccaacaaaaaaaaagaccaaaacctaaaatttacaccccttcatcccaaattataaattattttaaaattttgagatctaaaccatctcaagtccaatcttcat

SEQ ID NO: 6588 - DNA, 1188 bp, Zea mays
  Zm_smallRNAprecursor_2077
aaccaacctcttggtccctttccgagcgggccatgggaatgtgttgcttgcttcgttcgtttctgtcctggagtatgtcatgacaccaatgcgggagatacatctggggagcttagctagtcgtcaaattaaacaaagcgccaggcgttgcctaatcgagccgaaaatattgtcgggatcatcaagagcggctttactatattatacaatgttttataaattttaacagtaaagatttataaaatttatcgaggtcaggtgagatcaggcctcttcatgtttgtgatataatccattcagattatataatctaacaaattttaaactaaaacttaatttaaaatttgttatattatataatctagacaaattaaaaccacaaacgaacaccccgcttaatacgttggatacatcaggttaggattattgaatgaattgttacttagctttcccacgagagttgctcctagtttctgttacggtaacgactgctatgcaaacagtccttctgtgcaagcgtgcaagcaaaccatctgatccattagatcgtgatccaatcgtaggtcacatttaacgcgtaaaccctttcaccaccagctcaataatctttataaaaaaactcctaacaaatcatgattgtatctgtggttggatcgtaatctaatggattagatggtttgcttgtacgcttgcacagaaggactgcttgcataaccgtcgttgccttctgttacaatactagtactcctctcgttctaaattgtactaaactggtttcacttctttacatgccaagctttttagtaccatatttctaattttggatttgtcatgttccttcctatagttgcttatgttagagtacaatgtctataaacctctattataataggacttggcccacctaactttctattaatacactcccaacccagaattagggttaagatttcccattccaatagcttatcatcgtcgaaaacaatcatttggacattggtatggttttctgattcaatgactcatttcagaacactttcctttctcaacaaagcttagttcaactttgtatacaatctacttccaacaaaaaaaaagaccaaaacctaaaatttacaccccttcatcccaaattataaattattttaaaattttgagatctaaaccatctcaagtccaatcttcatt

SEQ ID NO: 6589 - DNA, 1082 bp, Zea mays
  Zm_smallRNAprecursor_2078
ttaactacgacgagctgaagtacgtagaaatactagtggagtcgtgccgcgtgtgcctgtagccactcgtacgctacagcccaagcgctagagcccaagaggccggaggtggaaggcgtcgcggcactatagccactcgccgcaagagcccaagaggccggagctggaaggatgagggtctgggtgttcacgaattgcctggaggcaggaggctcgtcgtccggagccacaggcgtggagacgtccgggataaggtgagcagccgctgcgataggggcgcgtgtgaaccccgtcgcgccccacggatggtataagaataaaggcattccgcgtgcaggattcacccgttcgcctctcaccttttcgctgtactcactcgccacacacaccccctctccagctccgttggagctccggacagcagcaggcgcggggcggtcacgtagtaagcagctctcggctccctctccccttgctccatatgatcgtgcaacccatcgagctacgcgcgtggactgccttccctgggtcggcgcaggaggggatcggaaggatggcggcgtcggtttccagggccatctgcgttcagaagccgggctcaaaatgcaccagggacagggaagcgacctccttcgcccgccgatcggtcgcagcgccgaggcccccgcacgccaaagccgccggcgtcatccgctccgactccggcgcgggacggggccagcattgctcgccgctgagggccgtcgttgacgccgcgccgatacagacgaccaaaaaggtatcccttgcagctcttagaaactgaattcgcgaggcagccagccaatatagccgagagagcattttttgattggccggatacatgtatgttgctgtgactgctgagatgaaaattaacggacaggaaacacataaataaagacaaaaaaaagtcaaaaaaaaccccgaagtatacatgtatatataaagtcactcagtaatatacacataaaaaccggtctaatccgcatgtcgtgcgttaacgtattataatatacgtaatatttggtgattaatagatatattaatataacacaagtaca

SEQ ID NO: 6590 - DNA, 1112 bp, Zea mays
  Zm_smallRNAprecursor_2079
aagactggagtgagacgtaggctttctgttttttttcttctttttactctcagagtcaccgtctcgtgtgttcaatcgtgatgagctgtacttacttggaattgatctcttaactatatcatatgtcgctatgtctcctctgctatttcacacgctttcacagctactagcatccttctcttggcgcaggtgcaaatcggcgattgcttttttttgtgtgtgtgtaggcacactgttctatcagtgagaaatttgccattatagaagtcctcagacgcggcttcgacgatttggaggcgtagacgagggattcgctgttataaaaaactagggactacccacactccaaaatgaacatgaccacgccattacaaggtaacgtctatgattaaaccattgatactcacgtcgtctctacatccgctatccttctccttctctctattctcgctaccaggcacgcaccctagcagccaccgtcgtcttgctccgtcctccgctcgccaggtctcgacgcgcgcgcagactctgcctcggcgtgccgctgccgtgccccgtctaagagctgccgctccggacgccacggacgcggcggcggccctcatggtcgcgcgcgccgaggccggggacttcgcggaggcctggtccctctgggcgcagctcctgcacagctccgccgcgccgtgcctgcccgccgtggcgccgcgccttctgccggcgtacgcgcgcctgggccgcttcgacgagatcctcctcgcagtgcgcgagctctcggcgcgggaccgcggcgcggcacgcacgctctacccgctcgccgtctcctgcctcggcgccgcgggcgagctggcgcgcatggaggacgccgtcctagaaatgggccgccttggcctccgcgtcgactccgcgaccggggacgccttcgtccgggcctacgcggccgccggaaccatcccgcagatggaggcggcctaccgccggcacaggaagtccgggctgctcatcacccgtggcgccatccgcgccgtcgcgtccgcgtacatctcccgacagaagtactacaggctcggcgcgttcgcggcggacgccggcctccgccggcgcgacgtcggcaa

SEQ ID NO: 6591 - DNA, 1072 bp, Zea mays
  Zm_smallRNAprecursor_2080
actggagtgagacgtaggctttctgttttttttcttctttttactctcagagtcaccgtctcgtgtgttcaatcgtgatgagctgtacttacttggaattgatctcttaactatatcatatgtcgctatgtctcctctgctatttcacacgctttcacagctactagcatccttctcttggcgcaggtgcaaatcggcgattgcttttttttgtgtgtgtgtaggcacactgttctatcagtgagaaatttgccattatagaagtcctcagacgcggcttcgacgatttggaggcgtagacgagggattcgctgttataaaaaactagggactacccacactccaaaatgaacatgaccacgccattacaaggtaacgtctatgattaaaccattgatactcacgtcgtctctacatccgctatccttctccttctctctattctcgctaccaggcacgcaccctagcagccaccgtcgtcttgctccgtcctccgctcgccaggtctcgacgcgcgcgcagactctgcctcggcgtgccgctgccgtgccccgtctaagagctgccgctccggacgccacggacgcggcggcggccctcatggtcgcgcgcgccgaggccggggacttcgcggaggcctggtccctctgggcgcagctcctgcacagctccgccgcgccgtgcctgcccgccgtggcgccgcgccttctgccggcgtacgcgcgcctgggccgcttcgacgagatcctcctcgcagtgcgcgagctctcggcgcgggaccgcggcgcggcacgcacgctctacccgctcgccgtctcctgcctcggcgccgcgggcgagctggcgcgcatggaggacgccgtcctagaaatgggccgccttggcctccgcgtcgactccgcgaccggggacgccttcgtccgggcctacgcggccgccggaaccatcccgcagatggaggcggcctaccgccggcacaggaagtccgggctgctcatcacccgtggcgccatccgcgccgtcgcgtccgcgtacatctcccgacagaagtactacaggctcggcgcgttcg

SEQ ID NO: 6592 - DNA, 1057 bp, Zea mays
  Zm_smallRNAprecursor_2081
acataccaagactggaagatgatttatactcgcatcaatagttctgtgcactgattctgaaatggtggtggctaggcccatgaggccgaactcgttgtccatgtgcacctcgtcggtgatgtcgaggaacgggtacgccggcagaaggcacggcgccacggcgggcaggcacggcgcgacggagctgtgcaggagctgcgcccagagggaccgggcctccgcgaagtccccggcctcggcgcacgcgaccatgagggccgccgccgcgtccgtggcgtccggagcggcagctcttagacggggcacggcagcggcacgccgaggcggagtctgcgcgcgcgtcgagacctggcgagcggaggacggagcaagacgacggtggctgctagggtgcgtgcctggtagcgagaatagggagaaggagaaggataacggatgtagagacgacgttagtatcaatggtttaatcatagacgttaccttgtaatggcgtggtcatgttcattttggagtgtgggtagtcccctagttttttataacagcgaatccctcgcctacgcctccaaatcgtcgaagccgcacctgaggacttctataatggcaaatttctcgcggcggcacggtggccaggaacaccttgccggcctgggtgctgaggaacacgcgggcggacccgtccgggtgcgccgccatgttgaggtaggagccgttgccgacgcgctccaggaacatgctgcggagcggcagcgccgccgggcgggtggagttgaacgccgcgccgccgccgtccaggcacggcgacctgccggcgccgcccagcgagccgcagaactcgcccgcggactgccacagggtaacggatgtagagacgacgtgagtatcactggtttaatcatagacgttaccttgtaatggcgtgatcatgttcattttggagtgtgggtagtcccctagttttttataacagcgaatctctcgtctacgcctccaaatcgtcgaagccgcacctaaggacctccataatggcaaatttctctctatcagtggagcaaccacg

SEQ ID NO: 6593 - DNA, 1057 bp, Zea mays
  Zm_smallRNAprecursor_2082
aggataacggatgtagagacgacgttagtatcaatggtttaatcatagacgttaccttgtaatggcgtggtcatgttcattttggagtgtgggtagtcccctagttttttataacagcgaatccctcgcctacgcctccaaatcgtcgaagccgcacctgaggacttctataatggcaaatttctcgcggcggcacggtggccaggaacaccttgccggcctgggtgctgaggaacacgcgggcggacccgtccgggtgcgccgccatgttgaggtaggagccgttgccgacgcgctccaggaacatgctgcggagcggcagcgccgccgggcgggtggagttgaacgccgcgccgccgccgtccaggcacggcgacctgccggcgccgcccagcgagccgcagaactcgcccgcggactgccacagggtaacggatgtagagacgacgtgagtatcactggtttaatcatagacgttaccttgtaatggcgtgatcatgttcattttggagtgtgggtagtcccctagttttttataacagcgaatctctcgtctacgcctccaaatcgtcgaagccgcacctaaggacctccataatggcaaatttctctctatcagtggagcaaccacggaggctgtcggaggacctccactgttacatacgtactacttggcaggctgaagccccaagtttcctgcgcctgttctagctagttggcgaagaaagatgtcgttccgcagcatcgtccgcgacgtccgagacagcatcggcagcctgtcgaggcgcaacttcgaggtgactgctgcagccgccgccggcggcctctccggacgcaccgccgcgcaacatcgcagggggaggtctcagagcacggtgcacgagctccgggacacgcgtgtcgtggtccagcaggacgagagccgctgggccagcctccctcccgagctcctccgcgacgtggtccggaggctggaggccagcgagagcgcctggccgaaccgcaagcacgtcgtgtcctgcgccgccgtctgccgcgcgtggagggagatgtgccg

SEQ ID NO: 6594 - DNA, 1060 bp, Zea mays
  Zm_smallRNAprecursor_2083
gaaccatccagacgatggatatgattgatgtgtcgtgatgtttttttatgaaacactttgcaacacttgtttgtgagacacaatttcagtttgcaacaaccgtcgaacctatatgttggtcgaacctatatgttgatgttaaatttgtgaatgttaatatttatgtgagaatatttgtgattgtgaatacttattagaatgtgtatatttgtgattgtgaatgtgaatttgtatatgtgcatgaatctgtttttgttttgtaaatgtcagattttttaaaaaacagaattttgtgtaaattctgtaatttgttatgtccgacggcctagtgttagccgtcggacataaccttgacttatctccgacggtattaaataccgtcggacataatcttaccttatgtccgacggcttatcgctgggccgtcggacttaagtttgtggggcccagtgactgaccggtaaaacggttgagacttactatttccgacgggcgctagcagccgtcggagataggttatgtccgacggctgccgtcggacattgcactatttccgacgagttatctccgacggcttaaagccgtcggagataagtctttgccgtcggagataagctatttccgacggtttaattcttatgtccgacggttttggccgtcggacgtttctccgtttactgtagtgcatgggagagttttatgtaatatgggttacgcaactcaccttgagcatcgtggctaaacgtcgcatatagtaggatgcaagattattgcagcaataccatcattgtattgtattacacatctttcgctgagatcgtggccaatgatcctcgtctctttcgtcactaaactcgctgtgttggcccaagaaaaaccgttaagcaaccatcacacacaagggaacagtcaacagtgtactccctccggtttcctattagttgtcgtttaggacaacgacacggtctccaaaatataactttgaccaatgttttttgttaaaatacaaatgaactcttaatacatttattttttcataaaagtactttttatgacaaat

SEQ ID NO: 6595 - DNA, 1065 bp, Zea mays
  Zm_smallRNAprecursor_2084
gaaacaactgttggatcctgtgtgtccatgctctgcatttctcgattgccatggtcgatgttggcactagagttgtggattcagcttttcaagctccaccaatgacacgtaatgctttgcacaaataaataaattcagggttcgggaaacaagttttgcgcacaaatatgtcagcttggttatattttatggcagtaaaaactcgcaaggatagctttcgatgtcttccacttcctaaagagaatattggccagattacccagattaagactattacacaaactaaattaatattagaaagaacagtagtttccaattcgtgctgaccttctcaacttcaatcatgaaataatcatccatggagtgtatcctaggcgcatttgcaccattctcaacttcaagatcgtgcaatgcctttgccagatgagaccgtatcttgtgcgcaaggagcgctggtgctcccatgagcaaaatcaatccagaccacaccctccacatccaacggtgctgcgtcagggggttttataaaatgttatttgcaactctgtacattttataaaaacccccctgacacagcaccgttggatgtagagggtgtgatctggattgattttgctcatgagagcagcagggctccttgctcataagatactatgtcttgccagatatactggagctagatcgaccatctgtggcgcaaatgccaatatgccattgcaacagagtacggatctttcgtagcaatttcagacaataatgacaatgcatgcctgactgcaactgggtcagaaaattcaatcctgcagttatatcaagtcaaatgagaagatcactggatcaagatattaagaatggaatctgaatgataagtagaaaagtaacgcccaatttacccaaatgaatgctcacaaacattgccaaaaatcagaatgcacacacccatgttagattgatgatggaaggataggcccagaagtattgacacgaagaaattaaaagtttatactgaaaacatgcagtacctctcaaattatgattcacacagctcttgtcaaacatggagaa

SEQ ID NO: 6596 - DNA, 1068 bp, Zea mays
  Zm_smallRNAprecursor_2085
atgaattccgtctcttcccgcatgggcagccgaatgccatgcactcgcatgttgctgccctgaatgtctgcatcagtgaagcccagaatatgggcaaaacgacgataactgactctgtgccagttaccctggatgaagaaatacatgactgggtactcatacccatcggcttcctcatctactttctttatccagagggtggcatagaactgagctaccacctcatcgttccaggggtattccatggtcataatgtttcgtaacccctttctctcaaggtttacgagagctgacgacatgtcagcatctcccatattctcacaaccctcccagtcaaataaatctatgtcggacgactgggtgtttcttggtaagaatgacagaattgtagaagtcagcctgaaaaagattccagaaccgagggtcctggacaccaggatgacgagggagtgagagtggggttggtaaacctcaaacgctgaagggtttctattcccttctgagtgaagtcgacgggagattcatgcggaccgcggctgacgttcgccggatgcatgtgcagtccggtgacgtagagagcatcaggcgccggaaggtcgacgaagtcgtcgaaagccccatcctcctcttggcagggagcataccctgaggaagacgtgctacgacgaggacgagaggcgccaaccttttggcgtctcccgcgagtcggctgcgagggcatggaagatccctcgccaggcatccgaccagagccacgtcctctcttagagagggagcgacgaggcggaggagaggggacgggagattcctcctgaatctcgtcggagtcgctgctaaactcaaccacagaggggttgcgacgacgcaccatgattgaaaaggtggtgaaactgtgaagcggttgaagtgtgtgaaagagaggctctagaggttgtgaagcgaccaaggcgagagagaatgaagtgggagaagagaaggggagagtcaagtatatataggcagttgagctggtcctcaggaccagttcaaccgcccccatgggccagttcagctggttctgaccagtgt

SEQ ID NO: 6597 - DNA, 1148 bp, Zea mays
  Zm_smallRNAprecursor_2086
acccatcggcttcctcatctactttctttatccagagggtggcatagaactgagctaccacctcatcgttccaggggtattccatggtcataatgtttcgtaacccctttctctcaaggtttacgagagctgacgacatgtcagcatctcccatattctcacaaccctcccagtcaaataaatctatgtcggacgactgggtgtttcttggtaagaatgacagaattgtagaagtcagcctgaaaaagattccagaaccgagggtcctggacaccaggatgacgagggagtgagagtggggttggtaaacctcaaacgctgaagggtttctattcccttctgagtgaagtcgacgggagattcatgcggaccgcggctgacgttcgccggatgcatgtgcagtccggtgacgtagagagcatcaggcgccggaaggtcgacgaagtcgtcgaaagccccatcctcctcttggcagggagcataccctgaggaagacgtgctacgacgaggacgagaggcgccaaccttttggcgtctcccgcgagtcggctgcgagggcatggaagatccctcgccaggcatccgaccagagccacgtcctctcttagagagggagcgacgaggcggaggagaggggacgggagattcctcctgaatctcgtcggagtcgctgctaaactcaaccacagaggggttgcgacgacgcaccatgattgaaaaggtggtgaaactgtgaagcggttgaagtgtgtgaaagagaggctctagaggttgtgaagcgaccaaggcgagagagaatgaagtgggagaagagaaggggagagtcaagtatatataggcagttgagctggtcctcaggaccagttcaaccgcccccatgggccagttcagctggttctgaccagtgtggcagagaaccagaaacaacagagggaaggaagaaaaattcaaatttgcgcgcagctgctggaagtgaccggacaaaaaaaaagtggtgctcacatgaaacaattcgatatctcctttggcttcgtggtctctcaagaaatggtgtctgatgtcaatatgtttagttctagagtgttgcacagggttgtttgcaagttttatggcactctcattgtcacacaaaagtggaattttgttaa

SEQ ID NO: 6598 - DNA, 1118 bp, Zea mays
  Zm_smallRNAprecursor_2087
gatagaattaatccctcaatgctgccaggcagtttgtttcctaacatgaaggaatttagaattgctatgagacaatatgccataaagcatgagtttaagcttggaatagatgttacttcgactactcgatatgttgactattgtaaaggtggtgattgcccttgtagaatctatgcaagggaggaaaagaaaggattactgaccatcgtggtaagtaattatccttgatttgttagtaattatttctcaatattttgttgtttaataaatcgtgaaatgacaatttgcaggttgctgtcttgcatgacgtgcatacttgcacatctagcggcaagaggaagacgacaacaccaagtagtggatgggtagcatttcacgctattccactatttatgaagaaaccacaaatgggtgctaaggagttgcaagatacactacaaggaattcataatgtcaacattggttacgacactgtttggaaggggaaggagaagacattgaaagagttgtttggtagttgggaggagagcttcaagctactattttcttggaaagaggcagtacttgctaaggcgcccgacagtgttatcgagattgatgttgttgtacaagatggtaagtactatttcaaccgttttttttttgtgcccttagggcatgtacagtggtgtttaatgtgggggctcttaaggtgttttagggggttatttgcaaaaaaatcttagagccgtctctccgtgaagagacgcatctggctcgtaaaccaagtaacaacagacgcctcatttcccactgtacgaatttgtcgtctgttctatcgatctgatgctatacaaatacatttaattctgtatttattaatagactacgtttatagacactccattgtacaatagagtctcttagttgtctcctgtgtttggagaaccgttttggtgtctctccactgtacatgcccttagaccagccccgattcggtcacgtcaggccgtcgcgtccgacgcttcgcttacgccttcgggcgagcggcgctgctctcccgttcataatggtgaggtctgacggaaatcgagatcccaaccaaattcgttttttttagcgtgggagaagcgcggcgc

SEQ ID NO: 6599 - DNA, 1040 bp, Zea mays
  Zm_smallRNAprecursor_2088
acaattaaggtcaaaaagatatacatttgcaatagaaaatttcttttgaatgattgtatatagatggctcccccttaatgtgtgcatgattgtgaatccaacgttttgacataatatgtcatgtgagcaacacatttagagatagtgacaaaaactatactaaatacaatcatccgaggggtgcaagagtgtcataacaggagttgtgatgcacatgactatctctaactacacatcatttttacttcatagcagagtagtcattacaaactgataggacaaaagatgatggccagaagaccatcatattactttgaataacaacccaacagttttatttcatacaattgtagaaggatacaagccacaacagtggccaaaacaaaaataatccaaaagaaaaaccaaaagaaccacaaactagaaagaaccacaaactagaggttggattttctccccctttttggcaacaagtaccaaaaacggagagagagacaaggatacatgaatcaatatcctccaggaggaggatatgacggaggatatgatggagggtatgaagtgtaatcagggaagaaagtcctcatcgcgtcctccttgaatgtggagtcccgaggtggctcatcagccgcagaaaaaacagatgccgaagatgtacgatgatcaggaggaggtggagggtggtgatggtaaccagagccggatggcctagggtcaccaggaatgggtcccggacccgggtagggaggcggagggtgagaggatgattgacccggatccccatggtagggaggcggggcaaactcctcgcgatcatcaacataggcttcttcttcttcatcgtctgcagacataaatgacaccccgtaggcctgctggtgccactcattgatctccgggggaggaggatggagaggcacgtcaggcgagcgagggacaaatggcatgcccatggtggaagcttgacgacgaagattgtcatcagtctcccgctgacgccgtgccacctcatggacatcagcagaaatgttgcggcacat

SEQ ID NO: 6600 - DNA, 1121 bp, Zea mays
  Zm_smallRNAprecursor_2089
ggacttttagccccggttagtgaaggaccagagaagctttctagttatgaatcgggtatagaacccatggggggggcttggttacaattccgaatacgctattacatgtttgcgctagtttttgttgtttttgatgtggaaacagtctttctctacccttgggcaatgagtttcgacgtattgggtgtatccgtttttatcgaagctttcatttttgtgcttatcctagttgttggtttagtttatgcatggcgaaaaggagccttggaatggtcttaactgaatattcagaaaaaaaaaaaaaagaaggaaaagattccattgagacaattatgagtttgattgagtttccgttactcgaccaaacaagttccaattccgttatttcaactacaccaaacgatctttcaaattggtcaagactctcaagtttatggccccttctatatggtaccagttgttgtttcattgaatttgcttcattaataggctcacgattcgactttgatcgttatggattggtaccaagatcaagtcctagacaagcggacctaattttaacagctggtacggtaacaatgaaaatggctccatctttagtgcgattatatgagcaaatgcctgaaccgaaatacgtcattgctatgggagcctgtactattacagggggcatgttcagtacagattcctatagtactgttcgaggagttgataagttaattcctgtggacgtctacctgccgggttgcccgcctaaaccagaggctgttatagatgccctaacaaaacttcgtaagagatagcgcgagaaataattgaggatcgaactctatgtcaaagtcaaaagaaaaatagatcttttactacccgtcacaaactttatgttcggcgcagtactcacactggaacttacgaacaagaattgctctatcaatcaccatctactttagatatatcttctgaaacttttttcaaatccaaaagttcagtatcttcctacaaattagtgaattaggaggggttcttttgtgcagaaaaagaaagaaaagagcagtacaatctttcaaacttgcatttgaaatgtgaaatatttatacaaagggggagagatcaagacaatg

SEQ ID NO: 6601 - DNA, 1172 bp, Zea mays
  Zm_smallRNAprecursor_2090
tttttagtccatcacattcacgcatttaccatccatgtgactgtattaatacttttgaaaggtgttttatttgctcgcagttcccgtctgatacctgataaagcaaatcttggctttcgcttcccttgcgacggacctgggcgagggggaacatgtcaagtatccgcctgggatcatgttttcttaggtctattctggatgtacaattctatttcggtagtcattttccatttcagttggaaaatgcagtcggatgtttggggtactataagtgatcaagggatagtaactcatatcacagggggaaactttgcgcagagttccattacgattaatggttggcttcgagatttcttgtgggcacaggcatcccaagtaattcagtcttatggttcttcattatctgcatatggtctttttttcttatgcgctcattttgtctgggctttcagtttaatgtttttattcagcgggccgtggttattggcaagaactcattgaatctatcgtttgggctcataacaaattaaaagttgctcctgctactcagcctagagccttgagcatatacaaggactggctgtaagaataacacattaccttctgggtggaattgccacaacgtgggcattcttcttagcgagaattattgcagtaggatagtggcctaggaggatttgaaaggcattatggaattaagatttcccaggtatagccaaggcttagctcaggaccccactactcgtcgtatttggtttggtattgctaccgcacatgatttcgaaagtcatgatgatattactgaggaacgtctttatcagaacatttttgcttctcactttgggcagttagcaataatctttctatggacgtccggaaatctgtttcatgtagcttggcaaggaaattttgaatcatggatacaggatcctttacacgtaagacctattgctcatgccatttgggatcctcattttgggcaacccgctgtggaagcctttactcgaggaggtgctgccggtccagtgaatatcgcttattctggggtttatcagtggtggtatacaattggattgcgcaccaatgaagatctttatactggagctctttttctattatttctttctacgctatccttaatagggggttggttacatctacaacccaaatgg

SEQ ID NO: 6602 - DNA, 1091 bp, Zea mays
  Zm_smallRNAprecursor_2091
tatcacagggggaaactttgcgcagagttccattacgattaatggttggcttcgagatttcttgtgggcacaggcatcccaagtaattcagtcttatggttcttcattatctgcatatggtctttttttcttatgcgctcattttgtctgggctttcagtttaatgtttttattcagcgggccgtggttattggcaagaactcattgaatctatcgtttgggctcataacaaattaaaagttgctcctgctactcagcctagagccttgagcatatacaaggactggctgtaagaataacacattaccttctgggtggaattgccacaacgtgggcattcttcttagcgagaattattgcagtaggatagtggcctaggaggatttgaaaggcattatggaattaagatttcccaggtatagccaaggcttagctcaggaccccactactcgtcgtatttggtttggtattgctaccgcacatgatttcgaaagtcatgatgatattactgaggaacgtctttatcagaacatttttgcttctcactttgggcagttagcaataatctttctatggacgtccggaaatctgtttcatgtagcttggcaaggaaattttgaatcatggatacaggatcctttacacgtaagacctattgctcatgccatttgggatcctcattttgggcaacccgctgtggaagcctttactcgaggaggtgctgccggtccagtgaatatcgcttattctggggtttatcagtggtggtatacaattggattgcgcaccaatgaagatctttatactggagctctttttctattatttctttctacgctatccttaatagggggttggttacatctacaacccaaatggaagccaagcctttcgtggttcaaaaacgccgaatctcgtctgaatcatcatttgtcaggacttttcggagtaagttctttggcttggacaggacatttagttcatgttgctattcccggatccaggggggagtacgttcgatggaataatttcttagatgtattaccctatccccaggggttgggtccccttctgacgggtcagtggaatct

SEQ ID NO: 6603 - DNA, 1128 bp, Zea mays
  Zm_smallRNAprecursor_2092
ttgtgggtaacgtatttggtttcaaagccttacgcgctctacgtttggaggatctacgaattccccctgcttattcaaaaactttccaaggtccgcctcacggtatccaagttgaaagggataagttgaacaagtacggtcgtcctttattgggatgtactattaaaccaaaattgggattatccgcaaaaaattacggtagagcgtgttatgagtgtctacgcggtggacttgattttaccaaagatgatgaaaacgtaaactcacaaccatttatgcgctggagagaccgttttgtcttttgtgccgaagcaatttataaagcacaagccgaaactggtgaaatcaaggggcattacttgaatgcgactgcaggtacatgcgaagaaatgattaagagagctgtatttgcaagggaattaggggttcctattgtaatgcatgactacttaacaggaggattcaccgcaaatactactttgtctcattattgccgcgacaacggcctacttcttcacattcaccgagcaatgcatgcagttattgatagacagaaaaatcatggtatgcatttccgtgtattagctaaagcattgcgtatgtcggggggagatcatatccactccggtacagtagtaggtaagttagaaggggaacgcgaaataactttaggttttgttgatttattgcgcgatgattttattgaaaaagatcgttctcgcggtatctttttcactcaggactgggtatccatgccaggtgttataccggtggcttctgggggtattcatgtttggcatatgccagctctgaccgaaatctttggagatgattccgtattacaatttggtggaggaactttaggacatccttggggaaatgcacctggtgcagcagctaatcgtgtggctttagaagcctgtgtacaagctcgtaacgaagggcgcgatcttgctcgtgaaggtaatgaaattatcaaagcagcttgcaaatggagtgctgaactagccgcagcttgtgaaatatggaaggagatcaaatttgatggtttcaaagcgatggataccatataaaataaaaaaaaaagcaaaatagaaagagaaaaaataagttaagaaatgcagtaat

SEQ ID NO: 6604 - DNA, 1034 bp, Zea mays
  Zm_smallRNAprecursor_2093
cgcgaaataactttaggttttgttgatttattgcgcgatgattttattgaaaaagatcgttctcgcggtatctttttcactcaggactgggtatccatgccaggtgttataccggtggcttctgggggtattcatgtttggcatatgccagctctgaccgaaatctttggagatgattccgtattacaatttggtggaggaactttaggacatccttggggaaatgcacctggtgcagcagctaatcgtgtggctttagaagcctgtgtacaagctcgtaacgaagggcgcgatcttgctcgtgaaggtaatgaaattatcaaagcagcttgcaaatggagtgctgaactagccgcagcttgtgaaatatggaaggagatcaaatttgatggtttcaaagcgatggataccatataaaataaaaaaaaaagcaaaatagaaagagaaaaaataagttaagaaatgcagtaattcttctttattcctctaattgattgcaattcaattcggctcaatcttttctaaaaaaaaaaaagactgagccgaattgaaatagatcttgatacgatcatgagacttgacaaatcgagattcttctattctatatatctagaatatagaaaggtataatacaataaacaaatataaatcaaaatatagtattatcgtacgataatggaatcaaatacgcagtatttacagaaaagagtcttcgtttattgggaaagaatcaatatacttttaatgtcgaatcgggattcactaagacagaaataaagcattgggtcgaactcttctttggtgttaaggtagtagctgtgaatagccatcgactacccggaaagggtagaagaatgggacctattctgggacatacaatgcattacagacgtatgatcattacccttcaactgggtattctattccacttctactttttaaattaaagggtattctgaaagaggtatttcttttattttcacaatagctttcttttgaatccaatttcaagttcgattagaaggatagaaagg

SEQ ID NO: 6605 - DNA, 1034 bp, Zea mays; identical to SEQ ID NO: 6604
  Zm_smallRNAprecursor_2094

SEQ ID NO: 6606 - DNA, 1035 bp, Zea mays
  Zm_smallRNAprecursor_2095
cgcgaaataactttaggttttgttgatttattgcgcgatgattttattgaaaaagatcgttctcgcggtatctttttcactcaggactgggtatccatgccaggtgttataccggtggcttctgggggtattcatgtttggcatatgccagctctgaccgaaatctttggagatgattccgtattacaatttggtggaggaactttaggacatccttggggaaatgcacctggtgcagcagctaatcgtgtggctttagaagcctgtgtacaagctcgtaacgaagggcgcgatcttgctcgtgaaggtaatgaaattatcaaagcagcttgcaaatggagtgctgaactagccgcagcttgtgaaatatggaaggagatcaaatttgatggtttcaaagcgatggataccatataaaataaaaaaaaaagcaaaatagaaagagaaaaaataagttaagaaatgcagtaattcttctttattcctctaattgattgcaattcaattcggctcaatcttttctaaaaaaaaaaaagactgagccgaattgaaatagatcttgatacgatcatgagacttgacaaatcgagattcttctattctatatatctagaatatagaaaggtataatacaataaacaaatataaatcaaaatatagtattatcgtacgataatggaatcaaatacgcagtatttacagaaaagagtcttcgtttattgggaaagaatcaatatacttttaatgtcgaatcgggattcactaagacagaaataaagcattgggtcgaactcttctttggtgttaaggtagtagctgtgaatagccatcgactacccggaaagggtagaagaatgggacctattctgggacatacaatgcattacagacgtatgatcattacccttcaactgggtattctattccacttctactttttaaattaaagggtattctgaaagaggtatttcttttattttcacaatagctttcttttgaatccaatttcaagttcgattagaaggatagaaaggc

SEQ ID NO: 6607 - DNA, 1035 bp, Zea mays; identical to SEQ ID NO: 6606
  Zm_smallRNAprecursor_2096

SEQ ID NO: 6608 - DNA, 1032 bp, Zea mays
  Zm_smallRNAprecursor_2097
gcgaaataactttaggttttgttgatttattgcgcgatgattttattgaaaaagatcgttctcgcggtatctttttcactcaggactgggtatccatgccaggtgttataccggtggcttctgggggtattcatgtttggcatatgccagctctgaccgaaatctttggagatgattccgtattacaatttggtggaggaactttaggacatccttggggaaatgcacctggtgcagcagctaatcgtgtggctttagaagcctgtgtacaagctcgtaacgaagggcgcgatcttgctcgtgaaggtaatgaaattatcaaagcagcttgcaaatggagtgctgaactagccgcagcttgtgaaatatggaaggagatcaaatttgatggtttcaaagcgatggataccatataaaataaaaaaaaaagcaaaatagaaagagaaaaaataagttaagaaatgcagtaattcttctttattcctctaattgattgcaattcaattcggctcaatcttttctaaaaaaaaaaaagactgagccgaattgaaatagatcttgatacgatcatgagacttgacaaatcgagattcttctattctatatatctagaatatagaaaggtataatacaataaacaaatataaatcaaaatatagtattatcgtacgataatggaatcaaatacgcagtatttacagaaaagagtcttcgtttattgggaaagaatcaatatacttttaatgtcgaatcgggattcactaagacagaaataaagcattgggtcgaactcttctttggtgttaaggtagtagctgtgaatagccatcgactacccggaaagggtagaagaatgggacctattctgggacatacaatgcattacagacgtatgatcattacccttcaactgggtattctattccacttctactttttaaattaaagggtattctgaaagaggtatttcttttattttcacaatagctttcttttgaatccaatttcaagttcgattagaaggatagaaag

SEQ ID NO: 6609 - DNA, 1032 bp, Zea mays; identical to SEQ ID NO: 6608
  Zm_smallRNAprecursor_2098

SEQ ID NO: 6610 - DNA, 1033 bp, Zea mays
  Zm_smallRNAprecursor_2099
gcgaaataactttaggttttgttgatttattgcgcgatgattttattgaaaaagatcgttctcgcggtatctttttcactcaggactgggtatccatgccaggtgttataccggtggcttctgggggtattcatgtttggcatatgccagctctgaccgaaatctttggagatgattccgtattacaatttggtggaggaactttaggacatccttggggaaatgcacctggtgcagcagctaatcgtgtggctttagaagcctgtgtacaagctcgtaacgaagggcgcgatcttgctcgtgaaggtaatgaaattatcaaagcagcttgcaaatggagtgctgaactagccgcagcttgtgaaatatggaaggagatcaaatttgatggtttcaaagcgatggataccatataaaataaaaaaaaaagcaaaatagaaagagaaaaaataagttaagaaatgcagtaattcttctttattcctctaattgattgcaattcaattcggctcaatcttttctaaaaaaaaaaaagactgagccgaattgaaatagatcttgatacgatcatgagacttgacaaatcgagattcttctattctatatatctagaatatagaaaggtataatacaataaacaaatataaatcaaaatatagtattatcgtacgataatggaatcaaatacgcagtatttacagaaaagagtcttcgtttattgggaaagaatcaatatacttttaatgtcgaatcgggattcactaagacagaaataaagcattgggtcgaactcttctttggtgttaaggtagtagctgtgaatagccatcgactacccggaaagggtagaagaatgggacctattctgggacatacaatgcattacagacgtatgatcattacccttcaactgggtattctattccacttctactttttaaattaaagggtattctgaaagaggtatttcttttattttcacaatagctttcttttgaatccaatttcaagttcgattagaaggatagaaagg

SEQ ID NO: 6611 - DNA, 1033 bp, Zea mays; identical to SEQ ID NO: 6610
  Zm_smallRNAprecursor_2100

SEQ ID NO: 6612 - DNA, 1033 bp, Zea mays; identical to SEQ ID NO: 6610
  Zm_smallRNAprecursor_2101

SEQ ID NO: 6613 - DNA, 1033 bp, Zea mays; identical to SEQ ID NO: 6610
  Zm_smallRNAprecursor_2102

SEQ ID NO: 6614 - DNA, 1034 bp, Zea mays
  Zm_smallRNAprecursor_2103
gcgaaataactttaggttttgttgatttattgcgcgatgattttattgaaaaagatcgttctcgcggtatctttttcactcaggactgggtatccatgccaggtgttataccggtggcttctgggggtattcatgtttggcatatgccagctctgaccgaaatctttggagatgattccgtattacaatttggtggaggaactttaggacatccttggggaaatgcacctggtgcagcagctaatcgtgtggctttagaagcctgtgtacaagctcgtaacgaagggcgcgatcttgctcgtgaaggtaatgaaattatcaaagcagcttgcaaatggagtgctgaactagccgcagcttgtgaaatatggaaggagatcaaatttgatggtttcaaagcgatggataccatataaaataaaaaaaaaagcaaaatagaaagagaaaaaataagttaagaaatgcagtaattcttctttattcctctaattgattgcaattcaattcggctcaatcttttctaaaaaaaaaaaagactgagccgaattgaaatagatcttgatacgatcatgagacttgacaaatcgagattcttctattctatatatctagaatatagaaaggtataatacaataaacaaatataaatcaaaatatagtattatcgtacgataatggaatcaaatacgcagtatttacagaaaagagtcttcgtttattgggaaagaatcaatatacttttaatgtcgaatcgggattcactaagacagaaataaagcattgggtcgaactcttctttggtgttaaggtagtagctgtgaatagccatcgactacccggaaagggtagaagaatgggacctattctgggacatacaatgcattacagacgtatgatcattacccttcaactgggtattctattccacttctactttttaaattaaagggtattctgaaagaggtatttcttttattttcacaatagctttcttttgaatccaatttcaagttcgattagaaggatagaaaggc

SEQ ID NO: 6615 - DNA, 1034 bp, Zea mays; identical to SEQ ID NO: 6614
  Zm_smallRNAprecursor_2104

SEQ ID NO: 6616 - DNA, 1190 bp, Zea mays
  Zm_smallRNAprecursor_2105
gaccgttggctcggccacgtgtctcgcgcagattgcgcggccgaccgttggcccagccgactgttggctcaccggacagtccggtgcccaccggacagtccggtgaattttagccgtacgccgtcggcaatttcccgagagcggcctcttcgcccgaggcagcctggcgcaccggacactgtccggtgcaccaccggacagtccggtgccccagaccgaaacagccttttggctgtacacagccaactcttctcttattcgttttctcctgtttcaagcacttagacacaatacattagtcttcaaaacaatgtactaaggcttagaaacatacctttactgttgatttgcactttgttcatccgtgggcatagatttacacttaagcacttgtgtttgcactcaatcaccaaaatacttagaaatggctcaagggctcatttccctttcagagggacgcgaggcagcagcggggggagaggaggaaggatggtggggaggctggcgaggtggctcagaggaggaggcagggcctccagaccgtgagggaacccgcttcgtacaagcagctgggttggaggaatcaacccagtagggtacgtagcgggagtgtttgacgggtttttcgaagtgggtctgggtgaccacttcgatcatcttcatgataaagggtgcatgaagacaccctctgtgaggagaccaggaagcacggacgatctcttcccagatcatgtcaaacacattgatgcgggcgagactgtttggagcaaggaggaggaggaggactcgactctccccaaggacgttcatttgattaccgccctttgggagaacggtcatccgggacaaagaattaaggtacctgtagtacctatgcatgttaacggttgtccagaactcccgctcagtagagacatgaatgaattccgtctcttcccgcatgggcagccgaatgccatgcactcgcatgttgctgccctgaatgtctgcatcagagaagcccagaatatgggcaaaacgacgataactgactttgtgccagttaccctggatgaagaaatacataactgggtaatcatacccatcggcttcctcatctactttctttatccagagggtggcatagaactgagctaccacctcatcgttccaggggtattccatggtcataatgtttcggaacccctttc

SEQ ID NO: 6617 - DNA, 1068 bp, Zea mays
  Zm_smallRNAprecursor_2106
gaatgaattccgtctcttcccgcatgggcagccgaatgccatgcactcgcatgttgctgccctgaatgtctgcatcagagaagcccagaatatgggcaaaacgacgataactgactttgtgccagttaccctggatgaagaaatacataactgggtaatcatacccatcggcttcctcatctactttctttatccagagggtggcatagaactgagctaccacctcatcgttccaggggtattccatggtcataatgtttcggaacccctttctctctaagtttacgagagctgacgacatgtcagcatctcccatattctcacaaccctcccagtcaataaatctatgtcggatgactgggtgtttcttggaaagaatgacagaattgtagaagtcagcctggaaaagattccagaaccgagggtcctggacaccaggatgacgaggagtgagagtagggttggtaaacctcagacgctgaagggtttctattcccttctgagtgaagtcgacgggagattcatgcggaccgcggctgacgttcgccggatgcatgtgcagtccggtgacgtagagagcatcaggcgccggaaggtcgacgaagtcgtcgaaagccccaccctcctcttggcagggagcataccctgaggaagacgtgctacgacgaggacgagaggcgccaaccttttggcgtctcccgcgagtcggctgcgagggcatggaagagccctcgccagccatccgaccagagccacgtcctctcttagagagggagcgacgaggcggaggagaggggacgggagattcctccagaatctcgtcggagtcgctgctaaactcaaccacagaggggttgcgacgacgcgccatgatttgaaaaggtggtgaaactgtgaagcggatgaagtatgtgaaggagaggctctaaaggttgtgaagcgaccaaggcgagagtgaatgaagtgggagaagggaaggggtagtcaagtatatataggcagttgagctggtcctcaggaccagttcaaccgcccccatgggccagttcagctggttctgactagtgt

SEQ ID NO: 6618 - DNA, 1171 bp, Zea mays
  Zm_smallRNAprecursor_2107
ttttgccgtccggtctcatctgcacagacacttggttttgattttttttggcgcatggaatctctgcagtacactttttcagaatcttgcgtcagaaatttgaatttttggcgtcttccctctgctgtttctggctctctaaccacactggtcagaaccagttgaactggcccatgggggcggttgaaccggtcctgaggaccagctcaactgcctatatatatttgacactccccttttcttctcccacttcattcactctcgccttagtcgcttcacaacatttagagcctctctttcacacacctcaaccggttcacagtttcaccaccttttcaatcatggtgcgtcgtcgcaacccttctgtgattgagtttagcagcgactcggacgagattaaggaggaatctcccgtcccctctcctccgcctcgtcgctccctctctaagagaggacgtggctctggtcggatggatggtgagggctcttccatgccctcgcagccgactcgcgggagacgccaaaaggttggcgcctctcgtcctcgtcgtagcacgtcttcctctgggtatgctccctgccaggaggaggatggggctttcgacgacttcgtcgaccttccggcgcctgatgctctctacgtcaccggactgtacatgcatccggcgaacgtcagccgcggtccgcatgaacctcccgtcgacttcactctgaagggaatagacacccttcagcgcctgaggttcaccaaccctactctcactcctcgtcatcctggtgtccaggaccctcggttctggaatcttttccaggctgacttctacaattctgtcattctttccaagaaacacccagtcgtcagacataggtttattgactgggagggttgtgagaatatgggagatgctgacatgacgtcagctctcgaaaacttagagagaaaggggttacgaaacattatgaccatggaatacccctggaacgatgaggtggtagctcagttctatgccaccctctggataaagaaagtagatgaggaagccgatgggtatgattacccagtcatgtatttcttcatccagggtaactggcacaaagtcagttatcgtcgttttgcccatattctgggcttctctgatgcagatattcagggcaacaacatgcgagtgca

SEQ ID NO: 6619 - DNA, 1068 bp, Zea mays
  Zm_smallRNAprecursor_2108
tcctcatcatccatcttcctctcgcgccgccgctgcctcgcgtccctctcctggccgcggatctcccatgccacgtggtcgtggtcgtggccgagggatgggtgcccgcttggtccatgggattgtggcatttttttctatgtgctggaacatttctgctgatgtacatgagctggcaaggcgtcaccgggagactgacgacaatcttcgtcgtcaagcttccactatgggtatgcccctcgctcgcctgacgtgcctctccatcctcctcccccggagatcaatgagtggcaccggcaggcctacggggtgtcatttatgtcagcagacgacgaagaagaagcctacgttgatgatcgcgagcagtttgcccccacctccctaccatggggatccgggtcaatcatcctctcaccctccgcctccctactcgggtcagggacccactcccggtgaccctaggccatccggctctggttaccatcaccaccctccacctcctcatcatcgtacatcttcggcatctgttttttctgcggctgatgagctacctagggactcctcattcgaggaagacgtgatgaggaccctcttccctgactacacatcataccctccatcatatccttcgtcctatcctcctcctggaggatattgattcatgtatccatgtctctctcttcgtttttggtacttgttgccaaaaaggggagaaaatccaaaatttctagtcattctgtttgtggttttttcggttatgtatttcttttggtttatttttgttttggccactgttgtgtcttgtatcctcttatcattgtatgaaataaaactgttgggttattattcaaagtgatatgatggtcttctggccatcatcttttgtcccgtcagtttgtaatgattgctttgctatgaagtaaaaatgatgtgtatttagagatagtcatatgcatcacaactcctgtttgacactcttgcacccctcggatggttgtattcagtatgatttttgtcactatctctaaatgtgttgctcacatgacatattatgtcaaaacattggat

SEQ ID NO: 6620 - DNA, 1040 bp, Zea mays
  Zm_smallRNAprecursor_2109
ttgtgaaaattttcagattagcctattcacccccccccccccactctagactactttcaagatggctccccctaaatgtgtgcacgattgtgaatccaatgttttgacataatatgtcatgtgaacaacacatttagagatagtgacaaaaaccatactgaatacaaccatccgaggggtgcaagagtgtcataacaggagttgtgatgcatatgactatctctaaatacacatcattttcacttcatagcaaagcaatcattacaaactgatgggacaaaagatgatggccagaagaccatcatatcactttgaataaaaacccagcagttttatttcatacaatgataagaggatacaagccacaacagtggccaaaacaaaaataatccaaaagaaatacataaccgaaagaaccacaaacagaatgactagaaattttggattttctccccctttttggcaacaagtaccaaaaacgaagaaagagagagacaaggatacatgaatcaatatcctccaggaggaggataggacggaggatatgatggagggtatgatgtgtagtcagggaagaaggtcctcatcacgtcttcctcgagtgaggagtccctaaggggctcatcacccgcagaaaaaacagatgacgaagatgtacgatgaggaggaggaggtggagggtggtgatggtaactagagccggatagccgcgggtcaccaagaatgggtcccggacccgggtagggaggaggatgagaggatgattgacccggatccccatggtagggaggcggagcaaactgctcgcgatcatcaacgtaggcttcttcttcttcgtcgtcgtcgtctgctgacataaagggcaccccgtaggcctgccggtgccactcatttgatctccgggggaggaggatggagaggcacgtcaggcgagcgaggggcaaagggcatacccatagtggaagtttgacgacgaagattgtcgtcagtctcccgctgacgccttgctagctcatgtacatcagcagaaatgttccggc

SEQ ID NO: 6621 - DNA, 1154 bp, Zea mays
  Zm_smallRNAprecursor_2110
cagagtagccaaataaatcgaaaaaggagcccttaggataccagggacctagattttgggtgtgaactagatatctcaaaattctcttaacggccactaagtgacactcttttgggttagcttgaaaacgggcacacatgcacacactaagcatgatatctggcctagatgcccacaaatatagtagagatcctatcattgatctataaagcttttgatctacagatttaacttcttcatttaagtcgagatgaccacttgaagccattggtatcttggcgtgctttgccttttccatgccaaactttttgagcatgtcttgtgtgtacttggtttggcacagaaaggttccttccttgagttgtttaacttgaaaacccaggaagtacttgagttcacccatcacgaacatctcaaacctatttgtcataaccctactaaattcctcacaaaaagtttcatcagtactgccaaatataatgtcgtcgacatatatttgacaaacaaataattgattgtcaactttgcgagtgaataaagtagagtctacttttcatatttcaaaatcatttttaagcaagaaatctttaaggcaatcataccaagctctaggggcttgtttaagcccgtagagtgccttgtgaagtaggtaaacatggtttggcttctttggatcttcaaagcccggtggttgctccacatagaccctctcttgtattggtccatttagaaatgcgctcttgacatccatttgatatagcttgaaatcatggttagtagcataggcaattaatattctaattgactctaaccttgctaccggcgcatatgtttcaccaaaatcaagtccttccacttgggtgtagccttgggcaaccaaccgtgctttgtttcttgtaaccacgccatgtttatcttgtttattcctaaagactcattttgtcccaatcacattttgtttgggtctttggactaaggatcaaacttcattccgggagaagttgttcaactcctcttgcatggcaattatccattccgggtcacccaatgcttcttcaaccttaagtggctcaagagaggaaacaaacgagtaaaattcacaaaaattagctaaacgagatcgagttgttacccctctcctgatgctacccagg

SEQ ID NO: 6622 - DNA, 1126 bp, Zea mays
  Zm_smallRNAprecursor_2111
atcgttcaagccagataaacttcgttctcacaaggagagaagataaacaaccatgtttggattgtaaggtgatacctggagagagtgtggtgccccaacataatcttgtggagggcgcttggtctgaagaataagatgcaaacaacatgtgggtgaagatggcagcttgtattaggaaggtggtgtcagaggtgtttggagtgaccaaagggagcataggtgaacctaaagatacttggtggtggaccgaggacattcaaaaggcaataaaagagaagaaataatgttacaggagcttgttccatgacaagagcgtggtcaacatatagaggtataaggtggcaaagaaaactgcaaagcgagctgtgagtcaggcaaagggtccagcctatgatgatctttaccgaagactaagtacaaaggaagggcagaaggatgtctataaactggctaggattcgggaaaggaagacgagtgacctcaaccaagttaaatgcattaaggatgagatggatcaactcttagtgaaaggacaagacatcaaacagaggtggcagaggtattttgacaatattttcaatggtgagaatgagactatggacacccaattggatgactcctttgttgatttaaatagatgctttgtacgcaggatccaagagccagaggtcaaagaagctttaaagaggatgaaagggggcaaggcgatgggaccggatggtatcccaatagaggtgtgaaaatgccttagggatattgctatcgtttggctcaccaagttgttcaaccatatttttcgattaaacaagatgcctgatgagtggagtacattagtaccaatcttcaagaacaattgatggtgtgaaaatgtcttacggggcgtttggatcccttcattttaaaggaattggaattcactcaataaagtaacttatttagtttggaatttggcattccaccactttccaaagttcagatataaggttatctcaaattcatagggtggaggataggaaatgattttatgcatgattagaatttgtttctaatctgtaacttacatgacactcttcgttctactcctctataataaaaatgtagcacataaatatctaggacatcttgc

SEQ ID NO: 6623 - DNA, 1171 bp, Zea mays
  Zm_smallRNAprecursor_2112
tcttggacatttctgctctgctcgcgcactagccatgcatgcgtgtcaggggcgtccaattttttttctgtccggtcacttctagcagctgcgcgcaaatttgaatttttctttcttccctctgttgtttctggttctctgaccacactggtcagaaccagctgaactggcccatgggggcggttgaactggtcctgaggaccagctcaactgcctatatatacttgactctccccttctcttctcccacttcattcactctcgccttggtcgcttcacaacctttagagcctctccttcacacacttcaaccgcttcacagtttcaccaccttttcaatcatggtgcgtcgtcgcaacccctctgtggttgagtttagcagcgactccgacgagattcaggaggaatctcctgtcccctctcctccgcctcgtcgctccctctctaagagaggacgtggcactggtcggatggctggcgagggctcttccatgccctcgcagccgactcgcgggagacgccaaaaggttggcgcctctcggcctcgtcgtagcacgtcttcctcagggtatgctccctgccaggagaaggatggggctttcgacgacttcgtcgaccttccggcgcctgatgctctctacgtcaccggactgcacatgcatccggcgaacgtcagccgcggtccgcatgaatctccagtcgacttcactcagaagggaatagaaacccttcagcgtctgaggtttaccaaccctactctcactcctcgtcatcctggtgtccaggaccctcggttctggaatcttttccaggctgacttctacaattctgtcattcttaccaagaaacacccagtcgtccgacatagatttattgactgggagggttgtgagaatatgggagatgctgacatgtcgtcagctctcgtaaaccttgagagaaaggggttacgtaacattatgaccatggaatacccctggaacgatgaggtggtagctcagttctatgccaccctctggataaagaaagtagatgaggaagccgatgggtatgagtacccagtcatgtatttcttcatccagggtaactggcacagagtcagttatcgttgttttgcccatattctgggcttctctgatacagacattcagggcagcaacatgcgagtgca

SEQ ID NO: 6624 - DNA, 1057 bp, Zea mays
  Zm_smallRNAprecursor_2113
aacccttcagcgtctgaggtttaccaaccctactctcactcctcgtcatcctggtgtccaggaccctcggttctggaatcttttccaggctgacttctacaattctgtcattcttaccaagaaacacccagtcgtccgacatagatttattgactgggagggttgtgagaatatgggagatgctgacatgtcgtcagctctcgtaaaccttgagagaaaggggttacgtaacattatgaccatggaatacccctggaacgatgaggtggtagctcagttctatgccaccctctggataaagaaagtagatgaggaagccgatgggtatgagtacccagtcatgtatttcttcatccagggtaactggcacagagtcagttatcgttgttttgcccatattctgggcttctctgatacagacattcagggcagcaacatgcgagtgcatggcattcggctgcccatgcgggaagagacggaattcattcatgtctctactgagcgggagttctggacaacagctaacatgcataggtactacaggtaccttaattctttgtcccggatgaccgttctcccaaagggcggaaatcaaatgaatgtccttggggagagtcgcgtcttcctcctcctccttgctccaaactgtctcgcccgcatcaatgtgtttgacatgatctgggaagagatcgtccgtgcttcctggtctcctcacagagggtgtcttcatgcaccctttatcatgaagatgatcgaagtggtcacccagacccacttcgaaaaacccgtcaaacactcccgctacgtaccctactgggttgattcctccaacccagctgctcgtacgaagcgggttccctcacggtctggaggccctgcctcctcctctgagccacctcgccagcctcctcaccatccttcctcctctccccccgctgctgcctcgcgtccctctcctggccgcggatctcccatgccacgtgctcgtggtcgtggtcgaggtcgtggccgcgggatgggtgctcgcttggtccatgggcttgcggcatttttctcc

SEQ ID NO: 6625 - DNA, 1058 bp, Zea mays
  Zm_smallRNAprecursor_2114
aacccttcagcgtctgaggtttaccaaccctactctcactcctcgtcatcctggtgtccaggaccctcggttctggaatcttttccaggctgacttctacaattctgtcattcttaccaagaaacacccagtcgtccgacatagatttattgactgggagggttgtgagaatatgggagatgctgacatgtcgtcagctctcgtaaaccttgagagaaaggggttacgtaacattatgaccatggaatacccctggaacgatgaggtggtagctcagttctatgccaccctctggataaagaaagtagatgaggaagccgatgggtatgagtacccagtcatgtatttcttcatccagggtaactggcacagagtcagttatcgttgttttgcccatattctgggcttctctgatacagacattcagggcagcaacatgcgagtgcatggcattcggctgcccatgcgggaagagacggaattcattcatgtctctactgagcgggagttctggacaacagctaacatgcataggtactacaggtaccttaattctttgtcccggatgaccgttctcccaaagggcggaaatcaaatgaatgtccttggggagagtcgcgtcttcctcctcctccttgctccaaactgtctcgcccgcatcaatgtgtttgacatgatctgggaagagatcgtccgtgcttcctggtctcctcacagagggtgtcttcatgcaccctttatcatgaagatgatcgaagtggtcacccagacccacttcgaaaaacccgtcaaacactcccgctacgtaccctactgggttgattcctccaacccagctgctcgtacgaagcgggttccctcacggtctggaggccctgcctcctcctctgagccacctcgccagcctcctcaccatccttcctcctctccccccgctgctgcctcgcgtccctctcctggccgcggatctcccatgccacgtgctcgtggtcgtggtcgaggtcgtggccgcgggatgggtgctcgcttggtccatgggcttgcggcatttttctcca

SEQ ID NO: 6626 - DNA, 1037 bp, Zea mays
  Zm_smallRNAprecursor_2115
tccctgtccaggattaaatattctagcttctgctggacaaccccatatatggaagtagttgagcgtgggttttctgccagtccacaactcatatggagttctagccactgatttactaggaactctgttgagtatatgcatagcggtttttaaagcctccatccatagacccaatgacaggttaaagtaacttagcatactccttaccatatccattagcgttctgttacgcctttcggcaaccccattctgttgtggttcgccaggtgttgaatactgagcaacaataccattttctcttaggaacctcgcgaaaggtcctggaacttggccatactcggtatggcgcccatagtactcccccccacgatctgatcggacaatctttatcttcaaattgtgttgattttctacttcagccttgaactgtttaaacttgtctaaagcttctaatctttccttaatgggataaatataaccgtagcgagagtagtcatgtgtgaaggttatgaacgagttaaacccatctactgtcctaactggaaaaggaccacagatatttgtatgaataatttctaacactctcgtactatgcttagcatctttcttaatctgcttcgcgaatttacccttaatgcaatctctgtattgctctaagtctgtgaagtctaggggatggagaatctgttccttaacgagactttctattctccccctcgaaatgtggtccaaacgatagtgccataattttctgtacttttctggattttctagctatttttctaatttcttttctgtttcactaattttgatttccaggaaaattaaaaaaaaatcgctggaaaaaaatgtgtctggccattttggcctggcctacttgtggaggcgtgcccagccaggaaaggggaggggggcaaggcgtgcccaggccgtaacctgggcctgggccgcccatcgagcccacgcgcgcgctgcacctgtctggtggccgttggatcgaatccaacgttccagattcaccacacgcgctataaagg

SEQ ID NO: 6627 - DNA, 1164 bp, Zea mays
  Zm_smallRNAprecursor_2116
ttttttcattatctagaattcaaccacacacactaatgtgtgttgcagcattagtatgtattgcaactattttttgttctattttgtactgtgtgttttagtttgttttgattagcaatttttggttatgagatctgtaccatgtgtttgtgccctcacgtttttttcattcccattttttcagtggtttttataatggatcaagaacagaatgtcacaggccagcaaggcgccgacactgtccgtcgctctcctcgtgtacaaaacaagagaaaggaattagataaaaatgaattgaaggaaaggaggaagaggttaaggttgaaagtccccttgtctcctattcaagatgaagaaagtgatgatgaacaagacccagagtttgctcctgccgacgatggttctggcgacgacaatgttgttattgatggtggcgatgagaataagggtaaaactaagacgcgagctatacgatgctcacctgggaagttcataaagcttgtgaatgctctctccgatgaatttaaagctgaagtagttgccaaggggtttggtggcctgctgagattcaagccgcacttattgtccagaaaattgctcagttggctgatgcggaagcttaacccggagacgatgaaattagagattggtggtggaaaagagattccaatcactgagcacagtgtttggtgtgttttgcagttaccaaacgttggccgtgacccgccccccatgtctgatgtagatgtgcgtgccttgcgggacgagctgggagagaaaatttgtggcaactcttatagacacatatctggtatcaatctatctgttatcattgatcgactgcagaagaggattctcactggggagttgggcctgagagcctttttcatggctgcatttcagtgtctgttattctccaacactgacactcgcatcaggattgatgatgtaaagtatactcaggacatccagaacatggccaacaagaactggtgcaaagcggtagtcgacaggctcagcatagctgctcgtctttataaaaaggattttgcggagaaaggcatcaacgcacccatcagtggatgcgggatcttcgtagttgtaagctcaacacacatttaatttttgcccttgcaacttactcttccaattacacaagtagta

SEQ ID NO: 6628 - DNA, 1045 bp, Zea mays
  Zm_smallRNAprecursor_2117
accaactaccaagtgctattcaatttgcaatgccaaacaattagctcgatggtggaccaaataataataaccaaaagaatcatgaaacatgcgttggcattcagattgaggagactctcttccagtggatcagaaatgttattagttcccacgtaatgagagagaaacaatcaaacagtagcccgacactggagcaacattgttgtgttatctcagacaaatgcctcgattgtcctaatggtataacactataacggaatgggttatatcggactcgtcatctgcttgctaatcacagagaacacgacatattcatgttcaacccccatctgatggtcattcgatcaagtacacaacattagtaggagacgttttggttgtattagcgactcgatttaattgtggttttgcactgtcctaacaatcatcagcagatgtgttcgattggcaactaggggaacttcaaaacattagtgcaatacatagttggaacgtcggcattcagaatgagtaggaggaatttctcatctagcagatcagacttgtatttctttcctcatcatgccaaccaaaaaataaataaataaataaaggcaaaacaaacaaccgaacgacactaggaaacaccaaaaaaaaatactagcatcaatacagcaagaacggtgggttctctcagacaaatgcctcggttgtccacatggtgtaatggaatggattcgatcggactcgtcatctgtttgctcatcacagagaaccgcacggcgcgaggccactacgagacgaaacagatagcggcgcaacgagattcgtaagacgggagggaagctcaccttggccctcatcgcggcgggatgactgcctctcggacgggtttggggggaaaccggaagagaggcctgtgatgcgacagcggcggcggcggcggtgcgagctctcgccgcgcttctatataggagagccagtggattaaccctagcagggataacagtcttgggccagatcttaagttatcatgggcctcaattattagacaaaagaaaaaaca

SEQ ID NO: 6629 - DNA, 1170 bp, Zea mays
  Zm_smallRNAprecursor_2118
tagtcagctatttgtggtgggttaatttacgttggctatgtttcgattctgtgtactttgatttatattatgtaaatgactctagtctttaatattattacttactctttattattattcgaagcattgtgatatgatgagtcatttatgtaatcgctatgtacgtgagttctgatcctggcacgtacatggtttgcattcggtttaccttctaaaacaggtgcgacaggtggcatagcaggagtggagggtagcgacggcgacacaacgctgcgtgtggtggcttgcagttgcagctcctcgttcgcgacgggtgtgcggccaagagctctcggcacaggcatgtagtagtagagccagaattgttaccttgggttttcccacacctcaaatagatatagatatagggatatagatagatatagcaaattcaccaaataatataggagtatagatatagatataacaagggttatagatatagatatatagaagatatagatagatagatagatagatatgatagaatagataacttacaattttgtctaaaagtaactaaatcagtgctaagtttggagtagcatatctctggtgaatacttgctagtgaattggtttccgctatagtatatatataagtatacactcttcttggattatagtatatatataagtatacactcttctaggatcaatcgtgaggagttccttaaattttgttgcgacatggagtacagaaagagggtggatgcgctagtgttttttcttgttacttctcctcggatactttgttgctcatgcacatgggaagggtaagtgaaaactatacagacatgtgtgtgcatgcttagatagatgtagacaatttagaagatgttattatatgataccgtgtgtgtatcatggcgaattgctaatgtatcgcaatcccctatgttaaattactcaaataattttgaatgttattattctcgaggcatttgttggtaatagaactcttatcctttaccttctactagatcatgtcacagatgatgtcggtgtttctactccagctaaagaaggaattatgcaaggaaaaggagcacgatgcgctaaaggttctcctccattttaagataacaagtgctactgctgcattgggggccgaactcatggtcgctactct

SEQ ID NO: 6630 - DNA, 1139 bp, Zea mays
  Zm_smallRNAprecursor_2119
tgtgtactttgatttatattatataaatgactctagtctttaatattattacttactctttattgttattcaaagcattgtgctatgatgagtcatttatgtaatcgctatgtacgtgagttctgatcctagcacgtacatggttcgcattcggtttaccttctaaaacctggggtgacaggtggcatagcaggagtggagggcagcgacggctgcatagctctgcgtgcagtggcttgcattttttgctcctcgttggcgatgcgtgtgcgaccatgagctctcgacacaagcaggtagtagtagagccagaattgtaaccttgggttttcccacacctcaaatagatatagatatagggatatagatagatatagcaaattcaccaaataatataggggtatagatatagatataataaggggtatagatatagatatagatatagatatatagaagatatagatagatagatagatagatagatagatagatagatagatagatagatagatagatatgatagaatagataacttacaattttgtctaaaagaaactaaatcactgctaagtttggagtagcatatctttggtgaatacttgctagtgaattggtttccgctatagtatatatatatataagtatacactcttctaggattatagtatatatataagtatacactcttctaggatcaatcgtgaggagttcattaaattgtcttgcgacataaagtacagaaagagggtggatgcgctagtgtttttctcgttacttctcctcggatactttgctgctcatgcacatgggaagggtaagtgaaaactatacagacatgtgtgtacatgtttagatagatctagacaatttagaagatgttattatatgatactgtgtgtgtatcatggcgaattgctaatgtatcgcaatcccctgtgttaaattactcaaataattttgaatgtaattattctcgaggcatttgttggtaatagaactcttatcctataccttctactaggtcatgtcacagatgatgtcggtgtttctactccagctaaagaaggaattatgcaaggaaacggagcacgatgcattgtagggtttcctccatgcaaagataacaagtgctactg

SEQ ID NO: 6631 - DNA, 1174 bp, Zea mays
  Zm_smallRNAprecursor_2120
tgtgtactttgatttatattatataaatgactctagtctttaatattattacttactctttattgttattcaaagcattgtgctatgatgagtcatttatgtaatcgctatgtacgtgagttctgatcctagcacgtacatggttcgcattcggtttaccttctaaaacctggggtgacaggtggcatagcaggagtggagggcagcgacggctgcatagctctgcgtgcagtggcttgcattttttgctcctcgttggcgatgcgtgtgcgaccatgagctctcgacacaagcaggtagtagtagagccagaattgtaaccttgggttttcccacacctcaaatagatatagatatagggatatagatagatatagcaaattcaccaaataatataggggtatagatatagatataataaggggtatagatatagatatagatatagatatatagaagatatagatagatagatagatagatagatagatagatagatagatagatagatagatagatatgatagaatagataacttacaattttgtctaaaagaaactaaatcactgctaagtttggagtagcatatctttggtgaatacttgctagtgaattggtttccgctatagtatatatatatataagtatacactcttctaggattatagtatatatataagtatacactcttctaggatcaatcgtgaggagttcattaaattgtcttgcgacataaagtacagaaagagggtggatgcgctagtgtttttctcgttacttctcctcggatactttgctgctcatgcacatgggaagggtaagtgaaaactatacagacatgtgtgtacatgtttagatagatctagacaatttagaagatgttattatatgatactgtgtgtgtatcatggcgaattgctaatgtatcgcaatcccctgtgttaaattactcaaataattttgaatgtaattattctcgaggcatttgttggtaatagaactcttatcctataccttctactaggtcatgtcacagatgatgtcggtgtttctactccagctaaagaaggaattatgcaaggaaacggagcacgatgcattgtagggtttcctccatgcaaagataacaagtgctactgctgcattggggggcgaactcatgctcgctactcta

SEQ ID NO: 6632 - DNA, 1148 bp, Zea mays
  Zm_smallRNAprecursor_2121
tgcctctggtgggttaatttacgttggctacgtttcaattctgtgcactttgatttatattatgtaaatgactctagtctttaatattattacttactctttattgttattcgaagcattgtgctgtgatgagtcatttatgtaatcgctatgtacgtgagttctgatcatggcacgtacatggttcgcattcggtttaccttctaaaacctggggtgacaggtggcatagcaggagtggagggcagcgacggctgcacagctctacgtgcaatggcttgcattttttgctcctcgttggcgatgcttgtgcgaccatgagctctcgacataggcaggtagtagtagagccagaattgtaaccttgggttttcccacaccacaaatagatatagatatagggatatagatagatatagcaaattcaccaaataatatagggggtatagatatagatataataaggtgtatagatatagatatagatatatagaagatatagatagatagatagatagatatgatagaattgataacttacaattttgtctaaagaaactaaatcactgctaagtttggagtagcatatctttggtgaatacttgctagtgaattggtttccgctatagtatatatatacatatatatatataagtatacactcttctaggattatagtatatatataagtatacactcttctaggatcagttgtgaggagttccttaaattttcttgcgacatggagtacataaagagggtggatgcgctagtgtttttctcgttactctcctcagatactttgctgctcatgcacatgggaagggtaagtgaaaactatacagacatgtgtgagcatgcttagatagatgtagacaatttagaagatgttattatatgataccgtgtgtgtatcatggcgaattgctaatgtatctcaatcccctgtgttaaattactcaaataatttcgaatgtaattattctcgaggcatttgttggtaatagaactcttatcctttaccttttactaggtcatgtcacagatgatgtcggagtttctactccagctaaagaaggaattatgcaaggaaacggagcacgatgtgatgtagggtttcctccatgcaaagataacaagtgctactgc

SEQ ID NO: 6633 - DNA, 1183 bp, Zea mays
  Zm_smallRNAprecursor_2122
tgcctctggtgggttaatttacgttggctacgtttcaattctgtgcactttgatttatattatgtaaatgactctagtctttaatattattacttactctttattgttattcgaagcattgtgctgtgatgagtcatttatgtaatcgctatgtacgtgagttctgatcatggcacgtacatggttcgcattcggtttaccttctaaaacctggggtgacaggtggcatagcaggagtggagggcagcgacggctgcacagctctacgtgcaatggcttgcattttttgctcctcgttggcgatgcttgtgcgaccatgagctctcgacataggcaggtagtagtagagccagaattgtaaccttgggttttcccacaccacaaatagatatagatatagggatatagatagatatagcaaattcaccaaataatatagggggtatagatatagatataataaggtgtatagatatagatatagatatatagaagatatagatagatagatagatagatatgatagaattgataacttacaattttgtctaaagaaactaaatcactgctaagtttggagtagcatatctttggtgaatacttgctagtgaattggtttccgctatagtatatatatacatatatatatataagtatacactcttctaggattatagtatatatataagtatacactcttctaggatcagttgtgaggagttccttaaattttcttgcgacatggagtacataaagagggtggatgcgctagtgtttttctcgttactctcctcagatactttgctgctcatgcacatgggaagggtaagtgaaaactatacagacatgtgtgagcatgcttagatagatgtagacaatttagaagatgttattatatgataccgtgtgtgtatcatggcgaattgctaatgtatctcaatcccctgtgttaaattactcaaataatttcgaatgtaattattctcgaggcatttgttggtaatagaactcttatcctttaccttttactaggtcatgtcacagatgatgtcggagtttctactccagctaaagaaggaattatgcaaggaaacggagcacgatgtgatgtagggtttcctccatgcaaagataacaagtgctactgctgcattggggggcgaactcatgctcgctactctac

SEQ ID NO: 6634 - DNA, 1146 bp, Zea mays
  Zm_smallRNAprecursor_2123
gagcacgatgtgatgtagggtttcctccatgcaaagataacaagtgctactgctgcattggggggcgaactcatgctcgctactctacgctggctgagtgtagtcatgcctgcttctaaacaaaaattaagatcactgttattatatacattgtaatggtaggtaatgctattaataatatatgggaattttagttttggtattatacttttttccaattcacgaaataccttctaaaacctggcatgacaggtggcatagcaggagtggagggcagcgacggctgcacagcgctgcatgcagtggcttgcatttgtagctcctcgttggcgatgcgtgtgcgaccaagagctctcgacacagacaggtagtagtagagccagaattgtaaaccttgggttttcccacacctcaaatagatatagatatagggatataaatagatatagcaaattcaccaaataatatatatatatatagatatatagaagatatagatagatagatagatagatagatatgatagaatagataacttacaattttgtctataagaaactaaatcactgctatgtttgagtagcatatctttggtgaatacttgctagtgaattggtttccgctatactatatatatacatatatatataagtatacactcttctaggattatagtatatatataagtttacactcttctaggatcagttgtgaggagttccttaaattttcttgcgacatggagtacagaaagagggtggatgcgctagtgtttttctcgttactctcctcagatactttgctgctcatgcacatgggaagggtaagtgaaaactatacagacatgtgtgtgcatgcttagatagatgtagacaatttagaagatgttattatatgataccttgtgtgtatcatggcgaattgctaatgtatctcaatcccctgtgttaaattactcaaataatttcgaatgtaattattctcgaggcatttgttggtaatagaactcttatcctttaccttctactaggtcatgtcatagatgatgtcggagtttctactccagctaaagaaggaattatgcaaggaaacggagcacgatgcgatgtagggtttcctccatgcaaagataacaagtgctactgc

SEQ ID NO: 6635 - DNA, 1148 bp, Zea mays
  Zm_smallRNAprecursor_2124
gagcacgatgcgatgtagggtttcctccatgcaaagataacaagtgctactgctgcattggggggcgaactcatgctcgctactctacgctggctgagtgtagtcatgcctgcttctaaacaaaaattaagatcactgttattatatacattgtaatggtaggtaatgctattaataatatatgggaattttagttttggtattatacttttttccaattcacgaaataccttctaaaacctggcgtgacaggtggcatagcaggagtggagggcagcgacggctgcacagcgctgcatgcagtggcttgcatttgtagctcctcgttggcgatgcgtgtgcgaccaagagctctcggcacagacaggtagtagtagagccagaattgtaaaccttgggttttcccacacctcaaatagatatagatatagggatatagatagatataacaaattcaccaaataatatatatatatatatatagatatatagaagatatagatagatagatagatagatatgatagaatagataacttacaattttgtctaaaagaaactaaatcactgctatgtttgagtagcatatctttggtgaatacttgccagtgaattggtttccgctatactatatatatacatatatatatataagtatacactcttctaggattatagtatatatataagtatacactcttctaggatcagttgtgaggagttccttaaattttcttgcgacatggagtacagaaagagggtggatgcgctagtgtttttctcgttactctcctcagatactttgttgctcatgcacatgggaagggtaagtgaaaactatacagacatgtctgtgcatgcttagatagatgtagacaatttagaagatgttattatatgataccgtgtgtgtatcatggcgaattgctaatgtatctcaatcccctttgttaaattactcaaataatttcgaatgtaattattctcgaggcatttgttggtaatagaactcttatcctttaccttctactaggtcatgtcacagatgatgtcggagtttctactccagctaaagaaggaattatgcaaggaaacggagcacgatgcgatgtagggtttcctccatgcaaagataacaagtgctactgc

SEQ ID NO: 6636 - DNA, 1183 bp, Zea mays
  Zm_smallRNAprecursor_2125
gagcacgatgcgatgtagggtttcctccatgcaaagataacaagtgctactgctgcattggggggcgaactcatgctcgctactctacgctggctgagtgtagtcatgcctgcttctaaacaaaaattaagatcactgttattatatacattgtaatggtaggtaatgctattaataatatatgggaattttagttttggtattatacttttttccaattcacgaaataccttctaaaacctggcgtgacaggtggcatagcaggagtggagggcagcgacggctgcacagcgctgcatgcagtggcttgcatttgtagctcctcgttggcgatgcgtgtgcgaccaagagctctcggcacagacaggtagtagtagagccagaattgtaaaccttgggttttcccacacctcaaatagatatagatatagggatatagatagatataacaaattcaccaaataatatatatatatatatatagatatatagaagatatagatagatagatagatagatatgatagaatagataacttacaattttgtctaaaagaaactaaatcactgctatgtttgagtagcatatctttggtgaatacttgccagtgaattggtttccgctatactatatatatacatatatatatataagtatacactcttctaggattatagtatatatataagtatacactcttctaggatcagttgtgaggagttccttaaattttcttgcgacatggagtacagaaagagggtggatgcgctagtgtttttctcgttactctcctcagatactttgttgctcatgcacatgggaagggtaagtgaaaactatacagacatgtctgtgcatgcttagatagatgtagacaatttagaagatgttattatatgataccgtgtgtgtatcatggcgaattgctaatgtatctcaatcccctttgttaaattactcaaataatttcgaatgtaattattctcgaggcatttgttggtaatagaactcttatcctttaccttctactaggtcatgtcacagatgatgtcggagtttctactccagctaaagaaggaattatgcaaggaaacggagcacgatgcgatgtagggtttcctccatgcaaagataacaagtgctactgctgcattggggggcgaactcatgctcgctactctac

SEQ ID NO: 6637 - DNA, 1149 bp, Zea mays
  Zm_smallRNAprecursor_2126
tgcatgcttctgtccggtcacgtcgcgcgcgcagtaatttttttttggaccttagcccctgtccggtcgtcctgtctctttttgcatgaggactggccttgcgcgcccgacgccatgtacttgcagactgcagcgtcctgtcttttcccccgcgcagttttttttttcttttgcatgcagtctgctgcgtcaggtcacttccccctgcgctgcgcgcaaattagaattttttcctctgttgtttctagttctctgaccacactggtcagtaccagctgagctggcccatgggggcggttgaactggttctgaggaccagctcaactgcctatatatacttcactcttcctcatctcttttcccacttcattcactctcgccttggtcgcttcacaacctttagagcctttccttcacacacttcaaccgcttcacagtttcaccaccgttttcaatcatggtgcgtcgccgcaacccctctgtggttgagtttagcagcgactccgacgagattcaggaggaatctcccatcccctctcctccgcctcgtcgctccctctctaagagaggacgtggctctggtcggatgcctggcgagggctcttccttgccctcgcagccgactcgcgggagacgccaaaaggttggcgcctctcgtcctcgtcgtagcacgtcttcctcagggtatgctccctgccaagaggaggatggggctttcgacgacttcgtcgaccttccggcgcctgatgctctctacgtcaccggactgcacatgcatccggcgaacgtcagccgcggtccgcatgaatctcccatcgacttcactcagaagggaatagaaacccttcagcgtctgaggttttccaaccctactctcactcctcgtcatcctggtgtccaggaccctcagttctggaatcttttccaggctgacttctacaattctgtcattcttaccaagaaacacccagtcgtccgacatagatttattgactgggagggttgtgagaatatgggagatgttgacatgtcgtcagctctcgttcacttagagagaaaggggttacgtaacattatgaccatggaatacccctggaacgatgaggtggtagctcagttctatgccaccctctggataaagaaagtaga

SEQ ID NO: 6638 - DNA, 1097 bp, Zea mays
  Zm_smallRNAprecursor_2127
cccagtcatgtatttctttatccagggtaactggcacaaagtcagttatcgtcgttttgcccatattctgggcttctctgatacagacattcagggcagcaacatgcgagtgcatggcattcggctgcccatgcgggaagagacggaattcattcatgtctctactgagcgggagttctggacaaccgctaacatgcataggtactacaggtaccttaattccttgtcccggatgaccgttctcccaaagggcggtaatcaaatgaacgtccttggggagagtcgagtcttcctcctcctccttgctcccaacagtctcgcccgcatcaatgtgtttgacatgatctgggaagagatcgtccgtgcttcctggtctcctctcagagggtgtcttcatgcaccctttatcatgaagttgatcgaagtggtcacccagacccacttcgaaaaacctgtcaaacactcccgctacgtaccctactgggttgattcctccaacccagctgctcgtacaaagcgggttccctcacggtctggaggccctgcctcctcctctgagccacctcgccagcctcctcaccatccttcctcctctccccccgctgctgcctcgcgtccctctcctggccgcggatctcccatgccacgtgctagtggtcgtggtcgaggtcgtggccgcgggatgggtgctcgcttgctccatgggcttgcgacatttttctccatgtgccgcaacatttctgctgatgtccatgaggtggcacggcgtcagcgggagactgacgacaatcttcgtcgtcaagcttcctccatgggcatgccttttgtccctcgttcgcctgatgtgcctctccatcctcctcccccggagatcaatgagtggtaccagcaggcctacggggtgccttttatgcctgcagacgatgaagatgaagaagtctttgttgatgatcgcgaggagtttgccccgcctccctaccatggggatccgggtcaatcatcctcccaccctccgcctccttacccgggtccgggacccattcctggtgaccctaggccatccggctctggttaccaccaccaccctccacctcctc

SEQ ID NO: 6639 - DNA, 1127 bp, Zea mays
  Zm_smallRNAprecursor_2128
atgcttatcaaatgcccaccacatgagattcctagatattttatcatatggcttttccaagccgataaaaatcatgtgcaattccttcttctactccttataccgctccatgacctgtcttattaagaaaattgcttccatggttgaccttctaggcatgaatccaaattggttcattgtgatatacgtcattcatctcaaacgatactcaataactcttttctcatagcttcatagtatggctcatgagcttaatccctcgatagttggtacaactttgaatatctcccttgtttttgaagattggtactaatgtactcctccactcatcgggcgtcttgtttgatcgaaaatatggttgaacaacttggttcgccaaacaatagcaatatccctaaggcatttccacacatctattgggataccatccgatcccattgtcttgccccctttcatcctctttaaagcttctttgacctctgactcttggatcctacatacaaagcatctatttaaatcatcaaaggagtcatccaattaggagtccatagtttcattatcaccattgaaaagattgtcaaaatagctctgccacctctatttgatgtcttgtcctttcaccaagagttgatccatctcatccttaatgcatttaacttggtcaaggtctcttgtcttcctttcctgaatcctagccatcttatagacatcgttctccccttcctttgtacttagtattcggtaaagatcatcataggctcgaccctttgtctcacacacagctcgctttgtagttttctttgtcaccttatacctctctatgttgaccgcgctcctgtcatggaacaagcttctgtaacattctttcttctcctttattgccttttgaacgttctcgttccaccaccaagtatttttaggttcacctctgctccctttggtcattccaaacacctctgacgcgacctttctaatacaagtcgccatcttcacccatatgttgtttgcatcttcttcttcggaccaaacgccctccacaaaaactctttccttaaaaacttcggatgtctcccctttgagtttctaccacttcgtccttgcaattttggcttgtttatccctatggg

SEQ ID NO: 6640 - DNA, 1167 bp, Zea mays
  Zm_smallRNAprecursor_2129
aaaggtgcgcttttgtaaaaaggtttggtttatattttataatactagacataaacatgaaaataccttagttagaaatatataaacatcaggtgaaccattttaatcttttataaaagacatatattatatacctgtggttatgagattataaacacactatgaaacattattagtccttttaattataaaatattatgaaacacattataacaaacatactagacattattaaaactattacagaaacttatttaaataagattagcatatagttataaagctactatttaaaagtgtttattgcataaatattaagttaactattcatgacaccacataatttaaattttaaataatcaaatttcaaagaacaaagtgttgtaggggttacacatgattaaccgtacactacagtaaacgaagaaatttccgacggctaaaatcgtcggacataagatttagatcgtcggagataagctatgtccgacggcattaacttatctccgacggttttaagccgtcgtggataacgcgtcggaaatagcattatatccgacggcagccgtcggacatagcgtatgtccgacggccccatcgaaccgtcggagataaggtggcataaccgttttacccgccgcctgggcccacagctgttatgtccgacagtttaaagccgtcggacataacatatagcatatgtccgacggttttaagccgtcggacataacatataccttatgtccgacggcctacactaagccgtcggacataatattttttagaaattgcacaaaaatctgaaatttaaaaaatctgacatttgcaaatacaaaacagatttcatacacatatacacattcacattaacaaatatactcacataagtatacacattcacaaatataatcacataagcattcacatttacaaaatttaacataacgacatgacacacgaaatgctctgttttactgtagtggtagacgataggggtagcatataaaaattggatctttcttctacctacggatgacacacgaagagagcggaacacgggaccagctgggatgcgacgactccagcgtgaggtagtagggcacctgcgaggcctcgacgacggcgagcaagcgacgaacgatgatgagggcgatagctctggcgagc

SEQ ID NO: 6641 - DNA, 1159 bp, Zea mays
  Zm_smallRNAprecursor_2130
ttatgcaattttttcagttaattatgaaaccaacgtggattaattattgtttaaattgcatagaattcagaaaattttgtggtgattgaatattttaaccaacgttggatattgttaccacaatttaatacaagtttatgttttctagatcatccaatgatggtttagaaattttgtgatcagaaattttcatagatatggcatgattattatttgaccaacgttgaatatttaattcatgcattttctatgattcagtattcagtatttatttcagatgtcctaaatattttctattttaattttgcaaaggtgctcataccgccatgttgattagccagattgctcagatgaaaccgctagatggtagtaattaccattcttggcgggaggatatagacatgataaccacagtgggtgagatagattacgcactgaggtttgataaaccagttgagcccacagtgggcactcccaactatgaccacaggtggatgcaatacagcatcgacaaggtcaagtgggaaagatcaaatgacaaatgtatgattattcttaagaggagcatcaaggagcctcttaagagttccataccagagtgcgagactgccaaagaataccttgagagggtagcctctcatcaccaagggtcttctaaggcttatgcttgctctctaatgacagaatttgtcaatgcaaaatacgatggaaatggtgtcagaccattcattcagaaaatgatatccatcgtagctaagataaacaagtacctcgggtctcctttacacgaggaatttgtagtatttatgataatgaagtctctgcccaaggagtttgagacttttcacatacagtacaacacttgtgtcactgataagtggaatatagaccaactcttggcacagtgtgtccaggaggaagagaggttaaagcagactggagactctgtcaacctcatcaaaggcaacatccccagacagaacaagaactcaaagaaaaagttcaagaagcaaggtaaacagaataaccaggcttcctcgagcaataataatcagccaagacaaggaggcagtttctcagttccccctgatacctgcctctattgcaagaagacaggtcattacaagagaaagtgccctgaattcctgcagtatctact

SEQ ID NO: 6642 - DNA, 1140 bp, Zea mays
  Zm_smallRNAprecursor_2131
atttatttcagatgtcctaaatattttctattttaattttgcaaaggtgctcataccgccatgttgattagccagattgctcagatgaaaccgctagatggtagtaattaccattcttggcgggaggatatagacatgataaccacagtgggtgagatagattacgcactgaggtttgataaaccagttgagcccacagtgggcactcccaactatgaccacaggtggatgcaatacagcatcgacaaggtcaagtgggaaagatcaaatgacaaatgtatgattattcttaagaggagcatcaaggagcctcttaagagttccataccagagtgcgagactgccaaagaataccttgagagggtagcctctcatcaccaagggtcttctaaggcttatgcttgctctctaatgacagaatttgtcaatgcaaaatacgatggaaatggtgtcagaccattcattcagaaaatgatatccatcgtagctaagataaacaagtacctcgggtctcctttacacgaggaatttgtagtatttatgataatgaagtctctgcccaaggagtttgagacttttcacatacagtacaacacttgtgtcactgataagtggaatatagaccaactcttggcacagtgtgtccaggaggaagagaggttaaagcagactggagactctgtcaacctcatcaaaggcaacatccccagacagaacaagaactcaaagaaaaagttcaagaagcaaggtaaacagaataaccaggcttcctcgagcaataataatcagccaagacaaggaggcagtttctcagttccccctgatacctgcctctattgcaagaagacaggtcattacaagagaaagtgccctgaattcctgcagtatctactagagagtggtaaggaccaagttacttttgtaaatgagtctttatacttagaatatcccagttattcttggtggattgactcaggtgcaactgttcatgttgcaaactctctacagggactccgtacaagccaaaggctcccaaagggccgaagaacaattagagtggcaaatggagttgaagcagcagtcgaggccattggagatatacatcttaaattagttaatggttttgtactgttgttgaga

SEQ ID NO: 6643 - DNA, 1052 bp, Zea mays
  Zm_smallRNAprecursor_2132
taatgaatctacgagctgaaatcacgaggccctgccgcctccgccgcctatatgagaccacctacgtagctggctgcgtctgcgcgcgagctcctcccctgtacccctacctctccaccccctcctcgtgccgtccacgcaccaccggcgcgccgcgctgccatggccatgaggccacgcgccgcgctcgccctctccctggcagccggcgtcccgctggtcctcctcctcctcctcctcgcgcccggcgcgcgcgccgacgacggcagcggcgggtgcggggcggcgggcggcggcgaggcggcgccgggcgaccgcgcgcgggccagggcgctgaagatcgcggccttcttctccatcctcgtgtgcggggcgctgggctgctgcctgcccgtgctggggcggcgcgtgccggcgctgcgccccgacagggacgtgttcttcctcatcaaggcgttcgcggcgggggtcatcctggccacggggttcatccacatcctccccgacgcgttcgagaagctcacgtccgattgcctctccggcgggccgtggcaggacttccccttcgcggggctcggcgccatggtcggcgccatcggcacgctcgtcgtcgacaccgtcgccacgggctacttcacgcgcgtccacttcaaggacagcgccgccgccgccgtgggcgccgccgccgtcggcgacgaggagaagcagcagcagcaggcggcgtcggcgccgcacgtcgacgacggagcagacggcgacggccacggccacggcgggcacgtgcacatgcacacgcacgcgacgcacgggcactcgcacggcgcctcggcgctcgtggccgccgtcggcggcgccgagggcgacaaggagcacgcgctgcgccaccgtgtcatcgctcaggtaaccgaccgacgatccctgttgagtattcacagctgttgttataaccgtgtgcagttatcattcaccacaccaccgtcgttataaataaaatggcatgcatttatcatgcgtttttgttttctttttttggtttcgtacgtaggttcttg

SEQ ID NO: 6644 - DNA, 1140 bp, Zea mays
  Zm_smallRNAprecursor_2133
tcccctgtacccctacctctccaccccctcctcgtgccgtccacgcaccaccggcgcgccgcgctgccatggccatgaggccacgcgccgcgctcgccctctccctggcagccggcgtcccgctggtcctcctcctcctcctcctcgcgcccggcgcgcgcgccgacgacggcagcggcgggtgcggggcggcgggcggcggcgaggcggcgccgggcgaccgcgcgcgggccagggcgctgaagatcgcggccttcttctccatcctcgtgtgcggggcgctgggctgctgcctgcccgtgctggggcggcgcgtgccggcgctgcgccccgacagggacgtgttcttcctcatcaaggcgttcgcggcgggggtcatcctggccacggggttcatccacatcctccccgacgcgttcgagaagctcacgtccgattgcctctccggcgggccgtggcaggacttccccttcgcggggctcggcgccatggtcggcgccatcggcacgctcgtcgtcgacaccgtcgccacgggctacttcacgcgcgtccacttcaaggacagcgccgccgccgccgtgggcgccgccgccgtcggcgacgaggagaagcagcagcagcaggcggcgtcggcgccgcacgtcgacgacggagcagacggcgacggccacggccacggcgggcacgtgcacatgcacacgcacgcgacgcacgggcactcgcacggcgcctcggcgctcgtggccgccgtcggcggcgccgagggcgacaaggagcacgcgctgcgccaccgtgtcatcgctcaggtaaccgaccgacgatccctgttgagtattcacagctgttgttataaccgtgtgcagttatcattcaccacaccaccgtcgttataaataaaatggcatgcatttatcatgcgtttttgttttctttttttggtttcgtacgtaggttcttgagcttgggattgtggtgcactcggtgatcatcggcatctccctcggcgcgtctcaagaccccagcaccatcaagcctcttgtggtcgccctcagcttccaccaaatgttcgagggcatgggtctaggcggctgcatcgttcaggtaatcatcatacagtccattgtcctaagatatacagtc

SEQ ID NO: 6645 - DNA, 1085 bp, Zea mays
  Zm_smallRNAprecursor_2134
cctgtacccctacctctccaccccctcctcgtgccgtccacgcaccaccggcgcgccgcgctgccatggccatgaggccacgcgccgcgctcgccctctccctggcagccggcgtcccgctggtcctcctcctcctcctcctcgcgcccggcgcgcgcgccgacgacggcagcggcgggtgcggggcggcgggcggcggcgaggcggcgccgggcgaccgcgcgcgggccagggcgctgaagatcgcggccttcttctccatcctcgtgtgcggggcgctgggctgctgcctgcccgtgctggggcggcgcgtgccggcgctgcgccccgacagggacgtgttcttcctcatcaaggcgttcgcggcgggggtcatcctggccacggggttcatccacatcctccccgacgcgttcgagaagctcacgtccgattgcctctccggcgggccgtggcaggacttccccttcgcggggctcggcgccatggtcggcgccatcggcacgctcgtcgtcgacaccgtcgccacgggctacttcacgcgcgtccacttcaaggacagcgccgccgccgccgtgggcgccgccgccgtcggcgacgaggagaagcagcagcagcaggcggcgtcggcgccgcacgtcgacgacggagcagacggcgacggccacggccacggcgggcacgtgcacatgcacacgcacgcgacgcacgggcactcgcacggcgcctcggcgctcgtggccgccgtcggcggcgccgagggcgacaaggagcacgcgctgcgccaccgtgtcatcgctcaggtaaccgaccgacgatccctgttgagtattcacagctgttgttataaccgtgtgcagttatcattcaccacaccaccgtcgttataaataaaatggcatgcatttatcatgcgtttttgttttctttttttggtttcgtacgtaggttcttgagcttgggattgtggtgcactcggtgatcatcggcatctccctcggcgcgtctcaagaccccagcaccatcaagcctcttgtggtcgccctcagcttccaccaaatgttcgagggcatgggtctaggcgg

SEQ ID NO: 6646 - DNA, 1047 bp, Zea mays
  Zm_smallRNAprecursor_2135
ccgcgctcgccctctccctggcagccggcgtcccgctggtcctcctcctcctcctcctcgcgcccggcgcgcgcgccgacgacggcagcggcgggtgcggggcggcgggcggcggcgaggcggcgccgggcgaccgcgcgcgggccagggcgctgaagatcgcggccttcttctccatcctcgtgtgcggggcgctgggctgctgcctgcccgtgctggggcggcgcgtgccggcgctgcgccccgacagggacgtgttcttcctcatcaaggcgttcgcggcgggggtcatcctggccacggggttcatccacatcctccccgacgcgttcgagaagctcacgtccgattgcctctccggcgggccgtggcaggacttccccttcgcggggctcggcgccatggtcggcgccatcggcacgctcgtcgtcgacaccgtcgccacgggctacttcacgcgcgtccacttcaaggacagcgccgccgccgccgtgggcgccgccgccgtcggcgacgaggagaagcagcagcagcaggcggcgtcggcgccgcacgtcgacgacggagcagacggcgacggccacggccacggcgggcacgtgcacatgcacacgcacgcgacgcacgggcactcgcacggcgcctcggcgctcgtggccgccgtcggcggcgccgagggcgacaaggagcacgcgctgcgccaccgtgtcatcgctcaggtaaccgaccgacgatccctgttgagtattcacagctgttgttataaccgtgtgcagttatcattcaccacaccaccgtcgttataaataaaatggcatgcatttatcatgcgtttttgttttctttttttggtttcgtacgtaggttcttgagcttgggattgtggtgcactcggtgatcatcggcatctccctcggcgcgtctcaagaccccagcaccatcaagcctcttgtggtcgccctcagcttccaccaaatgttcgagggcatgggtctaggcggctgcatcgttcaggtaatcatcatacagtccattgtcctaagatat

SEQ ID NO: 6647 - DNA, 1133 bp, Zea mays; identical to SEQ ID NO: 6466
  Zm_smallRNAprecursor_2136

SEQ ID NO: 6648 - DNA, 1057 bp, Zea mays
  Zm_smallRNAprecursor_2137
gttgcgagttcatggttatgaagaaactaaaatatgtttggttaaaataaatagcaactatagattctgttagagcatgatagattgataacatagataataggaatacaaaaaatatggagtaggaggtgattttgaattgaactagaggaatatatagatttttaggaatctattacgatgttttactcgtttggttgggattttagatttttggcagcgaatatggtttagaaagctaaacaaaacacacccttaacgtatgccatcttcccctgtctttccaaacaattctcgtgttgtcactccccctctcctttcttccctatggtaggattttggatgtaagtcaaactcgtagtcaatacaatgttgctccttgccccaatggtatgtttctagagaaaattccttcaatgccatccaaacttataccaatctcttcaatgccatcagatttaatagcttcccttcaatgccatcaaatttaaattctaatcccttaaatgccattgccgttagtttcaagttaacgccgttagttatatttaaagcaaatccctccaatgccatcaaaatctatacggatcccttcaatgccactagaaattggttcgatctatttggttttaaaattttcaaaatagaaaattttttgaacctaaaagttttgaaatgcaaatatatcacattgattttaaaatttatctccatctgttatcattagtgtttgttgttagtttgaaaaaaatattaggaatcaaatagaccgaacagatatagcggagtaatttttggtgtttacaaaaaaatgtactaaagtttttaaaaagtgtggaattggtccatattttttttattctagaatatttaaaatccaaatagatcaaaccaatttctagtggcattgaaaggattgatatagattttgatggcattggagagatttgctttaaatagaactaacagcgttaacttgaaactaacggcaatggcatttaagggattagaatttaaatttgatggcattgaagggaagctataaaatctgatggca

SEQ ID NO: 6649 - DNA, 1153 bp, Zea mays
  Zm_smallRNAprecursor_2138
tgaaaaaactattggcgggccttcaagacaaatgtttgaaatttagcaacaaatgtattcaacgactgagaaaaaatttccactcagtcggagctagcagtgagaaattcaccccgtcagctgaagatttaccaaagaccttcgaacatattgagggtgaaattgatgagcttgacgaagttatagccgggcacggtgacttctgcgcctgggtagcttctcggcgcactgctgcagctttcctaaaagctggctgcgatcatggaaagattgtcaataggcccaatttcactttatcaccatcaattctagatgacattcctgatctcgcccgaagcatttccaatagatttgtaaagatgatatggacaaaaggcgggcgagaaaaggctggagacgaagcttggagtcatcttgaaccagtaagaaatcataccttgtgcttacctcttccttcaagctcgattttgacttacaacaacttaatttatgtaggatgacgaagccgaagccgatggttaaagagaatgacgccgaagctgaggtcccttgaagattaaataggagtaaactgtagacagactcaagaaacttttgagataacttttgtaaatgtgactaaacttgtctttaatgaattctgttcataccttgtaatatgctcttatccttccattaacgtatgagaggtgctttgatgtggacgaaattatctttttgagccgaaggcgaaaaaacaccttcccttcttttcgtacacagcgaagcatagaaaacaacatttccctttcttccgaagctcttcttttcgtacacgaagaagtaaaaaagatagttttttttcttcttgccgaagcaaccacttatgctatgatgatggttatcctacatatgcctggatgaatgtttatgaatgcaaatgctatgatgtaatgtgatgtgcaaatgaatgtccaaacacatatccgaagccataatcacagccattatttccttagaaacaatcacatatcagtgctaacttttcgctgtaagctctgcattcccttaggaacgactttggagcttcttcgccttttactttcggcggaatcagcgttgacttttcgctgtaagctctgcattcccttaggaatgactttggagcttcttc

SEQ ID NO: 6650 - DNA, 1075 bp, Zea mays
  Zm_smallRNAprecursor_2139
actgaagtttggtggaaagatatgttacttcgatttccatagatctttttgccagaggatcacccattcaggttcgataggaatgcttttgaaaaggacacaattgtgatgtggggaccacccaagcgtcttagtggtccagagattcttgcgagacttaatgatttgaaactaaacgaacatggaaatcgttttgaaggttatggaaccgagcataattggactcacaaatgtggtctatgggaactcccttatatgaaagccttgattctaatgcataacattgatctgatgcaccaggaacgaaatatgggtgaaagcattatcagcacttgcctgaatatccctgacaaaacaaaatacaaccctaaggctagaaaagacttggccttaatttgtagttgaccaactctagagataggagagaataagaagaagcactacaagaaactaataaatgttcgtgggttaatttaagaacgtgggtaccgacattcttaattgagttatgttcgtgggttagtttaagcacgtgggtacccacgttcttatattaaattcgtgggcccgtggtaaaaccgtcgaacttatcgtattaggaacgtgggtacccacgttcttaacttaaattcgagggccacgtggacaccgtcgatcttaacccaaaaacctaaatctctctcaccccgcgcgtctgtcttcttttccctttgtctaccgcgtgcgcgcctgtcgctacctgcctcgccgccagcccaccgctagcgcctcgctgcacgtgccccgccgccaccccacgcccgccccgctgccccaccgagcgcctgggcagggtggtaccgcgcggtgctcgccatcaagcgccgctacggcgagcacctcgacccgcagccgaggaacccctttctcggcgtgcccaagtccttccccagtgtcaagccggagttctgggatgggatgcggtcccgcctcaccgccctctgacccgatgggcccatttcacgtcggttcctggccgacctccctaccgtgcttgtagtgggcgactcggtgttcatccatgggggctcctcat

SEQ ID NO: 6651 - DNA, 1140 bp, Zea mays
  Zm_smallRNAprecursor_2140
atttatttcagatgtcctaaaaattttctgttttaattttgcaaaggtgctcataccgccatgctgattagccagattgctcagatgaaaccgctagatggtactaattaccattcttggcgggaggatatagacatgataaccacagtgggtgagatagattacgcactgaggtttgataaaccagttgagcccacagtgggcactcccaactatgaccacaggtggatgcaatatagcatcgacaaggtcaagtgggagagatcaaatgacaaatgtatgattatttttaagaggagcatcaaggagcctcttaagagttccataccagagtgcgagactgccaaagaataccttgagagggtagcctctcatcaccaagggtcttctaaggcttatgcttgctctctaatgacagaatttgtcaatgcaaaatacgatggaaatggtgtcagaccattcattcagaaaatgatatctatcgtagctaagataaacaagtacctcgggtctcctttacacgaggaatttgtagtgtttatgataatgaagtctctgcctaaggagtttgagacttttcacatacagtacaacaccagtgtcactgataagtggaatatagaccaactcttggcacagtgtgtccaggaggaagagaggttaaagcagactggagactctgtcaacctcatcaaaggcaatatccccagacagaacaagaactcaaagaaaaagttcaagaagcaaggtaaacagaataaccaggcttcctcgagcaataataatcagccaagacaaggaggcagtttctcagttccccctgatacctgcctctattgcaagaagacaggtcattacaagagaaagtgccctgaattcctgcagtatctactagagagtggtaaggaccaagttacttttgtaaatgagtctttatacttagaatatcccagttattcttggtggattgactcaggtgcaactgttcatgttgcaaactctctacagggactccgtacaagccaaaggctcccaaagggccgaagaacaattagagtggcaaatggagttgaagcagcagtcgaggccattggagatatacatcttaaattagttaatggttttgtactgttgttgaga

SEQ ID NO: 6652 - DNA, 1114 bp, Zea mays
  Zm_smallRNAprecursor_2141
cgcaatgtgtccaagatgtaaaggcgaggcgaagatttacggcgacggccagtcccaatcacatcccctgtgagtcgatcctgtacaaaacaagatgagtcatcaaatccaacaaagcaattgtgatcggtaatttgaccaactgataaaagatccatggataattcaggtacaaagaaaatatttgggacagtaaagtttgaattggaaagagaacccttgtgggtgacatgacataatgtaccatcagcggtctgaacagaagtaccctcggtgacaggtgcagtagaagccaggcgtgactgatcagatgtcacatgaaatgaagctccagagtccagaacccaagtagatgacagagcaccagcagatgaagtagcagcaacagcaactgagcctctaggagatggtcctgtaccacgaccacgagtagcacgacggacacgaaaatcagccagcttctctggatacttagtaaagcaattctcagaccgatgagtggtcttcttacaatgctcacaaggcggaaaggaggtgctcctggacttctgagcagtagccaaaacactgtgcgaactgacaccagtaatagaagacatggacttaaggcgagtctcttcagcaagtaattcagacaacgcctgagccatggtgagagtatcagaagtgtgtagtaaccttgcacgaagagaatcaaattcaggtcgaacgcccataacaaatctgtaggtaaagaacttctcaatgaacttatgggctgggcaaggcacagctgtacaagcaggcaccatggaggtcaaagcactcataagacgatcaaaagctgaatagtaatcatcaatggacatatcttgttgctcaatgacatgagtttgctgcataagagtatgtaaaagagccccactgtcctgaacaaaccgatccttcagatgagaccagatagccctagcagtggtgaatttggacagactcataatcatagttggtttagtactattgaccattgcagccattactttgccatcattgatttgccaagtcttgattgcagctgcgttgcttctatcagctgctaaaactggtgaatcttcagttaaatggaatagtaaaccat

SEQ ID NO: 6653 - DNA, 1159 bp, Zea mays
  Zm_smallRNAprecursor_2142
ttatgcaatttttccagttaattatgaaaccaacgtggattaattattgtttaaattgcatagaattcagaaaattttgtggttattgaatattttaaccaacgttggatattgttaccacaatttaatacaagtttatgttttctagatcatccaacgatggtttagaaattttgtgatcagaaattttcatagatatggcatgattattatttgaccaacgttgaatatttaattcatgcatgttctatgattcagtattcagtatttatttcaaatgtcctaaatattttctattttaattttgcaaaggtgctcataccgccatgctgattagccagattgcttagatgaaaccgctagatggtagtaattaccattcttggcgggaggatatagacatgataaccacagtgggtgagatagattacgcactgaggtttgataaaccagttgagcccacagtgggcactcccaactatgactacaggtggatgcaatacagcatcgacaaggtcaagtgggagagatcaaatgacaaatgtatgattattcttaagaggagcatcaaggagcctcttaagagttccataccagagtgcgagactgccaaagaataccttgagagggtagcctctcatcaccaagggtcttctaaggcttatgcttgctctctaatgacagaatttgtcaatgcaaaatacgatggaaatggtgtcagaccattcattcagaaaatgatatccatcgtagctaagataaacaagtacctcgggtctcctttacacgaggaatttgtagtatttatgataatgaagtctctgcccaaggagtttgagacttttcacatacagtacaacactagtgtcactgataagtggaatatagaccaactcttggcacagtgtgtccaggaggaagagaggttaaagcagactggagactctgtcaacctcatcaaaggcaatatccccagacagaacaagaactcaaagaaaaagttcaagaagcaaggtaaatagaataaccaggcttcctcgagcaataataatcagccaagacaaggaggcagtttctcagttccccctgatacctgcctctattgcaagaagacaggtcattacaagagaaagtgtcctgaattcctgcagtatctact

SEQ ID NO: 6654 - DNA, 1140 bp, Zea mays
  Zm_smallRNAprecursor_2143
atttatttcaaatgtcctaaatattttctattttaattttgcaaaggtgctcataccgccatgctgattagccagattgcttagatgaaaccgctagatggtagtaattaccattcttggcgggaggatatagacatgataaccacagtgggtgagatagattacgcactgaggtttgataaaccagttgagcccacagtgggcactcccaactatgactacaggtggatgcaatacagcatcgacaaggtcaagtgggagagatcaaatgacaaatgtatgattattcttaagaggagcatcaaggagcctcttaagagttccataccagagtgcgagactgccaaagaataccttgagagggtagcctctcatcaccaagggtcttctaaggcttatgcttgctctctaatgacagaatttgtcaatgcaaaatacgatggaaatggtgtcagaccattcattcagaaaatgatatccatcgtagctaagataaacaagtacctcgggtctcctttacacgaggaatttgtagtatttatgataatgaagtctctgcccaaggagtttgagacttttcacatacagtacaacactagtgtcactgataagtggaatatagaccaactcttggcacagtgtgtccaggaggaagagaggttaaagcagactggagactctgtcaacctcatcaaaggcaatatccccagacagaacaagaactcaaagaaaaagttcaagaagcaaggtaaatagaataaccaggcttcctcgagcaataataatcagccaagacaaggaggcagtttctcagttccccctgatacctgcctctattgcaagaagacaggtcattacaagagaaagtgtcctgaattcctgcagtatctactagagagtggtaaggaccaagttacttttgtaaatgagtctttatacttagaatatcccagttattcttggtggattgactcaggtgcaactgttcatgttgcaaactctctacagggactccgtacaagccaaaggctcccaaagggccgaagaacaattagagtggcaaatggagttgaagcagcagtcgaggccattggagatatacatcttaaattagttaatggttttgtactgttgttgaga

SEQ ID NO: 6655 - DNA, 1043 bp, Zea mays
  Zm_smallRNAprecursor_2144
tcagtaacacgctcaaatctggaagcagctaaggagcctccgcctcgtcatgaatcatttgctggaggctaaagaatagccgatgcttgcaagtcagcgcgcaaatcccattctctttgttttaactccagaagttctacaccgccatcaattatctgtaaagtgcgtgttaaattttttggatactacattagatgtacccccaggttgagatcaagaataggtctgtggcaacttcagtgtaagtataggtaaattatataagctgaactgacttcagtgacaaaacaaagataaaaaaaatctaggcgagaaataaatttaagcggacacaccaacgacataaacaaaaaaaacaaaaaaaatgcaaactatggggttgaacccacgaccacatggttagaaaccttgtgctctaccaagtgggctagatgggctttgtgctcatgtctgcaacaaatattttaataacacaaccgagctcggcgccaagatctgtggcgccgagctcggttccacgtcgacgccacgcgtctggggtgtgccaacgcaacacgacctcggcgccatagcctatggcgccgagcaaagggtccaaaactgcatttaaaatttttttaggtctaaacgtgattttacttctgtttaagggctaaaatacaaaaaaaattcggtgcccccgacaaacccgctccgaccccctgacagcagagtgtttggccccggcctctgcctgctatcgctggcggacatctccgagttcgacgcccagatcaaggagaagggcgcgagacgctggacaaactcccctggtcggagtcgaagctggggcggctggtgcacgtgctggtgtacgacgctagatgaactctcccggtcggagtcgaatcactcgcaaatcgcctcgcgtcccactcgcaggggcaggcaatgaggctagcgcatggtccaaactctctctctctctctcttcactcctggtgccgtgaccttcgatctcggtacatgacagctcttccggatgcaggaaaaagtctacgttt

SEQ ID NO: 6656 - DNA, 1044 bp, Zea mays
  Zm_smallRNAprecursor_2145
tcagtaacacgctcaaatctggaagcagctaaggagcctccgcctcgtcatgaatcatttgctggaggctaaagaatagccgatgcttgcaagtcagcgcgcaaatcccattctctttgttttaactccagaagttctacaccgccatcaattatctgtaaagtgcgtgttaaattttttggatactacattagatgtacccccaggttgagatcaagaataggtctgtggcaacttcagtgtaagtataggtaaattatataagctgaactgacttcagtgacaaaacaaagataaaaaaaatctaggcgagaaataaatttaagcggacacaccaacgacataaacaaaaaaaacaaaaaaaatgcaaactatggggttgaacccacgaccacatggttagaaaccttgtgctctaccaagtgggctagatgggctttgtgctcatgtctgcaacaaatattttaataacacaaccgagctcggcgccaagatctgtggcgccgagctcggttccacgtcgacgccacgcgtctggggtgtgccaacgcaacacgacctcggcgccatagcctatggcgccgagcaaagggtccaaaactgcatttaaaatttttttaggtctaaacgtgattttacttctgtttaagggctaaaatacaaaaaaaattcggtgcccccgacaaacccgctccgaccccctgacagcagagtgtttggccccggcctctgcctgctatcgctggcggacatctccgagttcgacgcccagatcaaggagaagggcgcgagacgctggacaaactcccctggtcggagtcgaagctggggcggctggtgcacgtgctggtgtacgacgctagatgaactctcccggtcggagtcgaatcactcgcaaatcgcctcgcgtcccactcgcaggggcaggcaatgaggctagcgcatggtccaaactctctctctctctctcttcactcctggtgccgtgaccttcgatctcggtacatgacagctcttccggatgcaggaaaaagtctacgtttc

SEQ ID NO: 6657 - DNA, 1041 bp, Zea mays
  Zm_smallRNAprecursor_2146
agtaacacgctcaaatctggaagcagctaaggagcctccgcctcgtcatgaatcatttgctggaggctaaagaatagccgatgcttgcaagtcagcgcgcaaatcccattctctttgttttaactccagaagttctacaccgccatcaattatctgtaaagtgcgtgttaaattttttggatactacattagatgtacccccaggttgagatcaagaataggtctgtggcaacttcagtgtaagtataggtaaattatataagctgaactgacttcagtgacaaaacaaagataaaaaaaatctaggcgagaaataaatttaagcggacacaccaacgacataaacaaaaaaaacaaaaaaaatgcaaactatggggttgaacccacgaccacatggttagaaaccttgtgctctaccaagtgggctagatgggctttgtgctcatgtctgcaacaaatattttaataacacaaccgagctcggcgccaagatctgtggcgccgagctcggttccacgtcgacgccacgcgtctggggtgtgccaacgcaacacgacctcggcgccatagcctatggcgccgagcaaagggtccaaaactgcatttaaaatttttttaggtctaaacgtgattttacttctgtttaagggctaaaatacaaaaaaaattcggtgcccccgacaaacccgctccgaccccctgacagcagagtgtttggccccggcctctgcctgctatcgctggcggacatctccgagttcgacgcccagatcaaggagaagggcgcgagacgctggacaaactcccctggtcggagtcgaagctggggcggctggtgcacgtgctggtgtacgacgctagatgaactctcccggtcggagtcgaatcactcgcaaatcgcctcgcgtcccactcgcaggggcaggcaatgaggctagcgcatggtccaaactctctctctctctctcttcactcctggtgccgtgaccttcgatctcggtacatgacagctcttccggatgcaggaaaaagtctacgttt

SEQ ID NO: 6658 - DNA, 1042 bp, Zea mays
  Zm_smallRNAprecursor_2147
agtaacacgctcaaatctggaagcagctaaggagcctccgcctcgtcatgaatcatttgctggaggctaaagaatagccgatgcttgcaagtcagcgcgcaaatcccattctctttgttttaactccagaagttctacaccgccatcaattatctgtaaagtgcgtgttaaattttttggatactacattagatgtacccccaggttgagatcaagaataggtctgtggcaacttcagtgtaagtataggtaaattatataagctgaactgacttcagtgacaaaacaaagataaaaaaaatctaggcgagaaataaatttaagcggacacaccaacgacataaacaaaaaaaacaaaaaaaatgcaaactatggggttgaacccacgaccacatggttagaaaccttgtgctctaccaagtgggctagatgggctttgtgctcatgtctgcaacaaatattttaataacacaaccgagctcggcgccaagatctgtggcgccgagctcggttccacgtcgacgccacgcgtctggggtgtgccaacgcaacacgacctcggcgccatagcctatggcgccgagcaaagggtccaaaactgcatttaaaatttttttaggtctaaacgtgattttacttctgtttaagggctaaaatacaaaaaaaattcggtgcccccgacaaacccgctccgaccccctgacagcagagtgtttggccccggcctctgcctgctatcgctggcggacatctccgagttcgacgcccagatcaaggagaagggcgcgagacgctggacaaactcccctggtcggagtcgaagctggggcggctggtgcacgtgctggtgtacgacgctagatgaactctcccggtcggagtcgaatcactcgcaaatcgcctcgcgtcccactcgcaggggcaggcaatgaggctagcgcatggtccaaactctctctctctctctcttcactcctggtgccgtgaccttcgatctcggtacatgacagctcttccggatgcaggaaaaagtctacgtttc

SEQ ID NO: 6659 - DNA, 1065 bp, Zea mays
  Zm_smallRNAprecursor_2148
gtaacacgctcaaatctggaagcagctaaggagcctccgcctcgtcatgaatcatttgctggaggctaaagaatagccgatgcttgcaagtcagcgcgcaaatcccattctctttgttttaactccagaagttctacaccgccatcaattatctgtaaagtgcgtgttaaattttttggatactacattagatgtacccccaggttgagatcaagaataggtctgtggcaacttcagtgtaagtataggtaaattatataagctgaactgacttcagtgacaaaacaaagataaaaaaaatctaggcgagaaataaatttaagcggacacaccaacgacataaacaaaaaaaacaaaaaaaatgcaaactatggggttgaacccacgaccacatggttagaaaccttgtgctctaccaagtgggctagatgggctttgtgctcatgtctgcaacaaatattttaataacacaaccgagctcggcgccaagatctgtggcgccgagctcggttccacgtcgacgccacgcgtctggggtgtgccaacgcaacacgacctcggcgccatagcctatggcgccgagcaaagggtccaaaactgcatttaaaatttttttaggtctaaacgtgattttacttctgtttaagggctaaaatacaaaaaaaattcggtgcccccgacaaacccgctccgaccccctgacagcagagtgtttggccccggcctctgcctgctatcgctggcggacatctccgagttcgacgcccagatcaaggagaagggcgcgagacgctggacaaactcccctggtcggagtcgaagctggggcggctggtgcacgtgctggtgtacgacgctagatgaactctcccggtcggagtcgaatcactcgcaaatcgcctcgcgtcccactcgcaggggcaggcaatgaggctagcgcatggtccaaactctctctctctctctcttcactcctggtgccgtgaccttcgatctcggtacatgacagctcttccggatgcaggaaaaagtctacgtttcgtttcactatactcatcatgtttt

SEQ ID NO: 6660 - DNA, 1088 bp, Zea mays
  Zm_smallRNAprecursor_2149
tttgacaaacagcggtggtcgcgtctctgagaagtccaagtaagaggtttcacgggggccctgttgataaccccgcccaccttgctgttgaaactgttgacccgccatctctctgagaaaacggggattatccgcggttgcatttaccaaggtggcaatcgcctcggccagtgtgggaggaacaggaggtggatttggagtagactccctcccactagaagttccagctgtatcctatgatcgggtcttggacggcatctgtggcaacaacatttggaaacaatatgatatgccaaaggaaaaaccatccattttacattaccaaaaagagtaatgtacagactcggatttttacaacaggatacattacctattatacaaatacactacctattatacaacaatacaacctgttatacaatatactacttctatttcaactactacaccactattcctgctttccgttgcttttggcggcctcgtcgtcgggtgtgggagaccattcgtcgaccagcctcatggaaggagggggctgaaaaaggtctaactcaccaccaagcgcgtgtcccacaacatgcgagggtccggcttccgactcaacaggattcgtaggctcactgggatgcagttgcgaatataacacatgaacctcttcatgtaaggtattgcaatatatctgcagttcatcaacggccaagttgagctcagctactcgagcttgagccttttgctccttgtcccatgcaagcaaacgggattgaacaacccagtcgagtgccaaatcccggtccgcgagctgatctcgcagatggcggacatctcttctcaactcatttatgcggtcaccatctacgacccaaatagccgtcctgcggtggagttccgcttggagccgacttacttcagcttcgagatcccctataggatcattgcttccgctactactattatcatgccttggggccagctggtgactcgacacaccaatcgatccagtatgtttgcgcgctgttctccttgtgcggggcggtattttctaaggggggaaattttgattagtatggttcttagcatgatgcgtgtat

SEQ ID NO: 6661 - DNA, 1057 bp, Zea mays
  Zm_smallRNAprecursor_2150
tagagtttaaggaaggtgatcacatgtatcttaaggtgtcaccgatctgaggtatgagaagattcaaagttaaagggaagttgtcccctcgctttattggacctttcttattcttaaagtgagtggaagaggttgcatatcaactagaactacctaatcatcttgtagatgtacatgatgtcttccatgtatcacaattgaagaagtgtctcagggtactagaagagcatctacctatggaggatcttagtgttcaagatgatctaacttacaatgaatatcctatcaagattattgatactttgactcgtgtcacgaggagtaaagtgattaaaatatgcaaagtgcaatggagtcaccatggtgaagatgaagctacatgggagagagaagaagaactacgaatagattttccccacctctttcctagtccttcctaaatctcgaggatgagattctttgtaaggagaaatttgccattatggaggtcctcagatgcggcttcgacgatttggaggcgtaggcgagggattcgctgttatgaaaaactaggggactacccacactccaaaatgaacatgaccacgccattacaaggtaacgtctatgactaaaccagtgatactcacgttgtctctacatccgttacccttctccttctcccaattctcgctaccaggcacgcaccctagcagccaccgtctccacctcccgggcgtcgagctcgccattgagccgtgcgtcggcggcgtcgaggatggctcctctgccgtaccattcccgcaccgactttgccgcgaagtagatgccctcaccggagcaccgcgtgacgtaccccgccgcgtcgccgactagggccacgcgccccacgacacggcgcgggtgctctgggatcggttgggcctccaccttgactacgcggccaccggcaatcttggggctcacgcgcgcccggatgccggactggaggtgcttgatctccggcttggcggcgacggtgctggtcccgacggctacgtggtcgcacttggggaacacccagccatagaagtctggg

SEQ ID NO: 6662 - DNA, 1070 bp, Zea mays; identical to SEQ ID NO: 4645
  Zm_smallRNAprecursor_2151

SEQ ID NO: 6663 - DNA, 1126 bp, Zea mays; identical to SEQ ID NO: 4646
  Zm_smallRNAprecursor_2152

SEQ ID NO: 6664 - DNA, 1043 bp, Zea mays
  Zm_smallRNAprecursor_2153
ggcaggggtaaaaaaacaactctaggtctctctgcagaaacaaacaccacgtaggtttttccaccaattgacgatatggtcgtcttttttttcttgaaaaaaggaagaaagaacaacatgaaggaaggaatgaagtgccatcacatgagacggcagagaatcggtgaaataaagtgaaacaggccgtgtggtggggtggaccgaattttttgtattttagccatttttcgaaaaaacccaagaaaaaaaatatacctaatgagttatttaaaaaatgagtagtgacaaagataaaaaaatctaggcgagaaataaattttagcggacacaccagcgacataaacaaaagaaaaacaaataaaaatgcaaactatggggcttgaacccatgaccataaggttagaagctttgtgctctaccaagtgggctagctgggctttatgctcatgtttgcaacaaatattttaataacacaaccgagctcggcgccaagatctgtggcgccgagctcggttccacgtcgacgccacgcgtccgtgttgtgccaacgcaacacgacctcggcgccatagcctatggcgccgagctgtgttactacggcgccatagcctatggcgccgagcaaagggtccaaaaataacattaaaattttttaagatctaaacgtgaatttttttttcgaaaaatggctaaaatacaaaaaattcggtcacatgtaggggtgtaaatggtatggatattgtccgtccgtatttgaaattgacccgtctaagagggatgaaatccgatccgtatcagaatctaggtactcagtatccgatctatatctgatctttatccgtatccgtatttttaaagttggatatttaagttgtcaatatttattcaaatcttattcgatacaacttgataatatccatatccgtttcaaatccgaagagaagatatgaaaacaaatatggaatgagtaatattcgtctgtatccgatccaattacacccctagtcacatgtgctagcaagatagagtaaaggtctacgaag

SEQ ID NO: 6665 - DNA, 1044 bp, Zea mays
  Zm_smallRNAprecursor_2154
ggcaggggtaaaaaaacaactctaggtctctctgcagaaacaaacaccacgtaggtttttccaccaattgacgatatggtcgtcttttttttcttgaaaaaaggaagaaagaacaacatgaaggaaggaatgaagtgccatcacatgagacggcagagaatcggtgaaataaagtgaaacaggccgtgtggtggggtggaccgaattttttgtattttagccatttttcgaaaaaacccaagaaaaaaaatatacctaatgagttatttaaaaaatgagtagtgacaaagataaaaaaatctaggcgagaaataaattttagcggacacaccagcgacataaacaaaagaaaaacaaataaaaatgcaaactatggggcttgaacccatgaccataaggttagaagctttgtgctctaccaagtgggctagctgggctttatgctcatgtttgcaacaaatattttaataacacaaccgagctcggcgccaagatctgtggcgccgagctcggttccacgtcgacgccacgcgtccgtgttgtgccaacgcaacacgacctcggcgccatagcctatggcgccgagctgtgttactacggcgccatagcctatggcgccgagcaaagggtccaaaaataacattaaaattttttaagatctaaacgtgaatttttttttcgaaaaatggctaaaatacaaaaaattcggtcacatgtaggggtgtaaatggtatggatattgtccgtccgtatttgaaattgacccgtctaagagggatgaaatccgatccgtatcagaatctaggtactcagtatccgatctatatctgatctttatccgtatccgtatttttaaagttggatatttaagttgtcaatatttattcaaatcttattcgatacaacttgataatatccatatccgtttcaaatccgaagagaagatatgaaaacaaatatggaatgagtaatattcgtctgtatccgatccaattacacccctagtcacatgtgctagcaagatagagtaaaggtctacgaagg

(The sequence listing continues in the following parts.)

1. A method for modulating, compared to a respective wild-type plant or part thereof, the expression of at least one target gene in a plant or part thereof, wherein the method comprises the following steps:
a) suppressing, compared to a respective wild-type plant or part thereof, the activity of at least one small regulating RNA (srRNA) molecule naturally targeting said at least one target gene by
b) introducing into said plant or part thereof at least one recombinant nucleic acid molecule not occurring in a respective wild-type plant or part thereof, wherein at least a part of said recombinant nucleic acid molecule is complementary to at least a part of at least one srRNA molecule or at least one precursor of said at least one srRNA molecule comprising said srRNA molecule regulating expression of said at least one target gene in said plant or part thereof, wherein
i) the part of the recombinant nucleic acid molecule complementary to the precursor RNA molecule comprises at least 20 consecutive complementary base pairs of said precursor RNA molecule, said at least 20 consecutive complementary base pairs having at least 80% homology to the sequence of said precursor RNA molecule; and
ii) wherein the part of the recombinant nucleic acid molecule complementary to the precursor RNA molecule comprises sequences which are complementary to the srRNA sequence comprised in said precursor RNA molecule, and
iii) wherein the recombinant nucleic acid molecule comprising a sequence complementary to a srRNA sequence is selected from the group consisting of:
a. the nucleic acid molecule represented by SEQ ID NO: 2;
b. a nucleic acid molecule having at least 50 consecutive base pairs of the sequence described by SEQ ID NO: 2;
c. a nucleic acid molecule having an identity of at least 70% over a sequence of at least 95 consecutive nucleic acid base pairs to the sequence described by SEQ ID NO: 2; and
d. a nucleic acid molecule hybridizing under medium stringent conditions with a nucleic acid molecule of at least 50 consecutive base pairs of the nucleic acid molecule described by SEQ ID NO: 2.

2. The method according to claim 1, wherein the part of the recombinant nucleic acid molecule complementary to the respective precursor RNA is represented by position 234 bp-257 bp of SEQ ID NO: 2.

3. The method according to claim 1, wherein the sequences as defined in iii) are modulating the expression of a target gene in a monocotyledonous plant.

4. The method according to claim 1, wherein the sequence complementary to the respective precursor RNA molecule may be any of the sequences selected from the group consisting of the sequences of SEQ ID NO: 78 to 16344.

5. The method according to claim 1, comprising the steps of:
a) identifying a srRNA sequence targeting the target gene;
b) optionally identifying the precursor RNA molecule comprising the respective srRNA sequence;
c) producing the recombinant molecule as defined in claim 1; and
d) introducing the recombinant molecule into a plant or part thereof.

6. An isolated nucleic acid molecule comprising the sequence selected from the group consisting of:
a) the nucleic acid molecule represented by SEQ ID NO: 2;
b) a nucleic acid molecule having at least 50 consecutive base pairs of the sequence described by SEQ ID NO: 2;
c) a nucleic acid molecule having an identity of at least 70%, over a sequence of at least 95 consecutive nucleic acid base pairs to the sequence described by SEQ ID NO: 2; and
d) a nucleic acid molecule hybridizing under medium stringency conditions with a nucleic acid molecule of at least 50 consecutive base pairs of the nucleic acid molecule described by SEQ ID NO: 2.

7. A nucleic acid construct for expression in plants comprising the isolated nucleic acid molecule as defined in claim 6 functionally linked to a plant specific promoter.

8. A vector comprising the nucleic acid construct as defined in claim 7.

9. A microorganism able to transfer nucleic acids to a plant or part of a plant wherein said microorganism comprises the nucleic acid construct as defined in claim 7 or a vector comprising said nucleic acid construct, wherein said recombinant nucleic acid molecule confers upon transfer of said nucleic acid construct to a plant or part of a plant a modulation of expression of a target gene in said plant or part of a plant compared to a respective plant or part of a plant not comprising said recombinant nucleic acid molecule.

10. A plant cell, a plant or part thereof comprising the nucleic acid construct as defined in claim 7 or a vector comprising said nucleic acid construct, wherein said recombinant nucleic acid molecule confers a modulation of expression of a target gene in said plant cell compared to a respective plant cell not comprising said recombinant nucleic acid molecule.
